United States Patent Application Publication US 2015/0240253 A1 - sequence listing, part 27

SEQ ID NO: 127204 - DNA, 1043 bp, Zea Mays
gctatttttgcttctcaatttgacggtattttcttttccatatcaggagtgtttaattttttatgggcacgatcgcctctagatgaaccaacgtgctatattgctaggattgttcgtgtgatttctattcttagatttgagggtattcttatatgtatatgcatgttaatgccagaaaattgtatggttaaaatttgtgattaagcattttattcaagcttttgccaggctcgaagagcatttctgtgggttctattgggtttttagctctagtgtatcccaacttgcttgggatagaaggcattgttgttcttgttgttgatattgtgttgtgataaaaacagtcttgctctgtttgttggtacttcacagatagctgggagcaattccgtatcagtggcagcatagatgtgattgatgcttctactacagaccctgccaagctccaggttagacctgagagctgattactgctgtatttcacctacgcgctttatagagtgcactggtctggtaacgctttgagcacacagccagttgttctactagtgtaaattagtgtagctttacttctagttcatacctaggttttgttcatttatcaggttcaaccatatgtttgtgtcaccttatcagcctgtcaaagcttttgtatatgctgcttagaatagccctattgcttatcttgctgctattcaaatctatggtaaacaatggttgtcacttctttcacagcacaaggagaaagcatggttttcaagttcagtgaagtcgagattgcagtacttaggaccacagccaggcattccggttctagatgatgagcatgtgatgatgagcatgttaagggtgttcatctcgatcctttagctggtccagtagatgccttttgccttctggttcttgatccggaaaaggttaggcagccctttttttcactttcctgttgttgctctcatgtattgtactaccacatatgatgtttatattagagaaaagtgttgtgttcactatttttatgcagaggacaaacctaaaatttt

SEQ ID NO: 127205 - DNA, 1402 bp, Zea Mays
ctaaacgtcagctcgagctggtaaaagccaactcgaactgagaagggccgccgttatccagacctatctatcgcaactgctactgcaaatttggagtgcgaaagttccaagagctcgcgtcgtccatgcgttaccctccaagccaaccattccatctgctttgcacgcacaggcataattgcaagcaggatcatgagcctctacacactagtagagtagtagagaagagctcaaaatctgtgatgatgtttaatttttataggtggtttcaattatcaaacaccagtgctattttaaataacagttttcttaataaagcgtcactaaaaatcatttgtatcctgaatttttaagtttttcaaacaatctcgtatgaaaaaaatcaccaacataagatttatagatatctaaaagttataaaattttgtagttaacaacttttttatttgaaatcatttcggctctcaaaaactacatctaaaattatcaaatttaaaatgtaaattttgccaatggcctcggatgggaaaagtgtcaaaacaaaagttgtagaactccaaaaagttatgaaactttgtagttgacaatttttttcgtttgagttcgtttacagcctcaaacaatcaatttaaacttagttggttataatatgtggtcaacaaaactgtaatatagaaacaaagtaagtgatatacaaagtggtagatgggttatacgcgagggcgaggtcgtatctacgtattttgcgtgaaaaatattgtgacttgcgactttaatagacggggtagtgaggcctcctaataaaaatattttttaaaccctttttgtatgttttttgaaaaatattttcgcctatagttttattacctcgaccaacatatccgcttgactggaatggataggcttctgcagcgctggaacttggcgtgattcctcgccaatttccctctccatctatctctagtctccatcccatccatccatctatctatctaggaccaaagtctgtggtgcaatgtggggagccagaagaatatcgcagacccctacatgcctacacacatgaggctttgcagggtgagtatcctgctttcagttgagcatttgtccatggctgatggcttcatccaaccttgtcataccaaataggtttacaaccttgtctcgctggactggtggtccgatgaggcggtttaggatataccacggtccaactgaaaccattcacgagataaacttgaggagatagtagctgtgtgcttacatgtgtgtctacgaggtggagataaaccacaattggttaagcaaaattcgatcttttaacataaaaaatcatatctttaacccctatcaggtataggtaggctactaggctaaatatatgatgttatcatattattgc

SEQ ID NO: 127206 - DNA, 425 bp, Zea Mays
ggacggaagagtcttcggatgagggcttggattactttgcggcattggatgtggctgaggcagaggcttctccgtgtgttacggatgctgaagttttgcctggtccgagtgttgggcgtaggcggcgaagggcggtggcgaagcgtagagtgagtgaattggatggtggtcggcttcgtgtgggcagggctggcaggcggcaattgttgtcctcgccagttggggcgagtataggtgaggaggagttgcggagtctttttgagggtgaggagctgaggataatgctttttaactatagggagatgggaattattccgaaggttgaaccaatgtaaggtgtgatgccctcgctgtacgcgtgtaactatagtttgtatgatgaggctgtgtgccttcgcgcatctggctatgttcatagggcgttg

SEQ ID NO: 127207 - DNA, 282 bp, Zea Mays
gagttgatcatgctgtcctgcgtggacccaggtatgagcatgcttgcttcaccatactgcctggactactaaccatgtgcatgcacatgcagtctcagtttgcattcccagccttgttttgatgaaatggataagcattcagtcttgattcctgatgaagtgtgcactagaatggcccaagccttgatggtagctttgttagactacattgcaatttttacttgaatgacatgtatgtttaaaggacaatggtgaagataattctaaatgcatgcatataga

SEQ ID NO: 127208 - DNA, 353 bp, Zea Mays
  misc_feature (290)..(353): n is a, c, g, or t
ccatgtacaactctgccaacttggccccagaatatgtggtcttcactggaataaagtgggctaccttggttagcctgtccacaatcacccatatagaatcataaccagcagacgtgcggggtaatccaacaatgaagtccatgccaatctcttcccatttccactcaggtatcttcagtgggtgcaataatccggctggcctctggtgttcagctttaactctttggcatacatcgcacatagccacatgtgcagccacatctctctttagtccataccaccaatacttnnnnnnnnnnnnnnnnnnnnnnnnnnnnnnnnnnnnnnnnnnnnnnnnnnnnnnnnnnnnnnnn

SEQ ID NO: 127209 - DNA, 587 bp, Zea Mays
gaaaaccataacttgaggtaccttccataaaacgggcataacttttcgctcggtgctccatttgagctcaaatttttacagcagattcttgactccattctagggtgacccaaactagcctacggcctgtttggttcggtcaaaaactagcctccgtttaagtgttttcacgaatttcaaagatcctttgtgaatttctctaggccacaatacaactctgtttcaagtgaaattttgtgtgcttccatcttttgtgtttttggatcagtggtaaaaaattcagaatatttggagctcttttgatggtactccttttgaaacgcgcctttgatttctactagtgctgaaaaatctgccatatttacataactgccattcccactagatacttgtacctcctttcttgtgctttggtccaaccgttctattacattttctaggccagcaactaggacgagtacttggaacacttattcattattgctatctattactgacttgtgtgccacatatatatatttagttagccttcccatagctccaattttctctcgagcagaacaggtactcttttgcaatcacaccca

SEQ ID NO: 127210 - DNA, 571 bp, Zea Mays
acgactccattagcctgcttgcaccaagtcctctaggccttccgcaatcacgatgcaaaagcagcccactgattttagttctcgggggaccggaaaataaaatttaactttttttgtattttagatttttttttaaaaaaggtagccacattccaaaaaaaatatgtgtttatttttttagatttggatatcatcgttgtgacctaccacgttgagacacgacgtctcgacgaagatcatggcagtgagatcgtcgaagtctcgatctgcatggccgatcggcgtagtgcagacatggcagcatcccaacgctgtaaaacatggcgtccaggttgatgctaggatctatgacgcctagacgtgaactctaatccttctactgcttttgggcctttgctctgcgctctatgttgcaataggttaaatttcttctgtgtgcttttgatctcttaaatagagttgggtgctatagaaaaagtgggaaaaaagaaccaattgaccagttcttaccctctatttcaaacacatacaattatgtgatgaaatatttttttcccgcacatcatcacag

SEQ ID NO: 127211 - DNA, 709 bp, Zea Mays
ccgagatgacgaggtggtggtgcttgtgcctttttacgagcgcgggtttgtacttcccttgcataccttcgtctgggggctgctgttcttctatgggctggagatacaaaacctccatcccaactccgtcttgcacatggcgtgctttgtcatcctgtgtgaggcattcctgaggatagacccctattagaagttgtggcaatacttctttagtggtagggtgacccggtctatagcgaccaactgtatgttggttcggtcaacttccaactccgttctaactggaaggtgggttatctcaagatcctgctccccacctccgtgagttccgagggcgaatggttctatgtcaagaacctggctagcagtgccccgtgctttaccggtcaggagccggtgtctacggaggactggaaccgtgagtcagagctgggtctgaaggttgaggtggaaccttttattggtggcgctcaagacgctgaaggagcaaggtctcactggttcgagattggtgcgcgtctttatgcattgccgagttcagcccttgatggctcgtcagaggtcgatgcacaagtattccagtgttaatgaccccgatcgccactccaccgagctgctcacgctgtgcaagattgaggcaagagtcaaggtcgctaccacactgtcgtaagggtccttcatgcacgaggacttctagcccttggtgagc

SEQ ID NO: 127212 - DNA, 558 bp, Zea Mays
caaaatcgtagctgccgtcgggccccgcttgtggcccgcaactgcatttgaatctgggcgcacagccgctacagtactgggggccaatctgttgactcccccttggcctcaccaccacgccatcatcggatccgatcgagctgttcgccgcagcgccgacgatggacgcggcgctgccagccgtcgtcgtcgccaccttcctctactgcctcgacgttctatccatgctcgctgtcgctgcatgccacggactctggggagggctacatgcgcctgccctctgacgcggcgaagtgaacgacgatctgctgaattattgcattccgtatggtacgaattgttacgttatgttgcttcatcttgaatgaattttgttcatcgtacatgtatcttgtatttgagtaaggtgctattacaaattaacccattcactcatgtcccttctcactgtgatacaaatgcatataggactactctgtttaggtaacacggccatcgagctatgaaaattaattttacacttactgataatctgtaaatctgaaaacactagaaatc

SEQ ID NO: 127213 - DNA, 540 bp, Zea Mays
gccagatcaggaaaaaccaaattacctagaggttggagaagaacgaaggaactcccaagttgtgggaaatcagttgatggctcgatgaaggatcaacacccggagcaaccccgcaatgcatcagtggcgaccaagtcagtgtcaacagcagaaattaaaactctgtcatcaggagcgccggactctaaggcgacttcctgactcgaagcttgagctactgccatgcaaccagaatgcggaggagaagaccctacgtgaacatccatggaagtgtgagagggagaaccaactcggacaccctcaggggctgggtcatagctcgcgctacccatccgagccggatcatccccggtgacaccctcgggggctgggtaagcgctagcgccatccttgcgggtcgagttctctgtaacagccacctctaaggctgaaggaccttcacccacttccatgggagcagaacaatccagaccatcctcctgacccttaagaccgtgctccaaggtcgatgaggcacgggacgctgctcgagataactcc

SEQ ID NO: 127214 - DNA, 430 bp, Zea Mays
catagtggcccagttcaccgcacttgaaacagccgttgggttggacaggtgcgttgttcctggcctgcgtgttgttggtgccaccttgacggttctgtgaatttccaccagacctctggttggtctaggggttgcttctttgctggttctggttttgattacttctctggctttgctgtccagagcgttgtacttgataattatttccaccctgatttccagagcggaactgcgaaccttgagcattgtttggacgagtgttcctgctggactgaccttggaattttctcttatggttagatagctccttccttttgctttctaggccaattgccttgttcagcagtgtctggaagttggggaatgtgtgactctgaagttgatagttcagaggtccaatcaacccttccaggaaacgctcttggcgctt

SEQ ID NO: 127215 - DNA, 365 bp, Zea Mays
agcctttgcactcgaacaagagcgaattaccaatggaaaagaacttctcgaggtgaggaaacatgaggttcaattgcagaaacaaagagaggaagaacaggttatgactattgatattagtgttatgccagaagagcaaaagacatactatatgtggttgtgggttcaaattatgagccgaatatgtataacttaggtacttttcaatttgcatgatgttactttgctacatatcatttaagttttagtttggtacattttctattaaaattcagcttcttacctttgctgcattcatgcaggtactgtctcagttgttgtttgtgtttattcttcatctataggcttcagcaagtggcgaatgt

SEQ ID NO: 127216 - DNA, 1471 bp, Zea Mays
tcaatccttttagccatttagaacatcatgtgaacatggtgctctaaaaagaacttgcgccacctgcattaccaatctgacctctgacaatccttttattttaggaattttggggcaaacatgtatggtaataatggatgctgtttactagtattacatacctggtttctttgcttcccaccatgtcttgtgggcagcatgggaactgtcctcctagcattgctagatgaagctactccagtaggctgattatgctgtttttgccgtacatcaacaggggctatactcccattccgtagaccacatagcacaacttttcccttataggagtgagaaaatccagtgggcatagcagagacaggaatagtgtgtcacagtaaattccgaagtaatcataacatggatacagggtcaacaagaaagaataaaatccatattacgtaggtctgcagattatgacatatgctgcaataggaaaggtcacatcggtagcatattgctttcctttcaaaactttgagaatcatgtagtcatgcattagatgcacatgcaccaaatttaagcttaactggaaagtgggggcaaaaggttgaggcaagcaaaattttcaataactgtcatttgacaacaaaccataaaatgatatctcaaccagttaaaactacaaagtgggaagaagtttaggtagattaagattgttaccgagtgcacaaatttcagggaaagaatgtcgcttttagaacgacataaccatgatgatccccttgtttccaaatcgatcagaccagcaccaaggtccgaacctagaaataagatgaacaagtgaatcccaagcgaaaggatactatatgtgtctgtaacataagcaggctgcaaactgccaaaactgtaagaatgagtacagcttgctatgacaattaaattaattcctccaactatagcaatgactaacctttaaattgcaaaacggccatcacaataaccaaaactgagttattgtgaaaaaaatcacatatgtatacaagtaccaaaacaagcaggtcttgctatatgggttcaatattcaactgtcacgtttaaattatcaaagaatttcagaaatgctaattccgtagtgaaattcttagtgaatgcatccaacttgatagagttacgtaacacaaggttcaatcagaaacaagttgcaaaaatagtgtacctaagtgcaagggaaactttaattatctccaatatttaagctctgactcaacgaactcaccgaaagctgcatgtgtgccatcagaactacaatcagctgtccacattgttcgatcaagtgaatgaactctgtaggtagtccatggtccgattgccaagtcaacagcttcagaaagatccataatatataaagaggcacgagattctccagatccaagagtagccaccatgttttacaacgtcaagggacacaagctcacaacatatttccagt

SEQ ID NO: 127217 - DNA, 564 bp, Zea Mays
gcaggaggtcgggtgaaacgaagggaaaccactcgtgtagatctctcatcggacccgataccgacccgctataagtgaccggccgcattgactacgcctcgcaccgagccacggcagaggcgtaggtctgcctcccactcgtggcctatgagcccctcggtctgcaacgcactcatgacttatgaacccctcggactgtggcgcatttatgacccacgcaccccggtctgtggcgcactcatgacatatctggactaggcctgagtgcataggctgtctgcagggcacaacacgacaagctgtgctgagccccaggctacgaagaccaggggtcgacatagctcgaatgatggcgatcgggcctcacgctacccacatcgtccgttgtaaagaatgtgagacaatcagacgacctaagggcacataggtggatgtggcttcatcagggtataacgctcggttttacaatcgcccggtgactccttgaggaagccaccgccgaccaaccccctccttgcctataaaaggagaaggtcggtccccatacgaaggggtcggggacac

SEQ ID NO: 127218 - DNA, 781 bp, Zea Mays
aatagatgctcgccacttttttgcagctaggtgaatgcaaccagggtttcaagcatatgcattctggagcacacaaattttcaccctttttcaggctgggacgacacaagtgcgaatgggcacgtttctttctagttccatgtttgtccttcgatcttttggttgattttgtattagatcgtctctattgttgatagcaaggtaataaatagcggatttatgtctcggtagcggatcacggataacgggtgctatagctggaattaagccccaatagctagtggaatagctaaaattccggaacccatataaatattaccatcaagtctacacgaaaacttttaaattttttggtcgatcattgcatttcatggtacgtacaagctcacaaagaggcacacaaataaatatatatatatatatatataatgacgttacatttcttatttgatgatatgagtgcaaattcgaatttgacatgatcggagagttagagaatattaggcggcatcgtgaaaagaggctgaacggagctatatagctgctacagggacgtatgccacctttccttcaagaaaaaggattcactatatatggggacgtatatatgtcactagcttcccttcaagaaataaggttccctacggggacgttttgtcacctttccttcaagaaagaggattccagctccatttacgcttcctcttacgccacaagaaaaaaaatattccttaccaaaccttacagtcatttttggattacttttgcttttgtcatttcc

SEQ ID NO: 127219 - DNA, 748 bp, Zea Mays
tagggactagcggtccaccagttggatgtataggaatacctttcttcacatcattctaaccaagacgatgtactgcaccagtccaccgggtttgtcgactccactcactcgggtctggtgtgcaagcttaatcactccttatatgacctcaagcaggcacatgagcttggcacagtcgttttgcctcctacttggtctcccttgactttgttgacgccaagtagtacacgtccttgttcatcatttgacacgatgacaacaccatctacctcctgttctacgtcaacgacgacgtgctcacggtgtccagtgccgccctcattcagcatacgatcgcttccctaaagtgagagtccaagatgaaggacttgggccctctccacaacttcctaggggccaccatggagtgccaccccgagggcgtcttccttcaccagcagtagtgcaccatcaacgttctggagcgggctagcatgtccatccgtatgccttgatccatgtttgttgacacctagggaatggtccctgacgatgatgcctccccccagttggcaacatgacggcctaccaaagcttcactgggcctctctagtacctcaccttcacccgacctgagatcgcctataccgtcgagcaggtgttccctcacatgcacacctcacaagagctgcacctcaccagtgtgaagcatattatttgctactccatgacactcttgaccacgaccttcttcttcgacccacctcag

SEQ ID NO: 127220 - DNA, 363 bp, Zea Mays
gtaaaccttgaatatcggaatacttattcctgttgtacatagaagtaaaccttgaatggatgaagtaaagattcaatggatgaatatttgttggtgcgcccaacgggcagtgggtggatcagctccggtaattgcgcgcggatctgattggccgatggggttagtttcctagtgcgcttaatttcctaatgtggttggtccctcgtgggctggtccgattggaccttttggttcaggtgatggaccatacgtctcgtcacactaggtgatgattagcgtttaggtataacatgtatctatactactctattaagaacctaatgtgggcgtctagtggctggtgctaccacaacttcaccctcc

SEQ ID NO: 127221 - DNA, 1385 bp, Zea Mays
ggaagctcagggatctcatctcgagactcgaggagcttacttctttacagtattgtcttttgagccaagtgtttagcaatctcacgtatgattgagtagggaaaataattcgttgtattcatattccggacgtactgtgcattgattatttgaaaccgccctgctggatacatcggcgctcatgtcatttttctaagtgtattcttgaaaaaattgttgtttcattttttgttgtaattagggttacatatcttcacctcaatgttaagcaaatgtaaaatgaattaagcactccttgatttgttgggtgtacatttctttactcgatcactgtgggagtgtcagtaactcagtatcagcattcaacttttattttttcctggcccattgacccattccaacttccaggtaggatgtaaaagatcctggattccgttgctggaaattttattttcagcctactgtgtctgcaaatgtgcagcgtggttctcgagtattagtgatttaacatactagaatgtttgacaagtttatgctgttatatgttgagccaggggaagaaaatgtttctactggtttctagacgtctgcctcaagactctaattccactgtactgctttattgagcagattttctgaatccagggtatgatcagtatgtgtatcgccatcctaacgggtaggttttcaatttcgacacgtcaatatcagattttttttaggcttttggtgaaatctgtattttcacaatatgcatctaaggctgacaataggtcgctatgctgtctctcctcaaaggggattatttgtagatagtaagaatgctaaatgctgggtaattaagaaagctgaatgtgtgcttcataacataatcgttggactgttttatctccaaataaatgatctgttcttgtgttatgtatttattttctacagtaactctggttgacaagtgccagccaatgccttcctgttctctgattagtgcacactgggatttctaatgagacttaatatttagtctcacggttgctttgttctgttgaaaaacattagattgtgtgtggttggtttagctccagcccatgttgtgtttaaagaggaaggagtcatatccactgttgacttcaatgtcggcaagtcagatcgcagtgagatgaaagtcacaggaaaacggaaaagggtaactagattgttttttctttaatgtttggttaaataaagggcaacaagaattgatgctcattttacattgcagaatgcacaacacttgcaagaaaattcggcattgtgcaaagtttgtgtaaatgataaatcttttattgtgaggttggtccccttaatcttacacatcacagaagtatgtctgagtcattataattttc

SEQ ID NO: 127222 - DNA, 361 bp, Zea Mays
ccgaggtcaatgagacagcgccaatttcagaagtcatggaacgatcaggactagttgtgacagagggagctattgacgaaggtactcctgatgccgaagctgaacagactgttgttgaagaagaaaatgttgatgaagttgaggaagattatagtattttgatccccacaaaacccagccatctagattttgagaaatctactgtgtccaaagacgacatgcccatgatgatgaagcttggctactttggggaaactgaaagaaaacttgtccgatttgccggagaagagactacccctgcaccgaagaatgatgaaatagtggtttttaaaagcttcttcagagcaggactgcgatttcc

SEQ ID NO: 127223 - DNA, 388 bp, Zea Mays
ggtctcctcatcaggatcagtccagcacgaatggctttgtccatagccctatcgcgctgagccttcaagacgacacaattgttctctatctgtttctggagcagaagagggttccactgcatcaaagataaagcttgatcgggaacaacagcgccgcaagatctcaattgggcggatacaccctcaacaaaatcctatggttatggacagataagcaaaaaaatataattcaccagtatgaacaataaaagagcaaaaagttgactcacctgaagattggaaaggaatagtggaagacccaacgcaggaagagccgatgcatggcttgatgaaggaggatcagcaggaacaatctcaagagcatggcttggggtaacttcagccccac

SEQ ID NO: 127224 - DNA, 378 bp, Zea Mays
gaccggtgcagattctgagggccacatcacatatctgccaggattgtactctctgctgacttttggtggccgataagttcaggagtgggtctgagtgttttaagccacatgatggattgaccctgaccatcagtggatgaggtttcggttcgagcgtgaggacgtcactctacatacagctcagacccgagagttatttggattcctgagtcgatgacgaggcttcacatcatgtgttatggtacctcagaccctcctcgtagtcctcatggtggagtagctccttgcatcgctcacgccgctgctctgttccgacctccgtttaaagacagatctcgatgttctcctactaacttcaccccagcggcaaagtttctc

SEQ ID NO: 127225 - DNA, 438 bp, Zea Mays
gttcgggagcgtgtcgctgcaggcgatattcgggttctcagcgtccccacaacgctgcagttcgtcgacatcttcaccaaggggctgccgtcgagtgtattcctagacttttgatccagtctcaatatctatacaggatagagttgcgactatgagggtgttagagtactcgttagggttttggttatctcctgtgtatttaccctctcacccctactttaatgggcctggcccaactaccgagtctattaatacaacacccaaccctactcatgtgttagggtttcccgcacatcctcaattctcttatatctctatattatctcctatctctatgttgaccaaataaggtctaagacagtgccgcaatgactgaaataaaagatggcctcggcgcacatacatacatatgtctcatatacatacacgttgcacgca

SEQ ID NO: 127226 - DNA, 472 bp, Zea Mays
gaggtcaacattacagagaggccttgtctgaatcattcggagtccttggataactctttgtctgggtgcactgctgttgtccctgccctcggttttgctgctgaatcccaaccgcatgaaacagcaagctttgaagctagaaaacaagagttcttcaaaggaatctccaagttttcttctgggattcttcctgttccgcgagctgaaccgcacgttgatcctccaccttccccacctgctgctcccatgccaagaagaagtcgccgtgttgcgggagttggagtggaatttaatatccatgacctgggaggaagaactaccaggaaagtcatgagatcattgcatattatttccgagaatgagggaatttgtcaggaagccttggatgaatatactcagcttttcaagcgccccctgacccatagtgaggtggaggctcttgctgccctgtttgggtggagagcccctgagt

SEQ ID NO: 127227 - DNA, 717 bp, Zea Mays
ctctgctgaagaagtcagtgctttggttgcttcgcttggggagattcctgatgacgaacggcaagtccattttgaggtgcccctgaaccctagtgatgcagatataaatgccatgcttgatctgctagctgaggattcttctgacgctgctcctgctggtactttggcagtggtgccccttccagaggttgatacaactttggatgttcagaaacctgtcagtactcgcccgaggcgccctagccgaaccaatcagcctgagctttctgctgatgagcaaaagaagaagagaagacgcctccggcgagtatccagttttgatgaggacgctggtacttcagttcctgccgctgaagaagtgcctgcgactggacctactgacgctgaccccaatgggtgtacccaaactgctactgatcccaatgtaggtgccttatctgttgctgatcccaatgggtgtgctgcttgtgttgtcactatggaagatgaggaggaagagaatgaagctcctttgactcagaaaaacagtcggcagttcatcgccagcggtgaaagtagtggagttccttctcctgctttgtctgccctcattggtctgcaagaactgtccctggccaattttgaccaaactcttgaggatatggtcccagaagacttgttatcagagtcggtggatgatgatgcaacggaggcttgtgctgccgtgcctgatgctgg

SEQ ID NO: 127228 - DNA, 814 bp, Zea Mays
agggaccaagcttcagtagaccagctggacccacctcgtcacggttcagttagcagagtgagtgctctttccatgccccctcagttgcaagcaaccaaccccggcgaatgcatgttggcactgcggagatcccagtcatttcaagaacaactgtccccagctaaagccaccaggacccacctactccaactcggtgaatggccccaagaatacctcggcatccgcccccaaggcgccctcctccatcagccagcagaacaagacccagtaccaagggagggcacgagtgaatcacatcgatgcccaggaggctcaacaagctccgggagtagtgctcggtgagttccttgttgaatttactcgcgctaccgtacttttcgattttggagcatcccactctttcatagccactagttttgtggagaaacatggcattccctctactcctctagagattcccttggtcacccgaaccccagggtccgaccttctatgccagctcaaatgctcccaagtcagaatccttttaagtggggtagtattcttggcagacctaaccgtcttgccatccagagggattgatgtgatcttagggatggattggttaactaaacacaagggtatcatcagttgtgcaagcaagacagtcctcctcaccgaccaccagagaaagtcagtctcttgtcaggcccagccacccaccaatgacccgatgatgttcaatctaacagcagaaagcatatcagtggtcgaagaattcatggatgtgtttccagaagagttaccaggaatgccaccagaaagagaagtggaa

SEQ ID NO: 127229 - DNA, 435 bp, Zea Mays
cgaagggaaactaagatgcctacggaaccgtactgaggccaaaattgttagaaccctctccaaaagcattggcttgccgaagctggagactgacttgtgccgttatcaacgacaccacatcgccggaagcttgctttatgctaactttaaggtaacggatatttttgttattttattactattattactatcttttaggtcacgttttaacgaagatcgtttcgacagagcatattattaagcaaggttctaaaaatgcaacaagatctggaagaagagaaaaacaaagccgtcattcaagatttggctaaaaaagttgaaaatcacgaagccaatctgaaaaagaaagaccttataatccaagaccttggaatcatggtcaaagagcacgaaggtgcactggaaaagaaggattttgttattcagaccatggag

SEQ ID NO: 127230 - DNA, 668 bp, Zea Mays
caaggccactcaaaatcatgaataagatttggacaaagaagaaaattttggtctgcatctggcacaaaggaccggtctggtggcgcaccagaccgtctgttcagggaagccgagacttggcttttatcagctaaagcaccaaatcggttcggtgtgcactagattgtttacgcggagagggtgtattccagtcactttggaggagggcagcctggaacggtctggtgtgcaccagaccgtctgacagagttccaacggtcggcttcctccaacaactataatgtcgtggcaagggtccggtgagctaccgaactatctacagtgctctgacctcatcagaatggtaacctactcgggtagtctgataggggtccgatgtgcaccggactagtactgttcaatgtctagtgcacacacagaaattgtagatttctgcactcaactccaacaactatgtgggggtggttggggctataaatacccccaaccagcacattgaagacataagaactacaccaaacaaccatacatcaagtgcaacaactcctacacattcaaagccacacaagcacacatttgattgatttgagtgaagagagacttgtgcttgtgttcttgagtgttgcaaactcttgtgctctttatttgggtttcattcttgctctcac

SEQ ID NO: 127231 - DNA, 760 bp, Zea Mays
tcatgatcatcggagagaagagtatgagaacgatcataatgagatatgagacagatccatatttaatacttgagagtgggttatagaagataacaagatgacggggtagatctcgatgaatgatccagagattcgtatgataaagccacaacatgattcacagggaaaagattaccagatttaggtgaaaaagagaggtcatcaacccagatggcttctaggttgagcagaggagaatttaaagaggcttctggacaagatttccaaaaagaatttgagactggatattgttttgcgcaatagacaccaaccaaagttttatataatttttttaacataaacaagtgcacaaggaggctttaggcgatctagtggtcaagctaaagagatctacaagctgtgtaggtgtaacttcaagggtgaaacacgcaagggttcaaaaaacactaacaccaacacaagcatatgataatttttttaaaaggttttacttgctaaccaaaaggctatttggggggggtcttttcatgagcagaacatacaacattttttgtaaaaagggttgaacaatacaataccacctagatagcaagacaagagaaacacataacacgacctaacaagacttaccaatctgacacgaggtaagacatttctaacatagaagtacatcacattattcacaagttcttattattggaataaaggtgagagaagcatgttggtgcacaagagacaattataatgcgacaatcatgat

SEQ ID NO: 127232 - DNA, 863 bp, Zea Mays
ggattaaatatatacatcatgtggcgtgattcaagtgcttatgaacaacgaccgtttaaattttacaattcttgagtcgtaggattcaccgttcaattaagagggatccacaaaatttgagtaagttgtcgtgatgagcttagtccaattcttttcaaaatcctctaagaaaaccttgattttgatcatggatgctcttggaaaagctgtttgaattctgtactaatactttcccaaggttatgttcaatttccaataaaccagctcatccagtttttgaaaaccagctcagccagttttcagaccagctcagctggtttttggactgttccacttttctgccttgtcagtctgctctgtcagccagcaactttttgaaaaccatctcagccgtttttcagaccagctcaaccggttttgactccagtccacccttcagctgagccagtcactgaaccgaaaaaccttctggcagaaaccgtctctgccggttttaggaccgactcaaccgatttttggtcaaaaaggtccaacgaccaccagcttttgggggctcctttatatacccctttactctctctctctcttcattcactcctgcccatccatgaattcttgactgacctacactcaaacaagagcattcacttcacctctcacaccccaaatcacattcccttcaatcgtttgaaggacccttggtgtgaggtgaagtttgtttaactcgttggtgatttcatctctattctccctttctcttcatctcttgagctcactgtaaacttgaatcttgtgcgaatttgttactcttggaaccttgtgttccttgatagatagaggttgcttgggagtctccaaatttg

SEQ ID NO: 127233 - DNA, 970 bp, Zea Mays
ggagtatttcccctcactcaattgcgcttataatcaactatggagcgctggccacggtggccgtgagcatggcggctatactgtcgtgttcccggcgaccagaggacccctagtccaattggatggtccagtaagcatcgcagacatgtgagagagctcaaacgaggaagagggagggttggactgaccgaaaaaagggctggcgacggtgaggtgaactttgcggtggcggaaaccagttttggggagaactaggaattctcgagctctggtgaggaactgctaacaattaacggtggctgagtgcgtgaggatggggtgaagctcactgcggggtcaatttatagaagggtaagacgatggccgcgaattttgaggaggacgcgcggcggccggaggtggaagaaagtactggtgcacgcgaattcgtggccaacggcgtggcaacctccccggcgatgatgggatggccccagggagtcacggcgacgcggtagaaaaggctaggccacgcggcgcacggccgggaggtggcggttaccggcgagcacatctgttccagccgtaaagaggaaaagagagacacggggggtcaccggagtgatctccagctcaccgccggtgaggattcttatccccccagcgttattattccaccccgcacacgaatctaaaagccggcgacgcgaatcacggtggagggtcaccggcgtcgagctgtccgcgctggcgtcctaatctgtgcactgtaccatcgaggaacttgttcagagtgtctgacagacaatgtttaagcttctttttctctgattttcaaatggcaacacacccagtgacctatagcaaagttgtagtgctataatccatctatatctttgctataatgtgtactcacaaaaagtcactggatccccttcaaaatcgagctcaaagttcatctcaaaacactgtcattctgaatttcagacct

SEQ ID NO: 127234 - DNA, 325 bp, Zea Mays
tagagaaggtgagggaatcgtaacagtaacaggccaatgcagctgagcccaccatatttaggccctatcaaaaaatgactcaataaataggctaaacaacgtttaaacccattctgtttaggatgttttgaccgtttagacccaatgttgaccgtttaaatgggcaacgtttagaggactgcctaggccctaaactctacgatgtttctcagtttaccatttagacccgtttaaacagtcgtctaaaaccgtttaggataacattggtttggtgtgcataaaacgagagagacatgacatatctagtgaggtaccggttgccccg

SEQ ID NO: 127235 - DNA, 470 bp, Zea Mays
ccaccaactctagtctggacactcgataggctctcttggaaatagggcgatgcctgggataagctctatggcaaattcaacttttctttcaagtggcatggctggtaactcttcagggaatacatcggggaattccgacacaatcctaattgcttcaatcggattagactccttgtcatctactgataaatggtgacaggctccttcttctagttcaggtaagtacatcttggttacaacttcctttctggatggggacaccaacttaactgttctcttgtcacaactgacattggcttgatttatgtgtagccaattcgtccctaggatgacatctaacccttgagttcccattactactaggctagtggggaaatctatcccccttatttcaatcattagactcggacaaatcctatcggactgaacttttcccccaactgaattgactcttaaaggtgggatcattg

SEQ ID NO: 127236 - DNA, 1048 bp, Zea Mays
gcgatatatttatgtgctacgtctttactatagaggagtgagccaaaaaacgtatcataagttgtatagtacaaacatatcccgttgatacataaaatcatttttcatattcgacccatgaatttgagattatataatatatgagatttgaaaaatggtagaatgtcaaattctaagctaaatagactactttattaagaaaattttaattcttacaaaataaatagatccaaacggtccgtaacgggttgaaatccgtccttgtaagctgcatagaattttcacaatgtttgaatgtcaaacctgaagcctctatatatatataccttggctgctggccacattccatcgtcccgaagaactcacgagagaactaactagcaactactcccagaagcaattttgcctctacgtaactacaaaaattgtagcagcttgttgctacgatggccatgaccagcaagttcgttctgccgctgctgctagcggtgctgatgctgttggccgtttcaggctcggcgcgccgagtggaaggcgacaggtgggccggcggcgaaaccgccgcctccgtcgttggccgtcccaccatacagttcctcaaacggctctacttgcaacagctggcagctccatgtccctcaggcatgacctacgacccaaacagcaacccccattgtcatcatcggtgattatcagaagatagcatgcatgtatatgtatatataggtattgggctgtgatgctatatatatgtatacctctatgtgatagacatagactggtacagtgaattggtgatggtattcgactattcgatacatacttggtagcagccacgacgaataacgtaactctgttgttgtatcttataatttttttctgaataaagtggcagccctgtatcaggttttctggaaatacggtacgcttgcatgcacacaacttaccgctaattaagtatgatgagcacggagaacttctaaaacacgctgaaacaacgtattccaagaataacgaagtcaccatagaagaagtttcatcatcggcg

SEQ ID NO: 127237 - DNA, 635 bp, Zea Mays
taccccccttaaaaagaatctcgtcctcgagatttaggaggaacgagggaaaagatggggaaaatctatgcgaagctcttcttttctctcccaagtagcttcatcttctccatgatggctccattgcactttgcacatttttatcaccttatttcttgtaacatgagtcaatgtatcaagaatcttgatgggatactccgtgtaagtcaaatcaccctgaacgttaagctcttccattggtaactgttcctcaggtatacggagacacttcttaagttgagacgcatggaataaattatgcagatcggatagattatcagttagctcgagttgataggccatctctccaacttgcctaaaaaactcagaatgatccaataaagtgagaggacaatttactcttgactttaaaactcctcattccacgaagtggtgacaccttgaggtacacatgatcaccttcctcaaactccagtagtctccttctattatcaacatagctcttttgccttgattgtgcaattctcaaattttctcttatcattcgaacttgttcttccgcctcttgaataagctcaggcccaaagaattgtcttcctctagtctgatcccaatatagaggagtcctgcacttc

SEQ ID NO: 127238 - DNA, 865 bp, Zea Mays
ctggagttcaaccttgttccccaggacctataatcagcacagctcaaaaaataaaagtcatgagatctatgggatttggcaatcaagaaaaattcagtatcaaggaacaagatcgttacagcaagctttttggagaatcgctttcagatccacacgtctcagcccttgcagcaattttcggctggacggtggaagaaggggatgaggtgcgatcagcagaccttgctgatttttagacacctgggtgtatgtttctttggtcgcatccatttcgtattgattaataatgaacccttcatcaatcttgtttcggaacgcacatggccttaacaataaggccaggagagatattgttcgtgatgttattcaatccagccacacagaaattgtatgcatccaggcgactaaagtggcagacatgaaccacaatctttctctttcggtgtttggctcagctgttgataagtatgtggctcttccagctcagggtactaggggggagtgatcatcgcttggaaaagcaacatatgtcaagcaaaagcaattgccacaagaattgataatttttctgcctcggttctttttgcggaacaggaagggcgtaactggtggtttactggagtttatggcccacaagctgatgaagacaaggtcacgtttttacaagggctaaaagatatcaggatgttgtgtaatgggccgtggctaattgttggagatttgaacatgatttatcaagcttcagataaaaataataataacctggacagggccatgatgggaaggtttcggagattcataaatgaaatatatttgaaggaaatccctcttttgggccgtaagtatacgtggtccaatgagcgga

SEQ ID NO: 127239 - DNA, 891 bp, Zea Mays
aaatttatatttagacataagaatgacacgggcatagcatttggcataggatttggagttcctcctgtgcatctcacggcaggtgcccttgttgatttgaacacaggcgtggagtacagcgaggaatatttccggcatgttgatcttagctctcgttcttgggaacaagactcttccctatccggcttgtatgacaagtccggcgtggggccttgagacatctcacagcgacttcctcgagggagcgaagccacaaatgaggccttgatcatggaggtgatggtggacatagctcttgttcataagaacaatgctcttccctgtctggtttgcaaggcaaatccggcgtggggccttgatcatggagatgttgataaagatttgcttgctgccgagcgccgtggagccacgaagatgaagagaggaaggggatcaagagagcgccatgctgtttttttttctcaccttcacaggaactccgacgtgcaacgacggccttcaccacgaactcctcttctgggctgatgatggtgcggcagagagtcagggtgatggttatttttttttggagatgaactgcagcaggtcttgcggtgatttggaggcagcctcacggcagtatcgaatcgagtcccctggatgatcgttgtggcctgctatttatagcgcagggaggccagcagttcctgagcaattttggcgctctttgcatttgattttcttttgctaatgatgccggcgccggagtttgaatcgcggagcgcgttaatcgtgggagcgtgtgggagttgctttcttctgactcaatcagtcgatacagaagttgctattctttctccatggcatgtctggcgtacgtatgcatgtacactgcatgtacgtttgtgaaag

SEQ ID NO: 127240 - DNA, 792 bp, Zea Mays
caccgcgacacagacttgacgccgacctcgccagagccctcctcgaagcctcaacgttctacacctatggcatcccctcctccaatctcggaggtgattcatctttctcttggttttaggtttttttgtaagaaaagatcccacaacatatacaattctgacattcatatatatatatatatatatatatatgatagatcttttggatctcccaaaaaccctaaccatagatcaaatcacacatgcatattgtaccttactagatccgatccccatcatgttccccgatgaagctttgcactagggcaacagtggtcaggaaaacaagctcgatgttggcgatggacttccacaacattctctctagattggttagggtttgaggtggggaaccaaaaacggctacgaacctcatactagagtcgtcaatcccaacctctctatttataaggctgcacaaagggagcctaccaaccttatcttggattggacgccctcgattaggcgcaaggtcaaaaactcaattgccaaccagtggagatcaattctaacaatataatttttttacacccttaaatatatacattatatctagatacatgagagaaaccgtgtttctataaaatctagagcgacttgtaattcaaaatgaagggagtataatagcgaaagtctgttatccaagaatgcttacatatatggaagctttcgcagtagcgccaagttacgttggacaagagaccagagccaatcgcccaatcaccttatcagtctgacagtgcttgagcaccc

SEQ ID NO: 127241 - DNA, 427 bp, Zea Mays
ctcatttgtgtgaccagcggctacacacaccttggcagcaaaaggtttttactaaattgcttggactccaatacaaagtattgtacaaaaagggatctgacaacagtgcagctgatgccctttccagaagaccacatgtacaacttgagttgtcagctatatcagcagcaacaccagcatggctccatgatgtggtttctagttatgaagctgatgacaaggcacaagaattacttacagccttgttagtcaaccctgattctattcctcattctacattacacaaaggggtgcttcgtcacaaaggtcgtgtctacgtgggagcccttccttccctccacactaagatcatctctgcttgccatgatacaacacttggtggtcattccggcattccagttacccttcaccgtattaaacaattgtt

SEQ ID NO: 127242 - DNA, 576 bp, Zea Mays
atctacacataacctcttgcttttatccttcttctccacaaacaatactagggaagcccatggcgacctgctaggcctaatgaaacccttagccagcagatcatccaattgtcgcttcaattcaacctgctcctttggagccatccgatacggggccttatgaatagactgcgtacccggaatcagtttaatttcaaaagctgcatcgcgctctagaggaatgcctagaagctctgctggaaacacgtcggcaaagtcacacaccacacggatgtcctgcacccgcaaggcagcctcaccctccaccaccatggagaaaaaaattcctgacttccttgaccgacaatccagaagcaattgcgacaaccaggataacgtggactttggagaacttcccaagaatatcacctccctacccaacggcgcctgtaataacactgtcttccaaaaacaggatataaccgcgcgatactgagataaccaatccatacccaagataacatcgaattcccccaaggaaatcacaactagattagctgaaaagacctcatcagcaagaatgacggaacaagcctg

SEQ ID NO: 127243 - DNA, 861 bp, Zea Mays
caggtgggcgacatgtggcaccgcgagcccatacagccactgagcgcgcaacaggcgacgggtgacagtcgacaggcaacgccgcgacaaatgatgattgaatctcgatggttatgttgtgcgctgtgctagggtgactggacgagaatgtgagtggacaataggtgtagacgtacaacacaactaggaggataacacgcaggagctcgcaggagctcgttgctggaccaccaattacagtttagctactagcccgcaagacgaccagacacaccagccatactttcactttagtctgaatactattttattttttgatatatatattatacttatttttaataaatttcttgagtatttattgaatatccatgtcacaatagtaggcccgtcactgggtcctcttcatctcgctcgcttcaacctgagtacagtactacctgatgtggctgatgggtcaatgtttttcttttcattctctctttgcgttgcgttatagatgattgttaagattttgtactcagtataaatccaaaagaagaaaaacttgtctttggatttgccttgtcatgagaaaaggtggtcttccctgtgttgtttcgtgtgttctaacagaaatcagttctttacggttggtaggcagccatgcggtgtgttctttttttttctctctcacgagcgagcggccgaagtatttcagtgagtgaactttctcttcgccaaactgaaatcgatcgatttggtttgtaagtaggaatgccacaatttcacagtccacggaatggcttaaaatcataaaatcaatcatgtgcctagtacgagaattttggctcttcaatatcattagatatagaagtgcta

SEQ ID NO: 127244 - DNA, 426 bp, Zea Mays
ggaggattttgtgtcgtgggctggtctttcggtgcagaggctgggtcacccaattttggttagatttgctaatggctccattagtagctactcagtttgtcaggggtgttctgccattcttgctgatgaggtcttttcggccaatctggtggtgatttccttgggggcattcgatgttatcttgggtatggactcgttatcccagtatcgcgcggttataccctgcttctggaagacaatgttattgcaggcgccgtcgggtaaggaggtggtgttcttggggagttccccgaagttctctctatccttgttggcgcaattgcttcctgatcgctggtcaaggaagtcagggatctttttctccatggtggtggagggtgaggctgccttgcgggtgcaggacatccgggtggtgtgtgactttgc

SEQ ID NO: 127245 - DNA, 357 bp, Zea Mays
ctcttttccaaatcattctgcacataaaatcattccttcgtccaggaagctagccatttgcttcggtacgccaagacaaggtaccggacatccttccagtatttgaaggtgtagcaaataaagctattatgaagttgttcctttccagttgccttcgtctggcagttgagttcatgaatgttgcagaagcaatcagcatttggctccacaccctggctcctcattgcccaaataaaaattcccatcctcgttaaagcatttggggtctgttgatgaagataaatatcaaacttcttcaagacctccactagcatcttatgaagaggaaattgaagtccagtcctcataaagcttcag

SEQ ID NO: 127246 - DNA, 597 bp, Zea Mays
acttaacatgagttggctaatcacagcataagacttagcaaaccatttagatatttcaattcaaaacatgagtgggagcaggttaattagtttttcttaaccatttctcaacttaaactggacaacacacaagtcacttaaaacaccatattttaggaggtctaacatagaggcattaacacatggcataaaactccataagacttacattggttactgagagacctaaagcacttatgtgcatatcttattggattgttcctcaattttaacaagggtcgacttacgaacgctactcgcctccaataattattgggttgcgatcgtgttcatataagacctctaatcaatcaacaagatatttatttatccaatgggcatggaatgcaataatttataaagctaagcatcgatccgtcatacaacaaaaatcatgacaacaccgacagatactatccactaaccgttgaaaaactcaacttacttctcgcttgccactacatcactcctcaatcacacgaccctcatgagcatccttcacacgattatataatagagacctaagtgtcgtgttacacaatacatacatctttcctc

SEQ ID NO: 127247 - DNA, 391 bp, Zea Mays
gaaggcatggcctcgggtacgactccaagaacaggataggaatggggtagttgggtcttagccggtagaatccaaggttgatgtaacttctctcctcccttgcactataaaagggaggtagagtaactgtttaaggggtgagacctaggggattggatcagatttggtcaattggggttctagattccacaagattaataggggttggttatgcccgagttgctacgtcatactcttacacaagagttcaatctacactgaggatagacataaaggtggactagtacaatgcccgtgcattgcgacaatatacctatcatatttgatggtatagtgcaacagttgtacgacacccgagggtccagtggcaagccagttcgatggactctcc

SEQ ID NO: 127248 - DNA, 315 bp, Zea Mays
tcttatatgaaatatctcacctcaggtttcactactcttccattcaggttcaacaaaaaactctttaagaaggaaccagaatggttttgtctatgagtgtacatcgataaaccacactgtatctcttttcacagttaagcatttcatggtttagtgatttacatatgtccttaaaccacattgataagtccttggtgaaaattaagagagttcatggtaggataatgtgctgataattcaccctggttaaacacctggccttttggtgtcccctaggatggtattgccaagcagcacacctgctctacagctttg

SEQ ID NO: 127249 - DNA, 315 bp, Zea Mays
cgaaaagatgcccatttttttaaaaaaaaatcagtaaacgaaaaaacttcggagcatttccgttcactcatcccgccggccggggcccacgaatagatcagcacagcagcatgcccccggcccgaatcctgccgcctgccggggccaaccaatcacaatctgctcccgctaaacgtgctcttagccactagtcactatgggtctgtttggtgagtcaattccgttgcgaccattataaaagatccaaattccatatgaaccactggaatttctaccgttcgtcccatgccattgtccaagatttttcatcccgtt

SEQ ID NO: 127250 - DNA, 482 bp, Zea Mays
tagcagagcctgcaagatgtactaagtcaattcacttctatgaattggccaaacaaggatactaagtttcccagctcagaggacggcagccaaatttttgaggtgcattgtttatttttctctataagttaacttacctgtgcctatttatttatgttttgtgcagtggaaatactaacttggaccagtcactcatggtttaatttcaggctgttggattactgataggcattgaagaggtatcaccagagaagcaggctcagttcttgaccgctcttctaaatcctctctgtcatcaggtgattaatttttgttttttaatattatggcattttttaaaacatgagagacttactgatgcgggtaacacctccaaccccccaggttgagtcacttgttatggatgccaaagcacgagggcttgaggaatcatcaccaatggctattagccttcaacaaattattgttgcattgaatatggt

SEQ ID NO: 127251 - DNA, 483 bp, Zea Mays
ctttgatggagtttggtgtgactaccccaatggtggcggtgacgcccagcgcccaagagacggtcgaggcaaagcgagaggtccgatcccagctatttgaaggggaagaatctgttgcggctagcagaggcgagaggaaaacacggtggaaggtgtagccaccatggatttggttgaacggaccgctacggaggaatcgaccggaatcacgcgcgagctgttaggatgcagtcgggttcttcgcatggtggaagaagaaggcgcgcgcgcgaagataggggagatgatccgggcgaccctgccgtgtggatatatagcggcgcggacgttccccagccgaccgaacaccacggaatggttgttgtaacaacccccaccgagatcgacgcggggtggaagaagcacatagtcgtggtcgagggcccacctgccagtcagtgcgaaacgagtgcggctgtagattcaggcgcggagaccccacac

SEQ ID NO: 127252 - DNA, 305 bp, Zea Mays
ccgcttgccgtccgtgcgccacgtgcctaggagcattaccacatcgcagtgaaccgtagtagggagttcgtccatcgctggaggctttgccacgatgaaagccacgatagcgctcgcgccagtgacttcccctctctccggccgccagcgcgccttctcaaaattagacgtcaccgtcgtgggattctataaattgatgcccagtgagttccgctaggtaattacgtacccagtgaaccagccctcgcctccaatcgttcaccatagctcctcaatttggaatttcccccaaatcaggttttccg

SEQ ID NO: 127253 - DNA, 571 bp, Zea Mays
gccacgttttctgaaaagtacaggggcgcctaggtaaaaatcccgagtcacagagaacagtatagggtagactgcgggttgaatagttattaacctagggtctctttagaaattatgccgcgcgaaggggtatcttgtgttttcagccgtccgatctagagtctagggtttagattttatgaagcctaacgcattacgaaccgttcgattaaacctacggcccggattgactcatccaggaggtatccccgattagatctgcaccgcatatcaacgatctcacagacatctttcgcccaacccatcttctaatctcgaccggtcatctcagtatctacggcgacgacatcgtcttccaccaaacagccctcacgcggcggtgaccccgccagtaaatcgccgcggagtaaacacgcgccctaacactaaccatgcatacaaccagagcaacacgaagctaaagcgaaattgaatcgcatgaggaagcgctcaccgtcagtgggggatcgacggagcactgcgcacgacgttggcggactgaagagacgtcgcaagtcctgtaggtccctgg

SEQ ID NO: 127254 - DNA, 368 bp, Zea Mays
gggaattgatggaacatagagcatcttagaaagttttacccttagcaaggcctcaaaagctatcggagcaacattgtactctataattggagaatatgtcatcaatgaagtttccattttcaagggcattcaaactgttgactatcaattgacttcgattcgattggacttggaatcaacacgcttactcgacttagggtgaccactataccctactaacagagcaatcggcttaagtcggggacgatttaagacggtgcaacatgctcgcgcttactcgacttagggtgaccactataccctactaacagagcaatcggcttaagtcggcgacgacttaaaacggtgcaacatgctcgcacttactc

SEQ ID NO: 127255 - DNA, 594 bp, Zea Mays
gcattcgatagaagttgggaatccagtctaccctacgcagagttctcatacaataacagctatcaggccagcatcaagatgtcaccattcgaagcgttgtatggacgaaaatgtcagacacctctcatgtggtccaacgtaggggaaaaagcactagaaggacctacctttgtcaaagaggcagaagagaaagttgccctgatccgcaggagattacttgaagctcagagtcggcagaagagttatgcggacaataggcggagagagctcagatttgaagaaggagacttcgtctacctcaaggtctccccgatgcgtggtgtcaggaggttccaagtgaaaggaaaactagcaccgcgattcgtcggtccctatcccatcattggcggagtgggacccgcagcataccgtcttgaactaccagagtccatgtctgacatccacaatgtgtttcacgtatcccagctccgcaaattcctgcaagcaccagaaagtcacatcgaagaagagacagtgcagattcagaaagatcttcagtaccgagagaagccagttaagattcttgattcggttgtccgaaagacccgcacctca

SEQ ID NO: 127256 - DNA, 693 bp, Zea Mays
gcctctgtccactcctgccgtttgcgcgcgcacactcgctgcctgtggaccccacgcgtcaggggcgtccctatcctctagtttgttccgcaaccgaaggcgcggagctcgcccgcgttgactggatccaccgcatggatgtgctcccgcccgagatcctcgcggcgcgctcgaccggcgaagtccgcgactcaatcttcaaccaccctgccgagtttctcgccgcggcatgctcaccagtcatgcggctatggatcgagacccctcgccccataagtacgagccccacgagcccctgccgctcctctgtagatatgtcacgcacgccgaagaaaatagcccccgtgtcgtgtgtatgcgcagagcgaactatgggcgggaggagagtgagaaggagagaaaatgatggctcgggtcgccgccgttagtacccaccttcgctggcgccatctcccctgtgctctgcgactagctcaggtagggtcgccgggtgtcaaggagtgtgtccgtggactgcacggatcggggcatcggcctggattgccggaattgcgcgtcgaacttccttctccgccatcgtgccgcaagccgctgtggactgcacccgtgacactccaatcttgggtaaggactaactcattcgattcgttgcacgccctagatcgtttagcacctggttgggttgtgggaccg

SEQ ID NO: 127257 - DNA, 453 bp, Zea Mays
gcttcatactcgactgcattgttggaggctggaaataacaacttgagggcatatttgaggtgctcgcctccaggtgcgatgaagagaattcccgcgcctgctccctgcagtttcagcgagccatcaaaatacatccgccatacttctgcagtttcggtgttctctggtacttgttgttcagtccattctgatacgaagtcaaccaatgcttgggttttaatggcagtgcgaggtcaaaattcgatgtcatgagatcctagttcgcaggcccacttggctattcggccaatggcttccttgttgtgaaggatgtcccctatcggaaaaccagtgactactatgactttgtggtcatcaaagtagtgacatagcttgcgggcagttagaagtactgcgtataatagcttctgaacctgaggatactttttcttcgagggacccagaacttcactg

SEQ ID NO: 127258 - DNA, 341 bp, Zea Mays
gtgcccgaggggttgcgtcattgcttgaaaaatctggctgcgggcatgtgaaggttgtaatccatccagaatttacaatttcgataaatgacatcaaagagccttcagctgaagcaactaccctaggtgggagattttactccgaaatctaggtgaacggtgggaggaagatagcgaacgaagctatcaaacggagtgaggaagagacccatcatgcttcagaagaagcgaagagagctgtagagcgagaaaggcatataggtatatgtttctgttaagctctggcttcgtaaatgttttagcttcgtatttaacaaaattacatttttatgtagcggaac

SEQ ID NO: 127259 - DNA, 361 bp, Zea Mays
ctgagttctacacttgcgacgaacttgagcattgcattcgtcgttgttcttgtgtccattcttgtctctgactcgggccgccgcgagttcctccattcccactgccatggaatacgccagtgcgctgaatgacgcctgcgtcttcacggatctcctcctccttttggctaacatggctcctcaaagatgaccgcgtacgtttgtcgagcggcgctggcaagggccacgtgaactgcgttggtcgacgcttccacacgcgccgctaagcctgccctgccgccccctatgcgatgctgctcctcccctttcttctccgcctaggctggcgcttggaggaggatgccaccaaggttaccaacta

SEQ ID NO: 127260 - DNA, 692 bp, Zea Mays
cacctatattatggtataccgatgaactcctacgctaggcaacccatcctcccccaccaatttgggataaacccacgaaccgacgcacgactggactgttcaggcctgagctcgaattgttcgacccaacggcgactggtcccgtccttcgtgactaaccatcgagatccattctaggaccaccctactcctcataagggttaacagaaatgctcgtaccatggggctatatgtgtggaccgtctgaatatgctttcggaccatctgcatatcctattagaccgtcctacataaagtacacagaacatgatgcatgttattatcaggaaaacttctccctaccacccacaactcctcaaaatcatggtatggctccatgtgcacatgggagcgagcccttttcagccaacagaaggcctcaaatatttaatgcacagtatggggcgcctagggctagcattaatgcacaaccgaatcccaacccatgggcaaggggatgacataacgagacataaccacccacacctttatgagacctaagggttggtggattaccattggcttccattgacatagtgagagaagaaatagttggggcattccgagacaaactcggagttaacatgatccacggagggcagtcgtatcggaaaccatatgatggccgattcgaccacatcccatatccgcaa

SEQ ID NO: 127261 - DNA, 277 bp, Zea Mays
aaaggatggcgcttggagtggtttattgtagagaatcatggcaagtacctcccccctcggtcagggagacagccggatgttcgtgctccaagttggactgaatcccccacagacttggagataaccgaagccagggttctgcttgctgaaattggcttgttgaaggagagaggtctgactgctaaagcggtagttgcagactttgttttcaagaatattcagccactgaaggatagagcgtacccggcttatttgtatagtggtgtcactgattcta

SEQ ID NO: 127262 - DNA, 311 bp, Zea Mays
tgggtgtcaattgatgaaggtctacctcaaagttctttaaaacttctcatatcatgtcatttaaggggaaccaaagtcccgctctgaagaagcttttgaaaacgacaacttcgtcctctcttggctccggaactatttcctccctagaaaacgggacaagcttgctctcagcctccccgaaatagccaagttttctcttcataaccatgtcatcctctgttacagtagatttcctaaattcaaagtggctaggctttgttaggctcagaatactgttatcttcttcactttcattgtcactctcgcctcca

SEQ ID NO: 127263 - DNA, 1062 bp, Zea Mays
tttcgatttcgacccacttcgcacgctccactgcgtagcccaacaccatctcgcgcctctctcaccctctcgctggcgcgtgggtccgctttgccagtcctgcgccagtctcggttgcgctgactggtggccccatttggtcagcttgtcctcacacgccagtgccttctctactgcgcgctctctctgacaacccagggcccacaggtcagtttctttccccctcctccatccgagtcttgcggcatgtaacgaagtccggccatggcggagcgctccgcgggcctcaggatccgttcctcgacctcgcgcacccacaagtatataatgcgccacgatcctgagccgttcctctcccaaattttgcgtctgccagtacgaagttacgtgtgtgtcggtgctgggcgaaaaggattgcgctgtcgtcgccccattgtgcctctggacatcgctctgcctcgattctgcgtcttggagtgcggccggggacccgtgttcgtgcgcgttgaaaatcagggcggttgggcgctccgggactcggcaattgctcgtcgtctttagcgttccgcctggatccacgccacgctgtcgtcgagggtctctgcgccctaattcctggtgagtagcccttccatgtgttcacgcgatagctgtaatcgatttgcgctagtagattcgaggattaatgcctaggatcgcagggcagggaagttgtcggcgtggcgagcgcgttggtctaagttcgctccgccacgggatggccgagggtagaagacgggagattaccgtttgatcttttttgggcggttgagattagagcggggatagcctctcgggtgattgatccagtgtcgttggatcgagatctggcgtcgttggttggatcggaacttataaaatctgggctgtcgtgtcttcatccaacggcctggccagcgtaccggttcgacgcggtctagatctaatcgtgggcgccgattaagatctattggtcctggtaaaccctagagcgctgaacatgtgtaagttgcaaaagagaccctatgaaacagagcaatcaac

SEQ ID NO: 127264 - DNA, 693 bp, Zea Mays
ccaatccatttactttcatcgcacatttctgtcatataaatttgtgcgcataccgcaggaaaccgatacatctttcaattttttcgctcatgcaaatggaaacaaatatcgcgcatgcaagggatggggcgcgtgtggggggtcggagcggtcaggctggtccggtggtgcaggtgcagctagggcttccagtaactgtttggaagccttgggcttcttatatatatatatagtttatatattaagagccctgggcttccaataatagaggaagcccaggctagtcaacatgggcattttggttgaaccacaccgagtcaacaggtcatagtcacgacgccgttacccccgtcagccagccacctctcccacgtttcctgtttctaaaaccgtactcgcgcattcaacggagataaaccagcgcccatttgaagaaaaccccagccgcgcagattttcctttcgtcggaggcgactccccaggcgatttccgcgcctccaaaccagcgcaacgccaatccaccgccgctccaatccagcgccattccattcctccttacatccttcaatctcctagcattggagcccgattcaagaagttccaggtaatccaacattgaaataccccgagtttgccgtcgattttttgagccctatcggtcgattgaagtggatttgatggtaacccttattc

SEQ ID NO: 127265 - DNA, 383 bp, Zea Mays
gcagggtgagcctctgagtctctgttcgatacaaagatccatctaggggacatgttctatctttatatttttactctcccccacaagtcctgttcgcggggaagaggagaggtgagtcataccacacttttctcaatgggctagcaatggtgctcggtgagatgtggtgagatgcaatcaggtaatctgagtgaagccctagatccttttgtaggacccaagcacgaggtaagttggtgactgtcctcacacttccagacactaactcatatagttactggctccattcgacctaacccaatggctcgctgcctctccctacaataaaccatgagtcaaacattcctgaggctcgaacacaagctggtgatgcccttggcgct

SEQ ID NO: 127266 - DNA, 331 bp, Zea Mays
gcaagaagctgtacgtgatgtacggcagaagctgggagctcacctcccgcaggaacatgaagtccctgcgccgcgaggtcctaccggcgaccccaggggtcccgaaggcagccccacaccagcggtggcagagcaccactatctccttcggggcatccgactgccccgagaacgtggcagaggccggcatacttccgctcatcaccgcccctgtcattgccaacatcaagctgcatcatgttctgatcgacggtggggctaggctcaatgtcatcagccacactgcgttcaggcagctgcaggtcccagtgtcccgactaggaccctctcg

SEQ ID NO: 127267 - DNA, 517 bp, Zea Mays
agggatatagcataaaaacgatgagctgataccaattcacaacttgctcagggaataaagtatacaaatgcttttcattttaatttaattcaataaatgaaaccaaagaacaaatgaattcagaagatagtattgttgatgtcctggaattccaagcttaacaccctcacaagttgaaagtatattggcatgtagtcctgtagggatgtaaactggtagagatggtcgataaaaatatatttaggcccctttggaaggtaggaatcgtccattaatttcacttgaaccagtttaattttcacacgaaaactgttttaaaggtgaccttaaatgaaaagaatctaggtcggtcagttttttttttatatttgtcatttcaattacttataaacgaaaactgcagtatgggaccacaacagaacaggggaaaaacaatttaacttgtggtctgcttgcacagataatgtattaggattttattttggtgcatgtttcatattgtaccatattacgtgag

SEQ ID NO: 127268 - DNA, 514 bp, Zea Mays
gcccatgcgacggtgggttgatgtttttgagtttctggaggaactgcatcttgtcgccatcgctttgaggtccgtaccccaccgtgatttgccactgagtcgcatccgcgcgcatagaaatggtagtggttaccgcatgcgaagagagatggatgttagataggtcgaaaaagctctcatcagtggcaaggaggatgccgcctctggtttgggaggcaggcagagtcacgaaggagtttgcaaagttgtgtccaatagtgcgggtgaccatcatcgcatcaacatcttgtaatttcgtctcctagaggcagacaatggtggcgccagtgtcacgaacgagatcgcgaacgacgtcatgtctggcgcagttgtttaggcccctaacgttccaatttaaaatacggcagttacgatgtgccataataaaaacctgagacgaatgcctgagagaagacagatgtggcattgcataggtgcttgggtgcaaggtgacctacataggccggacggcgac

SEQ ID NO: 127269 - DNA, 516 bp, Zea Mays
tgaaattagtgcaagtatggaatttaaagttcatttaacaagaatgcaatagaaacatgataaacgagtaatgatcaagtgacatgatagatataataagataaaatacacacatatgtcacatgatctcacacaaatacagacacacatataatacaatgcattaacgtaaacatgaatgcatgaagattcaaaagattgagtccatctcacctactccacctgtgtctaacatactcgctctctcccccttcggcatcaagtaccaaaacctaaggatctacaggtggtgtggaggcggtcgagtcaagcactaagacatgaagagtaagataaatctgatgcacatatatggtatcatctaatcagagctatgtgtagttgtctgatagtgaggggaggactctggctaactctaactctagaagtgaagttgaagtggtttaggtctactcggtaacaaggcgtgcctgctaagtattaagtgagatgcactcaagagctagttgccactgt

SEQ ID NO: 127270 - DNA, 385 bp, Zea Mays
catcggactcgtccatgccgtccggcactggcgaccatacctatgggggcgtcggttcatcgtacgcaccgaccactacagcttgaagtttctcctcgaccaacggctagctaccattccccaacatcactgggtgggcaagctgttggggtttgacttcagtgtcgagtacaatccaggcgctcagaacggggtggcagacgccctgtatcgccgtgacacgccagagggtgcagtcctagatgtgtcagcgccacgcttcgactacattgcccaggtgcggcaagaacaggccagccacccggtggtagtggcactcaaggaggagctgacagcaggcttacgcggcgcgccttgggccattgtcgacgggctactcacgtac

SEQ ID NO: 127271 - DNA, 298 bp, Zea Mays
tccagacgtatttcggctttttgcggattcccatgcggagcgcacaacttcgcaagagatgcgggaacccttccacctctgagcagtaggatgtcctaatggccagagagtcttccatctggaatatgaaaagaagggtcttgttaaaatcaggggagaggagagaaaacttttcttggggtaagaggtattttctttttagggcaagttttaaggtcagggctgcgtcctacggccagtcctatggactctgataccacctgaagcgtcccgatcctttgggactcaaatgtgaaac

SEQ ID NO: 127272 - DNA, 328 bp, Zea Mays
gtcggtcagcctttcttgtccatggtgttggctaaatgttgtcccttattacatatttttccacattttgtcacatgtatctaaatatatcaacacaacttgtgtaactcattagcaataactttattcacttcatcatgaagttttctctcgttcttatggatagttgagggccaagatcctgaaataatggttgtcaacaagcatcaaggtgattataggttatcttggttagtctacagtagaaagattaggagtcattcttcaatacatcataaggacaagccccgatgtactcatacagatattttatgctttgagaattgtc

SEQ ID NO: 127273 - DNA, 872 bp, Zea Mays
ccaggatcccccacaaactggtacccattaggactgttgattccaggatctacgaccagatctacatgggcgaaagggtacacagcaacccaatctcgtccgtccattgtttgatctacggccactgcgttctctccttcctcgccctttttctcggtcactaggcagcggtgtgggtcgccggtcgcccagtcgcgacggcgccatggtcggggtaatagcccgcacgcccaaatactccatttcctaatcaaatgatgctacacggaattagggacatggagtagcagtggggatagttctcaccggaattctcatagtagttcatctcggccacgaccaagctcagaacttcgaatacgaacgacgaggaatggaccaccgcggcaatcgaggtggtcacagccgcacacagcatagagcaccgccgtattgaagtagtctcgtcctaggaacagggctccggcagcagcttcaagtgggtagcgctattccatacggcaaggcgtgggctcacgccgtggtcacaggaacgataggatggatgtgccagggagagtctcgggtggcatgctattactactaaataaagcgggacgcaaacgctgtcgtccgtgcgtccacgtcggctgaaaaacaaggtgcgcacgatgtttgatcaacggactccatttctgctctgtctatttgcgtttagagccttccagagtctccacacgaacacaccgctaaagccttccagaaattaccgctacccgaatatctcatctctgtccgcctgctctcaaacgctctgcggtctctagcgacggcaacggcgacaccggatgccaacggccgtccatcgtcgctcctcgtgcactacgttcgcc

SEQ ID NO: 127274 - DNA, 555 bp, Zea Mays
gaccgagcgaatttctcgccgtcgtcacgtcgcagccgcggatccgcccttccctgtgggccgctgtatctccgactcgtacctcgatgagcatgccccccattgcttcgcactgttatcctctacatgtagcatagggcggattgggggatagccgtggagatcgccagggcgcgtagtccggtcatggcgccgcctggggcgataagcctggtggccggagttgggcgggcgtagccgtggccgttggatcccggggcgatgattgagattagaagttgtgcacccgttcagccaggatctatgctaactgttggatcttgatcggatgaatccgtggggtcgcgggtgttttaaatccaaaccgtaggattctaatcggacgggttgtgttgaataccggtttgggtcgatgccgatctaatctgggccatccttgcttgatcgggcgaccgagatcagattgtacccttttgcgatgtaggttttaaaaagagacctcgacaaacatgttaactaacccgccgtccatggtcagtgcaaagtaatttcagt

SEQ ID NO: 127275 - DNA, 740 bp, Zea Mays
gttacagtcacactttgtcaaaatctcacaatcttagatgccatagttcaaaggcacctatggatctccaggctacaaactagagagcaactacaaaactaagagaggtcaacaaagagagagccaaaagagatgcctacacaaccagccatccccactatttatagagatgtgttctacttccctaaactacccctagatgcatagagcttatccactcagccatgggtaaaatggaccaactcccgacattttgatctgacgaccacacattattcacaaagttgctttgcctcgatgcaccatttgtgatgacaccacatgcctcccctaattctcgccagaacgtaccatcaggttttgacgcccaaacctactaaaaccagcgaactatagcattaggtggttttaaggctcaaccaccgaaacctccgcgggtagcataccccgtacacatccccccacgtcctagcacgtgtcccgccagtccacaaccacgtcggttacacgatctactcctccatgacctcccgtctgttagtgtccttaggtgtcagccatcacgactagacacacagtttctctagtcctaaggtcaagactcaatgctcgtccttcccgcactcggtccatcagcacgatcctgcatgaccttcaccttcttctctactgaccaccgtcttctgactacacacctgcacaccacaagccaagaaacaggtttgcacatagaaactcac

SEQ ID NO: 127276 - DNA, 474 bp, Zea Mays
ttactatctttgcctgaaccctaaaaccctactatctttgccagaattcagtttgatgtattgctatggaatttagtttgcatatggaattcattgtaccatgatttgggggagagagatagggggagggagggaaagcagtgttggcacttggccacatttgtttcaggctgaaggatcaagacgtgagccaagggactattgtagaacgaaatgttgccttcttgttgtgagcaggcaaaaagctggtgcatctcaatgctgaatttggtaccagtggatgctagtgccattcgaggccatctaggccgcctaattaacaaaatcagctactagtagagcagacattttaggccacacgctttatatatccacccaaatcatgatacctgatctcatttgcctatggaatgcagtttgcctgaattcagtttgctattgctgaggtgttgctggcttggcttctatactctg

SEQ ID NO: 127277 - DNA, 823 bp, Zea Mays
tgaaagatataagttgcttttctgaggtctttgaagtagtggacgatgcaaaaagaatttgtagattcttctataaccataacaggtaagtgtatatatatatttgataaacatatattcaatacttctatatttgtgtttaaactctatttttgtacttgcaggcttcatgctatgatgagggagaaaattggtggagagttgattaggtggaatgccactaggttcggcaccgtctttatcttccttcagagtttctgggatagataagataagtttatgcaatggatggtgtctgatgattggaaaaacaacgcatggaaagatgaagcagatcatgcatttacttatgattgtttgttaaatagaagatggtggagtgacatggaattggtgttaaatgctgtcacaccaatttatactgtgcttcactatatgctgatcaacaaaaaaatgcaactatagctagatttcttccaaagataatgacagccatggctcaaatacgtggtaatttaagtaaagagaaagatcttctcgatagaatagttggagtgatcaagaagagactaaaatatatggttgatgatactctcattgttgcaggtaagggatgaaatgagaattgttcaatttatgttcttttttgttgaatttgtttctaataataatcttgcttctttctctagctggtgcacttgatcctaaaacattatatatgactaagctttcaagaaaatcatctactagacatgcagttacattggctcttaagaagcttgcaagctcatctaagattgcatctgctgcaattgagcaatat

SEQ ID NO: 127278 - DNA, 723 bp, Zea Mays
ccaagttggattgagtctcctacagacttggagataacagaagccaaggttctgcttgctgaaatttgtttgttgaaggagagaggtctgaccgctgaagctatggttgcagactttgtttttaagaatattcagccactgaaggacagagcatacccggcttatttgtatagtggtgtcaccgactcaacccgagttaccaacaagaggattcttgttgtggatttggtgagccgactggagatgatcttgaggggcgaagtatcaaatattggtgctcctattgcatattctgcttggaatcttccagcttctaagtcttttttcaattttgtgtccaatcctcctgctgatgatagtggtttgggtcttagagtgcgaccctctcccgaacatattgaggtcctggttgcttcacttggtgatcttcccaatgatgagaagcaagttcactttgagatgcctacgagtccaggtgatgcagagataagtgctatgctggacatgttggctggggattcttctgactcggtccctgctggaacaatggctgttgcaaccatcccagagcttgaaaaaatcgtggacactcgaaggcctaagggtactcgcctgaaacgtctctgccaggtcagtcatccaactgcacctgccgaggggaagaaaaagaaaaagagacggcttcggcgagtgtcgtgtttggaccaggatgctggcccttct

SEQ ID NO: 127279 - DNA, 1331 bp, Zea Mays
tgggcgcacaattttataagaatgcaggggctaaaacataattttctgggctcgactgcaatttgttttggcttaggatggatggcgggttggtttctagaaagtgtaagggctcttttgcaagttgacgcggccgaaggggtacgggtgaatgcggaccgcccagattagatcctatggtgcagattagatctaggcgctttataaaccggtacgcaacgtcaaccgtacgatcagagatccacggtccacgaatgcccacgatccaatctactgcgagccacacgattaaaatccgatggctcagacttaaaatgacgaaggggtattctctcttctaatctggaccctccgctccctgatcaacggtccacaatcgcaccagccgaatcgttattgcgcaactaatcacaaccgtcgcagatcgatccaatggccatagacaacccacatccgaccgatacgcccatctaatctacgcccttcatcttggatccgatggctctctagcttcttctcccccccggtgttcttccacggaggagcatctcaaccccgcggtggcacacaaaaccggcgaccagatcgacgcccaagagccccaacagctaccccggatggtgctacgtgtattcgagacaaagaagaaactatggaagcaattcttaccaagcttagcggcgcggaatcctctggccacggcgaaaacggatctacggcggatttaacttcgatggcgagaaattcccaaggcgcgggccaaaatttgcgagcggcgcggccccgaggtcatccatcccagcgtctcgcgtttgagggagatccgcacagggcgttcttattctctctccctcggtctctcacatcttcttaggtgctggtgttcatcctccgatcggcaatggcggtcgaagcggccatcggttcctggtttaccgtgccatcttccacacaggttgcgcggagcccagaggagagggataaggggagggaaaacccacgccatggatttatagatgggtgaagtccgctatgctcgaaggaacggagccgcgattccgtcgcggaggttgggatcgtacctgagctgtgcgatagaggaaaacagggcatcgcgagttcaacggtggcgacactccatcctcccaaggttcgctcagccagcgcgcgccgttgcaaccgttttccgactgaggtggaggcgggcccagattggtcgctccgaccaacgcggcgacctccgcgcgtttggttgacgggaggaagaggatatgcccgacagacggggcccaaatgtcagtgatacaacacaccgcgcgcattagctccca

SEQ ID NO: 127280 - DNA, 913 bp, Zea Mays
ccaaatattttgaggtttgtattctgaaacttatactgagccaggcaatgcttgagattgttaagccctgtgattgaattgtgaagtgaggaaatgtgaagtgaggaattgcttctgattatatgagattatcaggttgcttagccctgtgatgaattctttgaaaatactgaactgtatactacacttgttgtttttatgcgatgaaatttgtgagggctatggctgtttcagcctgtttgatgctgtttcattgaataatttgacctgaggcttgtgctaatttgagattatcaggttgcttagccctgtgatgttttctttgaaaatagtgaaatgtatactacacttgttctttttatgttcaaaaaatactgagggttatggctgtttcagcctgtttgatgctgtttcattgaaaaaaattgacctgaggcttgtgttaatggaagatgatctacttgattagccctgtgaggttttctttgaaattagtgaactgtatactacacttgttctttttattctcaaaaatgactgagggctatggctgttttagcctgtttgatgatgtgccatgtttgcaaaattctccagttcagttaacattggttgttgccctatgacgatttctttgaaatattacaactgtatactacatatgatgtttccatagcactaactgagggcatatgatctttcaataattattgtggcagtattattgatatggctgtttttagcctgtttgctggtatgctttggtgaccctgaaccctcagttcactttggcagtattactggtatggatgttttcagcctgtttgtctagttgagttcaaattggtagtttccctatgatgtttttttgaaactttagaactgcctagtacatatgatgattttaaaaaaa

SEQ ID NO: 127281 - DNA, 301 bp, Zea Mays
gtgcgatgaagcggaatttacctcttcctaggcgtggatgtcagttcctttgttatggtgggagtagcacctagaaccacagtgctgctatcaataccaatagtctgcatataaggggtcagtcacagagcgcgtacggtttccaacataaatctgaaagtttctgggatgcacaccttatcttgcacactggttgtggaactttgtggtgtgagcggggtcaaaggcatgaccaagttagaggctttgttaggagtgtcttcaatgccactgggtgcgccttgcaatagcacatgttgtg

SEQ ID NO: 127282 - DNA, 397 bp, Zea Mays
cgaccatggaggccaagtcatgtgaatttcgggaaatcaactatgaagaaaggacatgttgaggccatgaagggcacatattttaacgatgtgtctatagtgagaattggaggtgaaaacattgtttctctccctaagaaaaatgaagtggtggtattccgaagcttcatgaaaggtgggctacggttttctctacataagatgttagttgaagtcttgaagaagtttgaaatcttccttcatcagcttacacctgaagctttgataaaagttgggattttcatttgggctataaaaagtcaaggattggaaccagatgtcgattggttctgtaatattcatgaattgtcctatcagacgaaggccactggaaaagagcaatatcacaacaactttg

SEQ ID NO: 127283 - DNA, 370 bp, Zea Mays
ttcaaagcctaagctatgtgcaggtccaggtcccagcccagtagtaggtattctcaaaatgtagagactacctcctaggggccagaccaccagttttctccttggtttactggtatccagccttgacacgtcgagcctacctacctgggggccaagtaccagagagaagttgacaatgctacacatcataatggcaaataacatacagataagttctagttcaactccattaaaaagttcttaaagtatattacacaaaatcaaaagttattacacccgcctcccagcggaaccctggctttgtctctactactctacaggtcatcagcagggtcgcgctggaagcgctcgaccaccagctccacgacgt

SEQ ID NO: 127284 - DNA, 393 bp, Zea Mays
tgaaactggaagagttcatccgactgaagcaaggggagattctgtgatgcaatatctcaataaattcaatcacctctcccaatacgccattgatcaggtggacacagacttgaaaaaagaagaattgcttcatgaggggactaaatgatagactccagcgcaagatggcaacgtgtctggacctcacatgtagcagggctgttagtacaacactgtcagttgaagtcaaaaatgtgggacaaggaaagtcaaaaggatatgcgagtgaaagatcaactcaaggacctgtaaagaggacaaggttggtaatccgacctttcaattcaaatcgttcttctcctcgcccacccagatatcccttgagacaacttgtgttcattcgtcccactcctg

SEQ ID NO: 127285 - DNA, 408 bp, Zea Mays
cgaaagacacgaaactcagaagtgagactttgtaaagttcagtggagcagagaaggagaagaggaagctacctgggagagtgaggactctttgaggagggaatacccttaccttttctcaagcccagtctgaatctcgagggcgagattcctttaagtggggtaggtttgtaacatcccaaaatttaatcccaaggttagaaaccctaaatctcctaaccccccttgattatctcctaagaccccacctcatagggcatttcattcatcacatgcatacaccatggttgttagtagcacatcacatagaatattttgacacccaagaaaatatagataaatttttgttcaaaagaaaaaggaaattaaaaggacaaaaggaaagaaatagaaatagatttagaaatag

SEQ ID NO: 127286 - DNA, 425 bp, Zea Mays
accctgatcggccctcggtcacaagaagcgcgatattaaatagcgacgaggcaccggcaagaagccaacacttttgcctttactaaaccctagccacccggactcccagaggactcgaacttctttagggcgcattcgtatcggccgaattggcatgtttccagccttcttccaggttgaacaaattgggctggattggaatccgatctagttgttcgttttgacccggatcgagaacaaatccatctgattttgactccccattctcacttctccacctagaacaaatccaagtgtcctctcatgtggattgattcctggccaagaatgagtgttccactcgatcctagactggctggcttcctggcttggctttgatctaggtttgccgaaccgacccttatgcttcaagtgacggaaacacc

SEQ ID NO: 127287 - DNA, 632 bp, Zea Mays
tccgtatcctaggagattgagtactcatctgcgactttgtccacgcgtgcatcatgtgtcaatgcaacaagaagccgaccctatagccggtcgatctagccactcgacgtgtcgtctcagttatgggcggacattttgatggattttatctagggcattcccatggtccaggggaatctatcgttaccgtcatcgacctcttctccaaatatgcacactttgttgcctgcagtcatccatactcggttgcttgtgccttctccgaggacattgtttgtctgcacagctttcccacctccatcgtcagcgaccttgataaacgatcttcaccagtcacatgtggcgcggcctcttcaagatgctcggcgtcaaactctgcctgagcatagcattccacaccggacggatggccaatcagaggtcatcaacaaggtgatagccatgtacctctgttataccatggaggaccgaccgtgtgcttgcgcaaggtgtacgaccggcccccaacacctctattaccacacaccgcaagggctgctcaaatggaggtggtggactccttcgtggccacgacaccttcctcatggaggttcatcaacaccttctttaggctcaacagtatgccaagcggt

SEQ ID NO: 127288 - DNA, 736 bp, Zea Mays
ctgcccacgacggcgatgagacccgagggaaacccgaggtgttcccgatgactaggcgcggtatagctttattggcggggtcaatgagcataataaacacacgagagtgccgaaacacaaaccagaagggtgagagcggacctagagatggctgaccacgacggggtgactcacggcggcacggagagtggatatgggggaaattccaaattaggacgctatggtgtacgatcggaggcgagggctggtgctctggcttcttaacaacctagcagagttaacggtgcaatcaatttatagccttcgggagcggtgcctccaaatttgaggaaggaagctggcggccgaagagagggggtgagtcaccggcgagcgctatcgtggcattcacagtgcaaggacttatggctgtcactagctatccctcaaggcttgcgatgatgtggtgaaacgaccgagagcgtggcgtaaccgagagaaacggcggcacgacaacgatggtcgcgtggccatgtcgcggcgcaagtgggtacagcgaactgagcggtaacagggtccgagctcatcccaacaccaagatcttttacctcgagtcattattcatgcatcactgggcacgaatcacagcgccagcgtggatcgcagctcgggttcaccggcggcggggttcagtgaatctgcgatcttctctaggttactgtatagtgggaatttcattcagtgcacctgacagagc

SEQ ID NO: 127289 - DNA, 344 bp, Zea Mays
gtgggaatgaggcaaggtagacatggaggtcgcggagcgcagcgagacaagcaacaagggtttggtagagtgggagcggtgatggtggttgggaggggagtgcatagaaggagagaacgcaggatggtgtcagcaccacgcagatagcgtggagcacgaccactaggtccttgggtgggtgtgaatgaggtgagaaaggggaagaggagtggagccggacatagagggagtcgatgaggcgaacacactagaggtagaggatgacacgattagtggtggacaccgcgagcaggggcacatagtgccggtggagagtcgtaacatgggggcaaagaaggtgttga

SEQ ID NO: 127290 - DNA, 336 bp, Zea Mays
gtttggacagagcagtcaatctctagctggtttgagttctcagtagttcctggtgaacgtgcctctcttcacaaatagtacttgtttgggtcaaaaatcactcgagatttgtaaacgatttccaaaacatttagtttagaaatagaaagtagtgtcatgcatagatttgtcttgaaagctagtttcgtaatatcatgcttattatatattatatttcaaaaaataatgggtatagttgaaacccaaagcccataatttttttcacccacgccacaccatacccgtcgtctgtacccacctgagatttgcacatgtttcctcctttctaccttcccg

SEQ ID NO: 127291 - DNA, 361 bp, Zea Mays
aagtactgtccgaagtgtaaatcatctaggttcatggaggtagactctggtgatggacagaagaggtagctcgacatccttttgacaatcctacggcaccttatgttcataccgaggatccaatgtctgtacatgacagaggaattcgtgaaacagatgacatggcacaaaaatggaaaacgatataatcctgacaagatggtgcacgcatctgatggtgaagcatggaaacactttgatgccattcaccgtgagaaagccgaagaggctcgtaatgtacgtgttgcgctggccacagatgggttcaatccttatggaatgagcgatgccccgtacacatgttggcctgtgtttgttatcc

SEQ ID NO: 127292 - DNA, 443 bp, Zea Mays
caaggatatcaggaacaagcataaatatgatcgttgcatctctatttttgcctcacaaattgattctggtgaacccagtcgacgattttagttttcgaaaacactcaggtaggcccgaccagaaacactgtctgacccattttgttctgttttgccaaaaactggtccgagccaccagcctgccacgatgcgcccaacttaacgtgttcgcatatatctttgtcaacggtttcttggtgcgtgaaccctaactctgtttgtccttcgtcgcactctagcctctcgaactcccgctcattcttgcaatgttcctaagcctttttgtttgcgagatcatgatggcacctaggaagaggaaacagggtgtcgccatgcccgatatccctccgattgatcccaacagtcaactacttttctgcggtaactatgcttcctttgtctca

SEQ ID NO: 127293 - DNA, 608 bp, Zea Mays
cttaaaccaaacaagaaacgggtgactcaatcaaaaaaatgggttagtttcaatccaacccacttcgttccaaaaccaaacgcactataagatttgcacacgcaaaagcacccactccagcgctgcattggtgtagaagaacagcgtcgcatctgtgtctatgaactgaaggtttctctgaacaaacatgttcgtggctgcaaaggcccttatggtggtcactcccagcatcgactctgccgcgaagttcatgacatgcgcctttgtagttcaattgatccttactagctccctcgtcgatgcgatgtagtatctctgcaacattaattaccaccgttataatttcatttgcctcgccatgccagagccaggaacgacgttcacctcaatgtataagcagaacaacgactgcaggaacggccacgagtactacttgccaggtaaccacgatcatgataatcatggttgctgccacttcgatcgtgcccgtgatcacgaaggtcatcgtgtacgggacgtcgaagtccaagatgctaagatcagacgaaacctgcagagttaagaacataaaggaatcagccagcaatcacaatccctaaaacgtcgac

SEQ ID NO: 127294 - DNA, 515 bp, Zea Mays
gatgttccaatttcactgctctcaaagatcttgcgcgccatctccagtacctcacttatcatgggatggtgcctggctgcctggcttggagcaccaggtttttttttttgacactgaagcgagctgggctcctgattttatgctgtagtccccttgaagccttctatcagttagactttcaaacttctaagagttgcaagattatgctcgcctcttggcctgttttggtccagaggtcactggtgaggtagccttgacgaggaccgtgtggagaacagaacagacaggtcgcagcttgcctgagagcccccgtagggacgggtggttttgtgtcctctttttgtatttgaaaaaatggaatcagtttattgaggacggtgctttctgggtgagtttagaaatgtaatttgtttgaacaatattagctctatgcagtgcatgcgaatcgatggttggaaccatacgaattgatggctggaaccaaatgtaatatatgttcttgtgcttactcggcc

SEQ ID NO: 127295 - DNA, 576 bp, Zea Mays
gggccactggatctgattcttgtgaccacgattatatcggacagactaaagtcgagacgctcatctcaagatcgacaactatgatctaatgaggcctatctcaaccccgactgcacgatccaagattaacagacctgaatcccccctgaacaatcattgctcaatctaatcccatccatccgaaggagaccggacaaccacaactctttctcctttctccgacgtcaagcagcggcggcgcacgacatctatggtggcaccatcaccggccctcaccacttctttgattcctccgtctaaactcaaacccgaagagcgctacgtgaagcagagtaaaggtaagagtatagaaggatcactcaccgagaatcagacagacaagacttctagccacaatgttgggtggatccacgacggcgagcctgtgccggcgagaaattcagtctgccctgacagctatcccttttcgatgcagcaacgagcacgttccagggaactatgtgaagccccccccccggttcggaccatgtgctccgaacaaccacgcacgcgagtggttacggctgtgcttgtgcc

SEQ ID NO: 127296 - DNA, 429 bp, Zea Mays
gcggacgaggtcgacggaggaggcgagcggggcccgaccatggtggtggagatagaggagggggggtctggcgagcatgtatggggagatggagatagagaatcgacacgctgagcctccggcttcgtgaaacgcgaggaaggtggacgcaacgaacggtccgctctgccgagatgaatggaaaatttcaggtccaacaggttcgtacatgcgtcagtcccgggatgggcaaagccccgtgaaacgcggacatgcctcgaattcctagtggcttttaacaagaagtaattcccatagtgaaatcctccaccattcccatcaaatctaactcgataacctcccaacatgacatgtaaaaaggtaaattaaacccatttgggtttgacgttgagtccattttcatgtcaaagactatccttttaacttact

SEQ ID NO: 127297 - DNA, 640 bp, Zea Mays
ggtcattctacatagagaactaatatatctataaaacttatgcagatttatggactcccaaaatttaccagtctcagataaatgaagatcccgggcttcatccttggtgggttgccgaaagtcatgaattttgatcttgtcccaagaaatgtcttcatcagagaatcgaagaatgtgagcaaacctccggtagctcaccttgtaccagctaccttcgatatagaaatttagataaggaaagttatagggactttcctcatcggccagcttgatccaaagagtggaatagaactgagcaatgacctcatcattccaatcatattggaatgtcataatgttcttcattttcttcctttcacaggccctcaaagcctgtgacatctctagatctccaatagcttcacatccttcccagttgatgtatctttgatgtagaataggctgatgcttcttgggaagaatcacagagttataaaaatcaacatgccgaagggtccagaaccgattaccattgatcctagcatcacgaatacgcaatgtagggttatggaatcggatgtcctggagaagagctgaccctccactggcagtaaaatctgtgatgggctcattcgcagatcgacgagcctccgcccggtgg

SEQ ID NO: 127298 - DNA, 476 bp, Zea Mays
ctgataggaggagaatcacatattatcctgggcttaagctacaagatcagataagaagaagatacctggttaaaggtcctcacagaccacaacctagttttaagtatccacaaaaaatcatagtgggcaagccacgtcgatttaacccaacatggtttgatgagtacaattggattgaatatagtgagaaggtggatagagctttttgtctttgctgctacttgtttagagattgtattgaaggtcaggccggaaatgatgcttttgtaacaaaaggtttctcttcctggaacaagaaagatagattagatgttcatgcaagcaagttaaatggtttttataatgctgctgtgaaaaggtgtaacaatttgctaaagccagaccaatcaattattgtttgccttaataagcagagagatgttgcaaaagaggattattttattcgactaagtacctccataaatgcaactaggttc

SEQ ID NO: 127299 - DNA, 376 bp, Zea Mays
cgaggcgtgccaattcttgtcgaagcaacagtacttgcctgcgcagcagctgcagaccattcctgtaacctggtcgtttgcatgctgggggctggacatgatcggacctttcaagaaagctcagggaggctatactcatatactggttgctattgacaaattcacaaaatggatagagtacaagccaatcgcttccttgacctcagcaaaagcagtggagtttgtccaagaaataatattgaggttcggaacaccgaatatcatcataactgacctaggatccaacttcactagctccgagttcttcgatttctgcgagcaaaggagcatccagatcaagtacgcatcagttgcacatccaagagctaatggccag

SEQ ID NO: 127300 - DNA, 426 bp, Zea Mays
agagctcgcaatcgccgctgtaaccttgttgcagcgtgcttgggtcgggaagcagaggagagtaacctacgggctcggcgaagccgtccgcggccgaccaacggcttggggtctccaacagctattgaatcgtcaccgggcttgcgacggactgctcggcgacatcgccagctcagtcctcgtcacaaacgcggtgagtcccttttccttatcaaatttgttgtgagctccgcgttcgttttacctgatcggggggcatgggggtcacgggagcaccgtggggtgttcacagatcatggcgccgccacgctagctccagcgccgccgcacagctcgggtagcgatgggtggtgctcgcgggcggttggatggatagtgggcgatccagattaaaataaccataccccttggcataataaaatctga

SEQ ID NO: 127301 - DNA, 504 bp, Zea Mays
caaataaagccgggttgtctcagaggtttgaaacggccccctaaattatcctccagtcgtaagttgcggcgctgtgtccaccccactgcggccggtcaaaacttttgcgtccgaactgatctctagaatctagatacggttgcaacttcatcgtccgactacggagaggcatatctagaatcggcttgtaaagtgcacgtacgaggcctgggggtggttctactcgctagaaaataataggaaccacttctagttttgtactagtagtacgtactagctagtgatgcatgttgaatctgcgtgttgcaggctgagggtgagcatccccgggcaaccttcccgatgcgtcgtcgccggcgaggctgcttgtgcaattacacaagtatatgcattttttgtgctccaatgcaactgcagacgtttctagacgggtgcgtatgtagaggcacgaaaaaaatacgcttacattcttccgacgaaaaaaatacgcttacaccaaaatag

SEQ ID NO: 127302 - DNA, 300 bp, Zea Mays
tgcctacctaatctaatgctctagcataaggatccgcatgttcgacgtgtgtttcacatgcttaggaactctcagtctctcacttatgtcacttggaaactaacgtcattttgactgccaagttagatgacttttccttcttaagagactgcctaagggcgtgtttgataaaattgttaactggatataaattaactttagcgcatctaaacagaagggctaataggtgagtttttttagtcaagtttttaactagctgttagccaactagctagacaaccttagctaatttttagccca

SEQ ID NO: 127303 - DNA, 537 bp, Zea Mays
tgtcagcaagttctgatactagtggattctggaagttcagcaagctttatgaacactcatttgacaggagtaatgacaggagtgcagcctttatcagtgccgttgcaggtaaaggtagctgatggaagaaattatggagtacacatgtaatgccggattgccagtggctgcgtgggggcaatacttttgtccatgattttaaaatactatcgttaagtggttatgatttaatactgggaatggattggttggagaaatatagtcccatgtcgatacattagttcctgtataagggaaaaaccagtacagttacagggtgtcttgcctaacacccagtcatgtccaacacttagttgtattcagtttgattcgcttatcaaacaagaagtcattgagcagttgctggagttacaggtgactttgtctgatcagcaaatggagatgcctactgtggttacagaattggttaatcaatttactcatctgttcgaagagccaaaggagttacctccaaagagatggattgatcatgtcata

SEQ ID NO: 127304 - DNA, 919 bp, Zea Mays
caccttacaaaggtcctagttaagcaactaagataccgagctaggtagagctcatctacgcaattctagttagcaatatgccaatatcacacaaacctaagtaactagtacaaagagtacaatgggagctcctactcatactaatgagcaaagcacataaagcctaagcacactagcactactcaactagcaaagctacgcaagctaaactagagagctactactacttagttggtacacaagctaagctatgctacctagctacacaagtcgagcaagcaactagtaagctacacaagcaaactagctacacaagagcaacaacattagcacaagtgtaaacaaataatacaaactagtgtagggaacctgcaaaccaataggaagaggttgacacgttgacttttattctgaagttcaatggtttgccaaccacttaatcctcgttgatgcaagcccaaggttgtcatcgaccctcatgctagtggtgatccacaagtcacactctcacatgtggagtgctcatacaagagctttgtcacttgatctggtcagactacttggcactcttcacacctcagcacctcgctctaatagtcttgctctttgtgtctcctaagggtgggcatgctaccccccgcaatgccttctcccaagccacacataacttcgtgcgggattcaacaatgatcacaacctccaagcaatctaggatgtggcaagcttcaagagtgacaagcaccaccagtttgcaactggattgcctagtgccacaccttgcaatctctcaatgcaacggactaacagtcactcactagcaatcggatgcaatcactacacgcacaagtgagttagaaggctctcaagcactcccaagcatggacacgaagtccctagggaacagccagccaaggccggc

SEQ ID NO: 127305 - DNA, 1053 bp, Zea Mays
gtctcgtcaagactcaaaactagtaggagctagctagaggcccagagcactgactagtaggagctgtcgatggcaactggtggctgcgaggctgctccgctcggcagagctcgcctcgtcctcgtcaagacgccgtcggggaacccgctgccccggcggaggggccaggtgaaggagaggatcgtcagggacattgcggatgctctggccacggcggcggtcctcgcctgcggcgacaggacggtagtgggcgcgggcaagaaaggcgaagggggcagggcgcccgcgtcgccgtctcccggtgcgaagaagaaatggtatcctcgtgaatcgtgagtgacgggtaacgtacgtatcctacctagcgtcaacccgtgagttagtttcacgctatcactattactggagtgatcagggtatgggaaggatcagtattgtggtctggtcctttcttatcagcgagtattgtggtctgatcctttcttgctttctcgttatgtataaccaagcaagatgagaagatgtatagcttgcttccaatatactattgagctagcaagtattttattatgttctgaccgatcaaactcctgaatcaatggaagaacattactagtgtgccaagaagaagcaattctcaaggacatggatcagcacggctcgtttttgttcattttaaaggcgtgcgcatgcatgaacgtgtgttaaccagagggaacgacgaagaccatcgatcaatcattgctggtggaccggagattggtcctttgggcgacggaatttcgtcacatgcaggtttgctggttggttttaggtgttgtttgaatagtaaccatggttgtttaaatccaaccatataatcagatattacactagaaaatgataccgtcctattcgaacttgttatcgatgttaatcagatgcgaatcattgtcattatcatttatgttgcatttcgttaaccaaacgataccttagtgtgcatggcctatgtacactaataccgttgtagcgggactctacgcgatataaactgaaactgaagaactgaat

SEQ ID NO: 127306 - DNA, 651 bp, Zea Mays
ctgtgtgctcataccataagttgctgaagaaaacaaaatgttcatggacagatattgtgaaaaaggtgagggttgtacacattactacaacaaaacataaagtagttgttgtaacaatatacaaaccaactatatgaaggtccacaatatttatgtatcctccagtcgtatacaagggtgacaaaaaatttgggatgaagtagaggaatacaataagggacgacatacacctaacaattataatgaacatcattcatactaactaaggaagtaatggaccctctgatatgttcatgacagttttaagaagtttaataaacaatgaacattacccttggttggctaaggtaacacattttgcctgaccctacgatgaatctttctggtactttagtaaaatgagttgttgttctggacagtggggatcacaaattaattcgcagaagacttgacagttttaggcactatcgaagtgaagccgtagtgtagggattacaaattaatgcaatctgcagaccattaggccgtaatactttgcactaccattccttgcagttaatatggaggatattcagcgggtgagtaccatataaatgtgtaaccataaaaggcacaccagatccgtggagttctttgaactggggattaatc

SEQ ID NO: 127307 - DNA, 385 bp, Zea Mays
tacgaccgcgccgcacggaggggaggattcaacgacgtgcgcgtgatcgccgacgaccataacggaatctccgaaccgacccaccactctggaggccataaagcgcaacccctaaccctaaccgacccttactcctttcgatgtgccccagtttctcgccgccagagctcagaaccaaccaagcgccaccgctgcggcgaagtaagtcacggagtggaggaactcggccctgactgtgacctaggcaatcctcgaagctttgcgggcgatttcgtggaagaggctgaggccatacgccaggatttcggggtggaatttctcaccgacgggcgagtttcaccttgcggccgtagctcctcgtcgggaattcacagcaccgcacaat

SEQ ID NO: 127308 - DNA, 666 bp, Zea Mays
ccgaaaacagtacgtgcagcccaaaacagccgtcaataaatttcagctcacctataattcaagaatcgccgcgttcgagaggcttgaattactctaacgctttactatttgttcgagttaagacaatctaattagaaccaacaattcgacttgcaaattttattcaaatcattagtgcactaaaattactacaaccaattaacaacgcattcttcatgacaatcactcaacaatttgcgttttaaattcgacatcacatgagcactactactttttacccgcgaccacaaacatacatatttagactacaacaagcaattcaccgtgattacgggcttaaccacgtcgtctaacaattcggttaactagagcaacgacatcgccgctaaataacatacacgtcaacttgactattattgccgcaatccgagacgcaacatatactacaacatttttataaacacgcagattcacaagtatattcgcacaccgaccaactcatatgaatcgtaaatcacaaatctccaaatcacagtcaccacgcatttacttcccaattcatgaacgcatacatgtttatcctacgaaccgggtatttcaataattatcctaaaacaactaactccattacacacttgtatcacaaatctacttgatttacttgaa

SEQ ID NO: 127309 - DNA, 341 bp, Zea Mays
ggagtctcaggttgagggatcataggtcatgagtgggactcggaccttggacccataggtcatgagtgggaggcggaccgactctctcctactccgtgactcagttccaggcacagttaatgtggtgtgcactgtattgatggcgagaatagtcttatggtcggacacataattcattcgagtggtcccctgttgatttgtttggctctcctgtagggcttcgcctcgcctgacccctggactcatcatacaggggtcatctaggggtggtctcacccgagtcggtctctcaccgttcctctctaacttggggccccctgaggaagtacaggtatctgatc

SEQ ID NO: 127310 - DNA, 686 bp, Zea Mays
gtttgaatcaggatgccggcccttctgctcctgctactaaggaagtgtcagtggaactttttactggagctgatcccaatgggtgtgaccttgctgatgctgatcccaatgggtgcaatccagccgacgctgaccccaatgggtgtgaccttgatgatgctgatcccaatgggtgcaatccgaccgacgctaaccccaatgggtgtgttgttcgtattgttgacgaggatgaggaagaggaggaggaaatccccttaattcggaaaagcaattggcgctacctggtcagtggggggagtagtgatattccttctccagccttgtctgcactcgttggtctgcaagagttgtccatagcaaattttgattaggctctcgaggatatggttcctgaagatctgctgtccgagccaacagatggtggtatgatggacgtttgcgctgacattccggacgtggggttagagctatcccgagcagcgtctcgagcctcatcgaccttggagtgcggtctttggagtcaagaagctggtctgggttgttccattcctatggaggtaactgagaatccttcagccttagaggtggctgttgcagagaacccgatcctcaaggatggcgccagcaatttcctagcccccaagggtgttgtcgacaatgatccggcccgggtaggtagtgcgagc

SEQ ID NO: 127311 - DNA, 825 bp, Zea Mays
gcgcatcaccacaacagaaacacaccagctctagcccgggcttaggaacagcccgatacctctgagtacttcctcctgaagtacccaattcagaggatttgccacggtaggggtggtggcactggtgctgagacttgccgctcttgtgggctggacccccagtgttgcccctcctcgcgtcttggccacgaggctgatcaacacccgaagacttctgagactccatggtgtactggtgttgcatctccacacccaatgcctgcttcaccgtagtacgaaaatccaccaacggaaaggcgcctagagcatgcctgatagaagtggaccatcttgttaaaacccacttcatactctatgacggacttcttctcttgcttgaaggacttcaaatcaaacttcattttctccaggaaggtgaccgggtagaacctcctctcaaactgcctgatgaaaatatcctaggacaggactcctagtgaagaggagtgagctgcctgcacgcctctccaccaaatttgagcctcaaccttcagcagctatgtgccaaagcgaagacgatcaccatacacaatctcaaagacattcatcttatcctccacataagtcagccaatctgctgcctcgaccggagtaccactgccatcaaaagtgtccaacttcatgcccatccactgcatcagagaaagaccactgacgggaaggggcacctcagccctgccacctggagcagcacccatagggacagcgcccccgggcactcctccacctccagcaccctgagcagcacccgcaggggcaacaggaatagcttgcctcagaatggcc

SEQ ID NO: 127312 - DNA, 1149 bp, Zea Mays
cttgatccggcgaacgtgggaggtttgagtctcaggaaatcccccattctgtcttgtggtcttccaccattcggccgttgattttccagatttcaagtgaggacctcgatgagtcgggtttgattggctagaacttgggctaggtctaagggtagtggtggaggtgcagggaggtgggtttcactttcttctctaacggcttccccttccactctcaggggaaaccctgctccaatcccggaggcggtaggcgtggttttatccgaagccatcttccagggaagagtgttactattatgcacatgcaaattgttttcaaccaagttattttattcattacaccatcacattacaagcataagactacaacaggtggaactacacgagagcattccccgaggtactaacgaactccttctctaaggtgtccccaaatgccttgagaagatcatcaaggcttgctagggatatatcctcgtcgtcggaccaatcatctattctggggggaggtagggatagaggggccttcttcttcttcttctctgtttggcatccttggtcggtggtcttcttctggattttctttttgggggcgagcttctttagcttcttgtcatagtccatcttcaaggttcgataggcctcatgggtgttggcttcctcgccttctgctatgttgagactctcctggagggatgccttctcttgcttaagctctttgacttgctgctctaggctttccactcgggagtttaggtgggtgcagtgggaggagagctcatcgtagtggttgtcgagggtgtggaggtatccggccatgtagacgatagtggggtcatcttctgtgggatctcctcctgacagagcctggagtcttttcctccaggtgggggtgttttttttgctgggtgggaaatatcggaggggggtctcagagatctctcggctatagttttggcacagttgtttaagggcttttcgagcaacgccctggcaagtgtcttggaagcggtgcccgatgaaggtaatttggaagggagggtggtttgggtagttccggctttctcccaagtagaccgccatagagcacttttctattccattttcacggtactccttccagacatattcgggcttcttgtgaatccc

SEQ ID NO: 127313 - DNA, 398 bp, Zea Mays
ctctcgctcgtaacacatctattcttcccccgttcaaaataaatcttatttcttaagaaatcacatattttaaaatgtaattaaatctatatagaccaatatgcgttctcggtgtttcgatctagtgacgacgcgttttaagcttagacggtgagatcaatgagcgtaatagttatactggttcgagtgaaatgactctacgcctatcttcggcggctcgcgatattgtcaccttattggagcgaggacatgatcacttttgctttgcatactaattttctaccaaagtgtcagtcgcagggccagtcaaacagaaagaagcgatggccaggtgacggatctcgaaggccatgggatctgccccttcgctccgacgacgaggtcaaccgggtgtactc

SEQ ID NO: 127314 - DNA, 567 bp, Zea Mays
cattcaatggttggagacaaagggttccgagcttactacaaaagccttcattattgcatctgacaatcacagacattttacgactttgctttgtctcgacgtatttttttcgtggtgatgctaactctaactaggtttagcctaaacccaaaaaaacgtccacctaaaccaccaaaaccctcataaataccatatttggtacattccctccacaatctcaacacaacacctccagcatcgtccgcctgatcaaagtcctcgagcggctctgcttgacttggtcaacggttatcctaacttgatcaatggtctactcctccaagtattattattacatttgttaatatccacatgtgtcagtcacaagctatcaatcttcgtcctctttggtccctcggtctaagccttatgacatcgtcattcacacctagtctatcggagtgaacctgcttatcctttatcatagtcgccaataatctttctagctttttcacacatgttcaccaagccaaaaaaagacatattacataatactgtggaacatgtgggtatatgtcaacattgggt

SEQ ID NO: 127315 - DNA, 792 bp, Zea Mays
cagttgatcttcttttttagtataattacccaaaattttgttgcacatagtttcaatcatctctagccactcttggcaaggttctttgaattgtttctcaaatgtgaagcggtaaggcagtcgaacaagttcattctttttctttgttcccttcagcttcggcattttccattcactcaacatcggggacaccctattggccaggtactcttgcaccagttctctagtgctgatctgttcagccaccaccctgaattctgttacagcttgttggcatggtgaccccgacgacatgcggcacaggggcctagtcagcccgatgcttaaactcagcgggctcatcactagcgtctttaacttctccctcttcttctcatcggccttgatatagaaccactcacttttccaaccggttggccatttggtgcgatagctaagcaccggggccttcatatccttgcgatatgcgaagttataacagccaaagttttcatgcagcccgtcttctctggccttcgtctggtaatgtagctcatacactcggcagaaagcttcagcattcggttccattccttggcttcgaagggcccagatgaagacgctgagcctaacaatagcgttaggggtcagctgatgaaggtaaatttcataattatccaaaacttccccaatcatctcgttcaagggaaaccaaaatccgctctaaaaaagctcttaaaaactactacttcgtcatttttcggcactggagtggtttcttccccgccaaagcgaataagcttcttctcagtc

SEQ ID NO: 127316 - DNA, 578 bp, Zea Mays
ccaatttggaggatgaagaccgtgaggatgatacagcaggtgtcttctcagtggattcatcgtcggtggctgccttgacggagggacctaggggtcgtttctgggtccttcaagctgagggagaatctgacgatgactccaatattgagcgggatgttgtcggtgcggagaggcagatgaattcggtctctcccatggccaacaataatcacagcagggatgtaggtactgcgttctcgagcacgggctcgcattctccgggagtgctatcgttggaggtgatgcacaacggtgagatgcgggggtcgtcgtgcggcagatcggtgagtcgccaaaatatgcttgaggaggaagcaggttgccgtccatctcgtgcttcggttagcttgaatgggagtcgtcgggcgagagcatggcctaccatggcttgccctctgaccactccttctcccaccgacccgaggaggaagacaaacagtgtggggggtccacatgtcagcggactaaagtaccccgaagaagaaggtagacagtcgcagagcgtaacagagcgccagcctatgggcctgggcagtaat

SEQ ID NO: 127317 - DNA, 811 bp, Zea Mays
taagcacaagagaaaattcagaaattgcctaagtctaaaaactaacctttgaacaaagatcccacatgttcaccctaatccaaaattcaaaacacttcgacccaattgacaaagtggcgccaaattaaccctagaatgccctggaaagaggtgacacctaccctagggcgtttgacacgacttggcaccatttttgtctcggcttggacctagctgacatagccaacttctcacccctctatctccctaccccgaccatatcttgacttggaactcatagcaaaaaggtaggatatggagcagggaagagaccgtacacagtgactttgccaagatacacacgctatggtgctcaaatctgccgttgaaccatggcagaagcgagctcccacgtgttcgacgcgggctgacacccgggggcgcgctcagagcacgcccgtgcgcgaacccccgcgcacccacggccgcctgtgaccacgcccgcgccacggctataaagcccgtcccagtgctcggctgccttccctgttgcctcctccgtaccacgcctaacttccccgagcccgcgcttagctccggcgacctccccgcgacccgccagagccgcccgagagcaaccatcgtggccagcccctttcccgtcctcctccgttcgatccaagccttcagatagcttccttgtgaggtcgtcaagcttgcacaagcttgaaccgaggacccgcgtcaccggaatagcgaaaccgtgctcgctggagttcatcaccccgccggcgcacgtggaccgggtaaatcactgcgccatttttcgatt

SEQ ID NO: 127318 - DNA, 402 bp, Zea Mays
gtcgttctgtgattaaagccctccattctatcgtgcatttgatccaggcaccgcggccggacctgttctgccaagtgggccccccaacggcggtacacaccctcccacgcaaaagcaaaaagacacacctcagtgtagcactagagctggaggagttgtgaacaatggatggtccacaacaacacttataagctacgttccgtctctctcagtgaccgatatggtactaatcaaacaaatctcatacgagcacctgtgtcctgtcgttcgtgcagcccagcaattggacgtgcggtccagcttcccagcgtgcagcccagcgcccctgtgcagcccagcgcccctcctctcgcttgtccgtctacagccgctgcctccccacatcccccacgcgagctgccc

SEQ ID NO: 127319 - DNA, 453 bp, Zea Mays
ggagttgatcagggccatggatggtgaaacggagggctgagattagaagctagggtaccggttcggcccaatgacgtagatccatctgatttaaatcgtgcgcctataactcgatcctaggtgtttaaatcccgtccgttggttgctgatctcgcggccgcagacgcacaccaagtcgtttaaacctagatctaatctggcacgttcgtttctgatcgggcgaccgagagatcgcgataccccttcgctgcacagcttttgcacaagagtccctgcgcttaattgaaacaaacatgcagtccctgcgggagtagtccgagtctggtagatttttgctagttaacccccaagattctcagtaagagtgtgcgcagtctaggaaaccgagaaaataggaaaaagaatatagaaattgatttttgggtataaaaataattgcagaaactcatttaa

SEQ ID NO: 127320 - DNA, 305 bp, Zea Mays
cgcgcagctgatcaggccgacttagttccagggcaccctcgaggcctcacgcctccagtttggatcatatcgtctagcccctgaggacccagtgccagtaccagatccagtacccgatattcaggctgaggatgaggcattcagacaatttgagacccaaggcactactgataatgatgatgttgattttgggatcccgccaccgcctcttgtgcctccacgctcacatgatcacgaggcagggagttccagtgctgcccctgctgcccctcctgctattgatcctgctctggctgcgatactcc

SEQ ID NO: 127321 - DNA, 284 bp, Zea Mays
ttcggggacctgattcgggacaaggtggagatctacgtcgatgacatcatggtcaagactagggaggggtcgactatagtggaagaccggaccctggtttttggcaagctgcaggcaacccgcaccaagctaaacccagagaaatgcatcttcggtgtctccacagggaagttgctggggttcctggtttcataccggggcattgaagctaacccagagaaaatcaaggctattgaggtgatgaggcctcccgcccgtattaaggacatccagaagcttacgga

SEQ ID NO: 127322 - DNA, 803 bp, Zea Mays
gccaccttcaactgctacaccaaccaaaattagagatagccacagatggtacccatatttcaaggtcagccaaatccaaacacaccactacttttcatgttgggtttgtagtaacaaatgtttgccctaatgtgtaggactgtattggtgccattgatggcactcatgtgctaacaagagttcctagaaatcatagggctgccttccttggtaggaaacaaaccacaacatagaacatcttagctgctatagactttgatctaaggtttacatatgttcttgttggctgggagggatcagcacatgatgcccttatccttgttgatgcccttgagagagaagatggtctaaaagtgccccaaggtaaaaactagtttccttggtatcccctaatattggtctacaatgccctaatatatgatatatgatgttaggtgaattttaccttgtggatgctggttatgctgtcagaccttggtttttaccccccttatcgtgccacatggtaccacttgagtgaatatggggggaggaatccacagaaccccaaagagctcttcaaccttagacattcatcactaagggtgacaatagagaggtcctttggtgctttgaagaatagattcaaaatattatacaacaaacctttccatccatacaagacacaagtaaagctagtcctagcctattgtatcctccacaactggattcttcgtcatgggaatgatgaacatattccactggaagaaacatgggctgcaaatcaagttcatgaggaagctccccatgaccttgtcatggac

SEQ ID NO: 127323 - DNA, 327 bp, Zea Mays
ttcaaccatgagatctgttgatcgcactccaactaatgcaaaaagactaaccattgagtaaagtcaggaggttttttccgttgacatttccagacaaactcgatctagcagctcagcacatcaagctgataatccacataaccagcagcagactgatccacaaccagcaccagtttatcgtgttcgcagaaaggcactagcttgtcatgtaaaaagaaatcctccttcagctccatccacattctccgatgatgatttcatggatgctccatctttgaagcgccaattcagatcagcctcaccttccccttcagaaaaaaaccgtgc

SEQ ID NO: 127324 - DNA, 740 bp, Zea Mays
cgtttgccagccattccgtctcctcgcctgcgtagtggagcaccattgcggcgacgtttctcctcctgtgatttttccccttctccctcctcgcggcatccccgtcagcagttaccttcccccgcagcggccattgatgttgattctggctgttaattactcacggattaatagcagtgcatcaattgctctttatagggtcttaatcgacactgattccctcctttcctccactatatagggcgcagcaccccctcctctcctcctttcaccatccgacaccgttaatggattttattggcagtcgttttacctctgtaattcaaggccggcttcaatggtcgcggttgcaaattcctcctccctttgggctataaaaggttgcgcccagtccttctctccttgcccttgatcgctctctcgctcacaaatcacaacatcacatgtgcttaccggctcgcagctgtcgcggctgtgctcgccggagttcatgcctcgctgaccccctgctccattactgagcctccctgctgctgcctaccgttgtgctcgcgccaccacgttgtgttgttgccgttgccggagctccgtctgctttgtcgtctgtactacaccggtgctgctcaaccctcgtgcctcgcactatctactagcccggctctctgctcctccaccacgatgtctactactcaccatcgtcatgtgtcgttggagacccttgccgatgaactatctcctca

SEQ ID NO: 127325 - DNA, 377 bp, Zea Mays
cgttgatcaagcaaggaatggatgcgactagatgtatccatacctgtttgtcgaggatcagggtggtcgagcgatttacattggatggttgggatcaggcgaggcaggccgattcgtagagtagatctaggccatctaattcgaattgggcgtctgtcgttacataccagttcgttatggggtcgatctagttggggcagtcagatgttgatcggtcggttggaatccctgcatacccccttcaacgtgtaattttagcaaaagagcccctgtcttttctttgtataaacacgtcgtccaccctaatgctattagtgttgcagttcggtcctcatatttatgagttggaccctggattttctgatattagcgtcagc

SEQ ID NO: 127326 - DNA, 378 bp, Zea Mays
cacataatgaggtccatgccggcgacgacgaggcctatcgtcgttctcggtgtcaccaccataatcagtgccaccctataggtcaccaagctgtcgagacaactcctatagtcgtgtcatgatggtgtcgagggtggtgttgatggtggcttgggctgtttgtaattcctggagcgtcgtaccggcttcaatttgtgttgtttcaaccgaaccaaggcgctcgttggtaatgtgaatgtcttcagcgaggctatcaaggtgcaggcgcatttgtcgctcaaaatgttgtgatgtccttagtacaaggggactgtggcatggtgttcttatcctcgtgatcccccatgtgtcctaccatagttagtgcaaagacaagag

SEQ ID NO: 127327 - DNA, 755 bp, Zea Mays
tgcgaacccagcccagccgagccttacatgggaatactccatttttatggtatacagatcagatgcagtgttaccagcagatctagccttcggagcacccagattaaccttcgaaaacattgcagaggcagaagcaactcggcttaaagaaatcgatgtgatagaggaggaacgtttgagtggtcattcagtcagccagataccagcaaaccctgaggtgtttccatgataaggttgtacgacatcgggcattgcagtaggggacctggtgcttcaccgcatacaatcagaaggacgacacaaactgtcaccgcatgggaagggcccttcatgatcgcagaagtaactcggccaaggtcttattggctaactcacatggatggtactccagtagggaactcatggaatgtcaagcatctcaggaagttctaccatagtagcaccataaattctagatggtaggctacactttgtaaactggtgacctgattgtcaataaagtttctgcgttcgtccacatacaaacaaactctcaagaagcgatcagcttaagtcgaaaatgccttaagccaatgcaacatgctcatgcttacaaaactaagggtgcctactataccctactaagggagcaatcggatgaagtcggagacgcataagtcgttgttacatgctcacgctacaagactacgggtgcctattataccctactaatggggaaatcgacttaagtcggagacgccttaagtcagtgttac

SEQ ID NO: 127328 - DNA, 409 bp, Zea Mays
cggaaacagttttgggaagaattccaaattcgtggattctagtgaatgaccgaggctgattcgtggtggctgggcagcttactactccaaggagctggtggcacacgcaatttataggcgcatcgagggtcggtgacgaattcggccgaggggtgctggcggtcggagaggggaggcaagctcagtgcgggggaaaaaggtagctttcaccgtggcagtgactccggtgatcgccggacatgcaaccagtgagtcaccgcgaggaagtcccgcgctgagacacgtggtgcgcaacggcggtagcttatcggcgacgaggctatccaaccgacgatgagctggggggtgaagtacggcggccttagccgtagctcaatccggtaccggatttttaccaggtcaagcttat

SEQ ID NO: 127329 - DNA, 426 bp, Zea Mays
tactagtatgaggccggctccaacgttgcactggctatttgggagctataaaaccggagccggtctcctaacgatccaagacgtgttgatacatcaaaattgaataaaacgggaaatttaacccatccaaatctttccggttttctcgttgtcaaactagtcctgagtttctcctctccccccttcccagtaattcgtgtaaggctcacggagatgatccaacactgcctcctcctgagtttctcctctccctccttcccagtaattcgtgtacggctcacggagatgatccaacgctgcctcctcctggagtcctggtatctggaatgagagaagcaaatcgccgggtacaggagagctctaatcttcctctatttcgttaattagtacttttaactataaaatttagtggtaagaataggacgg

SEQ ID NO: 127330 - DNA, 611 bp, Zea Mays
gcaggccctaatgggcacctcgttgcacaaccggcataggaggtgggtgttgggtatgtatatactcaacaccaactcccagacaatggtatgcccagggatccctacgcctagttcattctacatactcatgctaatggggaaaataggggccacaatcactacaatccttactacaccgagggtactgttggcgaccatttacccacacctccctccctgggtcactttcccaagctcaacttccctccattcgatggagaaaaccccaaattatggcaagctagatgtgtagattacttttacatgtatggcgtccaccctagtttatggattactgtttctaccatgacgttttctggccccgcagcgcggtgattacagtctgttaaacctacactgttatctatgtcatgggaggagttctgtcaactacttctagaccgctttggcaaacaagagcacgaaatcctaatccgtaggttattccacatcaagcaaaccactactgtcactgcatacattgatcagtttgcccaattgctagaccaactccatgcctatcagactatcacagacctgctatattacactatgaaatttctttattt

SEQ ID NO: 127331 - DNA, 541 bp, Zea Mays
caggctgcggggatgggcaatcgagtgcgctaaggctcgaactagctctagcgagggtaggggagtgttatgggccaacacaggggcacaagacggggccaatttggccggacaccgcgcgggggtggcgagcaagcgcgaccgtgctccggtaaggatgaattagccatgacgaattaaaggaaacagagcatgggaatgagttcctcatctcgggatagcgctcgaggaggcttggcgcagattctgatgggttggatgaccggcgtggtgggtgcgggattagggtgagcgcgagcggcaagggcatagcgtgagagagggtgagcttgcatgaaatgaggcaggggagagagagggtgcgggcggttctcaaaagggagctagggcgcgtggtcaggcgacgtggccagggttctcggcgtgcatgcgcgctggtccatggcggttcgcggggaaggcggacctgaccggggggtcccacggtgcagagagagggagcgggcgcgtgaggggaatggctcattgcgctgacgaggtg

SEQ ID NO: 127332 - DNA, 318 bp, Zea Mays
tccgcatatccaacagattaatgtttagagttttgtgtattttgcatgcagttttgactaaaaaccatgaagcacgtggaccgtcctccgaataatcccaaaggtataacaattcagtcaagccaggagtgtttcagtgttgacattccgtgcgcagaacagtcaaatccaagtcaaattatgggaaatcctccaaatgctgacagtcaaactttgatcaatgagacagtagaggtggattctgatgacaatgactttatgccagctgttaagaagcgtaatgtttctgtaagccatacaagagttctaagaaaagtt

SEQ ID NO: 127333 - DNA, 369 bp, Zea Mays
ggggagtaggcacaggcgatgggatcagcgttgctcccgatgatggaatcacggtgggtgcagcgatcggatcgggatcagcggtgctctcggcgatggaatcggcggcgggtgcaacgaccgaatcgacggctggcggtggttacggaagggtagcggatcagaaccacaactgataccatgaaagtgtgggaatgattaattgtattccatgaatatgcatgagtacatatagaggttgggtggcttgagagccaagccgcatgccacaaatgaaggcaacaaatcaagggcctactataattacacattctataatagtctaacacccgtgtgtgtctatatatattggtgaaatatatctcttcc

SEQ ID NO: 127334 - DNA, 888 bp, Zea Mays
gaatggtagtgctgcaggacaatagctttctgttaatacatatataaatgtcataaagggaagaaaacaaaactacttccggtttcttgtccctaccatcaggacagcaaaagacgatggctgggctgtaaccccaatgctgctagttcgatggagaccatgtctcctgatattctcaatgctacctggataatgtttgaaaaaaaaaggctagctatacacaggacacatcgaagtaatatctaggaaagatcatcgtaagaagccccatgtattttacttactgaaaatgccaaaagcaagaacgtagaagttgtgtgatgcagagcatatctaaataagctttcactgcaggctaattaacgtaaagtagtagttaacccaagcagtaaacatgttgtacataaagatgggcatgaattggtgcaaaacaaaatacatcacagagcgaccgaccccggtcggtgggggggagggggctaggtggcagccggagatggggaagagaggggtggcggctgtagggagaagaggaggagaaacttagcttgataccatgttagatagaccgaaaccctaattagggttgggagtatattaatagggctgggtaactgggccaagacccattacaagagagagattacacagttacgctagtatattataataatggtttcaaaagcagctagccactgcatagaacacatcaaaaataatattttgaaagaagatcattgaagtaaacctcattatcctttacatagttattgaaataacaaatcaagaaatatatgttggatataaaatatatttaaaaaagctctttacatgctaaagtaaagtaatgataagcaaaagagagaactaaagagactgagtttgaag

SEQ ID NO: 127335 - DNA, 273 bp, Zea Mays
caagattgacggacccgatttaataacacatgtggttatcgcttcaaacaagcactgttgatcggcatatcgacggtatcaactattaggtgaataagatcggtttgcgtccatcgaatctagatcagacgctacacaacgattcagccgaaacggtatggggaatctaatcccagccacccatctcgcatcaacggctcaggtgcgaccatcctcacccgacccctagcagcgacggcgcgccagctccggcacagcgacgccatagccacg

SEQ ID NO: 127336 - DNA, 633 bp, Zea Mays
caacccgcaatgcatcagtgggaaccaattcagtgtcatcagcagaaaatagaactctgtcatcaggtgcgctggcctctaaaacgactccttgacccaaggcttgggctatcgccatgcaaccagaatgtggaggagaagaccctacgtgaacatccatggaagtgtgggagggagaacccactcggacaccctcgggggctgggtcacagcttgcgctacccatccaagccggatcatctccggcaacaccctcgggggctaggtaagcgccagcaccatccttgagggccaagttctctgcaacagccacctctaaggctgaaggaccctcagtcacttctgtgggaacagtgcaatccagaccagcctcctgaccctcaggaccacgctctaaggtcgatgaggcgcgggacgctgcccgggatgaccccaacccggcatcgggcacatcagcacaaacatccatcacgccaccatctgccggctctgacaacagatcttctggaaccatgtcttcaagagtctgatcgaagtttgtcagagataattcttgcagaccaatgagggcagacaaagcaggagaaggaacaccactactttccccactagctatgtaacgccggctgttct

SEQ ID NO: 127337 - DNA, 380 bp, Zea Mays
cttcctcctctctactctctcttcgcgcgcctgcgattctctccgctgggatgcaaggtgattctcttcctctgttttcttctcggccctctgtttccttgccaagattccgctcggcgttgtatgctctcttctgctatggaaccatggccgtagttcttcccttcctctcgttttgttctcgtttcgctgggcagctacgtatggttaggctaggcctaggcatgcatgtacggtggcttccgagggtgcgtcgttgattccgactgctgattcgagggttttgaggtttctgccatggatgccctcggctaagcaattgctgctcggttcgttcagatctgtcctcctgtcctgtgcgttgtaccggccacggctca

SEQ ID NO: 127338 - DNA, 299 bp, Zea Mays
acttcttcatcccctctgtgtgctaatattctggtatcagattcatctcagaaagttcgtcgcccatctggaactgtcggcaggatacaactacttcacatgtttctagcaacattagagtgccatggatcctaacaccacacctcgacgagatggagaagaggttttcgaccatggagtcgcggctggaacggaagctcatcgatcacaccgcgatgaaggatgagcgcaccagcgctctagaaggcgccgctgaagagttggcgttgtggtgacccaaggtggaggcatacatggat

SEQ ID NO: 127339 - DNA, 984 bp, Zea Mays
cacgtggtccgagtgaagccccccgagcaacgcgctgggataggaacactcgccaaggcccgaatcgtcgacggcagcgaagtctgtttctcatccgcgacggcgccgggtgacgagggcacgactatggcttcgggagggggtctcactcggggtatatatgggcgaagaacgatctcgatgctttatcgcgggcagcgcgcgccgttgcaacagatccctgaaggaagcggcggcggactcggccagtgcatgcggtccgttgaagccggcgagtgcggctgaggaagatgacccgctcggttgagaggaaagcgctgtccgtatatatatgcgcggtagagatccgaggcgattggtttgcaactcccgcggaagtcgcggggaagaaaacaacccaacctccccgcgcggccccggtgtccgacgaacacggaagctgccgtcgcgagattgaggatcgacctgacagggaagccccaccggtcggtgcgctgagcaacccatgagtgtgcagctgtcccctgggcccgctcgccagggagggaaggagtccagccccaagcgcgcaagaaatgggtgaaggcgctgattttagggccccacgctgtcagtgggcgaagatgtgaagtaaggccatgcgggatggagctgaagtgggcccgctgatgtagtttgagcccaagtaaacaggtaagttttatattttcttttctgtttttggtttcctttaagttttcaaatttctcttccaattccaaatctgattcatctttctgtttcaaatttaaatcatattccaatcctagtgtgtcatataattcctactattttcggtattattacttattgtcattccattattttattctagacttaagtgacttacactttcttttctcatttctgttttatattttcatttatcatttgaggtcaaattaagtcttgattcctttattcaaagaaaatgcatcacaacaa

SEQ ID NO: 127340 - DNA, 331 bp, Zea Mays
aagccgccatttaaggaggggggaatgtgagggacccggcccatttagtatacgtcggcccaactagctgaggggatatataatgagcaacaacaattgaagagggggatatccagaaacaaatgaaatatgttcttcatccttatccacctatcttagttctatactgtctttctctatttcttctctgtaattgctactagttcttctacctcctgctgtaatcgctaccagttctgagttgaagcaatccatatcgccagcaggttgctgacacgtatccacagtgtccacatgcccccggcatggtcataggcgtggtggtcgtctc

SEQ ID NO: 127341 - DNA, 545 bp, Zea Mays
caaagacacctgccaagtcgtcgctcgcaaggcattgagggccctgtgtcagatctatgaagaagaagtggccacaccccgctcagattctttccgccctttcagagagaccgtcctgcttggatggccaggatgcgtgcattggaagggaagcagctgcttgaggacgaccccacagtcgtgtacctcactgcatacctactcaccctagatgcgcagtatgatttcttggctcggcaccaccgtcagatgattgctcgagcagaagatgaagagaagctcaaccgtaagctccatgtggatctcaccacagctcaagcccgtgtagctgccttggaaagtcatgaagccattgctgttgaagccctgaagcaagccaaggatgagcatgtccagaagttgatggaggcctacttggtcacccataaccaacgtagagccctgcggatccaagagcccgctccatccaaccctgttcaacccatcaaagatgaagacccccagattcttgaaggtcaccagaggagagaagaaggcttgggaac

SEQ ID NO: 127342 - DNA, 441 bp, Zea Mays
gattcatcttgccctaattagcgtatttatcccactctagaataacaaccatgagctaacccaaccaatagagtcttgatggattgcataatctattaacccccatctgaccaaccacattttgacctacatcatgtagtccatctcacccataactattctaaccatatttccccaactccgataatatacactaacctcaaatcaatgagctcaagactggagaagaaaaggtcaaccttgtcaaggaaggagagaagtcaaactcaaccttcggatgcattaccacctagcacagagttcttcctcaccataaactttcttacctctggctattcttgccctaacctatccatctcttatattctacataataggtagctgatacctatgctctactaatcacccattattgactaaaagatgagactctagattttt

SEQ ID NO: 127343 - DNA, 591 bp, Zea Mays
cgcaggaaagtgcataagggagttgccatacgtcgtttggagcctaagaacccaacctagtcgagctctgcatgggaatactccttttttcatggtctatgggtcagaggcagtactacctgcagatctcaagtttggggcgcctaggttgatctttgaaagcatagcagaagccgaggctactaagctagaggatgttgatatactcgaagaacggttgaacacggtaattcaatcagcatgataccaacaaactctgagacgctatcacaataaggccatgcgacgtcgatcctttgcagtgggagatctcgtcctccgccgaattctaacgggggagggacgacacaagttgtcacccctatgggaagggccattcatagtagcagaagtcactcggccaggatcatatcgtctaactcagatggacggcacggaaattgggaactcatggaatatagaacacctcaggaaaatttacccctagctgtatttcaaaagctatcgggacgacaatgtactctgtaaactggaaatatatcatcaataaagagacctcaagaatactcatattgttcatggtcgacctgc

SEQ ID NO: 127344 - DNA, 434 bp, Zea Mays
aaattatcccgtcctcaacaaaaaaacaattactctgactgggcattattgatgaaggtgaagctcatggcgtgagcgccctggacagcgattgatccaagcggcgtcgacttgcaccaggatatgatggcgctcaatatgctggtgagtgctatcccgtgtgacgtcccttgtccggcagcgatcaccgacgtgagatcgacccaggaaaatcgccttggacgacaccatagtacgagtgttgctctgtttctattctgtttttgcatacccgacatacggtgcttacagaccttatacacggttggccagcccacgccacaattctacagtaacaatcaatctggcccagctatggcccatacccttctactattcttcatccgtgccagcttcctcttctatctccgatacaacaacagagaccaaatgtc

SEQ ID NO: 127345 - DNA, 554 bp, Zea Mays
atcatattctctcgacattgggagcccgcccttctgatccaacctccattcctatacctagtcaggtccaaggaaccccttctttgcctgacccgtggcacgactattgtgaatcaaacaacagggaaaggaggccatgggtgcgagaaggattttgaacaggtagagcgcccaaggaaggaaaagattggggaaaaaactagagaaaaaagtcggtaagcgtaaaccgacataggtgaatcaccctctacttatatatgatggtaaagaaggcaaggcaatgactcatggtcgggcctaccatgaccccggtacagtcgaacctcgctgctccaactcccggtcacctcgagacccgagcagagatcgaaccgctccacaacagcgcccgcctcgaacagaacgccagggcaggtcacaccgcttggaaatcacgtctgcaccaagtaggacattactcgtcccgtcagctaccagtgccaagcatcatgatctccccctcttttttcacgccacaacagtcgttgtggtcgccttgaactagctaggtaaac

SEQ ID NO: 127346 - DNA, 350 bp, Zea Mays
tttaggagataattaagcccaaagttggactgtcaggctgatacagtctgaatttcagatagacagtgacttggatccaagtttgagagccatttcgactaagatccagtgagaatctacctagggttgctataacaaagttgtagagttattaaagaggaacaactttgctatagatgtttgggcttggtaccatagaaaatctggagaaaataggacctaaagttgctctgtcaggttatttgaaggagcactcgccatggtacagtgtcgtgtatggatcagatcgccagcgcgactgacctcaccgccgatggcttcctctgccgtgattcgtgctgccgacgtcg

SEQ ID NO: 127347 - DNA, 360 bp, Zea Mays
aaagacccccaggttctattcccttccaagtcgaggtccccgacggtgcaccgcacagggagccaagctccggcgagctagactggccggagggagccaagaccggtgctcccgagtgactgacaccaaattgaacccctcccgagcatttcccccaacttaattccaagaatggcgacctaatttgctctggccacggtgacagcgcggatgatcaaaggaacagcgtgttcccgacgatccatggcggtctaattcaatcagaggagtcgaggagcttgagggggaccttagaacgctagaacaaacgatcaaggcgctgggactgacctggaataggctgaccgcagtgaggtctct

SEQ ID NO: 127348 - DNA, 369 bp, Zea Mays
tgaggagcagcatgggaagattgtggaggtgatgatggatgtaaaggtactaaagtttgaggaggcggagatggttggggatgagatgacgatggcgttggtggatcaaccaatttgacatcccttcgaggccaaaggatgaaatttttgatggcttatccaagtgtctcgattccttcgggcccagggatgtctagcatgtcgtccttagatccttggacgaccatcgtcacttctaccctgcaataatcatctggtgtgtcgcttccatgaaacttacaacatgggatcgccatgcctgttcctactttcttcgtgcgattattgttaataccatatcttataaccagtgtgcacgtcactggcctt

SEQ ID NO: 127349 - DNA, 470 bp, Zea Mays
gcccgctaccttcaaatgactggccttgactctttggcaagtgtcgcattcagatatatacttagcaatttccctcttcattctggtccaccagtacaaggatctgagatcatgatacatcttgttactgccggggtgcatggagaatttggaaaggtgagcttcatccaatattttctttctgagctcggggttcttaggaacaaccaatcggtctccaaaccatagaattcctttgctgtcctgatggaagcatttgtatttgtccaccttttgttcgatcatttccttaatgaattgaacacccttgtcaccaatttgagccatgactatctgctcctgcaaggtgggctccactgagatgtaattcaaagcccctgaggaaaaaacttccacattcagcttgcacaattcgtcacacagagtggcgatcttggagtccataatcacacagttgcactgggccttcc

SEQ ID NO: 127350 - DNA, 1145 bp, Zea Mays
tcagtgtggtctttaataaattcttacaatcaatttaactgatgattcttgctggagtatattttttgtactcatctgataatttattttatttttccacgcactgcatttctacttctctagcaacgtatacttatcagatagtgcatgctatttgaaatggagggtgggctgtctagctatcagcatataaagaagtcttcgatagaagaatctaaagcatcatcatgtacgtgtgtgtgtgtgtgttggggggggggggcatattcagcagtaaagattggttttgatagcagttctagaattgtaagttacatatagcatgaagctttctgctctagtttctacggacttcttttacatgagttgcctctactaatctctgtaagcgtagagcctcatgggttcagtggcaggctagtgccagggctgcttgaactaaggaatcatggccagcatagtgtacttgctaattgttattcaaaaactgttttcttaggaaaaaaaatatttatgcatcgttttttttcctttttgtaaacaagaaagttaagcatgttacattataggaaccagcatactacgtgtattaatttttattcaatggctatttttttatatggcaagatatctcatgtagatggtcagaagaaaggaaggatataagagtgttaactggtccctaacctgatagattattagtaaatactagtctatcttgcatgtattatgcatttaaattatctgatatataaatggcttgtcacaagaatatattattgttattcctgcctgtaggaaccatgtagcacaatcgagttaatactaaacaaaatgcaaacagttatatggtcttaatcttataaactttagcatcctatcattagattaagttattatttcctatgtgaaagatctgtacttgtagataacttggcactcatctttagagctgcaaagaactgtaaaaacacataattatcagcaaaactaaagaagtgatactatctggttgatcactggggggaaggaaatagaagaatgtgtggatgtacaagttatacacccagttatctattcaggacagccccctagttgatacctggcctataggttcatccgtccccctagcgcctaatttccag

SEQ ID NO: 127351 - DNA, 448 bp, Zea Mays
gcaggactcctctatattaggaccagactagaggaagacagttctttggacgtgaacttattcaagaggcagaagaacaagtccgtataatcaaagagatcctgagggtagctcaaaccaggcaaaagagctatgctgataatagaagaagaccactagaatttgaggaaggtgatcaagtgtacctcaaggtatcaccacttcgtggaatgaggagatttaaagtcaagggcaaattgtcccctcgctatattggaccattcagagtttttaggcgagttggagagatggcctatcaactcgagctacctgataatctatctgatgtgcataatgtattccatgtgtctcaacttaagaagtgtctccgtatctctgaggaacagttaccaatggaagagcttagtgttcagggaaatttgacttatacggaatacccgatcaagat

SEQ ID NO: 127352 - DNA, 441 bp, Zea Mays
ctcaaatagtgcgatccgacatgtgcagtagcgcgaaattaaagttagccacacgattcaagatatactcgccggtaaacagatctgtgagatatgttcagttcgctcacatccgttccaccgccagtaagaagcgaagcgagatagtcaagatctaaatctggcctacaccttttagcagcacgcaaccttgtttgtttaggattatgatcttctcagatttaaaattaagtgttattaaaataagttaagactgtttaatctaggaagattataatggcagcctttaaagtctcaaatggtgcgatcggcgatctgacatgtgccgtatagcaaaatttaagaaactcgccgatctgacatgtgccgtataacaaaatttaagaaactcgccggtgatcagttcgctcccatcccctccaccaccagtaagaagcgaac

SEQ ID NO: 127353 - DNA, 575 bp, Zea Mays
tcttgatggcaggcagacttacactggtaaattctaccctatcagccctgccgacttacaccatgtgcattgtgaaactacctgtctcagtcatcaacaccattgatcgtgcaagaagagattgtctgtggaaaggaaatgatgtcaacacaaatcgcaggccgatgatttcctgggataagatcatcactcccaagaacaaaggtggcttgggatcaccaatctcagattgcagaatcaggccctcctcatgaaacatctacacaagttttatgcgaggatggatattccatgggttcacttaatttggaacactcattattgctctgaacagattcctcatctctcctcagaaaggtgatccttttggtggaaggacatcgtaaggtttgcagatcactacagggggattgcttctctgatggctggtgatggtaaatcttttgctctttggcaagatgtttggaataatacgttgttcaaaatggctttccctagtctgtattcattcgctaagaggaagaactgttcactggccaagtttctacagaacggtcacctccttaataattttc

SEQ ID NO: 127354 - DNA, 383 bp, Zea Mays
ccatcctttgcttgtattttgtcagacacttgtaagagcttggtaagatacattagagcgtgttcctgtgttccacctaagaggagcgtatagtgaaattattagggataaccatcaccgtttgtttcgtatttttgtgtttcgatggcaagcgacaaagaagaagcaaggatccctacagacttcgatgaatgtgttagctgccaagatcttgaggcaaacaacaagctcctgaaggagcaaatgcaggagacggtccacaagtcagtgcatgatgccttcattgacatgaaccttggcaagacttacgagaggctggatcgacgattgtcccagatcgtcgacagacttgttgtgttggagacacaacaacaagcaccgcc

SEQ ID NO: 127355 - DNA, 470 bp, Zea Mays
tgacttcaggaccttgaacaacccaccacaatccacgcgagtacaagctctagcgtatctggcgtcaacgcgtgtgcggccatcagggctacgacagtatagcaagccttcgtaataagcgcaacaggcacaattatggcttggtaattggggtacacgataaatccacgcaacgtgcgcaacaggcgcaattgtgctcgcgtcagacagacagtgcctacagggcatgcaaaaaatacacgactcagcgatggcggtctgactcaacgggagcgatccaattaatggagagcgcgacatagcaatcacatgacgcagccaagttcgaacggcacaaatattgcgtcatgttgccagggcgcagtcaatattcagctaatgccataactcatccgattatcaacgcagcctcatcggcgtgtctgagtacccattatataatttaatcgctcggcgtgaatcagaaactc

SEQ ID NO: 127356 - DNA, 423 bp, Zea Mays
caagtgaaaagattctctgcttcctatatttcccattggctatcatatgaaaataccgagtgttgttatcttttagtaggacatcctttgcttttgcacattggtagtatttgatttcttcttccctaagaagtctggtcaggtgatctcgagattgagccaagtactcttgctccctctcagtcagatctctgacttcagcaagaatatctagagagcaaattaaattttgaagctctatttctttttcttgaactgcccattagtttgagcagcccatcctcgtagaaatctacgcagagcacccaacttgctgttccatcattttatggaattttgacctttagtcgcctcccttggtccaaatttccttgacactgtcatcaaagcctttcacgaagaaaccaattcagttcaaactta

SEQ ID NO: 127357 - DNA, 1284 bp, Zea Mays
gggaagagagaggagggagagggaagagagggagaggttttagggtttagggtgtaaaccctacgcgcgtctctgtagagagtgagagagagggagaggagaggagagagggagagggagagggaagagagaggagggagagggaagagagaggagaggagagagggaaagggaagagagaggaaagagagtggagggagggagagagagagaagagagaggagggagagggagtgtatatataggaaagagagtggagggagagagagaggagagagagggaaagggaagagagaggaaagagagggagagggagggagggaagagagatgaaagagagggagagggagagagagagagaggagagagcagcggaaagcatgtttttttggcttccactctctagtataaattgtagactagattcacttcacttctgccacggagcaattcagtttttatccgtttagctttatagagttatgtgagctctaccagatgtccctggcaaatagttgtctgattgtctcaaacaacgtattccattgtagtactattagctagtgaaattagaaaacgacgtacgacacacttgcgttgcttcgattaagagcaactcatcagaaccccacttgaccagagcgtgttctcatcacctgtccttggtctctctcacacaaagagtatgcatcaagcttcattagcaaagcaaaaaaaaaatcaaagcttcattaacaacgccatttcctacgactctccatctctctctctacgtcctatacgaatcctcctatacgttctatacgactctccatttctctctctctacgtcctatacgactcctcctctctccctctctatacgttctatacgactctccatctctctctctacgtcctatacgactcctactctctccctctctccctctctatacgttctatacgactctccatctctctctctctctacatcctatatgactcctcctctctccctctctccctctctatacgttctatacgactctccatctctctctctatgtcctatacgactcctcctctctccctctctccctctctatacgttctatacgactctccatctctttctctctacatcctatacgactcctcctctctccctctctatacgttctatacgactctccatctctctctacgttctatacgactctccctctctatacgttctatacgactctccatctctctctctctacgtcctatacgactctccctctctatacgtaactcgat

SEQ ID NO: 127358 - DNA, 940 bp, Zea Mays
ttttgttattgacatgattgtatccttgcatcttttttaatacccttttcccttaatctaaagtacttacccttgtacctatatagcctatctaaacagttcagtctatgtgtccatgaccttcttgtcttctgagatcatttcttattctgttgttaagtcgctatctctcggcaatttctgtgcccttggtcttagtatgctcgtatctttggaatcttgcatactcttatattcttatgtatgcttattttcataccccaataactgttcaagacatttcagttgacatgtccttgaccacccctgtttcttaacggtccatgagcgatcatttcatgtcgcccatccttggtgatctcgttgttactttataacttctctcgatagtgagttcttacttcaaccattctattgcaccctcacctatcttacccttgattgttttctccacttcgccactacgcgagtcttcccttaactctatcatttgtcatgacttttgttattatcaccttcaccttagacatctctatatcttatttgaggtttatcttataccggcatttaaaatcttctccctttccatctcaatttgagcatcatactttacctacttttcccttggtcgtatcctcttctttgtcacctgcgcgttgttaactctatcctttgttgtgtttttgtttgttatttcctttacccttctcatcactctatcatgccttgtgattaaattatgtttgttatctaaaatctccagtctcttatcctaatttgagagtggtgttttacttatctcacccttggcaacatcctcttcttcaccgtgtgtaagccttgacataactccattctttgttgtacttataccactagctcttcaatgccttcgtcttttccctcatgcccttgtctgttgtcgcctctgacccttgtg

SEQ ID NO: 127359 - DNA, 672 bp, Zea Mays
ggtgatatgatcccggtcgagtgacttctgttactatgaatggtccttcccatagaggtgacaatttatgccgtccctcccccgttagaattcggcggaggacgagatctcccactgcaaaggatcgatgtcgtacgaccttatcatgatagcgcctcagagtttgctggtatcgtgctgattgaatcaccgcattcagtcgctcttcttcgagtacgtcaacgtcttccagcctagtagcttcagcttttgctatgttatcaaagattaaccttggtgccccgaacttgagatcggcaggtagcactgcctccgaaccataaaccataaagaaggaggtatttccatgtagagctcggctgggttgagttctcaggctccaaactacatatggcaactctctgatccattttcctgtgaacttttcattcttgtcgaagactttctttctgagtgcttctaatatcatctcgttggctctttctacttgcccgttggctcttgggtgcgccaccaaggcatatttgatctaaatgctcttttgctcgcagaaatcgaagaattctaatctagtgaagttggatcctaggtcagttatgatgctattcggtatcccgaacctgaatattatatcttgtatgaattccactgccttagctgaagttaaagaag

SEQ ID NO: 127360 - DNA, 430 bp, Zea Mays
cttgcctattatcacctttgacccttgacctctctccatatttaccatgatgtttacctatttttcttagcctcacttattccatttcaatccaagagtgttgttttccctatccctctctcgttcgtttcctttccctttgtcgctttgcagccctgtctcaccttaacttcatccttggttgagattttgtttgatatcatccttacctttgtaatttgtagatcttgccttgatacttatcttaggtctgcttgttgagattccctcttttttatctcaattcgagagctatgttttacttatctcacccttggctatatcctcttctttaccgtgtaagccttgacatacctccattctttgttgtacttataccactggctcttctgtgctttcgtcttttcccttatgcccttgtctattatcg

SEQ ID NO: 127361 - DNA, 424 bp, Zea Mays
acgagacgagacgattaaggagtcaaatgacgtgaaaatggcgtttgacggataaatggtgtcataggatgtttggaattcgaattgaggcacgaaacgatatggaattgagccgatacttcacgaataggtttatataggtgaatatgagtgaagtgtgtgctcggtttgaatttagacgaagaaatagggatttgggcactcggctcggaaacgatcgctcaaaacgggaaatttggtgaaatttaagcctgggatttcggatgggcgtgaaatttggcaagtaggttactgaaagtgttgtgaaggtgcctgaaaaatttgggttcaattggagcatttttgactggtttgggcatttcaccgagcacgtggcgtgcggagttctagggtttcggtgaaaagcgtatttggtggaaaaacc

SEQ ID NO: 127362 - DNA, 517 bp, Zea Mays
catttcattagatcgggtagaagagtgcaatattctgagccaaccagagttagattctgatgactgcagggagccaatcatcagatacataaagaatgaggaggagccggatgacaaaaatgcaacagagtgcgtcgcaagacagtcaactcactacactctcattggggaaacactatacagaaggggcgcgacaggagtcctcatgaaatgcattctttcggctactgggaagcaactgctagatgaggtccacgcttggcaatgcgggatacacgtagcatccaggactctggttgggaaggtcttcaggtctggtttctactagccaacagcaaatagtgatgcagccgagttagtccagaggtgcgaagcttgccaatacttatcaaaacagcaacatttaccagcacaacaactgcaaaccatacctgtaacatggccattcgcgtgctggggactagatatgattggacccttcaagaaggctcaaggaggatatactcacgtactggtt

SEQ ID NO: 127363 - DNA, 272 bp, Zea Mays
ttcctttttcaatttccattagcatggcggagtaaatcgattgaacacttaccgcgagaagatgagaagagcggttctcgatctcgccgatcatatccctcgcggcggcggcacccccactggcgccagcttcggcggcagcggcggcgtccctagacctggagtccctccgcattagcgagtggtagaattccaccacctcggggactcgcctgacgcagggggcgggcgccggggccgttcccgaagccgcaggggacgaagctctggag

SEQ ID NO: 127364 - DNA, 364 bp, Zea Mays
ctcctgccaagtgaggtcagttgttcgtttcaccagggaggcttccctcgccttgaggtttccctcaacacgagcaatatcactggccttgtcggagagttcctgctgcagcttctgcagcttcacctcagccacagcttgcttgtcctgctgtttctccagcactgcattataagctttcagcttatcatggagtgttgtgacggcctcctccttttggtctaggtgttttttattcctggccaagcttctctccttccgggtcacctcctcctctcggtcagacaccttccggatgtcctccttgaagtcctcacgctcctgcccaagctcggcccgctccgaggcgaattggcaggatgcc

SEQ ID NO: 127365 - DNA, 558 bp, Zea Mays
tcttggagctcaccatggtcttatatctacttacgcattggagatgcttgttctatacatattccatatatttaacaactctttcatcggacctcttggaagtgacagacatcactcgatgttggcctcttggagatgcttgttctatgcacaatatggcgagctatggagttcatgtagtgctccaacagatctagcaggcaatcgtaggaagttagtagataagatgactggattttcatgtgtgaagggctacatcctatttcgttcagatttcctttgtgtcgcttaggaatcgtttgtttgctagattgccactggtgggcaaaatgtaacaggatcaccattgtttgtttttgtcattgataaatcagtacaacttcatgccactaaggcagggtattcaactattcatcagtttctcagttatgcaaaataattctcagctatgtaaaattattattgtcttctctgactttcgtatgtcatgtgtacttggagtcttaggtggacttgtatagctggttattgaaagctaaaatctgttaggccttgttc

SEQ ID NO: 127366 - DNA, 454 bp, Zea Mays
gaaattctgtgtcagagtggcatagattggttgtccttgatatttgacaatctagatctggtcgtggacctcttggtcactctggcgcagttcatcttattgtggagtatattcttcatattcggaggaagggtgctcctgacgcctagtgtccgccatgaacacgaactaagccccccaacattcggagtctgagtccaaaaagtctaagtctaattagttgtcattgtgcatgctaggccactgtgcaaattggatctgattgttttgatgtttttaatcacaaaattgctagggcgtcaagtgttaatctaaggtgcctgagtatgtcactggtgaagtggaccatgccgaagaagatgtccatggtcgctggagtagtaggcatatacctaaggtttctcgacacgtcactgatgaacttgaggtcgctgaagaaaatctcctatcccgg

SEQ ID NO: 127367 - DNA, 437 bp, Zea Mays
ctcgctactgctgtcaaatcaacgccggtgaggttgccacggcgtaggacactaattcgcgtgcgccagtgttcttctccacctccgaccgccgcgcgtcttgctcgaaattcacggccaccacccgctagcactataaattgacccctccctgaactccgtagggtagtaagctgtccagccaccacgaattagccgcagtcgttcactggaatccgcgaatttggaattctccccaaaacccactctccgccaccgtgaagaacaacccgccgcggccaacgcaaatcagggtcaatcctgtcgttgtttgtgttgttcgtacattcttgtatgaccacgatgctcactgccccacttaattgaattatctcgccaccaatcgccgggaacacaaccgtatagccgccatgatcacggccaccgtggccagagct

SEQ ID NO: 127368 - DNA, 317 bp, Zea Mays
tatcagagaaatgaggtctatcactggcccaccaatgcgaagaagatgtcattgaggggtcgtcattattattgaggtactcaacatcagagctttctgttgagttgcatgttgacatagcatcctccatggagaccgagcaatcctgagacaggccgggtgagctgcaacctgttgatacaacgtctggcacagaaggaagagatgtgttcttctgaagaagtgatactgcctgatcaaactgttcagaggccagccttctgctagaaccccgttccgtgttcacattgcgcaggcaagcataggatcctttctta

SEQ ID NO: 127369 - DNA, 374 bp, Zea Mays
cttcggtccatcgtcttgggcgacaactataggtggacctccgccgtgggcgcatgtggtgtgccggtgaatcggcggtggtcctccggcgcggcagatcggcggctgggcgagggcgaccaccatatgacggcttggcggtagatcgactatgctcctccaacttggccatgggcactgggcagtgagcctctgtcgtgggtgcctgtgcggtggctcgttgccgtgtaaccacggccgtcaccgtggatggtggttcctacgacgctaggattggggaatggatactggggaagcaggaggctcatcagggctggcggctgcgagtctgcgaggggaacaggagcaggtgattcaggttaggtcaccgctac

SEQ ID NO: 127370 - DNA, 339 bp, Zea Mays
gaatttgaaggcgccttccgagaacatcatatgctccaagggatcgtccagctcaaagaagatgaatttcgggaattaactcaaggagggagatctgtcagtgagtacgtgcacaaattcacagaatcggctcgctttgcgcctgacgatgtcagcttagaggccaaaaggatggcccatttcttgaaggggctaagaccagaactcaagactatcctcgccagccaagacttcatcagcttctcgcatctctcaaacaaggccatacaagtagaaagggctaaagaagaagaaaagggtcacctcaagagaaagttccaggtcctccgagctcagcag

SEQ ID NO: 127371 - DNA, 446 bp, Zea Mays
ttcttgaaggcaagatagacacatatggcttcaaccctaaaagtgttccgtgtcagctcaacataaactcctagattgacattgttttcttttcataaggcaaaagcacactgtctctcacaaaacattctgctttctaacagcatatgctcctaggtgttgttgtcctcgtcaccgatgtccctagagaatttgatctacctacgtctgcatcacgcaggcaagtggacttcagcagctgtctggacatcttcaatccttatgttagtgtaaatctaagtgtgatcaagtgttaatctaagcactagctattgtaatggtaagctaagcgattaagatcctaagtttaaggttactagtttataatactgtcttcattcatctcgactctaagatgcctgaaatgcagtggccttaggggtctgtttagtccaaagatggacgga

SEQ ID NO: 127372 - DNA, 661 bp, Zea Mays
ctgcgcgcaccgaggactccgcgcccacgtcgcgcgtagagctcgcaaccgccccgccctcggccacttgagccccagagccccgctcaccctctccctccctcatttgcgcacctgcagaacctcttttcaacctcccccacgctgcgcgcacgccagagaggagccgccgttgcccgccgccgtgccgagcccgtttccccgtcgacgtcggagccccgccgtgccctctgccacggtgagctttgcctcgacgtccgcaactcgggacacgctccaatttctcctctccctccctgatttcctctgcccgcgctcacccgccgtcttccgcgcagccgccgttgtccgccaccgttaacccgagccgtcgtcgcgccttcaccgccaccaagaggtctctgggtacgccttgaggtaaggaacctcccctgccctctccttttccctcccttgctccctactgcgcctaatttctcgtcggagtcggttggcgccgccgccgagccatctcgccgtgggtcgccaccctctggtgcccctaccgcgatttagcccccgccagtaggttccccgcgccttccccaatctcccagaccatcccggtcgccccgagacccgcggagcccccgcgccccttgtctccggcgagctcccccgc

SEQ ID NO: 127373 - DNA, 435 bp, Zea Mays
gcaacactggatggtcctagtaataaaagaggtcttccatcttttcctggtccaccttctccacttggcgctgcaccttgtgtttctaaaatagttgatggtccaccttctccacttggagctgcaccttgtgtttctaaaacagtggatggtccaccttctccacttggcacacttgaagattggatgccactaactgacacaagtacaaggctactacaaaatataattgtaattagtaattatatgacgacatttgaagcaaaggagttgtaagtgaaatgtacctatcatatatagacttcgaagactaaatgtcggtctgtgaaggttcatttgcacccacatacttgcagctcctctgtttcctatttctttttttggtaccgtttagtgggcacttataacttgtttgtctgtgaccaagctctccac

SEQ ID NO: 127374 - DNA, 460 bp, Zea Mays
ggaaggttgggccttaaataggctgctactggaccgaaccaaagtggggaacaaccggagctaaggaagaaggtggtgggggaaggtgtggcaaccgcccctaaccgatcgaaagcatgagcatcaagataattgcacgataacgatctcatatcgtgattcattcattaggctagtactagtagctatgctatctcgtcctagctcgttcacgtgtgtgagcaggtctatcgatgtatatgtcactgttggtgggcccaccatgccagtccatttcatgatgtcatatggcccacggacacttgcctactcggtcgccggagaccagctgggcgtgtatgcacatgcagttgctgtcggctcgcctatatgaatatcgggcggcgggttggcatatgtgggctcaacttcagagtctatcagagaaccaagtctagggcccagcaatcattgaacccac

SEQ ID NO: 127375 - DNA, 492 bp, Zea Mays
tagggagagcgcacggaggctgacacctcacgctaacgtcgacagaaagaccttgaatgctacccgaccgcatcatgagggctaagcggcaggcgttccctagtccgtgtcgaactggaggcagtttgggctaagttgaggaggtgctcgatgtcgtcatgccacttcctcatggcgccaggggacacctcagagctcgagggattgaggagcaactccctagctgttgagagtgccccaccaggggcgccccgtgaggataatctagatgccagctccgacgggtgatgcgacgccatgggcgctacagtgcgtggagcgggcgaggagccgcttgcgatgcagatgacgccatcccctcccccatctggatgtcattggaggaggagacgagatgctcgatggtttgcaccatcatccgagcagagaaaaacagacgaagaaacctaagctaagtcccctacctggcacgccaaatgtcggagagctcca

SEQ ID NO: 127376 - DNA, 420 bp, Zea Mays
cgaagaatgattttgattaaaaggtcgaatcaccaacctggttctcttctcaggtccttgatttgacctttcacctccaaacccctttgattttccatgtcatgcatttttggcttccactgccagtgtcgtactgacagacttgctgtaggtgaggtccaagcatgttgccattttcccctgaagcctttcactgagccccctcataaaacaattccttttctttaagtcagtatccacctgatcaagggcatactgagagaggtggttgaatttgttgagatactgcatcactgtatctcctccttgcctcaaccggataaaatcttctagcttcatctagagtactccctctagatgctctcggaatgccaacttgaactcattctaggtaatctaatgcccaacaggctggattgt

SEQ ID NO: 127377 - DNA, 526 bp, Zea Mays
gctgtaaggtgcctgccaccttcaaatgactggccttgactctttggcaagtgtcgcattccgatatatacttagcaatctccctcttcattctggttcaccagtacaaggacctgagatcatgatacatcttgttactgcctgggtgcatggagaatttggaaaggtgagcttcatccattattttctttctgagctcggggttcttgggaacaaccaatcggtctccaaaccatagaattcctttgctgtcctgacgaaaacatttgtatttgtcctccttctgttcgatcatttccttaatgacttgaacacccttgtcaccaatctgtgccatgactatttgctcatgtaaggtgggctccactgaaatataacttaaagcaccagaggaaatgacttctatgttcagcttgcacaactcatcacacagagtggtgatttttgcatcaatattcacacagttgcactgggccttccgacttaaggcatctgccacaacattggctttgccaggatggtaatg

SEQ ID NO: 127378 - DNA, 499 bp, Zea Mays
agaagaattagcaagggtggataaaaatgatttaccgacatttgctgccttcgggtcatcaatttgcttctgaagagtagcaggatcccactacgataatgaggatatcactttggcacctgagccgcttgtgcctttggctggatggctacatggtccaaaacacattgcaaagcaaaaatcagaagatagaacatccatcaaaaaaatacaaagaaatgtgaaatccacaacaactacctgcaaattcatcaggaacaccagaagagccaaagctagtgcaaccaacacaccctcagagcagtaacatcagcagaagccataagggaagcagggacaagcgccgaaggctctgaatccccaaacgaagcatgtcacccattaggttcttacgcgttactcacccgttcaccactagggattccgacgttggccgaagttgttgcagcatcttcaggaacctaacccggggtagcctcttcaaccaagagggatggca

SEQ ID NO: 127379 - DNA, 846 bp, Zea Mays
atgtggagattgacaagttctttatcaaggagaagatagatagtggggttttaagattagagcacatcaattcttgtaatcaattagctgattgcctcacgaaaggtttaggcccaagtgagaacgagtcaatatgtaacaagatgggcatggttgatatcttttgcccatattgagggggagtgttgttgaaattagaacatttgtaagggtcctttgtgcaaagtgcatatataaagtgtgtgtgctccaaagtaaaagatgggcatgttagtagtgtttataataacccgattagcacttaaacagtttcctcgcggatgtacctaactgggcatttggtatcatgacattaaggtctaaggcaggctatatatatgttaaaccaacaaaggaagaagtatgataggttgtgatggtttatttgatgccaaaactaattgaagtattaaattccatgtgggcttgcacaaatatgaaccaagcagtcctaaactgttttggagcaatcctcatgtgattagtcgatctatcttaaaaataggctttatgatggtgatggcaatcttaaaaataggccttatggtggtgatggcatgacaccttatcatgttgagcactagtgtcacactgtcacctttgacgaaagaaggatgaggtgttcggaatgcacgtaccagatccaccaagccggatgtacaagacctctgaaaagctgttcttctccatgtcgatgagatccccgctccaaaccaaacaccttgatgtgtcacccacagcaccaatgctgcttaggttggcataggcgtatgccatacaggagcagtttctagtgcactcgtcagc

SEQ ID NO: 127380 - DNA, 741 bp, Zea Mays
ggccgccgcagccagcggtgctgctctcatcaatggctccgagcctcagacgcccatggccaccgcatcaccgatcgacgcgagatcgagtatttattttgtgtaaatataactcgtcccgagatagaaaaggagacaaagagacgctgtcgactgtcgtctgtattctgagaaagagagagaaaagagaccgacgaaacggaggagggagttttttttttctattatatcaagctggcttatctcgttcagtgtcctcaaatctaaattcactaaaatagtacttataagttaatctcttctctaaaataaaactaagtgtctttttattttcttttcttttcttatttttctcagcactgaatgactaaattgttcctagcagtttgggtttccagatcggtcaaggcgtgcgttgatgagtgaccgaagactatactagaaacatgctatgaacttcagacccggaagctcagagatgggataaaactctaactaacttcacagttcatatgcaggacagtgtctgcttacaaaaatatcacttgttgagatgcttagtcgatttgcaggctaactccctcgcttggatatcttgggcaacgctcagactcagtatacaatccacatcggccaaaatgattttaactcaaaccttggatctctcagtttcgaaagcgtcaagcaaagtctacattcaatcgttagccagatctcctagacaacactgctattctgaat

SEQ ID NO: 127381 - DNA, 1400 bp, Zea Mays
gccttacgggaagcgtagcgaatctgcttctcgtagcgcctcctcttccgcttctccttgtaccgcatcaccttcgcctcccggtccactgccgggtcggcgccgcttgcgctgccgttggccgccgcgtcggtgaacgtgctcccgcagaaggacatctgaaaaaggacgtacgtgtcgatccaacataataaggcaccgccgatgcatgtgtagggatcggatgtaaactccaacatgcatgttgttagccatgtaggggaagaaatgacgaactggactagctgacccacataacacttcaggaacccactacattcctagatgcatgtagcgccatcttaatttgatcataaataatggaataaaattacaaggacccagatccaattctctcacatggattcctgcttttgagatgagctatgggccatgacaacattcagtaagataacatcgcttctgtttagatgatataagttgtctaaatgcttatgtggaggaaagagaagagtagagacaggagaagcggatattagaacaaaaaaatttgtgaggtagaatcatgcattaatagtgaagagttaactattatataggttggctaaatagcaggctgcaatgatctttaccgtcagaagtcagctgtattattaaacttgctgttatattcggaaactggttacagtgtggcagcactcagtaagataacactactcaatccttttcagaaaaaaaaagagatgacagtactactcaacagaaatgatgagaagttgggatcaatattgtacgtagaacagaaccacatgaaatgagaattgagtagctgcctgttggccagggttatcttcacggcccgtcgtgagcacaatgatagacaaatagcggtagcaagggagaaaagaacgaaaattgtatttgccagtttttgtaattatcagcatgttgtcagaaagatagcgacactgaagggtaaaggaaaaagaaaaagaaaaaccttgtatttgggcaaggaccttgttccacttcatttgtgcatcattgtaaacccaatcaaaattccgtcatgttgtcatactagcttaattttagtgttctcactagccactgaacaaatgaagtataactgcaattaactgatgatgttctccgcgattgttccccttctatcttcttatactatactgtaaatgtaaattataatgtgtatgcatggctttgcaatttctgtaccttcttcttagtatagatagatgtatagatagatggtttgatagatatataggtagagctgtccgatctaataagcgttgatggcttgatgcagatcttatgattaccaggaatttcgttgatataaacaaagagctcgtttgtttgggattacatatagtttg

SEQ ID NO: 127382 - DNA, 666 bp, Zea Mays
atgaattttttaagttctctgctcatttaaaaagaataaacagaaatggttaaaggaaaaagactttgcatcggggtccctaggcttatttctctgacttagcacttaaccccctaggtttttatcccatctaacccgcgctcctccttcgcctgaacagtgaccgaagaagaaaaagcggtggtgcgacttaccggtgacggtagaggtccggcgaagagtcgagtgaggtctgggggtctctggcaatcacgtagaggtgcagatcgtccgcggtggtggtcggagatgggctggcttcgtgcgcaggtggttgggctcgccggtaatgcatgccccggcctgctcacggcggcagagtcaaattaaagtgctcggggagcttcagtgaaggtcaacggtgatgtgggtgcaaggaatcggaaaatgactcaccaagtgacccggtccacgcgcggtggcggtcggccgaagccctgtgaggtcgtgctagcttctccggtgaggcaaagcctcggctcaagcttgggaaagcttctccgcctctcagggaagctgtccaggggctagggtgaggctgggggtcgtcaggaagagctggccacggtggccgagcgctcaggtgacttggtgggcagcgcagagctcgctggagctaaggactgg

SEQ ID NO: 127383 - DNA, 417 bp, Zea Mays
cttgggtactttggtgacggtgttgggcgcattccgggcgctgaggagattcctgagcctgagggcgaattggttgtgttcgaggcattcttcatcgccggccttcacctaccggcacatcgtttcatggcggaggtcttgcagaggttcgacgtccaggtccaccagttgacacctaatgtcgtggttgccttggcgaagtatgtctaggcggtgacttcgtacgacggtcagccgtccgtggaggtcttctccaagaactattgtctgactggcaaaagaggaaaattggaaataagattgcatccatggatcgtgcaccttcacgccgaggactggaaagacttcggcggaagtcgtggaaatagtcccttacgctcggaacaagtggggcaactggtgagacttttggtttta

SEQ ID NO: 127384 - DNA, 292 bp, Zea Mays
cccatgttccatgtcttcctccaagaacgactgctcacggcggaaacaaaaacaaggcatcagaggaaccgtttccatttttagcaaatcgttcgttcgtgtcttcctctgcatcattcgttcacagaaactgcgggaggccccaaacaatgagcgagcattgaggatccatggaccagctccgccaggtgggcgaggccctcggcggcatccacacgctcatggccttcgccgacgatctccgcatcaacccgcgacaatgccgcctcctcgccgacgcctgcgcgatggc

SEQ ID NO: 127385 - DNA, 519 bp, Zea Mays
tctgttagaagggcatagtggtcaccccgagttaagtaagcgcgagcatgttgcaccgtcttaagtcgttgccgacttaagccgattgctccgttagaagggcatagtggtcaccccgagttaagtaagcgcgagcatgttgcaccgtcttaagtcgttgccgacttaagccgattgctccatttgcagggcatagtggtcaccccgagttaagtaagcgcgagcatgttgcaccgtcttaagtcgttgccgactttagccgattgctccgtttgcagggcatagtggtcaccccgagttaagtaagcgcgagcatgttgcaccatcttaagttgttgccaacttaagccgattgctccgttagaagggcatagtggtcaccccgagttaagtaagcgtgagcatgttgcactgtattaagtcgttgccgacttaagccgattgctccgttagcagggcatagtggtcaccccgagttaaataagaatgcaggtcgatcatgaacaaactgagtattct

SEQ ID NO: 127386 - DNA, 438 bp, Zea Mays
ctaagacggagggagcgtttgaagcaggcaaggctttgctggttcccgccggagccaggaacagcgaaggcctcaccgactaccaaagacctggcacacggagcacgaaggcttctgtcgccacccacgcgttgtcgaaacggcgggcccatttataaccgccctgggccgcctggtcccacttgtaagccgctatgtgggtagagttattggtatgaccgtccgtgttgtccctaatcacactataatgacctgtaataacccttgagaggggaatattccagggataacatagttcaccggggcataattgtatttgccaaggtgagatcgtcccctggttacctataaataccctcgcactgtatcctgttgcaagaggctgaaaaacattgtcgctctaatacacttttttgacaagcatcaaatcatcctcgt

SEQ ID NO: 127387 - DNA, 510 bp, Zea Mays
ctggacactgctggttctccggtggatcacttttcaattgtaaacactgaaccgtgatgggtttggacacctggagtgtaaaatcttggatgctggtgctgctagcagagaatatacaacacgcttcctacttttgatatcccaaaggccaaatcttgaatccagctactgaaaatctggggtcaaatcagattgtttccctgcagacacaaagtgtctgaaacctttgactgtttagtgttccaacaaggaggttaagtttggaaaaggcagcagcagcatgtatacgtaccatttccacccaccaggaagtacgttcccgctcctgtcgactgaaaaaggacctggtattgtgccgtttctggaccaccataaaagtcacctacggttagtaatttgcttccagcagcagatcgtgcatagtggggacattggaaaatactaatagcaatgacaagacagtttaagacacctaggattctaaagtacgaacactgttttagctattat

SEQ ID NO: 127388 - DNA, 556 bp, Zea Mays
gtactacagtggagcaggcactgggtgtggagatgcaacaccagtatagcatggagtcgcagaagtcttcgggtgttgattagcctcgtggccaggacgcgaggaggggcaacattggaggtctagcccacaagaggggcaagtctcagcatcaccgccaccatccctaccgtggcaaatcttctgactcgggtacttcaggaggaagtactcagaggtttcgggctgttcctaagcccgggctggggctggtgtgtttccgttatggtgatgcgcatcgccgtgcagagtgccagtggaatagcaggtgttcaatctgcagtcaagaccacaaggatgtggtgtgtaggaggaatcccaatgggaagctcagatgggagccagtgacttcctcctcttctcagggcactgtcaacatgatgtcaagcgctgagcagcaattttcagttccacttcctccgcagcagttttatgtgcatgggacttctcagttcgtgacgatgcagggttttcctcagtatctggctgcgcctactcctgcaccgactactcctat

SEQ ID NO: 127389 - DNA, 350 bp, Zea Mays
atttagacggtgcttgcagtgtccggtcccagtgtggtcccgcgatccagcaaggcgcgcggctacgccatttgtttggcacgaaagtttgtgcgagcttgacgtggggaggacggcagggatcagtgcaccgatgatccaacttgcggtgctctaataaatctctaatccgtcttgccgctggcttgtacagactttcgtcagcgattctgtgtcgcaaacgagaagctctcgtgttgtgaatctatatatgattggctcggttgcagtgtttttttccccaggggacctatctaagcaaggaataaaaacaccatagaatagctccttaccttaaggctgcaccataa

SEQ ID NO: 127390 - DNA, 510 bp, Zea Mays
tacatttgttgtaataaaggaatgagccccataccacctctgccttgtaccaaaaataaggaaataaagatatgtcgtgtttccttttccattacttgccccagtaagaatttgggagtgactgctatagtaagattgaagctggatagtagagcaacaactttcttaaagatggattaggaagtcgctgcatgaaaaattaagatccaggccttgcaagttgggctgtcaggctgactgaagaaccatcccatggtacagtaactgaaacagattacatgttcagcccccctcgccgccggtgacctttgcgccgtgatttgcgtcttcgctgcgattcgtgctctctggtaagtggataaccacgacgaagtaaagatcttggcaccagatccgctcaggctcggtcgcgaatgagtttcatcgtacccacttgctcgtcgtgcggccgggatagacctcgccgtcgttggccgctcaccgctgtgcgccacgtgctaaagcacttga

SEQ ID NO: 127391 - DNA, 574 bp, Zea Mays
ttcagagaaggagggggggggggggggctgtatatgccatcaccgcaccaaataccgaggacccgtttatggtctgtccaatttaccacatcgtcctagatgatataagaagcatttagatatggtcgtttacatgtagctttagaatttcctttaaccattttgacattttacattgcccaccaccatgcttattaaaacgacgtttaaacgtcgtttaaactataaaacgctgacagaaagtgaaacgacaaaacgttttacgattcgtcgtaaaacgtcgtttaaacgtcgcgttttgacgtttaaacgcggtatagagtgaaacgccgcgtttcgggcgtttaatgcgtctgctgctagaaattggcccagcccaattagaaactcccgcccaggccgccgctacaggccgcactatcaccagcccaattaggaactcgcgttctcaccagccgccgcactccagggcgcgctccagcctccaggccgccgctgccgctgctccaacactcctgcgccgcccgtccggcgccgccagccccgcctctgcgtgccgctgctccaggccgcc

SEQ ID NO: 127392 - DNA, 512 bp, Zea Mays
caggtatttcccgggtaatgcagcgaatttaccggggaaggcttctacaagatttggccaaagggcctccgggtaacggatcgggaaaatttcagttttatcgaagtttatcttcagccctgaacacccttcgaaagtctctagaatcgattttagcactttgagatctgctttatccgctctaatgaacacccctgcatcgtctgcgtatagggaacagcgaagttttgcccctcttggcaggacccgccccagtaacccagcctcggccgcccgctcgatcatcatctggagcggatccattgctaatatgaagagaaaaggtgaaaggggatccccctgtcgcacaccacgcctgtgaatgattttgtctgattgttgaccattgatgataactctggaggtagatgaaccaagaattgctgcgatccaattacgccaccgcaggggaaatccccgagcttttagcacatcaagaagataagcccaatttagggaatcgaaagctttgg

SEQ ID NO: 127393 - DNA, 502 bp, Zea Mays
gttgttggtcaagcaaaagcaagatacttcttggttacgtttcgactgaattcacgatgccgtgaggagggtgccagggattatattacgtactggatagggagtattttataataaatttgaagaggcaggtgcagagagcagagaggtagacgccagccgatgggggggccgcatgagcaactgggcgttgcagccatgtccatctgcacttctctgacttggagtggaggtggtggaaatttgtatcggtcagccggcaggtccaatggtgtgcagctcctgctcctctcaagaaaccacggatcaacagctttggtgttggagctgctgcttctgtttgcatgcaattactctactgcttctgtatccgtagacggtctccagcagccttctgctgccttcctagaaacggcaggaaaaacgaaatagtaagatgctagaacggaggtagtaagatgctagaggccgtactttctgcaactaccatgtctcctgaaat

SEQ ID NO: 127394 - DNA, 641 bp, Zea Mays
cgctcgcgctcttcaccaagagcagcgcgacgccgtcggccggaggcggatcaggggttcctgatcattaccaccacggcgtcaccatgggagggttcaacttcaacccgttcgatgatttcgacccaccgccgccggcggcggcagcggaaggtgagacggggagcggcggcggcggcagccatggtttcttctcctccttcgccaccggggacaagtacggccgccactagctagtacgtaacccatctctctcgtgctgtctggtaattcagctagcgtgtgcgtgcgtgtctgtgctcatgagagagtttgtgtggagaatggagagagagagattgagaaacacaagcaacaaattctacttcggccactgctgctatactgttttgcattataagtatttagcaagctgcataattgtgagttttccatttcttggttttgggatatggcgatgccttattatgtacatacataaatctgagttctctttgattaattccaagctcattttgtttggcgtccagatgttgacattttattggtacttccccgcattaaaaagctaaaattatgcataaatgaggttttaaaccataattgttggttttaaacctatattcatatccacttaacca

SEQ ID NO: 127395 - DNA, 483 bp, Zea Mays
cacccaccccgctagcacgctatgctgcgtgtgtgcgtgcctaccccttccgcgacggtcgtggcggcgtcgaagaatttgaacttgtcgcctacagggctccagaaaaccagacggcttgaccgcttcacctccatttccttcgtcccccccgagtcctactatatacgcgcggccgtgcgctcgatccatacctccttccaccgctgacgccttcctcgagcgttccatcccatcccctcacccgaatcccactcggctactccccacttccctttaagaacgcgcccctccccaccggaggttaccgcccacccatcaatccatcatccatcgctcggtaatcgatcgacccgaacaacgccggggtgctggtgtgagggtcaggatggtggtcggattccgccgcacgatctcgttcccggcgcccaggtccccggcgccgccagcggggcccagcgccgccaacaacaagtccgtcgc

SEQ ID NO: 127396 - DNA, 293 bp, Zea Mays
tggatctggtgcttccaccctgttgggtactgacacgtggtcaggtgggcccaagcactcatagacagatggagagcacgagagcgaaaagacggttggtgggaaatgtagcttctcgttatgcgtgtcctattccactacaggatgtgagtatttataggcccgtccgggggtaggtggtccaaagtacggtcctacccccgaccaccaactatatccgggaatatccaatctaacggagtaaatacaacactgcgcgtacagtaaacagtgcgcaccaaattacacacccg

SEQ ID NO: 127397 - DNA, 517 bp, Zea Mays
agagatacgccaggaaaggagggcgcagtagcaacaacaacaacaacaacagcaacatcagcaagcaccacttcctccgccaccaccaccagttccaccccgagataagcaccgggagttcatgagccataagccactgacatttgctagttctcctgatccactggacgcagatgattggctgaagtccgtagagaagatgttgaacattgctcagtgtactaacctggagaagcttttatatgcttctggacgtctgattggtcctactgctgattggtgggattcatacactgctgcccatgatgctacgaacactatcacatgggcggagttcacgacgcaattcaggaaccatcatataccagctggattgatgaagattaagaagaaagagtttttgtcgctgaagcggggaagcatgtcagtcagtgagtaccgcgacaagttcatccagctatccagatatgcacctgatgaagttttcgaaaatgagaggaaacaagagcattttatt

SEQ ID NO: 127398 - DNA, 520 bp, Zea Mays
ccactgggccagtgagagctacgtggttgacactatggtagtgatcctttttctgtcgtttggtgtcgaagtctacacttgatcccctagtaatcatgtggatgaccccgcggtagggctgctcggggaagtcctcttgcttgggtgctagcggcggagggttttgatgtggatgattttgatgatgcggtggaggagggaggacttggatctcttgatgataatggtacaagtgattgtgttggtgagggatctgctcgttgtggtatggttgctagtggtagtgctggggtgataagtatgtgcgacaacttgttggttgtcagcttgctgatttctatccatcctgtctttggtggccttggtttccaggcaatccctggtggggtgtgcgcattcttcgccatgaaacaggtagtaaaaccttcgcggctgctgggcccggcctctgcctcttcctatggtgttggtgccacagttttgttgtgtgaggtactcctgatgacgaactgtgtctctg

SEQ ID NO: 127399 - DNA, 444 bp, Zea Mays
tgaaggtatcgataggggttgcaaggcaccagctgattttaagtggcttgcctttatcctctaaaatgtgtcacattctgatacatattgggctatctcccttttcatcctggtccaccaatacaggggcttcagatcatggtacatcttggtgcttcccgggtgcatggagaatttggagagatgagcctcatccaagattctcttcttgaggtctctatttttaggaaccaccaatctgtcttcaaaccacaatatccccttgctgtcttggcgaaagcacttatacttctccactttttgattaagattctctttgatgatttgcacttcctcgtcaccgagttgggccataataatctggtctaacaaggttggctcgatggagatgtgagacaaggtaccagaaggaatcacttcgatcctcatcttactcaactcatc

SEQ ID NO: 127400 - DNA, 307 bp, Zea Mays
cgaatatgaagaaaaatataaaaataaatatggtttcagtgatatccatccgtattcaatccgattacactcctacatgtaaattcaatccggttacacccctacatgtaaccaggccaaaaacactggccgactccttacacccctacatgtaaattcaatccgattacaccctacatgtaaccaggccaaaaacactgcccgactcccactcaccaaacctttattaccctcgagcgccggctacaactctagactggataggtgatagtagccgaaaagatatgtcaacgaaatctaagcatac

SEQ ID NO: 127401 - DNA, 641 bp, Zea Mays
catcaatgttttttatatgatttggcaagaaatcattcatgctgcctgcttccctctcaagggatgtcttcacgcccccttcatcatgaagatgattgaagtggtgactcagtttcgctttgaaaaaggaacaagacatctctcgtacacccccttctggattgatccaaacaatccagcagggcgtctgaggaaagtcccctccagctctcgtggacctgctgctgccggcccctcgagcccctctcctggtcgcggatctcccacaccacgtggtcgaggtcgtggtcgcaggatgggtgctcgactggcccatggtattgtaacattcttttccatgtgcacgaacatatcttccgatgtgcatgagctggctaggcgtcagcgggagactgacgacaacctccgtcgtcaagcttcttccatgggtatgccatttgctccccgctcgcctgatgtgcctcttcatcctcctcctccagaaatcaatgaatggcaccagcaggcctatggggtgccctttatgtcagctgaagatgaagatgaagatgaatatgaagaatactttgatgatcgtgagcagtttgccccgcctccccaccagggggatctgggtcaatcctcttcgtatcctcctcccc

SEQ ID NO: 127402 - DNA, 540 bp, Zea Mays
gggagataattgtcagtgtttcgaccacagatccttaaccaaccagtaatgtgtcgcgtggccggctctagatggtgtgcgagatgacacaagcggttatcgtagttcgggcttctcgaggccctacttccagtggaggggatgaggattatattactcgcacagtggtgcttgtagtaggggtttgcaggcacaacgagagaggggaagtccccaagtccctagagatgattgaggcaagtgccaatatctaagacaaagtgagaaagcaagaactcgtcatgtgtgtatctccttctcaatggagggaccactgccctatttatacaccaaggggagcgtccgcagtgaagccgagtcttgtactcgaaggagagatgccctggcatctgacgtgacgacgaaccgtgcagtagattcatgcctgctaacttcccgcagagagctgaggctgagaccgaggggttattcgtacgcctaagccctagagggagaggtcgcgccatgtcgtagtggttgtaaacagacccagggtatggg

SEQ ID NO: 127403 - DNA, 363 bp, Zea Mays
cccaaatacgcaggaagtctgcaattgcaccaacagataaactccccggaatatcattaatccaaccattatcctcgatcgcctcctgaactgtccttttgttaatcagcttcttaggaatggtctcaaaaagtcgtggagcgatatccacaatccgctgcccacccaaccatcgatcactccagaaaagggtagaagctccacttccaatctcagaatacaaggccacttgtagaaactctcgaattattttcggggtatgcaaaggcagggatgcccagggccgacctggctcagttttttgcagccaagcccaacgcattttaagggcccaactcagttcagtgatgctgaaaataccca

SEQ ID NO: 127404 - DNA, 593 bp, Zea Mays
gttaaagagaagaaaaaaatacattagatttttagataatctttggattcttgatccatcccctcagccacttcagtagatatgctagattccggaacaatgctgttgactgttcgtgcttcggactgttgacttgcatcacgttgtggctgatcctaaaactacccttgatgtttctgattatatgacaaagttggagctgatgcgggtggttgaggcagggcccatctggccagagaatgacttgctgaagcaactaaagctgaaggctgctggtttggctattgattgcatacatactctggaatgtacggagaataatatgaagaagtatgaaggacctgtttcggctaattctgccttgcctgagcttcaacattttccttctgtttttggattgtaacgtgacaagttcttgttgtatggccttatcttctccacaaaatagacaggatagccttcttggctaagtgttgtatctccctctaaagcttcttcctcctcttcctcatcttggggctggcggtctaaaggaactctgttgtgtccctgttgattaggagtaactgtgctgcccttgagtatggctgttt

SEQ ID NO: 127405 - DNA, 564 bp, Zea Mays
gcccgatttccccctcctcatacagacggccagccaatcacagccgcaaacccgtggatctacggtgctcgtgtttcttccccgctcgaattcgggaacggcggcgccgcccgcgttgatttcaaatcccgacgagcaatttgtcccccaacaatacctaatcccggatttaatggagttctagcgcatgcggagatgaagacggtcaagggcagagggtacctcgatggcgcagctgatgccgtccacacgacccgcggatccgcagcggttgtagcacgacggtgagcaattcccccctcactgcacgacgattcccgccggcgaggccatggaacgcatccacgagacccagcgaaacccctgggcacgacccccaaggatgcgacggcgagaagcaagcaggattgcctacggcagtgactctctttacttggtcacaacttaatctcgcgcccctggttgactgtggctcacggatggctagagaagaggaggtgcgggagaattcggcccgcctttgtagctaggtagaggtggtctacgcgtggcgaagaatccgag

SEQ ID NO: 127406 - DNA, 341 bp, Zea Mays
aacaaggaggtacaccacacgaggcaatcaattgtgacacacaagaagatggtgacaccaatgaatgtgaagtttcaccggtcaatccaaatggcaagtgaccgccaaggttcaatcaaaacaaaggcaagaagcagaaaacagaaaatagggacaacactaatcatcgttcaataaacagttacatctatgtctgtttcaactaattcttatgctgcaaaaaagggaaaaatttccattgatgaagtgatgaaacatgtgcttgcttgtggtgccacctatggtagtaacgagcacttcattgcaactgaattatttgtcaaactgacccaaaaagagat

SEQ ID NO: 127407 - DNA, 375 bp, Zea Mays
ccgaacccttcctccctccgggcttcagcgcttcggtggtccttcaccgggaaattatggccaggtcagtttctcgccgtcttccgccattgcatgaggattgggctattatcaacattcaacctttacctgaccatgagattactttcccggtggtgagggatgtggttagagaataccttgtggaacaccgtcggcttggggtgcatgatatccagcggtcgcacctggggcaggttttggttcagtttagcagcattcttgaaagagacaaccttgttctgctcggtccgcaacagtatcttgatgcttccttcactgttcagcggcataatgatgcttggaaccatagagccctttattttaatcgggaat

SEQ ID NO: 127408 - DNA, 530 bp, Zea Mays
gcgacatttattccgccaagagacataccttttagcttgcacccttcatgtgatatatccaccaagaatattccctgcaagcgttttccgcggtgaaattttttcgtcgtagggacggggaactattccccggcggcgaggaattatccgttgtcatctctacccctttgtcttgcttcgtgctccagctagctcgatagcgtagtgctccctgctccggacccaagcacttggtcgcatcgatctcgatgcgttaccgtctggtggtgtccatcgtgtcggttccaccacggcactagcataaattccttgacaccaacagcgagcgacattctgctgcttgatccgccactgcgcctgcttcgtcgtcctcctcctcctcgatctggactccagggcaaggcgtgtgtacgtagcccgcctcctcgaccgtctttccacatacaaacataatgcgatggccgcgcatgttgccatcacccagacgctactagatttccagaaaccaactagtgatggctgctagctgc

SEQ ID NO: 127409 - DNA, 997 bp, Zea Mays
cactaggccacttggaccatcgaccagtaggggtggatttgggccccaggccacctgggccgtggctcgagacgcaacccaaaaatcttcttatatctaggataattttagcccaaataatctagtccacatgcacaatatccccttccactcccgattcgttctggcgcgtggtggtctcccgactcccccattggcccaatccctcatgccctgcctctacctccagtccatgtctcttccctcctagacctaggtgccagtggcggcgcctccgcactacggcctccagtctatgcctccacctccatgctccactgcacggatccggatccggcaacgacgacctccctgcggtcagcggtctgcgacctccattgattcgcaccacatcgttcgccccttcctagcagtgagcatacaaagcaagtgttctttaaaataatcttttatagagtggcccggggcatcaattttatggagctccgccactgtcgcccagggtatagcacatataatgatgtagagagtgttagagaggagagtctaggctagaggagcaggcgtagcacacgacaacgactgttggggggttctctttgatcgaaggttctcaagtcattaatttgtcaattttttttccaattctatttcaggtataatgaagggttgaccatgtacaccttcgatcggaaataatactcgagcagtgcaagcatgaaaacgaagctgagaagcttcagttccgtgttttggacacgcaacgaaggatcagtaagaggaagcgataagatcttagaggcttggacaacatgtctaatgatggaaaaaacttttatacccttaaaatatcttgtagtttgtgtgcataggactgagtgcatgattgtaatttttacaacactataaatagagatacaatgtcatgcacaggggacactttgtataagatcttcaaggcttcatgattctgtgaattctgtgatgtatatgtgat

SEQ ID NO: 127410 - DNA, 310 bp, Zea Mays
gaccattagaggattcctgcactatgtccttttgtttaaccaaatttgttcggaaattgaggtagtgcatttcgcctctctttctaatgttcaggaagactgcttcttgatagaccaagatctatgcctcttagctgttgggatttccgtgtgttccgttagctgttcattggctgagtttctgtttagaaaaaatggttttgggttgctttattgttcttctaggaatgactatgatctcgcccgacttgttcagtaataatttggttgccagcaaaactcacgccttcttcttttccataggaatatg

SEQ ID NO: 127411 - DNA, 1261 bp, Zea Mays
aatcagtaaatggttgataattaaggacattaaataaaataccagacttgtgtgtatttggggtattctttgggctgtataaagtttatagcatgcttccggtatatagaggtcgatgctaattcttagataaacaaataatagttgggaggcttagctggtagcatgctttttgtatgttgtacttgcacccgcccacaattctttctctcaccctcttctcttcatgcttcttttttggatctaccatttagtgcaagcgaacacccttaagggaaagtattgttgcttatatctcttttttctaaacttctttagtgctttccttttagtttgagtcctgcttgttcaaccacacaagatgagtaaactatgcgccagctcatgttcaggaaactaatctccatcaacaacttcctatccatcaacaacttcgtatccatcaacaacttcctcttacaatgtcactatcaaacattgtaatgtgcaaatcattgcgtgttacatgactcctaggcatttagaagaatgtgcaaatcaacgagtacgcccaacacaaagaggttctgcttattgttcagtcactggccatcttctatttgacaacaatttctggagtatgagagggcctgtttatttattagtcagctgaggatttcgatctaggcattttggaggtagaaaaaataggccaaataaaaaataggatgtgaattcaaataacctgtccttgtaaagtcctgatgaatattgatgaaaatgtatgtgaattgttgaacaattgcaacttgaacagttaaactataaatatgagacaataagatcagcaccttaacagtataatcactggaagctgtaatgacactgcaaaaaggaggaaggaaaagtaagcctttaatgcttttcaggattcagggtataaaactgactggaacatgaatgaatgcatgaatactgaaattctgaacctaatccaaaagaaataagaagagattgaaaaatgcagcctgcagtgtgttggagaaaccgacataattcatgatgggtgcattatataatttctggtgttgtatgttgcatgggaggactttttgtacaatacacttgtacctgtccccaattttctctttctcacccgcttctttttgtacaatacaatattctgatagtgaggactagacaagactccaagttacatgtttgctgctaaattctgagacctataaattgacagagtgattttgtttgttgctaaattctg

SEQ ID NO: 127412 - DNA, 650 bp, Zea Mays
gtgacatacgaccagtgctgcctctgctacttagggttagatgggtcgggaagaagcatattaggaagatgggatctcctaatatgttgtaacccggaaaaacctgtatgattaatgaaagatgaatggttatcttcttttggttcaaattggtcttgtgtcgctatcttctcataatgagtataacagtggcaaactcctatttttcagatcggagcaagaccctgccgtgggcaaaatgagcagggtccccccaccgcctctagctccaacaatgcaggagttaatggcccaccaaattaaattttgcggcagctggtgcaacgtcagctccacgcccaacaatttggtggagggcaacaacagcgctcgcaagcggaggctacctatcaagagtttctgagcacccaaccaccactgtttacaaaggcaaaagacccattggacgctgtagtatgtctcagggttgtggattcaaagttcccccttctcacgggagtttgccctgaccccgccaaggctcgcttcgtcgcacagcaattccggggacttgcaaaaacatgatgggatcatttccctgccatgctccccgccgatcacgtggtgacatgagaagaattcaagactgcattcaggggacatcacattcc

SEQ ID NO: 127413 - DNA, 880 bp, Zea Mays
gaaggagaagaatagggaactagagcaggtagagcaagtagagaggaagaagcgggcagattaagacggtatgccacttggccaacccgatcgagcacctggaatgggccaaagtatttgaagccaagcttatggtgggagcgggacatcgctgaagattgcacatatggctgtagcttaaggtaaacccagtcattgatctcaaaacagcgttcggaccggcgcttatctgcctggcgcttcattcttgtctgagcacgtaacaaatgctaacggacgagctcctgcattgctgaacgctcctgcaaccaagaggacaaggtagccggagtagtgtcatccactgtgatacccagagtacggggctagcgaccgtatagcacctcaaatggtgaccgacccaaagctgaatggaaactagtactgtaccaaaactcagcagcaggcaaccactctttccacttgcgagggcaggcgctagcgaaacagcgaaggaaggtctccaagcattggttcacgcgttccgtctgtccgtctgtttgtgggtggtaagaagagctgagctgaagctgagtgccagtcaatttaaagaggtgctgccacaacttactagtgaatactgggtcacgatctgaaatgatgactgcgggaagaccgtgtaatttgtacacattgtcgatgaacgagtgagccactgttgcagcagtatatggatgcagtaaaggaatgaagtgcccatatttagaaaacttatccactaccacgaaaatacagttggctgacccagaccgaggaagtccatcaatgaaatccatggaaattgtgtcccatgctgttttgggcactggtaggggttgaagtttgccgggatacgctgcac

SEQ ID NO: 127414 - DNA, 321 bp, Zea Mays
gtcgacgaggcacgggatgacctcaacccagcatcgagcacatcagcgcaaacctccatcacaccatcatccactggctccgataacaagtcctctggaaccatatcctcaagagtctgatcaaagttggctaaggacagttcttgcagactaatgagagcagacaaagcaggagagggaaccccactactttcaccgctggcgatgaactgtcgactatttttccgagtcaaaggaacttcatcttcctcctcctcgtcgtccacattggcaacacaagcagcacccccattgggatcagcaacagaagcagcaccccca

SEQ ID NO: 127415 - DNA, 881 bp, Zea Mays
ggacggaggagtcgtcggatgaggacttggattactttgcggccttggatgtggcagcggtggagtcttcgccgcgcgctgcgaatgctgaagttgtgcctggtccgagcgctgggcgcaggcggcgaagagcggttgcgaagcgtagagtgagtgaggtggacggcagtcggcttcgtgtggacggggctggcaagcaggagttgttgtcctcgccggccattgcgagtgtaggtgagggtgagttgcgaagtctttttgagggtgaggagcttaggataatgctatttaactatagggagatggggatcattccgaaggttgaaccgatgtaaggtgtgatgccctcgctgtacatatgtaattgtaatttgtatgatgaggttatgcgcctgcgctgtgcttgtaaaggagttgtgtgcttggtctagtatgtttattatgccggtccggtgcgcctgtggtcggtcctggcgcgggcagtttggtgtagggtttagcatgggtagacttttgtggaagacttcgaatttgcgcacttgttgtggtagtccggctgcacccttgggcgacttttgcacggatagtctttttgagaagacttcgcctttacgcacttgttgtactagtccggctgcacccttaggcgacttttgcacggatagtccttttgaggagacttcacatttacgtacttgttgtgctagtccggctgcacccttaggcgacttttgcacggatagtctttttgagaagacttcgaatttacgcacttgttgtgctggtccggctgcacccttgggcgacttttgcacgaatagtctttttgagaagagttcgaatttacacacttgttgtggtagtccggctgcacccttggg

SEQ ID NO: 127416 - DNA, 423 bp, Zea Mays
gatttgggtaataaatctgttctcgatgctttgggctttggctggaatatcaaccaaatctgatgttgaaaaaattgaaagttggcttattaatagttttggcatggttgcatccggccttcataaatgccgcagctttgcagcgtgaagcgaccagggcacagaagtcttcgtgcccggttataacttcatcaagggcttcaacttcattttcaatatgttcgaaggccccggggatatcttcgactgaaggaataatctcttcagaagcagctccaaccgagttaaatactcacttcagccgattaatgcaccgagtggcaaagtcggagcacttgttccgaagggtctcaatagcttcatgcagctttgtatttctttcagcttcagcttcgaccttcgtatttcatgcgtctgcgaggg

SEQ ID NO: 127417 - DNA, 616 bp, Zea Mays
aaattaattaatccttttagttagaaggataaaacttctttgttttaaaccatagagtcagttcaagcctcatttttcctttgcacgaaatatgattctgaagggatatatagatgtgcatgttgctaaaaaggtggaaggtaacataaaataacagtatgcttgctgattggagagaagggattcattttgttcacagaataattgtttggcttctataattcctctggtgtcttaaactaggttaatgtattgtattgttgtagggttataggaggctgagtcactgtgagagcaactccatcatggccccaacttgagccctcatagctaaatataggtgcccagaccaaaaacacaactccagcatggcccttactagagccctcaaatttgggtggccacccaaatcctccctctagcactcaaacgatggttcaaggcttgaagccaacaccttctcaacccgccccatcatcctcgttgaaggcctcttcgatctcctcgtcggccaactcaacgcccggcgcaacggcaatgaggtaggcgatagctggcgtggaggagtggcacgacgcgagttgatgaagagaggagcggcacgggtgggtggggg

SEQ ID NO: 127418 - DNA, 510 bp, Zea Mays
gccgcgtgttcttctttaaaaactggacgacgcccgagtgcctggctgaggcggacgatcaccggcgcttggtgtgatggccctaccggtgtacccccgtcggcgagagttggtctgcaagctaggtggttagtcggagaaccagtttcagggcgtgagaggcaacaggatggcctacaacggcatgcagcagagagcggaaacacatctacgtacccagcaccatcgcagcacgtggaagtagttgagagatgctgctgctagcatttggatccatacctcgaggtggaacgtgttgaagaatcccagtcacaacagacttggccgcgatgcttaatcgacgacgaggctggccatcgacacagtgaagttccccacgagacgcgaactctgacgaactttccttcgaactccaagcactaccttcgctctattagcccatggttcgcttcggcgtgcactgcagcccttcctaggagaattccagggccgggtggtggcgtgtcgtag

SEQ ID NO: 127419 - DNA, 517 bp, Zea Mays
ggcgggttgtagtagaccatcccctgaagactatgatcgtgttgtggatgatgtgccaaatgtgcctgatgctcaatctggccccaatttgaccccattaagtcagccaggagatgattgtgggactcatgacctacaaacagattctcctgcgggtatcccttttggcacaaaccacttgtagtaagtttcattggcatcacatgtccattttgtagcatgagtactttgctcatttcagtgacgtgaatttatttttgtacatcggtgcatgttgcaggagagaccccctgctcttgtggttgattctacgactgtggcacgtggctgcttcatagatggatttaccttgacaccaaagaccaatagattgaataaaataagtgagacaaaaaaataaaagaaattaccttaacaccggtaagggatgttggtcgtagtgaagaggagtaaaccgatatggaggggatagaattgacgtcgtattatataggcatacgaggatcgacgccaagat

SEQ ID NO: 127420 - DNA, 429 bp, Zea Mays
atttcaaaattttcaaaaatattgtaaaaattacagtgggtgaatattgggctctgaagtctgtcctaaaattttgagttcaaaaacaaacagaacatgccctggacaaaaataacaaaagttggggtagaggggttactttgcactacaacccttatctagttgtgggttctatactaagggttatttttgctagtatatatgggtcataacatgctcctgtgccaaaaatcatagagggttacttagtggatttttagttatgattttctaaggtttaatgccaaaaagacagttataactaacttactaattgaaaaatgtcaaccaacagaactttcatttttcctaggttcttcttagcaaaagaatagtcattcctaaggtaggggtgttttctccttaggattattttcttaggacttttta

SEQ ID NO: 127421 - DNA, 442 bp, Zea Mays
aagagatgtcctgaagtcatcaaggattcttccagacgtgctaaaaactgattctgaagcaacagttgacaccggaattggtagcacatcacgagccaagtgtgctaataccgggaatcttgaggaattcaccttccaccatcctaaaatatcaaacttattatcttctggttcagtatcttcatcaaggtatttttcaagttcagatttgttgttgccaccgccatagttgtgttgttttagtttttgtgcaattaaggacttcatccttccgcctttggactgtcttgcttcttgagaatcattggctggtgttgttgcatcaggtggagcataaagtctcctatattcttcaaacaattgtcgaacacatagtttaacagcagcccaaaccttatgtccattttcctcactaaacatctcttcaatcgctagctttgtg

SEQ ID NO: 127422 - DNA, 421 bp, Zea Mays
gacgattgcttgtcgaatcacttccttcaactcgcctctgcagcggccttgccggtgccggtgccggtgccagttgccactgccaggctgcccgccgccaccacctctcctctccattccataaaacagaaacatgaatgggagcagagcaatagatgaggagtacaatatggtcaattaaagggtgcaagtactcctcgacagtgcagcatttaagaaaacaaattgacctccatagctcccgctcgccatttccccccactataaatactcgctgccatgccatctcttcttccacaccacagtccacaggcaccagcaccaccagtcaccactcctccggctccgagctgaggaagggaagggaagtcagagccgcagctgcagaccgtcgtcaccgagacgagacagtaagcgctct

SEQ ID NO: 127423 - DNA, 718 bp, Zea Mays
cgccactgtgttaaaacgtccgggtcgatattcaacggaaaaatcaaacccgaacagtttactaatctagtggtgctgtggaacaattgagaggcgctggtccaacatgaacttgaggatgaaatggtctgttcgaaccagaaaacgacgaccccataagtacggcctccagtgacgtactgcttgcaccagaccgatgagctcgcgttcataagcaacgagcttcaagtgccatgtggcgaacggtctactgaagaaggcaattgggccgttgtcttgatgtagcactaccccaaaccctgaaccggatgcgtcacaatccatgatgaatgatttggtgaactccggaaggtgcaaaaccggtgctgtagacagtgcctccttgagtgctgtaaaggttgtggctgcttctgctgaccatgcaaaactgtcttttttgaggagtttggttaggggagctgcaattgtgccaaagtccttaataaatttgcggtaatagctcgcaattcccagaaatcctcgcagcccatgagctgatttaggtgttggtcaggcggtgattgcttcgactttgtcactgttcatagagacccctgactctgagatgacatgtcccaggtatacaatagaagtggctccaaagctgcatttagatttcttgacaaataaactgttggtgcgaagtaaagtcatcactgctctgacatgttgaaggtgg

SEQ ID NO: 127424 - DNA, 557 bp, Zea Mays
tcattgactattacttcacctcatccttgattctgcttcaaaatattagtcacctcgactaattctatggtctgctcctatatgcctctcgccaaaattattttattctggtatggtttatacttctctcaatctattagatctgatctcactcttgtgcttgcgatatctttgtagatgccccttaccatgaccttctagtctcttgggattctttcctcttccatcattaagttgctaccatttgacaatcattattcccttggtattgacatgttgcatcttttggattcttccatacccttatcccttaattcaaacacttaaccctaaaaactctattgcctagttaaacatttcagtttatgtgtccatgaccttcctgtcttttgagatcctttcctattctattgttaagtcgctatcttttgacaatttgtactctcttcgtcttggtatgctcgtaccattggaatcttgcatactcttatttttatatgtgcttacctttatatctcaatatctgtttaagacatttcagttaacgtgcccttgac

SEQ ID NO: 127425 - DNA, 384 bp, Zea Mays
ccaccatcctctaacagaagcctagcaaaagaaaatttcggcagcacctcccctgcacggggaggtttcgaaatcctgcaaataaaactatcagcacgatggctgacatccacacataattcaacatcacgatggccgacaatcaacaatactacatattaacctaatcatacacgtacataaatttaacacaacaagactacatattaacctaatcatacacgtatataattaactcaatattaaacctaatcatttcatataaatcatacacatagaacacaaagctttttaattacaatatcacaaaacgaaagcaagcaatcaccttgcaggttcggtcgcggacgagacggtgggtcgtgtgggtttgaggtcggccgc

SEQ ID NO: 127426 - DNA, 365 bp, Zea Mays
ggaaaatggcaacatgcatggatcttacttacagtagggctgtcagtacaacactggtagtggaagccaaaaatgccaggcatggaaaatcaaaggggtttggaggtgaaaagtcaaatcaagggcctaagaagagaaccaggttgatgatctgaccttttaatcagaatcgttcttcgcctcgcccaccttcctatccctttaagcagcctgtttttatttgtcccactactgcccccgctcctagcaatcagtcgagtgcccctggtactcatttccctgctctccctagttcttctactggttgcttcaactgtggaaagtccggacactttatcaaggactacccatacctgaagaaaaat

SEQ ID NO: 127427 - DNA, 404 bp, Zea Mays
cgggcggttccaccacatggccatgtgtgggcgatgagcttggtgaattgcgaagggttgcctaagcgaggagagaacttttggcatgcctcgcatgacttggtgactcagttggtcgtgcaaattatcgcgggccagtaaaatccctgacgaatcaccttggctgcgagggccctaggtcctgagtgtgagccgctgattccacctggatttcgcagaggatttctaggccttcagtttcggttatgcatttcagcataggctggctgatgctctttttgtacagctgaccctcgactattgcgaaatccctgctcctatgtttcagtcatttggcctcattgcgatcggctggatggtagtggccgtgcaggtatagtgttattggggcccgccagtcttca

SEQ ID NO: 127428 - DNA, 495 bp, Zea Mays
ggagcagtcgcacgagccgccctacgccaatgcccagtgtcgagctcggatctctgttcttcccttctcgccaggtgaggctcccaatgactcagtgcagcttcgaattggtggacggaggggagggggtcgcagtgctacgacttttatgcaccacagcgaagtccgactgagggcgatgttgccagaattttcgggcggaacatgccgaccaatacgcaccataatcagaacagaggttggtgggatctggaggggataaatacgacagcttgggcccatgaatcagtgagcagaggtgaatgacacaggacccgcgcggtcagtcagtggagagctgcgaggacgtgaggtgcgcgcggcgaggtcagctgacggcaggggccccctgatcagtgagaccgcgcgcaggtggtctggccgaggcaacatgcgaagtgggccgttttcaggcgatttggcccaagagcgcataatttctttttttatttttgt

SEQ ID NO: 127429 - DNA, 520 bp, Zea Mays
aaactctgcctcgctcgagctcaacttcggccaactgccccagcaacaactccccacgaatctcgcaggaggacacttcaacaattgtgctacctcctccctgtacggctgcatgccccgaggcaggctcgaccaaggccttaggaggaacctccgcctcacccgagctttgtgtcggcctaaataacattgcccaaaggacgtcacctactccttcgtgaaggctgccaacaatcggatggctacatatccacgtcaagtctgctttacgccatacatgacagattattatgcactttttcaccatgcttactgtcggtaccctgaatcagtggtaccctctactacagtataaagacgctgtacacgtacgacgtctcctggccgcacgaagaatggcacccgaccccaccacatgggcaggtctaggggcgccgcatgacaaaggaagatgatgcaccctaggatgcatcattgggtccggacctccacggatgaataccggacccttgtacgcaca

SEQ ID NO: 127430 - DNA, 702 bp, Zea Mays
ctcctcaacctttgagtttcttcctaataccagaccatcgctcccacctagatagtagcccaccgctcgaactccctccacaacttcttctcgctcgttgctcctttctcccacgatcgatcgtcatttcgcctctctcatggtagcgccttccatctccctcctctcactctttactagctcacctaacatccctcaacaaccccaatgccggacgatgcatcaccgtagcacttctagcatcgatggtgacacataatggtgtcgacgtcgacgccaagacgcaacaaccccactggccatggcatagcacagcatccctagcggattggcacatcaactctagcatagcaccaacccaatgggctatcgtgcccattgtgccagcataacacgactactgcccaagagtgtcgtgtttgggtcatgacctagacaaggtgacacgatatgatagcactgtcatgtctgatagcggtgtgacccattgtgccatgctccatcttacttgggctggactagtgtcgtgtcgtgtcatgtgtccatctatatctactaggaaggtgctcaaattacaaagccagtgtatattcggtcctatagacaagttgagaaggggattgagagggaaacacatgtaccattgtgttgtgatgaaccttagcctcacacgagtgttatgttagtaggctaccttttgga

SEQ ID NO: 127431 - DNA, 619 bp, Zea Mays
actgagggtatcctggagtataccaccttttccggccacgtggcagccccggagctgcccatgcgaaaaggttgggtgttgttttcccgcgcaactagggatagttgcgcgggcaccgtgtctttaatgctgtagtaaggggtacccctgattcagggtaccgacagtggcccccggacccgcctcaggggagggtacaagcctacagttggggccaaagcttgatcggcgattggcgcgccgcttccgtgcgcttgctgacataattattgtcagtccgccttcagtcacgtcaaccaccatgcctattcccgcggctaactggcccgtgacctccgcactcgatggttttactgggccacgcgcggggtgcctcggtaccgctgcgttgattttgaaatttcacctttactgtcttctacggcagccccaaggaggcgcggtattggtgcgagcggtggttcgacttctctgtacgcagggaccggcgcccaaggaggatgactcgtgggcctaggcccccgtgccagagactgggctgtcggtttcggcgggggcgaagaggcgcactaccgcaggcagtggcgcgctcttcacgcgtcggttctccttctccgca

SEQ ID NO: 127432 - DNA, 434 bp, Zea Mays
ttggcagcttcagcaattttcttcataggagcagggctcaaggcctttgtagtctccatcacaacatccagcacgttggccatcctcctcctcttgggagtcgcggcagaagccttttgcaccttaggcagttttgcctctgttggagggctcagaatttctggcattttcattatttcttcaacctttggctcttcagccttatcaactttagcttcgactcgactgtaggcgtcttcagcattacagttggttcttcaaagttctatgtaattgaagcagcttgtcttgcttcagcagttgaagaggctccttcggcaaatttaggcaccacagccggttcaatataacgcggccggtgggtcagaaccttcacctttttgcccttcggcacaactgtggtggccgaagcggcaatcttcctcttttttcct

SEQ ID NO: 127433 - DNA, 495 bp, Zea Mays
catatgcaactcggttccccgtgctagctggccgaggttgaattcagagtggtggctgccgaaatcagcactagagattggtataagagtacttggcaaacaagactttttcaacctctagcggctagggaatgctaaagaagaaagaagggggaaagaaatatgagcttgtttggctcccctatcattttaaatttgagaaacaattcaagaaaccgtgcactgaatggctagagatgatcgaaactatgtgcaacgaaattcttggcaattacacaaagaaagaggatcaattaatgactgccgcctttggcacccgacgaaacgaaggctgaatcgagtaatggatgcactgaactttgaatatccagattatgacaggcttgacaaaggggctgagggaacaaagaggaaaagagttgttagcattcttagcagagaagctgactggtccgtgaaagcagatgaaaaggctctgaagaatgtgaaagtggc

SEQ ID NO: 127434 - DNA, 714 bp, Zea Mays
ttaacccggacccggttatgtacactgctatgctgacaaccgttggatcccagatccgcggtccacggcgcacgatgcccttcactccctctcggccacacgatttcctttcaacgcgctagattcaatacgacgaaggggtatctctcttctaatctggagccttcatttcggatccgatggctgaccccgcatccatcccaattcccccacccgagtcgcactgaggcgagcagagcacggcggcgaccatcgccggcgtacagccacccggagtcatcgcagctcgattcgatgcaggtatgggggaaacacctagtgcatgccatggcaaatgatggatatgggttcttaccggctaacaggcagaagaaatgaggtgaccgcgcaaccagcggcgtagcagcgatgtcacttgacgacgagcaatcgtcggtgctccgcgatccaatcgtgtagggtgagaccacgggcgactcccagagaacgagtcgaatcccccacacccaagggtgagaccctaccgaaagcatatgcccggttcgacgatggcggtgtcctccactgtacctcggcgagctccacgtccggcgctacggtggggttgagaggaaaagaccagagcgcgagatcagggaaaagggtaggcgctggagggaaggcttaatactgcgcgtggttgagatcgtggtgaaagagccacggtggttgccg

SEQ ID NO: 127435 - DNA, 307 bp, Zea Mays
gacagttttatggcaaacgtaaaaattgtattcatcatcgtaaaaatcgtcacttgaatacataaatagtgtaaatagcaggtataaaacataatcatcgatgacataaacatggatccgatagttcgttgccggaggacgattccgaggttgtgagatcaaaggatgcctcagaggccatcagatcgaaggtggtcgtcgtcgtcggaggccctccgatgcgctgcatcgaaggagattgttgtcttcagatgccaccacagatggtcaccgcagccatcactgcttgtgcctcgaaacatcgttg

SEQ ID NO: 127436 - DNA, 1100 bp, Zea Mays
gggggcgcgagtttggagatgcgccgtgggaggaagaccgactacctcgacatcccactcaaggatagcatcaaaggatggtgcctggaatggtttatcatggagaatcacgggaattccctcccctcacgatcagggagacatccagatgttcgcactccgagctggaccaaatcccccacagacctggaggtggctgaggtaggggctctacttgctgaggttggattgttgaaagagaggggtctgactgcagaagctgtggtcgccgatttcattttcaagaacattcagccactaaaagacagagcatacctggcttatctgtatcggggcctcgctgattcgacccgagttaccaacagaagaattcctgctgtggatttggtcagccggctcgagatgatactcagacgcaaggtgtcgaacatcggtgctcctgttgcatactcagcctggaatctgcctccttccaaggcttttaccagttttgtgtcaaatcctcctgctggtgatagcggtttgggccttagagtgcgaccctcccccgaagaggttagtgctttggttgcctcacttggtgaaatacctgatgacgagaggcaggttcattttgaggtacctttgaatccaagtgatgcagagataagtgccatgttggatatgttggctgaagattcctctgatgcagcccctgctgaaacactggctgtagcacccatcccagaggctggcaaagctttggatattcagaagtctgatagtgttcgcccgaagcgtcgtcgccgagccactcaaccaacttctcctgctgaggggaagaaaaagaaaaagagacgtcttcaccgagtgtcgtgcttggatcaggatgccggtccttctgctcctgctgctgaggaagtgccagtgccagtttttgctgaagctgatcccaatgggtgtgacccgactgacgctgatcccaatgggtgtgaccttgatgatgctgatcccaataggtgtaatctggccacagctgatcccaatgggtgtaccatccgcattattgatgaagatgaggaagaggagaatgaagtccctctaattcggaagaacagccg

SEQ ID NO: 127437 - DNA, 771 bp, Zea Mays
atcaacacacgtgaatccttaaccccttcccatctagaccgtccacgccgagatcaacggcccccgagcatcttctccccaaccctaatcctagccgcccaaagcagatctaacgaccatgaacctttctcccctttcccagcagtaagcggtggtgcgcaccggtgctgcggtggtgttgctcaccggcgaacatccaaccccgcaccccggtacccaaaccaaccactagcgtgcaatacaatgacaggagaaaggcaaacagcatgggctacttactggagttgatagcgaacaaagcgctgttggcgacgttgtacagtggcccaatggcgagattctcgccccggcgaggaattcgtccctccagacaaccccgcatcaccccacagggcctgggtatgatccctgttggccggtgaagcgccatagctatccccggtgcccaattggccacataggcgagaatccatggtggaggaagagggcatggtctccctcccgtgacgaggtcgatttctccccggatctcgtcgatgttatgcggtggtggtctagccctagtctctggctgaaggaggacgccagcaactgacttatagggcgacgagtgaactacgagctggtcgcagtcaggcacgcgagctcccagcggaagcggcctttggttacggggatgaggaacatctacagggtcccatggcccacgagtcagcattacacggcacgaggggcagtggctgacgccaataggtgtagaggttgttatgc

SEQ ID NO: 127438 - DNA, 483 bp, Zea Mays
tagagatgatagaatggtataagagcaaggataaaaatgttgcacatttgctccgtactaatcaaatgacttcaccgtcaattcaaaaagacttgtgcaaagcttgtgttgatttgaccagcaaagctattattgaagatattggagatagaaacttttcagttcttgttgatgagacccgagatgcatctataaaggaacaaatggctgttatattgaggtatgttaatgcatgaggtcaaattattgaaagatttcttggtattgaagaggttgctgacacgacctcgtattctctaaagcaagctttggattctatgcttgtttttcatgggttgtcaatatccagattgcgtggacaagggtatgatgggacatcaaatatgaggggagaatttcatggacttcaaagaagaatattagatgagaacccatatgctttttacatacattgttttgcccatcaatcacaactagttgttg

SEQ ID NO: 127439 - DNA, 595 bp, Zea Mays
ctgaaggattgcatccagagcagggtcaaccgcaggaggaggagcagggacagcacgggaactccgggcctcatgatcatgtgagcgtggaggcacaggaggcggagatggaatcccaaaatcatcatcctcatcatcaggaactgctgtgccctgaatctcgaactgatggaaagttgtatcctctgcctgaatgtctgtcactggatcaggtactgacactgggtcctcaggggctggacaataggagctaaagtggacgcgagaggacttaagagtgccctggaactgcggtggctggattagctgtgcgaaaatgtagcagagataatgtgcatatggcagctgtcgccgggcacgcagaccatccaatactgtgtcctcgatctcacatataaggaagtcaacaacattaaactcggaatgagagatcagggcaccaagaagccaaagctggatatgagtggtagcctctctataacccatccagggcagtagcgtccgtctcatgagctgatataaatacttggtcgctggagtgaaatctgtcggtgagcgtcgcgacccatctgagaagggcagtcggaacagggcc

SEQ ID NO: 127440 - DNA, 483 bp, Zea Mays
tgaaaaaaaatccagattatatataatggtcaagctatgatccaaagaggccttcatgcatactagtaaaccatccgacccttcgtattaatagatagatagatagatactgtatgaatcatccatgggactagtcaatatatatgatccacaacaaaagctcatccgtcatgtggggatcgagaccaattaattaaaaggtggttgatacattcttttcatctccttttctttcatcaatcatgtgatgttgcctgtgcctacaggggagggaattgcaacttgcaagtcatctatatgaacatggagtagcggtagttgttgatgcatcatccatccacccttttggtgcatgccctatcgtttttccctccatgatacgaatataatacgatactgtacaagaataaagctttgcattgaaggtaaaaactgccattgtatattcttttttctttctttcttctattttgtttttgcctg

SEQ ID NO: 127441 - DNA, 563 bp, Zea Mays
caaggatctttactggcttctcacggtactgaagatctttctgaatctgcactgcctcttcttcgatgtgactttctggtgcttgtaggcatttgcggagctaggatatgtgaaacacattgtggatgtcagacatggattctggtagttcaagacggtatgctgcgggtcctactctgccgatgatggtatagggaccgacgaatcgcggtgctagctttccttttacttggaaccttctgacaccacgcatcagggagaccttgaggtagacgaagtctccttcctcaaatctgagttctctccgcctattgtccgcataactcttttgccgactctgagcttcaagtaatctcctgcggatcagggcaactttctcctcagcctctttgacaaaggcaggtccttctagtgccttttaccctacgttggaccacatgagaggggtctggcatttttgtccatataatgcttcgaacggtgacatcttgatgctggcctgatagctgttattatatgagaactccgcatagggcaaactggattcccaacttctatcgaat

SEQ ID NO: 127442 - DNA, 487 bp, Zea Mays
gggttgaggtgtctgtccctcacttctaaaactaggcataacctagagaaagcactaatacaatggtgtaacaaacataatcacttcacaaaccacctacgctaaacatagagtgagtctttaagcatttgggtgtctagagctcaaggattggagtctcaactcccattccatgtttcttagcacatacacttgataaatggtcggttggggtggaatttatagcccccatatccaaaattcgttgggaaaaagcatagttttctgcgtagcaccgggcatggtggcacaccagacacgtctagtaagttcgatgtcagctagccattgcgaactagacgttgtcgatcattgaagcctaggtatctggtgctaacaccggtgtcacaaccgacatctctagctcagttgcatttgcaacctttgtaagtaccatatacaggtgcgggattcaatgagctaccagacatgtctaatgcattatggc

SEQ ID NO: 127443 - DNA, 865 bp, Zea Mays
aggtgcactgaatgagctctcccatggtacagtgcctgaaccagattagactgccagcgtggagctctcaccgccgatgactccctccgccgcaattcgtgccaccggcgtcgggattcgtgcctgagtggatggatagcgccgcggggtaaaagatcttcaccgccggtgtgctggacgccactccgatgactcaccgccgtacccccctactttgcggctggagcagataggctcgccggtgaaccgccgcctctcggccttgcgccacgtatccgaacacctctgtcgcgtcgccgtgactctttacagccgtcaaatcgtcgccggtgagctcaccacgactgaggacacgaacccactgcgccatgatccttccctgtttccggccgccagctctgcccggccaaattgagcgccaccgtcaaagccctctataaattgatggccggtgcagctgcgctatgtcatcgtgaagccatagcacccgctcccacccttaatcattcacccgagcccgtgaatttcgaacttcccccaaattcgatccctgcccccgtgaaggtcacctcgccgcggctagctcgattcaggttagctcgagtccctctgatgcttgttctagcatccctaagcttccctcaaactcatcgaccctttagattgaactaaatcaccatagatcactgggaacaccttcatctgtccgcaacactctcggtcaaagtggccagagcaaaccaattggccatagatgaaattgtgttgggggaaatggtcggggtaggtccaagttcgtgtccgccgctcggggccgccagtcttgtctctctccggccggtacaggtgctcgccggagttccac

SEQ ID NO: 127444 - DNA, 356 bp, Zea Mays
atacaatagaaactatttgtctgaaaataattatatgtgtgctacatatctaaaaacatttttcttatgtaggataaaagaatagttttaccgcatgtcatgctgggtttttgtttgtgcacttgattttgcaaccttaactgggattcaaatttgtcatttgaatgaaaataagctagaaaaaatcaaaacagaaaataagaaggggaggctggggcgaacgtcctgcgggcgttggtttgcagatcaacggctgtgattagtttgcgagtaccggttcgcttgcatcgatccggtccatccatttccgatctggcgcataggattccatcggagtatattagatcaggcccgtc

SEQ ID NO: 127445 - DNA, 451 bp, Zea Mays
attcacaatccagtcttggctcagaggaggttcatactttaggtgttccaagtatttttttagcagtgttatgttgatgatgcaaattgcccaggattgtattacttatacacgacaacatacttctgtatttttattaggtaattaaggctaaaaaaagaaggctgggtcgtgcgcaaaagataataggagattattgcctcttgcctggatcacctgtggacgccaatgcacattataccactgctatagagcttgcaagattgactggtgatgttttctggcacgctggagcccttgagggtagtgtctgtgcattagtggtaagcttttacataaagtcattctggttgttaaagttcaactatattcatcttgataagccacattccacatatcaatacttcatttgaaaatgtctccatttatatctaaatttcacttggcatga

SEQ ID NO: 127446 - DNA, 428 bp, Zea Mays
atggtctcatcctcaaccctgatatctgatactagagctggcgctggacctatgtccttaggagctaggcgatagaagccgaacagaagttgagaggcctcgagggtagcctggaactgaggaggctggattagctacacaaatatgtgacagaggtagtgggcatacggtagctgacagcgagcacagagaccatccaacattgtatcctcaacctcacaaatcaaaaagtcgacaacatcaaactccgagtgtgaaatcaaggcaccaaatagccagagctgaatatgcgtggtggcctccctatatcccatcatgggtagcaaagtctgcctcatcagctcatagaggaacttcgctgctggagtgaagtcggtaggagaacgtcgcgacccatctatgaatggaggtctgaacagtgcagcgac

SEQ ID NO: 127447 - DNA, 737 bp, Zea Mays
ctgggacgcacgggatcatcacaacctccacttcattcaaggtcgcggacacctgcgagcaagctaattgcgagctcgcctcagcaatggccgagctcccgaggaccacccctcaggacgctgccagcacacccgacgttggcttcgacaccctcaagtccgccgagggcgaggaggacgccccgactagcgctgccgacatcttgaagtgtgcgtggatcggtgcaacatcccccaacgaatagacaggagcaaaggcaacagcaaggaggtcgcataggcccttagtaggcagggtttgtaagaaaatgactccacctagtgcgagttgcgaatcatgtatttactaaggaaaaatcaatgagaatcgggggatgcacgttaacaactccacctagtgtgaccccatcgaccagtccggtgcgaacacctcccttcccaactccactctcgataacagaacttgacgaccaaatcgccagggcaaccagatccccatgttcccctcgggggggaggagtgtgtaccattccaccttttcaagtaacacacatcccctcgccacaggccatcccaagaagaacccataccctagaaggcctcaatggccatgactctggtagaccgagatgaccgataacaagggttagagcctaaggaaagaagaatggcgcagagtttaaaaggaaaacaatattacacataacaacattcgatcattcaagagttctttataa

SEQ ID NO: 127448 - DNA, 385 bp, Zea Mays
tttgagttctttgcgagtcaactttgcttgaccaacagggggtgagggttgattgggtgtctgtatctcatatagctgagcctgacttgattcttctgtttgggtatccatgtgtttcgtggctttcgcttgaggtggactaatcatgtatccaaacattttttctattccttttgttgttcttcattccattcatcgaatatctctgtgactcatttttctcgttcgtagttgttaaggtaggaatattgtcgttgacatcatttacttcatttccattggggttcatcatctggttatagagtaaaaaagaaagtgagacaagattacataagaggcttgtacgatatgaagataaagggcgaacacaactttttgatttcca

SEQ ID NO: 127449 - DNA, 365 bp, Zea Mays
gccgcgattcccacccagctaaacacggataacggtcctctggagaaaagatctcactgtggatgatcttggagcacagtagccactctgtcgctcatccacttaccggcgacgtggccgcatgtccatcaccagcgtgccgccgttcttcgcagttatgccacgccgtaagccatcttaccatgtcgcagtcgatcgcaacacaccgtccttctattacctaaggccttgccacggggtttgccaccaatcacacgcgccagtgaactttccctcctccgaccactgcgcgtgatcgttccaattcccggccaccgctctcgcttagtataaattgagcccgccgtgagctccgcaagatcatc

SEQ ID NO: 127450 - DNA, 622 bp, Zea Mays
gagcactgccagaaggatcctggggcggagggtaagaggacgattggcccggatccccgtgatacggaggcgggacaaactgctcacgatcatcaaaaaaagcttcttcttcttcgtcgacgtcgtctgctgtcataaaaggcaccatgtatgcctgctggtaccactcgttgatcttcgaaggaggaggacggagaggtacgtcaggcaagtggggggcgaagggagtacccaaagaggaagcttgacgacgtaggttgtcgtcagtctcccgctgacgtcgagccacctcttggacatccgcagcaatgttccggcacatggagaaaaatgccgcaaacccgtgggccaagcgggcacccatccctcggccacgacctcgaccacgaccacgtggcgtgggagatccgcggccaggggaaggacgcgaggcaccggcagcagcagcaggaccagcagacggacccgcagatgtatgagcacgagagctggagggggctttcctgaggcgccctgctggattgttgggatcaatccagaaaggggtatatgactgatgtcttgtacctttgtcaaatttaaactgggtcacaacctcaatcatcttcatgataaacggagc

SEQ ID NO: 127451 - DNA, 2239 bp, Zea Mays
atatgagagttattaaaagtaaggtatggctgatgccacactaagccataatggctcctccaccgctgttgtccggcaaaccatcacattctgtgacgcggggacgtcgagcaactcctgacttggggcactccggtcccatatgacaaaatcccccattcccattcagccattcctatcgtgcaagccatcacacactccggacgttgggcccacattgcagactacggacgcccacgtgacagccaccattagttttgcacacaccggacccacgtctgctcgcgcaaaaagttgcctcaatttgacactagcaggaacatttgaccatgattgctttctctaaagaaggaaggcttataagctggtagaagctatgttggctggccggtatggtcataaaaatgtgcaaaccgtgatgacgacataggtcgcgtgggctgtgtttctttggtgcggcccaagtagctgctaggaggcccgcacgcttcttaccctgacccagcttggctttagggtcagtctcccttgctttctctgcctagcgagccctcgccctctagcccttcctgctagcgccgtctccgtcccgtgctctcatgttcatcgtcgatctcagccatcttaggagcacccgctcactcccagacgcccacgcaaaggaatcccccatgatcttcctccaaactgccaactccctccacgatctccccctctagctcatgatccctccgcccgcccccaccccccgcctgccacgcccacgggcgcaacaagccaacaacccacactcggccccgctaccccgatccgtcgccataaatccgctacctcctcctcgagtcctgcttgatcgccccatgctcaaccggtcgaccggacggaagggcagccccgaccgtgaccacaacgcgatgtgcgacgagtgagggcagtggcgggggttgcgaccaacgacagagagccacacaaagaagcccgtcggcgatgttttcctcaaggttcgttcgctcattccttccttccttgtgctattggcgtgtgatcctagctagcgctctcttgatttcatccttatccacgtgaatcctggatcacactgtatgcagatcggattactggaaggccagaccagctgctcgcattcactggtgcacggtgtgggagctgagagctccgttcctatggccgggccccacctctcttgggcccttgtgcagatacgcagaggtagtgtcccctaatttatttgtcatgtcccctaatttgtttgtcagagctgcttgaggatgttaatgaggtatggctccgctggttcatcagtattcagtaattacaaggcattatgagttagcatgctccctcctgctaagctagctaaatgtggttatcaggtctcaataagtatccatttttaaaagtataaattgttatagccatacatgcgagtctttattttagaaataaccaaaggttctaaacctgcattgtgctaactcgtcaatcattcctgaaatgcgattcctttttttcattcagagttcggttggacaaattaagatggattgagatcttagttgttaaggtagaagtaaaagcacggtgatagcagcagttgtggtcttcgatatcttagtgtgttacttggtgatagcagcaactgcgatctccaatattctagggcatgtttgcctccctcttctaaacttagagatctaaaaggtttagaatgttttagctttcttttgatgtccaaatctctaatgaaaaggtgggctaaaggttaaagccaactttagaccacctgatgcatataaggaagaagggtccacatgcaccattctctgtagcatagcaaaatcgagcttgatgtccttgaagattgatcgagataatattagttagtactgaatttaattttaatgacaagtttgtaatgggtaggataataagggatatgttacaggttgttggtttcttagatgaatatgctgctgcatagggttaggcctgaaaggagaaacagaacaggattggtttttgtagctctcctcccctcatctctccatgggattggaatatatataactttatgagtttatatggaaagcaatagatatttgtttatttcctctcttctctgctctcctctcctctttatgccatattactgcttttaaactaaggcgacactgctagaggcactattatatgtcaagttcatatattaagaatttga

SEQ ID NO: 127452 - DNA, 571 bp, Zea Mays
gtattaattaccggccgccatttctttagagatcagaattccaagctgtttgcaactcgacgaagacaagtctcacaagaatcttcaccaaagtttgcaatcggttaattatgtaaaaatcgtttgcaacttgacgaagcttagcatcagaggcaacagaaacaaccatattactcccagaagtgactctcctaggcggcgaagagatccatacatgcaggttagtccacgaacgaaaccaaagcagcgaagagatccatatgcttcaacacaccagttgaaatgacccactagcgatcaagacattacctgtttgaaataaagagtgaattagacaacttaaaaactaatgaccaaataaatccttacttaaagcctatagaatatatatctacataggtgtgcactgtgatttcactacgtatttattatcctaaacacaaaagagttttgttcgcttaattttaatctgtaccgaattctactgcttctacaatgttttatctctatgaattgcagctgcagccatccgcgtgaaccaatcaggcggcaaaggaactgcgagtctgcg

SEQ ID NO: 127453 - DNA, 447 bp, Zea Mays
gttaccacatgactttcttgtgcctttggcactgttatttccgcctaagggcttaaaatttctagcttttttgtttcttcgacttttggctcttcagttttacctttgttagcctacgattcaactagctccgttgagggcgccttcggcatggtggctggctcttcaatcttctgtatgagaggagcaggttctttcgcttcagtaaccaaagaagtttccccaccaaattcaggcactatggtcggttcaatgtagcgcggtcggtgggtaaggaccttcaactttttcctcttcggcgcaggctcgcttggagcagccgaagcagcaacctttctagaagttgcaccctttcttttctgcccccgcggcgggtagcgatagtcagggtacacaaatccaatagcatcaaaaaccctatttagtcttttcttttttcggctcccg

SEQ ID NO: 127454 - DNA, 484 bp, Zea Mays
acccctcaaaaccctacaccctccatggccttattggctcccctcgccgccgccggagggaggcggtcaaacgatgctatcccttcccctacgccgccgccgccgcctccttcgcttctgcgctcgccggaaccctaccttcctgcgcctctccatcgctgcctccgcggctgccctctccaccgcccctaccgtcgcttccgccgtcgtcactcccatttccgaccgcctacgcgtcctccgctccctccacgctgtcgcccctgaccaccttctctcccacccgctcccctcatccgcccatatctgcctcgccgcccacctcgctgcccgcgctcgcctcttcgcgcactcccgccgcctcctctcccgcctgcttggtgctggccaccggccccacctcgccgcctccctcgtcgacattcttcaccgcgcggccctcgcgctggggcctcatcgcagcgcgctaccttccgtctttgac

SEQ ID NO: 127455 - DNA, 499 bp, Zea Mays
tttccatgtttcaagtctcttatcaaatttttcttcaagcccaatccagtctgcaatgcgaagtctactggggctcacagggacacctaagtatttcataggcaaagtaccaatctggcatttgaaaagatcagcaaaatttgttgttgtttcctcatcaccatttattacaaaaatctcactcttgagaaagtttattttcaaaccagacatcagctcatacatatacatgagcaatttcagatttctagctttttcaaagtcatctccaatacaaatgatagtgtcatcagcatattgtaaaattatgagaccattagggataatgtgactgcataaaccagtaataacattattctcttgtgccttaataaggattctagccaaactgtcagcaacaaagttaaagagaataggtgagagagggtcaccctgtctcactcccttatgacttttaatataattaccaactttgtcattgatcttaactctgacagtg

SEQ ID NO: 127456 - DNA, 365 bp, Zea Mays
tacttcatggggtttgggcctgtcaccgaacattacacatcaatgttcgagacggggcacttccccaacctgctgcaagacgtgttgcacgcgttgggaacctacgtccgacccttgtacgagacaaggcgagtgtgcgagcctccccgggcttgctactacatcactcgcatccacgtcagggtgatggatgcaggggatagggggttcaggactctatcggctcatgagtccctgacacagctatccacctacgctgcttcggtcagcgatgctgccagacgaactttgtggtctctcagccatacctaccggcagcagctacatgacacgaggttcaggcatcttcctctgcgtctaagtgg

SEQ ID NO: 127457 - DNA, 609 bp, Zea Mays
ggcttctaaatagtgtataaaactcatataaaaattttgggcatttttggaattaccatttgttttctaaaaatccagaactattgatttaagctattttaaatgccttaaaatttcttatttaaactaaaattcatgaaactatttttattaaatattatggaaaataagaagcctaggaaaattggtttcacaattttaggatttttctacaatttttaacatatttccaaagctctggtgaaaaagaaaaaggaaaaggcttgaacagtaatgggctggtttcagcccagtcggcccagtctagaggggaaagcgcacgcgcgcgcgcgcgccctggaggttttgcagaacggcccccgcgtttctgtcaaactgcgaatgggttcagacactatttttatcagtcactgacaacttgcaccgaggtccctgaggttctatctctttaccgcgctaggtccccgacgacggtgagcacagggagcgcaacaccgacgagctagaccggccggagggggcgaaggccgacgctaatctttagtttacaccagattctacccctaaggagtatttcccctcactcaattgcgcttatgatcaactacg

SEQ ID NO: 127458 - DNA, 287 bp, Zea Mays
ggcatgccccacatttgatttgggacatatggtggaggtaagtatgtgtatggatatgacatagatggataagggggtggaggtgtccatgtcggtatgttaggtctcaactgtacagtatgacctttcatttcttccgattggtggggtgatccaattgccctgacctgacgttgctcatgaatgggtaagcggggtcgctttgctggccggtcactggggccgaccttcttttttacgtatttggacaacaattgatcgaaagtcgggccaggcttgatcagccg

SEQ ID NO: 127459 - DNA, 412 bp, Zea Mays
gtgccacagtgtcagatttacatttgaatttgaaaagaagtcaaaataaaataaaagaaagaaaatcaaaaacagaaaaaaagagaaaagaataaacgagttcggccactgggccgattgtccccaccggcggcccacttcccttctcctccactccctcatagtccactagcgccgttacacttacaggcgagccccactgaccagtccttcaacccatgcgccagaagcttcttcctcccccaacagaatcgcacgcgttccctgtagaccttccccctcgtcgtgcgcttcacccagtcaacagcttgtcgtgagctcagcggactccgtcgattccgccgtggatctcggccactcgcgttccctccacgttcagcttctcggccgttgatcagtcgttcgctctggc

SEQ ID NO: 127460 - DNA, 602 bp, Zea Mays
cgaagtattcttgcaccaaatccctggtactaatatgcttagctaccactctaaattctactttagccagctgatagggtgaccccagttgcatattgcacaagggtctggtcatttcgaagttcaaactcagcggactcataaccatggtcatcagcttctccctctttttctcgtcagccttcatatagaaccattcatttttccaaccagttggccatttcgtgcagtagctaaggactggtgccttcgtatcctttcgatacgcaaaattctaacagccaaaaatttcatgaaggccctctgcccttgccttcgtctgataatgcagcttgtgcactcggcagaaagcttcggcatctggacttatcccttgtctttggagctcccagatatagacgatgagtctaacaatggcgttgggagtcagctaatgaagatatatttcaaaattctttaaaactacccctatcatttcattcaggggaatcgcagccctgctctaaagaagctctaaaaatcgacaacttcatccttcttcgactctgggatagtctcttctccagcaaatcgaataagtttactctcagcctctccaaaat

SEQ ID NO: 127461 - DNA, 365 bp, Zea Mays
gcagaagtcgcccaagggtgcagccggactagcacaacaagtgcaaaaaaccgaagtctaccgcgaagactatccgtgcggaagtcgcctaagggtgcagccggactagcacaacaagtctaccgcgaagactagccgcgcagaagtcgcctaagggtgcagccggactagcacaacaagtgcgaaaaaccgaagtctactgcaaagaccatccgcgcagaagttacccgagggcacaaccggacgaagcataacaaaagcaaaaacgaccacaccaaactgtccgcgccaagaccgactatatgcgcaccagtccagcataacaaatacacctgaccaagtacataacgccttcgcaagcatag

SEQ ID NO: 127462 - DNA, 756 bp, Zea Mays
gtcatcgaccaccctcaccaataatgacctcttcaagcgggccagggcatggtggggaaggctgattacagtgcccttgcccaggtcccgatgcggcccaaccgtggttacatgtcactagtaggccatagaacctgcctctgcttttatccttgtttcttcatctcaacgagattaatcggtcttccatttgttctaaggggctacggggttacagatccaccttgcctccggtcctagaggacgtggagggtcgggcagtgcgtaggttggctgcaggcagcagaagaggaagaaggacaaggagaagaagcgagcccacgagaaaaggtagctcatgacaaactcgagaatcatcgtcgagcgtaggtgagggaggggctgccattggaggcgtcccagatatgttcagcaacgacgatgatgatgacgaggggatggaaattcgactcggctttagccctgaggtgacgctttggttcgagccactctcagtgagcccgtctggcagtctggatgtgtcggcacctaggctcaaggtgtcggtgccttggctcgagacataaacgttcatcgagcggcagactatcctcgtggtcaaagaggaggaggtgacagcggagcgggttgccgaccaactcccggtgtcgaccacggggaccatgggcctgaggagtttggcgctaaggaggcttgtcctgcctcagtcttggtaagtgtcatgagatatagaggctaatttttcgttatcttctg

SEQ ID NO: 127463 - DNA, 509 bp, Zea Mays
tccatttggtgaacttgtcaatggcgaccaacacgtgagtatagcctccttgagctttcttgaagggtccaatcatgtccagtccccagcatgcaaatggccatgttatatgtatggtctgcagctgttgtgccggtaagtgttgttgttttgacaagaattggcaagcttcacatctctggactaactcggctacattactctttgctgttggccaatagaaaccaaacctgtaaaccttcccaaccagaactctggatgctgcgtgtattctgcactatccggcatggatctcatctaatagctgcttcccagtagccgaggaaatgcacttcatgaggactcctgctgcaccccttctatacagtgtgcccccctatgagggtgtagtgggtcgacaatctcgcgatgcattatgctgccgttttatcatccggctcttcttcattctttatgtacctgatgataggctctccagtcattaggatctgattctggttggcttaagg

SEQ ID NO: 127464 - DNA, 351 bp, Zea Mays
atcaggctcaacgtgtatatctgagctcttcgaagctaaggaaagagtgccaacgccaaagggttctgccgggtacacaagcttcattatcagacaaaggcaagagctgacggcatgcacaagaacttcggatgctacaactttgcatactggaaggacacaaaggcccccgtgataggctaccacactaaatggttgactgggtggacgaacgagtggttctacgtgaaagatgacgagaagaaaagggagaaacttatgagcatggtgatgagtccgttgagattgaacttcgggatgactcagcccttgtgcaatatgcagttggggtctccttgccagttggccaaa

SEQ ID NO: 127465 - DNA, 519 bp, Zea Mays
aaaactttgttatttggttcttaccaaaattttgtattttttccaagtcttttcccaaattcccttttatgtgcttattggttcacataggataaattagggtttgagagttcttcttaccttgaggttcatgacatgattaaggagagtttcttaatatgaaaaagactcactttaaacctttgttattaatttttgatgttcatgcctctatttggttcacatgtgataatggtttaagttagcttaaagaagaaaccctaggtgacaccagggtgtcacaataatgtacatcaataggtgaatcaaattcaaatttttatggcttctccagcatttagcgatttttctaagtaaataaaatcatttttctttttattcctgacgctaaacctaaagttatagggaacccactaaccatctctatctctactcttttaaagcaccagttttaatggtcgtcctatactcctatgtcacacaccaagcaaacatctgttaccatctcctcgcttctcg

SEQ ID NO: 127466 - DNA, 393 bp, Zea Mays
cagaggcggaaccccaaagtcgtcgtcatcatcatcataatcagggactgctgcgcccggagtctcgaactggtgaaaggtggtatcctcggcctgagtatcaatcactggagcaggtgccggcacaggatcctctggagctagacggtaggacccaaagaggaggcgagaggcctcaagagtaccctggaactatgggggccgaatcagctgagcaaagatgtgacacagatagtgagcataaggcagctgtcgatgagcacagagaccatcaagtacggtgtcctcgatctcacaaatgagaaaatccacgacatcaaactctgagtgagaaattagagcaccaaggagccaaagttgaatatgagtggcagcctccctgtaacccatcca

SEQ ID NO: 127467 - DNA, 482 bp, Zea Mays
ctcatgttgaggtctgtctgggtgaatatatatttgagacttttatggtccgtgtagatgttgcatcgggatcccatcaagtaatgcctccagatctttagagcgtgaactactgccgcaagttccaagtcatgagtggggtaattctgcttatgaggcttgagtgctcttgacgcatacgcgatggctcggttatcttgcatcagaacacacccaagccctgttctggaagcaacgcaatatacatcgaacattttggtgttgtcgggctatgccagcacgggtgcggttgtcaggtgctgcctgaaggtatggaaggcatcctcgcatttctgactccactcaaatttgaatcccttcttcaagagctcagtcattggtttggcaattctagaaaaatctagaatgaatcgctgatagtatccagctaaccccagaaaactccaaatctgtcaaacagtggttggaggcttccattccat

SEQ ID NO: 127468 - DNA, 404 bp, Zea Mays
ccttttcctcagtttcttgtgtcagaacagccccaatgaccttatcctcagctgcaatgtataatcggaatgatactcctgcttgtggtgcttttaatacgggagccgaagataagtattttttgatgagatcaaatgcttcctgctactctgccccccaagcgaattcggcatcattcttaagccgaagaataggggtgaacgcgtcaatcttcccggctaggttaaaaataaaacttcgtaaataattcaccttgccgagaaacttatgcacttcgaccttacaagtcggaggtcccacattccgaatagacttgattcggtcagggtcgatttctataccatgttcatggatgacaaatcctaaaaacttaccagtcgacactccaaaagcacatttacgt

SEQ ID NO: 127469 - DNA, 633 bp, Zea Mays
cgcgcgtggtcaggtcgggccagtggggtgcgtgcgtccgcgcgattgtgggacacgtttatgcatgtgtaaacatgtgttatgttttgcgtaaacagaaggtgcgcacatggtgagatcgagttgggatggacagaggtgggccagcgtcgtgttcgttggtcgggtagttagttcctactcatgattatgctagcatatttaatggtttagacttgcataacaggagagcggcaacgaaccactcgttcaggtgggcccacacaccaccatgattagtgcacccacgaagttggaagttaccgtatatatcggaaaagaagatatggagatgatcgtgcgtgggagctcaggcagatttcagcgtaaaacgtgaaccaaacagtgtaaatgggtatgaattttagtgtaaatcatcgatctatttcataacgaaaacatgtatggaaacaaaaaaaatctgatttaaatgctttaatatatcttatacaaatggcataaatggtaggaacccaatacacactggattaagtaaacgagataatgcataaaatcaataaattgtttgtgaaaaatgtgaatagtaatattataaacagacaaatatatggaagtggagccatgaactgaaat

SEQ ID NO: 127470 - DNA, 389 bp, Zea Mays
atcgaaatcaattgcgtgtttttttgatgttgttgtctcattccaatgaggagtgttacttccacccttgtttctagatccaggaggtcgtcctctcttacgtccagcaaggctagccaatcgtaatctattctcctccaatgacaaacatgtcctattgttgtggccatcagcaattccacacttctggcatttcctgttcattttctttgtaccttttgctcccaatttaataaccttttgttcactcccctttattgttcttcctttgggttttgagttatttggtcttgctaagcttatcccatcgactacaaaatccagtttctgcaattcaaaagtatatatttctcagcacataatattatgcagtcccacattcagtataa

SEQ ID NO: 127471 - DNA, 357 bp, Zea Mays
gcgactaatctcgattagttgtctagtttggactagaaaccgaccaagtgtgttaggtttttttgggcctcctattttcggtttagctatagttccatatgaatagccgctgctaacacctatccagttttgcatgaatgcatgacccttcagttgcttcctagcgctctagttccctctcattggcggttgttcgctcttgcccctcctctctagttccctctcaccggcgactattttctctcattcctcctcttcagatccctctcaccagcgacgatggtaaatccatctcgaagatgagctcctcttttgatcaccatcctttatccattcatttgatatgctactgtcttg

SEQ ID NO: 127472 - DNA, 513 bp, Zea Mays
gtcgtcgtcgtctttaatatcagccgtcagagcggtcatgtgaagctaaagaaagcgctcatgggagtgtccttcgtgttctctatcagccgccagaatcttcgagaggaaaataaatatgtatcgagaaattcacccccacacgagatatttccagagagtcgagcagacacagaccaaaaagggaattacaaatgcggtgctctcttctccgtcaatggcgacgaccttagccatccgcacccgtcgcccctacttctctgtgtccctggtccttcccaagccacagtaacattctattaacagggcacgacgtggaactccttgcgccgcccccacaccgccgctgtcgtatgctcctctccgtcgctacagctcgcgcgctccgcctcggcatgtcggtggtactggatgaagaagcagtcacgaccgtgggaaagacatcggactggatgacaaggttgatgttagcctaccgcctgagtgcgttgacgacagcggagaggaagatgg

SEQ ID NO: 127473 - DNA, 697 bp, Zea Mays
cagtattggtagggacaccaggtgctgcttcaactcttgaaaggcttgtaacgcctcttcggtctaagagaatgggccggactttcgcaacagcttgaagaagggtagcgccctctcagccagccatgaaatgaagcggctaagggcggctaatgaccccgtaagcttctagacgtccttaatacgggccggaggcctcatcgcttcaatcgctttgatcttctccgggtttgcttcaatgccccgatgtgaaaccaggaaccccagcaactttcctgcagagacaccaaagacgcacttgtccgggttcagcttcgtgcgtgttgcccgcagcttgtcaaagaccagggttaagtcttccactagggtcgaccctctcttagtcttgactatgatgtcatcaatgtacacctccaccttatccctaatcaggtccctgaaagtcttactcatcgcccgcacaaatgtcggcaaggcgtttttcagaccgtaagacataacaacatagcagtaaagcccatccactgttacaaaagcggtatgctccctatcttccctagacatctggatctgatggaaaccagagtaagcatctaagaaggacaagaggtcgcacccggaggtagaatccacgatttgatctatacgcgaaagtggatacgggtccttgggacaagccttattaaggctggtgtag

SEQ ID NO: 127474 - DNA, 582 bp, Zea Mays
tatatatatatataaagacggtcgaaagaaagctaataaggtagcatgcacggggcaagttgaaaaagacagagaaggactccgatcctcgtgcagtgatccgcacacgtgaggacggtgagagagagacgacaggacgtacgtggtcgatctggctcccacaaaagcacaagcaccggtcgatacataggcgcgcgacgaccctctcctgatcgatctagacgtagtacgtctgctgcgccactcaatatacgtgcatatgcttctcacatgctgctgcctgctgccgctggatgcttccgatgctttgtggacgacgacgacggcgaccttgttggagggagatagagagagagagagggacacacacacagacatcttaagaaaggtggcgaaacgagacccggccggccggcgccacctttctttcttctctgctagctttccggccaccactaacgatcgagtggacgtacgaatgagcgacgacctgagcacggtttgcatggccagcagcgagaggggtgcagtgcccatacccaccacacaccagtcgatcacgagtcgcctccagcagtccag

SEQ ID NO: 127475 - DNA, 383 bp, Zea Mays
ccgacgtctatcgcgaagactatccgcgcagaagtcgcctaagggtgcagccggactaagcacaacaagtgcgaaaaaatccaacgtctatcgcgaagaccatccgcgcagaagtcgcctaagggtgcagccggactaagcacaacaagtgcgcaaaaatccgacgtctatcgcgaagaccatccgcgcagaagtcgcctaagggtgcagccggactaagcacaacaagtgcgaaaaaatccgacgtccatcgcgaagactatccgcgcagaagtcgcctaagggtgcagccggactaagcacaagtgcgaaaaagtccgaagtctatcgcaaagactccgcgcagtaagccgcctaagggcgcagccgacctagtacaacaa

SEQ ID NO: 127476 - DNA, 525 bp, Zea Mays
ctggcatcacatgatgaataggcgatgcttgttgtgttgccttttcagccgttttgttcaactgttttgttttatggggtggacaaggtttatttgttggtcgatcacatagaacgacctttttgctagcatatttggagagcaactgatcaaaagtagggccggctttgaccaaccgaccatgtgtgctttgcccttatgtttctttcctttctttatgtggaggctgacgcctttggccatgggcggactgtccgattgagttagccaaactgttcgcatgagcaccggaccgtttgcacctaggtgtcggacagtctgcgatgtttgagtcaaggagttttgctcggctgcttggttgagcctgtcccccagtgcctccgaacttgttagtctttctatccggagctttccgagcaatcccttcttgcaatattttgacgtgcaaggatcgccaatgacagtgtttttgtctttgcctttatcggccagttcaggccgaaccaagacttgattgtatgtggg

SEQ ID NO: 127477 - DNA, 436 bp, Zea Mays
caggggagatgcagagcacttcttattcttctatgggtttttggctggttttaaaccagcaatcacccacactttcagaacttccaacaaaaaaagaaacaatgaggttacaaaggtggagctgaaatgtaacaagcatggaaaaacaaaaaagctgatcagcaggaacaagataattgcatagaacatcaggggtgcgagaaagggccaaaaaggaatacaaatgtctaggttaaaacagactgcagagtagtcatggttataaaagaacatcaacagaagtgggtgatcgataggttagacttggaacacaatcatgatctcagaccagccgacagcaacaacatgtttagcggacataaatacatgactgaaatggaaaaaggagttatacgaacattgaaccacaacaacatacctactcgaaagatgattg

SEQ ID NO: 127478 - DNA, 481 bp, Zea Mays
gagagggtcgaccctagtggaagacttaactctggtcttcgacaagctgcgggcaacacgcacgaagctaaacctagacaagtgtgtctttggtgtctccgcgggaaagttgctggggttcctggtttcgcaccggggcattgaagcaaacctagagaagatcaaagcaattgaggcgatgaggcctctggcccgtatcaaggacgtccagaagcttacggggtcattagccgaccttagatgcttcatttcaaggctagctgagagggcgctgcctttcttcaagctgttgcggaagtccgacccattctcttgcaccgaagaggcggaacaagcatttcaagagttgaagtagcacctagtgtcgctaccaatactgttagctctagaacctggggagccattgtatttatacatcgcggcggctgcagaagcggtgagcatggtgctggtcgtcgaaaggacggcacaagaagaccag

SEQ ID NO: 127479 - DNA, 431 bp, Zea Mays
gtgtgacatgggcgcacatgcatgagtgcaataagagtcacaacccatggttggtggccacatgttgcatgcttcacgggagctggagagggcagagcgccagagcaggcaaaccacaagtagagaagcgactatgagtagagctggagatggaggagctagaacaatggtggtcggtgacaaaggcagcgggttgcaggatgcaggtgactccgcgagctgtgagcaacagtagagaaaaagactaggcaagccgtgggtgcaagggaatgatgatatgctttgctaataagctagaccaaggtatgacgtgggccataccatgccatactaggtgcttcgcccccatcttgtaggcatagctatttttgggcaatctacgttaagccgtagtgtagggctagatgtgatagtgctacgctggtttcttg

SEQ ID NO: 127480 - DNA, 393 bp, Zea Mays
ggtacttcttcaggcctgatatggtgaaagagaccgaagaaagagttcaaagaataattcataatttgaagaaagctcaagctcgtcagaagagttatgcagacaaacggcgaatgcccttatatttccttgagggagactatgtctacctaaaggtttcgccaagaagggcgtgtcgcatttcagggttaaaggaaagcttgcaccacgatatattggtccttttcttattcttgaaagatatgggccagtggcataccgacttcaactacccgaaactttgtctgctgtacataatgtgttccacgtgtcccaattgaagaaatgtcttcgggttcccgatcgaaccgttgaagtgacagatgttgtccttgaactggacttgacatattc

SEQ ID NO: 127481 - DNA, 375 bp, Zea Mays
ctccgccctgtgggtggtatgtaccggcaagaaatgagttgtcttggttaacctatccacaatgacccaaatagaatcgtggtgtcgggatgtgttgggtaaacccacaataaaatccatgctgaggtcctcccatttccaagatggtatgggaaggggctgtaaggtacctgctaccttcaaatgactggccttgactctttggcaagtgtcgcattcagatatatacttagcaatttccctcttcatcctggtccaccgatacaaagatctgagatcatgatacatcttgtaactcccggggtgcatggaaaatttggaaagatgagcttcatccaatattttcttcctgagtgtgggattcttaggaacaac

SEQ ID NO: 127482 - DNA, 448 bp, Zea Mays
cttctcccgaagaggttgaggctttggttgcttcacttggtgaaatccccaacgacgagaggcaggttcattttgagatgcctttgaatccaagtgatgcagaaataagtgccatgctggacatgttggctgaggattcctctgattcagcctctgctgaaacgctggctgtagcacccatcctggagtctggcaaagctttggacactcaaaggtctgatagtattcgcccgaagcgtcctcgccgaaccaatcatccagcttctcctgctgaggggaagaaaaaaagagacgtcttcggcgagtgtcatgcttgaatcaggatgccggcccttctgctcctgctgctgaggaagtgccagtgccgattttcgctgaagctgatcccaatgggtgtgacccaactgatgctgcacccaatgggtgtgaccttgatgatgttgacccc

SEQ ID NO: 127483 - DNA, 370 bp, Zea Mays
ctgttacatcctaacagatttttattgagcttgctgtgggattgatttgattagctccttgaagatggtcatggtgccaatgttgcgagcctccagaccatagcaggagaagtattgtgctaggcagggcagtgggacgtgagcaggactacaggtctgtgctggtgcttcattcttcatttctttaatcttctatggttcagtgacttaaattatttattcgcattaaagataaagaataaaaaccctagaacattaaggtaattctttttccaaccataactcttttagactatgcgacattaacttgaatgctcgtgccttttgtgaatcctgaattaccacaacgccctatcatctgttatttcat

SEQ ID NO: 127484 - DNA, 1129 bp, Zea Mays
cccgatcctctccgtcgactgccatggttggcacattctcgccctaatcttctctgctaacagaaatgcacaccccatcggagttaagtaggactgctatctgaactcaacagcgttctgttttacccatctatgcacatgaacatgatattcatcactgtgctctgaactatgctagctgatgactcttgatctatgaacatgatattcatcactgggttggattattctttaaaggacaatttcgagcatcatgatagtctacttgcttgcaacacctgcacatacgaggaactttctgtttcttctccacattatcaccgggcttctttactttctgaccaggttttattcgtttgcacctacccacagatttgacttcattaggtggctgtataataacatggttagggattgaacaaccaataaaggactcgatctcttgaacttgacttgtcattctctctggtagcaatatggaaagatcttcaccaaatgcaacaatactatcccgaagtgtttgtaacccattgtttgatccttcggcacggtgaattaattcttcaatcttgcttctaatttgagatgccaactttgcattagttgtttctacagcatcctttggaacttctttcaacatgtttccctctccatcgaagacatcatccttagtcactagtttagtccatctcttcaaaacaaattgatctggaatatttttaagtgatggacattgtaaaacacgaattagatggcaacaaggaataccatacatctcaaagaacatacaagtgcagtgcccatcgtttgttgtaatattgacacggacctctctcatcttttttctttcatcattaactgttgatattttgtagtctccctcgcttacaattgtctctatgacacaattatctcgagcattaataatttgtttttgtagttcagagaaaacattgaaagtgaacacctcactcccatgcctttctaatgcccaactagtctgcaacacgggtgatgtatgcaggctagcattatcattttccaattcttgatgcctctgttcatccattgcattaacaaacctgatccaaaattcaaccaatgtatttttgtaaccaatgaaacggtt

SEQ ID NO: 127485 - DNA, 585 bp, Zea Mays
cacatcagtcatcaaatcatgtccaactaaggtactacatcttgcttggcacaatgcacacatctgagtagtatgcacaccacaacactattttaacaacaccaactaagacaaatttcatgctaaaatccgcatatcacacatgtacatatcatgaagtgaccaccttcattcagtctcatctagtttcagtccatcatcgaccacattcttcctcaagcaacatctgcacatgaatcaacatgcaagtgagtactagaacaagttggatgagtaaccctaagctctacccaaagtagagaaaaatgagaaaacccaaaggttttgtgaaaatatctagcaattaatgttcaatatctatatgatgaagcatgtcattccctttatcccatgaacttgaggaagtgaaattttatatcaatatgcttattttaaatgttgcactaggttcttagcaatacatataccactagtgttattataaaaaagtgcaacaatattgaaattgtcccataccatactcttttaagtgtagctatcgtccaaagaatttgggaccaacaacaagcaacatactaaatatcc

SEQ ID NO: 127486 - DNA, 536 bp, Zea Mays
gttattcatccatttcatcaagatattaaaccatatttgctctaccattcaaagtgaatactcatgaacaataatcatcttaacaatcaaatttctagtgtgatcatgatcatattcaatgggattaacaacaagagaaccatcatcaagagcgaagctgatagtaccttgagcaacctttgattttgcattggccaacttgttctggtaagcggtgcacttatcaagatgtcgattcagctgtgatgttggacccccaggtcgatacacatacagtttgtaacaaaacttgcacttggccttcgtcaccatttccccaaacttctttgattgaacttcgaccaccttaaaatacttccagtaatctgctcgcttcgccctcttgaccttacactttgaaggagataatggaacatcaccctttgcccttttgactcctctctttgcattatgaacttgtgccacttgaacctcatcttcaccctggctcccaccatcctctgaagtcttagagagaaatcatcctccatgtcgag

SEQ ID NO: 127487 - DNA, 374 bp, Zea Mays
ctcgccggtgaaccaccgcctcctggccttgcgccgcgtgtctaaccctttccaccgcatcaccataacctgctctcgctctccattgatcaccggatcgattgccacggcgttggacaccaagccagtgcgccagtgcccttcctttcctccgaccgccgcgcgtcataccccaaattcgcggccaccgctcgtgggctctataaattgaccgcgccctcagctccgtcatgtaatcaagcagcttctgcacctacctgtaccccaaaccctccaccagcgagctctaattccggatttcccccaattcgggtttccgccaccgtgaaacgaacttcaccatggctagccctttcccggtcagttcatactcc

SEQ ID NO: 127488 - DNA, 519 bp, Zea Mays
gggtagaaagtggatgtacttggaaaagcgattgaccaccatgaggaccactaacttgccgtcgatatgagggaacccttccactcgaaccgaaattggtaactcaaggggctgcaacagtcctgctgggtggaggcgctccaacatgttgtgttggcaaactttgcagcttttcatgtagtctatgactatcttggttgcttttggcattgtaggaggcacaaatttagtatagcatcttatgtgtgctttcatggctcgccccgtgaactgtggccaggatgggtggccatagggagggcagaagggcaatgaacaagcggacggtgtagatggcgatactgttggttgctaaccatttagtcgtagcttctcctttgcgaatatggtctagcaggtgttcccctcatcgagcttgagcatttcacttcggaggtcatcaaagagttcaaagaaggggctggacagggccagcattgatgttgcatccttgtcacgacgagatatcgcgtcgatgac

SEQ ID NO: 127489 - DNA, 783 bp, Zea Mays
ttattttcattgcaaatatgtgaactttgtatacctattatccagtgaagagattagaaaagctcccagccgccgaggtcctgcagcggggacaggtcgacaagaatgttataaatcttagattttgagtgatcccaacaatctcgctgcccccagtactcctgatttgattactcaaaatacgatatgctgttgggaaaacaagcatggtggtgtcgcttgctgttgctaaccatgatgaaaggtcatttcaaactatttgcttaacttcagcttccacttatagcctcaactgatagaggtatatgcatgttgcaaaaaaaacttctttttttgcaaaataactttgtaagatacatttgcttctagagtctgctggttaggcgcggtggcggccatccctatcagtcacgcaggtatatttgggagttgagacctccggtggttggctcgcaaataaaggccccccaaagagacgcaactaggaccaaccgcgaaggctccatgggacctttgctcgacctcgacgacaacagcaaagcctttcgagccaaaggctacatgcaaaagatgacgggacgggacaagcaaagggcctagaacgtgactaaagccactccgagggccttttgggaaaacttcaagggctatgtgatggagggcccttggaccaggatgcagtttagccttcgcctttgaggatctgatggccctgtaaccctggtaacggctcaactagggcccattcagtgaggctattgtaatgaagaatgactcttgagc

SEQ ID NO: 127490 - DNA, 327 bp, Zea Mays
atgccaacatcctctttcccctacaatcccatgcccccgtccctggaggatccaaaggaaaaggagcttgcccctctgccggagaggaaggaattctaatattgcttcagtcgcgggtgcctcgaccaaggtatgccatgcgttctccttccagatttgttaatcctcgtccctagagcagataataaattcatgtcaaaattacaatggggacgagaccttctttcctaggggaagttcctttagaaattaaatacccaaggttctaagatcactgcaaggacaagaatgttcttgtacaagagcaggtcatgcggcttgagaggg

SEQ ID NO: 127491 - DNA, 432 bp, Zea Mays
ggcagcgtggatgtatggtggagggggttgctgataagtgtgtgcgacaactctagggttgtcggctggctgtgcccgtgtcatcctgtctttggtggccttcgtttctaggtagtctctggtttggtgggcgcagtcttcgccatgaaaaagacagtagaatcggcgcggtggctgcgcacgcccccgacccctaccgcgagttccgtttccgcggccctggggggatactcctggcggcgaggggcgtcagcaacggggtgctggttggcgatgttgtgcacttgctgctgattgcggccgtctcgaccgaagtctggctgcggagtcctcgtccacgtgcgactggactgtggagcatctttgggtttcctctgggactcaaccttgcgctggtggagttcttcggatttggcatatttttcaaaaagc

SEQ ID NO: 127492 - DNA, 430 bp, Zea Mays
gttggaggctagtcgtagacgaatggggctttagggtgtagtgcacatttttcacctctcgttcgtgtcgcagagcaggaagtctcaacactggcagaacaaacagcagcggcttcggtgcttcgggtgtgggagaacgacgacgaagttttagttgacgtaaggagcggagacgggtgactggagcagggacggagtcgcggtgcaggacatcagatagagctccagactcggttggcgttgctgcataggggaaatgcttcgtcgaaggggcgggcatgcttcagcgagggggtaccaggagcgacgactccacatgtcgggtatgataattaggggtgcccagactacacctctaaaacgagcttaaaaccctaagggctctatcaaaatacgtcccctaaggtcaaggaatcacaaacatcacctc

SEQ ID NO: 127493 - DNA, 453 bp, Zea Mays
cggcaggacacttgcttgtcagattgcctaaactgttgtttccactgtttgatgggcgtcacccccgtttgtggataaatcactgtgaagtttattttgagatgtatcaagttgatacaacctcttgggtcaaaattgcttccatgcatatggctcctgctattgcttgttggtttcaagcagtgctgttgcgccacccaaagttgtcatggccgttgttttgtcagttgttacatgaacactatggcaaggatcaataccaattgttgctgcgtcagttgtttcgcatccaacaattgggtaatgtgtcagagtacattgaacaattctcctccctggtcgatcagttgtcggtctatcagtctgcgggtgatccattgtattttgttactcgatttgttgagggtcttcgacctgacatacgtgctgttgttctgttgcaacgccccgtgg

SEQ ID NO: 127494 - DNA, 370 bp, Zea Mays
caaggctagtcttcgaaagcatagctgaagcagaagcaaccatgctagaggatattgatgtactagagaaagagcgattgaacatagtaattcagtcagctagataccagcacaccttgaggcgctatcatgataaagctatacgacatggatcttttgtagtgggagacttggtccttcgctgaattctaacaggggaaggacgacacaagttgtcaccactatgggaagggccattcattgtatcgaaggtcacttgggcaggatcatatcggcttactcaaatggatggtacggaagtggggaattcatggaacatagagcatcttagaaagttttacccttagcaagacctcgaaagctatcgaag

SEQ ID NO: 127495 - DNA, 512 bp, Zea Mays
atttccgtgccgtccatctgagtgagacgatatgatcccggccgagtgacttcagctactatgaatggtccttcccatagaggtgacaatttgtgtcgtccctcccccgttagaattcggtggaggacgagatctcccactgcgaaggatcgatgccgtatggccttatcatgatagcgcctcagagtttgctgataccgtgctgattgaatcaccgtgttcagtcgctcttcttcgagtacatcaacatcctccagcctagtagcctcagcttctgctatgttttcaaagaccaaccttggtgccccgaacttgagatcagcgggtagcactgcttccgaaccgtagaccatgaagaaaggagtatttccatgcagagctcgactaggttgagttctcaggctccaaacaacatacgacagctctctgatccactttcctgcgaacttttcattcttgtcgaagactttctttctaagcgcctccagtatcatcccattagctctttcgac

SEQ ID NO: 127496 - DNA, 456 bp, Zea Mays
agcccaaggaccctccgcagcccagctaaacctggacaaggccttcgcagtcaaactccaggcaggacaaccgcagtcagcagcaggtgcacaacatagccaaccagcaccctgccggtgaggtcgcttgccgtcaagattatccccccaggggctgcggcaatggcacgcgtggctgggccagggtcgggcgcaacaaccgcacagatattactgcctgtttcacgacgaagactgtgtgcacccaacgagggattgcctggaaacaaaggccaccagggacaggatgtctcgggcacaaccagtcgacaaccaaagagttgtcgcgcacacatatcaacaccaccacccacaaccatacaaccacgaccacgcccagcatctacccaaccacgcatatcagcaccaccaggaggtacaagtcgtaccaccccccacttccgcctccgcataaac

SEQ ID NO: 127497 - DNA, 331 bp, Zea Mays
ccaatgtttgagggagcaccgcctttatgccaaattatcaaagtgtgatttctggctgaaggagattaaattcttgggtcacaccatctctcaagaaggaatcgtagttgatccgaataaagtgcaagaggtgatgaattggaagccatccaccactgttcatcatattcggagtttcctaggattggccgggtattatttgcgattcattccggatttctcccgaattgctaagcccatgacagaactattgaagaagggttcaaagtttgagtggggcagaaatgtgaagatgcttttcacaccttgaggcaacatctgaccacagcac

SEQ ID NO: 127498 - DNA, 368 bp, Zea Mays
gacaaggccagtgatattgctcgcgttgagggaaacctcaaggcgagggaagcttccctggcgaaacgaacaactgacctcacttggtaggaggaggacctcgccttcagggaggagatgtgggcaaggcggaacaagcagctggatgagcttgagctcgaggcagaggagaaagtgaagcgtctggaagggaaagtgcggacgctggaggagcaggtccgccagttccaggcagcgcaggcgacgcagtcggccccgggcccccaggcagtggaggtgttgaggaaggcacttgacgacctccgggcagagcaacgtgccggagctcagcgcatcgccgcttgggctggcgaggcaagcacagcgct

SEQ ID NO: 127499 - DNA, 458 bp, Zea Mays
gccggccagctgggccgctactaggccagctgaccgagcagcccagccagcggcagccaaaacctacaggcaggcaagcacgcaggttgaacgaagcaagcggttgcccaggcaaactcgcgtgcggcgttggggcggtggagctcaactcctccctggttcccacggaactgacgccgaagcttgtgcatcccgcatggatccgtccttagcggctgccctggtcagctcccttcataagggaagtggatccctttcccctgtactctacggttccatccaacccactgttccagcgagaaatccttcgatctgctcgattccgggtgtttggtctcgtccatatcgtcggttgtctgttgttctcggtggtggtggtgtggtgctgttgacgacgtgccttggtgctgctcgttgattctctggtctctgtccaccgtggcctggtgcttgggctc

SEQ ID NO: 127500 - DNA, 637 bp, Zea Mays
catttgcaagtttctcttaatctgtactaaaggaaacttgccacacgcacacgcacacacccaaatctgttttgcgatggcttgtgaataagctttatcctgctattccatagagtatgactgcaaaccatgcatgtatattcagtcgtattgtcttgttccttagagaggaaccgaaggcgcataaggctcagactcgttgttcatagcctgctagtagtgcaagtactggaggttctcaggggagttctgctgatttagtcactcaggagatgctgacgttccttcgtcgccttgctgcctcttcaatgccagatgtgctagttctgtgactgtctttgactctgctaggttttgttgctgcttcttagccttctattgaggaaccacctttcacatccacttcaggtacttgtgtatggattcttgattctggtgcttcttttcacacgaccccctcatttcaccgatctttcttttatgtgtccttcctctcgttctcttactattcataaagttgatggatactctctctctctctgtcattgtgcacggtactcgtttgtccaactcttttcatgttctggtgtttcctatgttcaaaacctaaatatgcagcttatgtccactggttagc

SEQ ID NO: 127501 - DNA, 454 bp, Zea Mays
gaccaagtatgcattttatataaattaaacaagttctagcatttatttttacactaaaaagtattttcctaatgaatttatctgattttctaattatctggactgagcgcaccattaccagaaagtccaggggccttggtgcaataaatcctcagactcagtaaacaccccgaggggatggcgggttgattcctaggtttgccagggttccaaatgcaaaactgtgcccgcaaggggggtatggcgaactctaggccgccagatccaaatcctacggacgagattagatcactcataatatgaagcggtacgcgaccggcaccgtccgatcctcacccgacgctccagatttaattatcccaggatcgcccacacccgatcgatcccaatcggacggtatccgcgacttagaccgaaacagcacccgacttcaaatctggaccggacattgcca

SEQ ID NO: 127502 - DNA, 426 bp, Zea Mays
cttctttttagagggtccaagaacttcgctgatgaagtagaccggatgttgtactggatatgtatgtccttcctccacccgctcgactactaacgcggtgctcaccacgtgagtcgtgcaggagatgtataacaacagatcttctaccggctgattccgcgtggctcggcgtggtggcttgagtactggtggcatagtcaggaactttttcagtgcttctagagcttcctatgcttctgtggtccactgaaacttgtccacattcttgagcaatttgtagaatggtatgcctttctcgcccagccttgatatgaacctgcttaaggctgccatgcatccagtaagcctctgtactttcttctgtgatcgcggcgcttccattcacatgatggcctcaattttttctgggttggcttcgattcctcg

SEQ ID NO: 127503 - DNA, 452 bp, Zea Mays
cgcttgccgcgttgtccggaggaggagccatgactagaaccacccccggaatggtgggagggagggcggtgaggtggctgatgtgaagagagcccaacgggagcagtggatgtaggtggcttggagccaccgatctcgccaggtggtgtagtaacaacagtgaggggtgctgctggagcagcgttggtcatggtgagttcctcgagagtaagatcatcacggacctgcaaaaaagtggggagaggagaggtgcgatggaggtgaagaccgtgcgcttgaaagcgttcgttgaggccacggatgatgttgaggacaagagtcttgtcggagaccggctcgccaaggtcgcgaagatcttcggcgagctttttgtagcagcggcagtactcagcagcagaaagatcgccctgagtgaaggagcgaaaatcttggtcggcgtagagggtgcgcgt

SEQ ID NO: 127504 - DNA, 566 bp, Zea Mays
ggagccgagcgtccgatgagacgcgatgacttgtcgcgctcgcgccaggtacgacaagtgttcctaccgttcgcattgcaggcttgcggcagctcgtacacacgcactaactgtgagttgaaataaaatccaatacgtctttgcaattggactcttttgtattatcgctaggtaccactactttgttaacaatatatcatggtatgtaaacagattttgaagccgaaattttgaaagtagggtgaaaaaagagagaaaaaaatgtttggctttaagttgagtacacgacacatggcacatatgttcaggacaaataaaacaagagatcaatactgttatattacatgaaaacatgggacgacatcacagatccatccagccgccggcaggcccacgggacagcgacgtgctgggatcggtcgagctcacctaatgatttgtgccttcggacgtggacaactcgcacgccaatgttgccatgcgttgcgtgctcgatcacagtggcatcagtaggtgagcgtcgtcactacccactactactactacactattcctagtggccgccg

SEQ ID NO: 127505 - DNA, 453 bp, Zea Mays
tcggtgagcagttgggtgagatggagctgacgacccaggcccacatggaagtgcctggcgcgaggcaagcgacgactgccacacggtcccaccaccagccgtagcgggcgcggccctgagcgcgcgtgggtgaatgtgactggcaatgcgggcccgacgcgttagtgacatcacgcggcaagtggagatgagtgtgtgcgtgggcggtcctagtggtcagtgagcgcgggcgtagcgcgaagttgggctggcagcagaaggatttaggaaaaagggatgggtcgtgctagggtttcggcccagagccagttctggaattttccttttcttttctattcctttttttctttccttatttctatttctttgtattttgaaactttcaaattcaaatttgactacggtttcatatttaatattcaaaataaagagcaccatcaaaaccaacatgtg

SEQ ID NO: 127506 - DNA, 398 bp, Zea Mays
ggttggctacaccagcgggaggtttccatcttaattgattcaggcagtacacattcttttgtgaaccagtgcttgattcaacaattacctactgccctgttagtggaagcacatatcaaggttaaggtggctaatggaggtattatgcactgctcttccgttttacctcgagctgaatggacgatacagggttatgtttttcaccaagatttgaaggtccttcccctgcagcattatgacatgattttgggaatggattggttggaggttcacagccctatgcatgtgcattggcgtcacaaatggctttctattacatatcatggatctttcgttacattgtatggctcagactatggggctagtgagagcttgctaattcagatatcatcagtgtc

SEQ ID NO: 127507 - DNA, 578 bp, Zea Mays
caaggtaaacatttaggtagaatgcctcaatatcgcaagggtcaaaggcgacaacagacaagagtatgagagaaaagatgaaggcattggagtgctagtggtatgagtacaacaaagaatggagttacatccaagcttacatgcggtaaagaagaggatatagccaagggtgaggtaagtaaaacaccactctcaaattgagataggagactggagattttagataacagacacaatgtaatcacaaggcaggatagagtgatgacaagggtaaaagaaataacaaacaaaaaacacaacaaaggatagagttaaaaactcgtaggtgacaaagaagaggatacacccaagggaaaagtaggtaaagtacgatgctcagattgagatggaaaagaggatattttaaaggctggtataagataaacatcaaggtaagatataggggtgataaggataaaggtgataatgatgaaaagcataatccaaggacagagttaaggcaagactcgcaaagtgacgaaatggagaaaacaatcaaggacaagataagtaaggttccatcaggacgatcgaagtaa

SEQ ID NO: 127508 - DNA, 291 bp, Zea Mays
ggacagcaacactctgttttcttttgttgggtgccatcgtgattcttcagatgacgcgaacggattcaggaactcagaaagctagagaggggcgtaggaaaaagcaagaacgagggtttagaactcaaggggacatcaccagaagtatgggttggcatgataagtcgggtgcaaagtggcaggccaatagcttgggagaagtttggataacagaaaagcaagcatcacttgggcattacctctaaaatgctaatgagacgtcagaccgactcatcctgagtcagcctccca

SEQ ID NO: 127509 - DNA, 454 bp, Zea Mays
cctttcagagagaccgtcccgcttggatggccaggatgcgtgcattggaggagcagcagctgcttgaggacaaccccacagtcgtgtacctcactgcatacctgctcacccttgatacacagtatgatttcttggctcggcaccaccgttagatgattgcccgagcagaagatgcagagaagcgcaaccgtctgctgcatgtggatctcaccacagctcaagcccgtgcaactgccttggagagtcgtgaagtcattgctgttgaagccctaaagcaagccaaggatgagcacgtctagatgttgatggaggcctacttggtaacccataaccaacgtagagccctgcggatccaagagcccgcttcatccaacccagttcaacccaggagagtagaagacccccagattcttgaaggtcacccggtctctaccagaggagaaaagaaggcttg

SEQ ID NO: 127510 - DNA, 603 bp, Zea Mays
gagttccccacagatcaggaggtagccgaggcaggtgctttgcttgctgaagttggattgctgaaggagaggggtctgactgctgaagctgtcgttgctgattttgtcttcaagaatattcagccgttgaaagacagggcgcacccggcttatctgtatcgaggcctagccgactcaactcgggttaccaacagaagaattccctctacagacttggtgaaccgacttgagatgatccttagaggcaaggtgtcaaatgttggtgccccagtggcatactcggcttggaacctgcctcctcccaaagccttcaccctttttgtgttgaatcctcctgtcactgatggcagtttgggccttagagtgcggccctctgctgaagaagttagtgcctttggatcgcttcgctcggggagattcctgatgatgaacggcaggtccattttgaggtgcccctgaaccctagtgatgcagagataagcgctatgcttgatttgctggctgaggactcttctgacgctgctcctgctggggcatcggtagtggcgcccctcccagaggctgatacaactttggatactcagaagcctgccagtactcgcc

SEQ ID NO: 127511 - DNA, 832 bp, Zea Mays
ggtaaacttaataaagcgtaaagcatgcttggtaatttccgcagtcggctaagatgttcgtctaggttaaaaataatttatgtattcaacgtggtgtgtttggatgtgacaagtagattggaagggtggggtttgtcgaagcactgtgatatcgaacgtgtatatcgaagtgcattgtagtggtaattgtgttaagttaatcggtagtgtctcgagtgcacgccacaatatggttgtatgcgagacggagttatgcacatgatgggtttagtaaaaatccatcggtgtcactggtgttaagttgaggtttagttgtgcgtggaaagtaataatatgtttaatacttagaactcttagtcaatggtagaaattgtctcgacataagtagaggggtggcgacatgccaaggtagtcatcatttcctctatgtttatcagtcgagtcgagtcgatgcacattatgtgttcgttaaattatgctttgcacatagtgtatggtggtgttcattacttcgaatagatgttttcgagtggaaaaatagtttcctaatgcaattatgtgtaaggtgtttgtagtgacactttatctcaaaaaagtgttaagtctgcgcataaataagagataagtgtattttgtgtagtgtggattgattttgagtgcatgtgtcgcaagaaatgaattagtgcgcatataggcgatgaatgggtgtgatgaaatggtgacatgccttcgtagtcatcatgtcgtctgttggtggcctaactgaaggtcttagagaagggtcgattacctgtgcattattattgtcaccttgcggttctgtatgaattgc

SEQ ID NO: 127512 - DNA, 828 bp, Zea Mays
ggcacgagtaaatcacgtcgatgttcaggaggctcagcaagctccgggagtagtgctcgatgagttccttgttgaatttactcccgctactgtactcttcgattcaggagcatcccattcttttatagccactagttttgtggaaaagcatggcatcccctctacccctctagagattcccttggtcacccgaaccccagggtcagaccttctatgccagctcaaatgctcccaagtcagaattcttttaagtggggtagtattcttggcagacttaaccgtcttgccatcccaagggattgatgtgatcttaggaatggattggttgaccaagcacaaaggtatcatcagttgtgcaaacaagacagtccttctcacagaccgccaaggaaagttagtctcttgtcaggctcagccacccgccaatgatccaatgatgtttaatgtagtaacggaaagcatatcagtggtatagaatttatggatgtgttcccggaagagttgccaggaatgccaccagaaagagaagtggaattctacatagatctgattcctggaacaacgcccatcgcaaagagaccataccgcatggctcctgccgagttagcagaattgaagctccaaatcgcagatcttcaacaaaaagggtacattcatcccagctcatccccttggggagcaccagtccttttcgtctctaagaaggatggaagtatgaggatgtgtattgattatctatcgttaaatgaagtcacaatcaaaaacaagtatccactccctcggatcgacgacctcttcgatcagcttcaaggggccaaatacttctcc

SEQ ID NO: 127513 - DNA, 521 bp, Zea Mays
aacatgcaattgtaaatcaatctagtgccttgtgatgcaatttggggcgtaatgatatggtatggtgccttcagatatttgtgtcatgtggtttgtagcagctctgtgatgtatttataataacctgagtgttgtttttaggcttgtgatacatgtgagatgagatagttgctttgccctatgatgctttctttgaaaatgttgaactgtatactacacttgatgttttttgtgaaaatagctgagggcatatggcatatggttgtttgtgttaacagtgcagagttgatgttgccagttcatatggttgttttattgaggccaattatagtgcatatggctgttttttttgctgtttcattgaaaacattgaactgtatggtacggaggcttgtgatacattttgagatgagatagttcattttccctatgatgctttctttcaaaatattgaactgtatactacacgtgatgttttttgtgaaaaatagctgagggcatatgacatatggttgtttgtg

SEQ ID NO: 127514 - DNA, 860 bp, Zea Mays
gcgggcactattcttgagaagctcagggtctgttttgttaattccagggcctgacagtgatgatctttctatagctcaggactgcgggttgataaaccaaacatacagagtctcttttgcaaatatctatggccgaaggggtatggaggattctgagccgcatgatctaacatcggtggcctagattagacttaaccctatatgacccggtatgcaatctctcccacacgacttggaagagacgaccctgattctatttggttggattcgatctcacccgtgcacccatgatccaacgatcccggtttactaacctaaatcgttatactctcctgttaatccactcccttcatcggtcgatcgacagccccagtttttcttcttcctcaacgcctagtcacattggtggcctccacaccgcgaccgccattaccggtgtgcagcttccgccacctaagtgccccgctaacagttcgactagatgctacttaagatagagggcaagacgaacaacatggagacactcaccggtgaccgaaaccgcggcgacattgaccccgacccaaagcggcttgccaacgaattctagactccagtacacttcggcgagcactgatgcacccatccgagcataggcaagatccgccaagatccttcgtgagccggtggacgtctcgagtctccacataggcaccgaacgatggaggaagtaggggcgacggcggcggcaatccctcaccaatggaggtggcgctccggttgtctttcttggcactagagtcgagcgcatgaaaggtgggaggtgaaggatatgtgcggcaggtagatatacccgcagccgaggtccacggctggcgaat

SEQ ID NO: 127515 - DNA, 436 bp, Zea Mays
atagtgatgtccttgttggaagcaaacgaccaaagcttaggaaatatttcggatttacagatattgccccatttgtcatgccagagtaaggttgttcttccgtcccctacctccacctgagctagctccttgtagatgtgtagagtttttagaatgtctttccaccaaaatgagcttattggtatctctgtagatactgcgttgttgtggtaatggttggcccagattatgttaacccatgggatgtctaatctgttgaaaaatttgtgtaaatttttcatcaagagggccatgttctgcaattctaaatcaatcactcctagtccaccttgcttttttggtttacatactaatttccaggcagcttgtggtgtattcttctcattgatgtctgcgcccctccaaaggcaatgtcttctgaatttttctataagct

SEQ ID NO: 127516 - DNA, 687 bp, Zea Mays
cttgtccctaaggtgggtctatccgactgctccatcccgagaaagaaatcatgccaaatcatgtcaaacggatttggttcgtcttctagcttcaccagagcttcctaggggtcttttggcgccactttgtcaattgaacctagtggttttgagttttggaacaaggtgaacgtgtttgatctttgtgaggggactgattttcagaaaactgaaattctagtttttatttggagtttccacttgagtgacttgttcgggggtttgcaaagcctttttgggacaactctcttactattttttgtgggttattaagtgtactacaacttctataattagcccaagtcctgacaaagtgatttacttagcctttttattgattttttctttggtgctctaatgtcctgaagaggggaacttcagggtttcggcacttcaccctcttcctaagcttgatatggttaaggcatgatctcttagggcgataaagacttggttaaggcttggctcaagtttggtgccttttgctcaaactaaaccacatgtgataacaggtcacagatgtaggtactgaggagaaaccctaagtaacacctggggtgttacaggaagtagttccagtccccgttatactacgcctcaaagtacaccggctcgtggtagttccaggcaacaaactcaacagaccca

SEQ ID NO: 127517 - DNA, 373 bp, Zea Mays
cgaaaaatccccagaatctgctaatactaatgctgttcgcccacctgcggaaatctgttttttggacagcaacatacccggattcaaacagcgatatctcctaaattataactccgaatcgagcgcataagtactcgttggaaaggtatgacaaagctctacatgattatcatagtgattacagctaattaccgctgcaaaaaccccagaaacggcccacaatacttctgtccgcctgccacccaaaatcaggacagcactaccaccaattcgcttaggggaatagttaatcaaacgtaatcgcagcaaaaatacaaaataaacataagatcaccttgagttattctttcacctctttgttcttcctccacca

SEQ ID NO: 127518 - DNA, 419 bp, Zea Mays
atcttgttctgcccaaaccgaagcatgtccatggaccctagtgaacccgtaagcctttacctagcctcaatttggccatccccgccgttgtccgatcggaacatgtccactctcttgtccatccgctctgccaccgtggccaggacattatagtgcaccattagtgaaattgatggaggggaaatggtcggggtggacctaattgtgttcctgtcgcttgagagctccagtcgtggcgtcattcggccggaataggctcgccggagtgcggcgagggctgattcctcgtcgtggactctgctctgtgaaagtttagaaggtggagggccttagtgtaaaccgtcagtgactcactgaacagtagaagaacctgtctccaaataaatacaaccccgaggccctttctgcaaagccgccag

SEQ ID NO: 127519 - DNA, 481 bp, Zea Mays
caagcatcatctgttaagttattagggtggtggcaacatttaatatatgttgcaagcaccatccattgtttaaatagaatgcgacaacacttaatatgtgttgctatgggaatgtattgattaattaggacgcgacaacaatatgtgttgctagtacagtaacatttataatattagaatacaggctcgatcttcctccctgactgtagcggtgacctaacctgaatcacctactcctgttcccctcgtagactcgcagccgccagccctgagcctcctgcttccccagtatccattcccaatcctagcgtcgtaggaacctccatccacagtgacggccgtggtcacacggcaacgagccaccgcataagcacccacgacagaggctcactacccagtgcccatggccaagttggaggagcatagtcgatctaccgccaagccgtcatatggtggtcgccctcgcccagccgccgatctg

SEQ ID NO: 127520 - DNA, 538 bp, Zea Mays
cacacttcacggtggatcaccaccagaagatcatctgtcaaggggagatcgatatggattctctcctacctccacttcagggtcctgctgtaagtgctccagatctatcccttacgactttcatggatcaacgaggagatcagttaaagcaatacgtagacgaatctattaaaatccatttacattcatacgagaaatcaactgctcctagctttccatcgcgtgagactaatacagagccacttgcgccaagcacatcagctacaaatgggtcacccttggcccagccatcatatggtatgccgctgcacgcttttgtgtcaccatcatatggtatgccacttgcgccaagttctggacatagtcggatcgtccgagtgtcatctcagacagttcggttatatcatggaccgtccgacgtatttcgctggaccattcgacccaacgcaggcctgcacacagatcactcaggtcgcaccgcgcatggccggatcatccgggtacaacctcggacaattttgccccatcacagaccgtc

SEQ ID NO: 127521 - DNA, 287 bp, Zea Mays
gttgctacccctaaatttactttgtgctcagttttcccccaccggaagcaaactaacctcatatgcacacttctacgccattaccgtcgtgcttccgtccactgcaccatgaccggcagtggttgtgcccatatttggcaccgtctcctcattgctacccctaaatctacttcgtgctcagtttccccctccgccagcaaactgacctcatatgcacacttctacaccatttctttcgtgcttccgtccactgcatcgtgactggcagaggttaaaaaaggattttt

SEQ ID NO: 127522 - DNA, 1046 bp, Zea Mays
cccccccccccaaaaaaaaaaagcgaggttgattgcaagcaaacggtttggaggacgggagacagagagatcacagcggcagcatgcaattaagaatccaagaacagcagacgctaggggggttgtggggaggcaacgtggatgctcacacagtgagcagagctgctaggccaggcgcggccgggcggctgcagcgagcggtggcttgagctttataacgggcggaggagtggaggacacggatggatggatggatacaggaagcaaggagcaaccccgcgggtggggtccgagaaaaggcgggcggcgaaggaagaggaagagaaggcagcagggtaagtggtggttggagacagcacaggaagaggacgatggcggaggtgggggacaatttactgacaataattgccgggaggcgagctgctgtccactgctcactcgactcctttgttgtacctagcgatggcagtaaacatatatacggtgtgcgtgcgtgatgcctggtcggggatgcatggtagggcggagggagaaggaactcggagagacagcaagcggatggaatggatggacgtgggcgtcgcaaaagattcagacagggaagggggatagaaaaggaaggccgaaggagaagcagcagctaccactctcgtcgtcggcgacgaagcagcagctagcaagaggagggagaggacggatcggctgaggcacctcttcgccttcggtggggtgctgcctttcgtttccgttgctttgcttgctccctcagcagcctaggactaggagtttcttgcagggctgggactgggttgcaactttgcaagcaagcaagtaaaggaagctcagggacgggacctttgtaggacccaagtgcagtgcagggctcctcgcttcaacttttgcagcgggaggtggaggcaagggtgggtacaaaagttgggaaagaagatggatggaggggcaaacaagggaaaagggggaggttaggctagggcgctacgcgctaggcaggcgcaaggagcggggcagcctttcctgcttctttc

SEQ ID NO: 127523 - DNA, 348 bp, Zea Mays
atcaaatacaacgtggcgagagatgatgatcttgcgagtggatagatcgagacaccggtagcccttctgagaaggaggataaccgagaaagacgcatgccatggatcgaggggacaatttgtggggggtcatggcactgaggtttggatagcacaggcaaccaaaaactcgaaggagtgagtaatctggcatcttgcgataaaggagatggtagggaatatcattatgtatggacgacgaaggccgccggtttgtgagaaacacggcggtggagagagcctcggcccaatagggaggaggcatagccgcatggatcagaagcgtccgaacgacattgttcagagtgcg

SEQ ID NO: 127524 - DNA, 381 bp, Zea Mays
gatagtgccttgacaacatgaccctatgcctagtgtcatgtgtgagctaccactcagacccataatgtcggtcggggcattacatgactaagaaggcaagcactattaagcctagctcccactaccatttatctagtcatcccattcacatccgtcaatcatcaccactcatccaccctcattttggtagcctgccccctagccctagatctagttcactctccttgccttcttgtagtctctgtatcgcctaagctcctctacttggcaacatcgcgccttgacgtctctccgctgttagctcccttgcctcgctaactttcgcattcctcatcctctctctctctaatcttcatcgctctaacaacatgtagaccataa

SEQ ID NO: 127525 - DNA, 435 bp, Zea Mays
ttcgatgaaacgatttccatgcaaagtttcggaagatacactttttgaaggtaggtcgtggtttttaatgtttccaccacattttttgaatagaactgtgagctggtctattaggtgatcttttatttgatgttcttccatttgatatgcaggatgatttagtgttttgcgcatattgtattgaatatcatctgctagtaatttccaaactttttcaaagaatgaatgttcatctccaacttcgcaaaaaagtaacatagtcacaaaaagttgtcgaagttggttcgaagttgcccatctagctgcttcatcgaacgcagtataccactcttgatcatcatttagaagaccacgagctttgcatgcttctttgaaggtacggtataacacaccattatattttcgtagatcttcgtagctttgtgcacctttgac

SEQ ID NO: 127526 - DNA, 397 bp, Zea Mays
aaaatatccatcccttcgttcagtaaacacataggaggagtagataagtctcccacttgggtatgcactatggtccaaaacttgatatttgctactggggtgaaggcgtgaaaccactggatttttgctgtccagttaattccaccacagatccaacagataaggcctcactgcccccccaaaatagtccaaatctgttattttcctagcagcaaataaggcctctagacccatagtgatgtatctcaaccttgattccatccaatacttgagtaacctaacagagaggaagtgatcttcttcaatgtatcagcctgctgcttcattccattcctcccagttcaggccctctgatctcccaattcttcatagcaacagaccactctcccttaaccag

SEQ ID NO: 127527 - DNA, 742 bp, Zea Mays
cacacttggacaagacaaaacgcaagaaatgcctcggttctgcctctctgataaacccaactttggccaaggataactcagtgttcctgacacgaaacccttggggttctgcacctcgaaagaatgaagagaggagaggagaccatatgagaggatttcatctaaattcacccagattcgcgacctatgggtgtttgaatgtgaaagaacgccatgggtcaaccgttcggccacaggtctgagccgcagagcgtgccattgaacgctccgcgcgtgcgcattagggcccgagctcctgtcgtgcaccaaggccaagaaacgcagcgccgcgcacgtgctcgcgcctataaaggtcgctccaccctccgcctttccttgccaaccgttgtccagccagccttcaccagaatttgaccgaggacacgatcatcgtcgcccaccattgttgcccaaggcacgccatggtgaaccaccacctctggtcacgtgccaactcaactagagccaccactaagatcccttgagttccctagggctctccaaggcctcagccagagctctacctcaccagaaccgcgcaaccatcttcgccagagcacggtttccgccggtgaacgtggactcgcgtccacagccaaccatagtccaattccttcaagcaatcatctcctcgacaccccgtgaagtttccccactggtggaattgaaccgtaccatcaccgactagctagaacaccgccac

SEQ ID NO: 127528 - DNA, 348 bp, Zea Mays
ggataataagtacctctcaagttcagttgaaggggtcaaatgatcatcagcagtagcatccaaagaagagatccctgttcttctggtagcgctaagggtagaaggctttggtggagaaatagctaacgtgtttagttcattggagtctgaaagatgagacatctgttgtgatggtgaacatgcaccaccaatgcgtgattgtatttgatttctgaacttggaaaaggatgcatcagacctgtaataattgcacaaaaaacaactattagtatcaatgatcaaaaggcacaataagagctctcactttttttgctaactactgctgcatgttaaaatgttatgactacc

SEQ ID NO: 127529 - DNA, 494 bp, Zea Mays
tcttgactcatctgatgattccgttttgcccattgaagacttgagttggtgcttatcctcccatgacgtggttggtcttctttggccttcctcctggagttgctatccgagttgagggcatatggctatagctaggatagctagggtacatgaggtagttagatttaaacagagttttactttgcttttaggatatctagattaggcaacctatgatgtaggttaggttgttgtttacggacaagttagtccagggcattaatttagggtaagatatgtttatagaatcagggcctaatttatgtctaacttacttaagtaactcaatttggattagctcatgttagattaggtgggatctagatcagattggtataactagataagatctatttattttaggctagatcatggttgctactctaggatgaggtaagcaaagtggttatgacaagtcagaaggataagatagaatccttttaaggtaagatgaa

SEQ ID NO: 127530 - DNA, 431 bp, Zea Mays
aagcaatcattcagggagcattacattccagatggcattcttcaaatgaagcttgaagagtttgtttatctgaagcaaggcggtgactctataatgcagtaccttgccaagttcaatcacctgtctcagatgccatagaacaagtcaacacggatttaaagaaaaaaatgttttctgatgggtttgagcgataagttgcagtggaagatggctacctgtttagatcttaccttcaatagggccataagcatggtgatatcagtggaggtaaagaattcaggacaagggaagacaaaaaggtttgcacgtgaaggaggtgagcaatcctctcagggatataagaagcgatcaaggctagtcattcgttccttcatcccaaatcatgcttttcctcgcccaccctcctacccttttaagcagctggttttcat

SEQ ID NO: 127531 - DNA, 450 bp, Zea Mays
gtctggagttgtgtagccacttagcctggtcccgtaccctaagcctgcacctccaccactctgcaacgggtgccctagtatttggagttgtgatcttgtaggtccggacatgaggcttggcttcccagactcaatcctgcaggtcctgttgcatgaatcaaaggatggctgatactagacgatgggtcctatgggtgtgctactaacacttcctagccgaagctgtgtacaggtccaggtcccagtcgagactacctcctaggggccgggtcaccaactctttcttaggtatagtggtatccagcctcgacacgtcgagcctacatcctagggggccaagtaccagggaggagttggtaacagcacatacaacaaggacaaatagcatgcagataagtgctaatactactcgataaatagtactcaaaagtatcttacaaagaacaaaaa

SEQ ID NO: 127532 - DNA, 289 bp, Zea Mays
ctgcctgggctacagccttaacatgttcacagccagtcttctccaaaactgctgcaaccccttgggcaccggcgaaggcacaaaaatccccacggtcactgagaatttcttcaaaagcttcgacctcttcgccgatccattgaataactccttcaggatcgcctcggataaatttttgctctgacgagtatgcacccacctttgcaaagctatcttttagtttcctcgcacaatccatggatacttcgtagcacttttctctggaatcccgatgttcttcaatattttt

SEQ ID NO: 127533 - DNA, 719 bp, Zea Mays
agggatttcgttcgacgcggctggggtcacgatgatgacaaggattaccagcagtgtagacgtcttggcacccggaggcatcgcagactctctggctaggcgcgttcatcgcggtgccgtggaggtccggaggattgtatcagttcaagcggtagatacagaccttccaccccattccgtcgtcgtggtttggtgattgggccgactgtgcgctggattcccaaggttaagaccaagtcggtctcttttgctgaccccctaatatctgttgtttggtcaccagctgctataagagagctggaaggtgaaaaaagcctgaaacctgctagcagattgagtcccggcgacctggcagctcagtagcctctttttgctgctccttcaaaggtatgtggttcagagcaaatatttatttcagataatcccttcaccgtaattctctcttctggggcaactattgtttgtcttcaagaaacaaagataatgagctggaacaacaacttattgaaggaaacattggggtgtaagttaccaactcagacggttcatttaccatccctgagagcctcaggtgggattctaatcgcatgcgatgcggattttttcgaaatgattactattccctacccatcagtatattcgttatctgtcagggtctgctcccgtctaatcgacgtggcatgggaccttgcaggagtctatggccctcaacctgaaaa

SEQ ID NO: 127534 - DNA, 560 bp, Zea Mays
gcggtgacacgaggatcagcgccggcagcttgtttctctccctcactctctctggttgccacccgccatagatacgccatggacgagcatcctggccatgcccgcgttagcgggtgacgaaggctagagcttccccgagcgtacctgccacccgctcgatcccgtcgatggagcccgatgcgaattccccaatggcggcggatctgctcaacaatggtggcggctctctgcgcaatctgaggaagcggctaggggataagaaggggagagggctttagctcgccatttattggccgagtgtgcgggagacaaatccgccaagcagttgcgccagctgaccgagaactccgtggtggcagcgatcgggcgtccgaaatcggcggggagaagacgatgtttgttacggggctcgagtgggaggagagactggcgttccggtcccacgtgtaagcgactcaagcgaggtagtcacacagcgagcgcgcggctggcgatatgacgaggtgggacccaggcgtcagcgaccgagtacagaaaacgcaggcgcagagcggatgaca

SEQ ID NO: 127535 - DNA, 368 bp, Zea Mays
cagtcgcccgacattcggtcatgttcagcgcctagactgcttcaggtagcaggtcggcccatttgcccttcttgtcgtcgagaagcattttcttaatgatagtgaaaatcttgccgttggcgcgctccacaacgccgttagattgtgggtgatatactgaggcgaaggctagctttgtgccgatggagaagcaaaaatccttgaaatcctggctgtcaaactgtttgtcattgtcaactgtgagctcagacgggactccgaatcggaagataatgttttgccagaaaaatttctgtgcagtcttcaacgtgattgtggatactgcccttgcctcgatccacttggtaaaatactcgacgacaacgaag

SEQ ID NO: 127536 - DNA, 584 bp, Zea Mays
ttaagcggtggtgcttaatttggccgagcagtgctggcggccggaggggagaaagagtactggcgcaacgaattcgtgtcccacgccgtggcagttacttcggtgatcaacagagagcgagagcaggtcacggcgatgcggtggaaaggtatagacacgcggcacgaggccgagaggcggcggtcaccggcgtgcttatcagatttcactgcagcgagcctggtacggcggcgggatttatttactagccagagttatccacggcgatgatctttacacgacttcatgtgttatccagccgatctggtcacgaatcacggcggcgaggacacgcatctacgcgcggggaggttgtcggcggtgagattgccgtgctggcggtctgatccacttcggtttactgtaccatcgaatcaccatgagacaacctgacagagcaagttcaggtccagatttctccacattttctatggtaccaagcccaaacatctatagcaaagttgttctactacaaaggatctacaatttttctatatcgacctagggcaaattccttgaagatcatgatctatagagctccaaag

SEQ ID NO: 127537 - DNA, 449 bp, Zea Mays
tagcaggggcttcagcgcctttctgccccgaccgcgccacacaccggcggtaatcgccaccctcatggcccacgaccgcctccccagatcaaacaacctagagttcatggggatggtcggtggcggcagggacctcatatttgaaacactttgcacagacacggatccaagtccctctaggagtaacaatgaataacccctcggcggcgaggaggacaaaggtcgcctggtcgatgcggccctgtcggcgatccctctaaggtggggctacacacatggtagggtcgaaggaatcaccggatgtaacgcctacggcaaaagaccctatagtagatgcccggtcggagcggatccacaccttcgttgtaaaaccctcgaacggttataaataaaatgtgtttttgaaaacgctctttacaacaaacacggtgagctggggagagcctcgg

SEQ ID NO: 127538 - DNA, 397 bp, Zea Mays
cgtgggatgaataactgacgaaccagattagaatagccataccccttcgtgcaacgcgatctgtgccgttgatccatgatcgggtgaacgggagcagatttagtcacttaaaatctatacccttggtgcgggatccgacggaccacgttgttcatcgtttcaggatgacgatcggcctaatctgggtcgtccaatgaggatccgatggccagatttcttggataccccttcgcaggacgccttttccttataagcccctgatatttattagaatcaacccgccgtccaattgaggggcgccctgtgtctcaagaatatttataccagaccccctgtgttttgatttaattgaagctcgatccagataactcataaaataggtaaatgaatacagaaa

SEQ ID NO: 127539 - DNA, 365 bp, Zea Mays
tccctctcccacctccattgttgttggtaatggttcgctcctgcctatcaccgccaccggctcgacgcaccttagctctcttgttctaaataatgttcttatttcgcctcagcttatcaagaatcttatttctatttgccaattcactattgataacaattgttctgtggagtttgacccgtatggttgttctgtgaaggatcttctctcgcggaacgtgatcatcaggtgcaatagctccggtccgctctacccgctgcagctgcccgtcgttcactcccttgatgcctgctccacgtcatcctcccgtggcaccatcgcctcggccacccgggtcgcgaggccctctccaaactcacttcagc

SEQ ID NO: 127540 - DNA, 693 bp, Zea Mays
ctgggaagagcgggaagcaaatctgatagagcatacactgaaactatcaggcacatcaacatgataactcctaggattgagcttctacgaacagcggagattggtctggatgaagcaacaaatactgagttgcagcaagatgcagatggacggcagaatattattcccattgcaccaacacaacaaagttctgaaaacaatatggaacctgttgtgatgcccactggtcctacaccaccactagaatcgggcctcaatccaggttctgcaaacttcctcgctgatctaacattgactgaactgccagtgtcgcgcacgaagggtaggaagtctgccagtggtggctaaatgtgctaaaaatagtgtggaacctgctaatccatacagcacatacagtgggggtcagggcataagagagttccaaacctgttatgttagggggcactatagcacaacatgccctcagaacccaaacagaagcagagcggtcaagaacaaggacaaaaagagaagtgccaaaactgtaggttggactccaagaaaaagaggtcgcccaacaataaaaaaaaggactagatgagaatcaagacgaggcgcagagtgagggggatgagacacagcaatctgggtgcactatgatcgtggaggagtcagcagcacacgcggtgattgcaagaattaggagggcgacaa

SEQ ID NO: 127541 - DNA, 918 bp, Zea Mays
cggagatgttcgctcaatgatggaagcccttccgttggccgttgcgcactgcccggctcaacctccgccgtatacggcgggattccgtcgagtccgctttgcttgcccctataaaactgaacgccgcatcaccgagcacctgcgcatccatcggcgacaacatgccacaccgtgagggtgaaaccaagagagattggaaggcagattcaatgccgtcgctgccgtcgaactgcgctcaggatgacgtcccagcctcgatgactgctctgtgaggttcgattggacctaacgatgaggtacacgggctaaccagggtcgggcgtcaagcacgacgcggccaattgctcaccggagcaacgatgaccgcggaggacggcacatctccgtgggcggggatctctacgcaaccctcaatggtaagaaccccaccaaacgattcgtgtccgtttccccattgtgttgcgtggccggattggggtatggtgcgcccagggttggatcggtcgctcgccggtgactttcggtagtggtgtagtcatgagcgccgccgctcggtctggctcagggaagaagggaacgtcgtggccgttgatggggttaatcaacggtgtgaattgggggctggatatcgggcagcgggggccgtagatttcgaatctggcggttgtgggttaattggatttcataaaatctgggccgcagatctggggatcagcggtgctcagtgcataccggttcaggaagttgatcgatttaatctgtgtcgtccatatccgatcgcacggctcaggatgctagataccccttcgccatgttcattttactaaagagaccctgaacgtttatgaaatgaacccgccatccatcctaagccaaaataaattgtagccgagcccagaagattatgctttagcccct

SEQ ID NO: 127542 - DNA, 477 bp, Zea Mays
taatggcggcttcggttcgccgcagtccgcggtaacgggtccagcagaccagcgctagctccacctcctgcaacggtcggtgcaactgcaacggacacttaatttagggcgggaaacaagaagagactacagctcgcgttacgtacacgtacggacgtacctacactacaccgctgcgtacgtacgtctgtgatgttggcttccactatctgcgaacggcttccactattcttggccattgttcacctgaacatagttttcgaacacgaacatcctcttctccttgggcatcccaacgcaggccggtatcaaccacttcaaagaaaaactcaaccaaattggggtcattctgcagatgatcctggtcaccaggacctatcttgccctgaataaccatagccgctgccgccgtgctgccatgggtgtgcaaaccttgatggagctctgacatggctcccggtgatcagcggggtcgcc

SEQ ID NO: 127543 - DNA, 510 bp, Zea Mays
atcgaggcgaagataggcttggtgccgatggagaggcagaaatccctgaagtcctggctgtcgaactgtttgccgttgttgactgtgagctcagatgggactccgaatcagcaaacaatgttttgccagaagaacttttgggcggtcttcgacgttattgtggatactgccctggcctcgatccacttggtgaagtactcgacggcgacgaaggtgaatttgaggttcccttgagccgtaggtagtggtccgacaatatctagcccccagcgttgaagtggccatgtgtgggcgatcagcttggtgaactgcgaagggttgctcgagcggggggagaacttctggcatgcttcgcaagacctcgtgactcgattcacggtacagattatcgcgggccagtaaaatccttgacagattaccttagcagcgagggccctgggtcctgagtgggacccacaagttccgttgtggacttcacgaaggatttgaatgccttcggtttcggtcacg

SEQ ID NO: 127544 - DNA, 345 bp, Zea Mays
aaacgagggagagagagggatgaacagaccggaaagggggctggccgtggtgaggctgttcttcgcggtgcggcggaccaattgtgggaaatccaaaattcgtgcgtcctggcgaacgattgagggtgggagtgggggttctggtttcgcgatgatgtagcacagctgaccgtgggctcaatttatagattccagggggcggtggcgcttgaattgatgatggcgcggtggcggccggagaggggagacgagctcagtgcggggagaaagtggctttcaccgtggcagtggctccggtgatcgacggacatgcatccggtgagtcaccgcggtgaagcccagctc

SEQ ID NO: 127545 - DNA, 546 bp, Zea Mays
tgtaaccaaacacctcctaaacgaaccgtgacggaaatgttatttttttctaactccatttgtgtttctgttcttgcagcaacaattgacaggcaagtacaagattgtggcgagaggacaagaatgatgatatgggagatggataaaattgggtgcctgaagatgcgcttgttgttattaggatttgttgtacgtaggagagtctcgtgtactatgttaacaatagtcgaataagttgctttttatttaattattttgcacattgtcctcaagatcacgatcagaaagtgtgctgttgtcggtaggttcatgcagaactaataagcttaataagatctccattggtattgtacttccatccatttgttgagcaagtttccagtttcagcattcagtcacttggccttctggggcatcttgttgccatttattttgatgccaactgaccccacaacaaggattaatggtatacataccacacaaatttttttacaaaattagatggctagttaattttgatactataaagcagcatggaaatgaact

SEQ ID NO: 127546 - DNA, 614 bp, Zea Mays
cggggcctcaaatactgagaagtgcagggggcaaaaccgaagttttcccaagacacagaccactggcgcttggagtgcgggtttattcctaagaaacccagggattctttagtaagattcccgggccgaaggggtacggttgattttcgatcgtccagatcagatccagaggccaggaatggatcacggccgcgacaaacagacaagcgagcgtgtccacttgatcaacgagcgacgaccgcgatttagtgtcgtgaaggggtatcgcctacttctaattagagccgcagggaaccgatccaacgaccagtaggctttcttctacttacgcgcacgggcgttcgacagcagtgagcgcccatggcgcgacccgtcggattgaacaagcgcgccgcggctcgcatctaccatacgcaagttctaacgctagggagatacgggcgaggaagattatgggagcacaacttaccgtggcactgccaggaacaccgcctggtactgcgatcgaccagccgggatcacgacgcgcggtgatgaagctctgtttcccccccggtcagcgcacacgaacggaggattcacctgacgcccagcgcggcagcgcacgacccagg

SEQ ID NO: 127547 - DNA, 279 bp, Zea Mays
agatgatacaagatgaggagcagaaagctcgagagctagagcaagagatcgcgctcatgcagggcgagggccagtacaacctgcagtgtggaccgcttgcaccgctagcgcctctccaacaacgcgtccaagccggagacccattcatacctcagtgtggccccttcattccacccgccgcagctttccaggggatcaactacctcgacgagcgaagccccttggctccgcaactccaagcatcgccttggcccgccaacttcagggctggcacctacc

SEQ ID NO: 127548 - DNA, 532 bp, Zea Mays
cgaaaggagatgtaggcaaacaggatcagctaggatgatcaacagaaatgctatgaagttttaggggcaaggacttatggaaagaaacatggcttggacatggtttgcgcaactagacaacaaacgacatttttttgacacaacaagtgcacaaggagacttgggtcggtctagcggtcaggctgtgggggtctctaagctgtacaggtgtaactttatgggtaaaacacacaagggttagaaaataccaacacaagcacatgataaaatttttttaggtttcacttgctaagctcaaggttgtttggggggtctttcatgagggaacaaacaatttttctttgtaaaaagggttgaacaattacgataccacctagatagcaagacaagagaaacacatagcacgacctaacaagacttaccaaactgacacgaggtaaggcatttctaacatagcagtacatcacattattcacaagttcttattattggaataaaggtgagagaagcatgttggtgcacaagagacaat

SEQ ID NO: 127549 - DNA, 481 bp, Zea Mays
gccagaataaagtattgttcgcagcttaacttaggagtcgtgtcaatgtgaccaacgatcgtttcgtcgtagccgtagcgagattccgtcgcattaataaccagtcagcaactttgttctgcttgtgtgcgtccgtctctcgtgtgcccagagccccagatggtgtgcgcatccaaaatacagttcgtcgtcagcagaagccaacatacacacaccacgaaactacgagtctagttcctgtgttgtgtaacctacatgcgtttgtgtgctttatcctgtatattaaaagaatggtatacgcacgagagttgcaactatagagtatatatatggtagtgtgcattgcagctgatttacgtctacgtttattaacagcggcgacgcgtcgtagcatgatcaatgtttgttgggtttacagttgctctacacgccatttttatcacatgggcgagcgtcaaaagagggaagaaaatgagagtta

SEQ ID NO: 127550 - DNA, 304 bp, Zea Mays
tgcggcaagcttggccactgggccagggactgtcggcagccacgacgtggtcaggccaacgtcgcacaggcggaggcggaggaggaggccctgctcctggcacatgcaagcatcgagcctgatggaataagtcttgagcatctagaggacagcctgcttttgactgtcctctgtagccctttagcatctagaggacagcttgactgtcctctgtagtctctttagcatctagaggacagcagtcgtttttttgactgtcctctgtagtcgctttagcatctagaggacaacagtcgcttttgac

SEQ ID NO: 127551 - DNA, 592 bp, Zea Mays
ggcattagtagaagtttcactagagtggatttgatagagtaggggtctgatctttcgataagttgtttgggtggagatttcgatgttgttgatccgaagttatccaacaacgcaagaaaatcctgtaatcagtacaccacaaccctattggttactaactcgcgtacacacgaattagtctcgcaaagaaggcttatcttgctaatgcaaatgagaacacatgcaacaagaaagtaattgggacgaatacatgttgaagaaggacaaggattacatcgatagacttgggatggttcgccgtgacttttgggtaaatattctagttctatctgttctttttctgaacattcttattttatgacttctgagtacatgttctttatcttgtagctacgttatcggttgcctaaaggcatggattgtatggcacatgttggacgtgtgttccaaaggaatgcacaaaagctagtgaaggatgcactatactatgcaaggattcaagcaacagatctttattttcaagttcattctgatgaagaaggtcccttgaccaagaagcaagtgtcctcaaatatatacctcaccgaggaac

SEQ ID NO: 127552 - DNA, 735 bp, Zea Mays
ggggcagacatgggtgagggcgaggtgtggacgctttccttatcttcttcataggagtagtataaaagaatacataaaaatatttataaatggtttgggagcgaaatttaatttttagaattttttggctttttgttgctccgacagtaaaaaatggcaactttaaaaatctagtccacgtggtgctaattgaatgtcatgtatggacgatactttctatcgaaagccaaaatggcgggccgcccgttcttatcaggcgatagcgtagtcactcgcccaaaccaccacgtcacccagggcgggcgatgttgtcctggtgatacccccaccatatgaaccaccataattgtgtgtgacgttggagttgtgaaccatgcaacttgcaagggcaaaggcacaatagagagagggctatagaaatgataggtcatctggtcgagcgagaggagtatagatagccagatagactaggcccgctgggaagcctagcacggtccataaaagctggaactagcctggcctagtgcataatgcatcgtgcacatgttgacgtagttcaatgcatcgtgtcattgttgggtggtcactttggctatagtgttggtctaggaccgacatgatttttaggctgacatgaagacggctcggcttgttagggacccctctagcctcttccgaatattcgatgggagggtggcctatataagccacatctgacttctgtcctctctcgcc

SEQ ID NO: 127553 - DNA, 1075 bp, Zea Mays
gcgcgcgtgggtttggctggaattcggcccagccgagggagggggtgaggtttttccttttctttttctttttctaattctaatccctttcttctcctttttctatttttgtttctttttgattctttttctttggagaccaaaaatattttctaaatgatcttgagtgagaaacatagtctatgtgaggtgctctaattatttcaattgtatgcacatgaagaggggttctaagggtagggttaagggagaaaggtaaaataagggggggaggaatttaggaggttagggtttcaaatcttgggtgggattttggaatgttacagatttgcagtgatttttccatgatgaaccactcaagacgtcatcccttaatgctatccttgagggggatatcgagatactccactttcctcccccgtcgaagctctaaacttacgccatcgacaagctgatgctgccctccagccatcacggaccgacagtgatagagatacctccagagtccgaagtgggggagaattccaagaaaagcctcgcacagatgtacgaaaatggcaacttgaagaatagagttagggtttaagtgtgtcagattcaagtcgtaaaaatcaaggagaccacggaaaaaaggagagatgggaagagcgagtctgcggataagaaacgagacgtaaacaacagattcatgggtatcctctgtcagaacagtgaccccgctgcagattcgccaagaacagagttcctttggcggcaaaaccccaatctcaacaaggtgaaggtcggattcagagataatagacatgtgattaccagcaaacggaagctggctgttgggatcgatgggagggatgatggcagctgcctcttccgcttgggatccattgcaatctctcgggcggaatgagcgggctcagaattttgcggaagcagaggagcggctgaggaaaaaagagaagttagggctcggaaatcaaaatagcacgtcggcacgagtataaatgggtctcttggatctggcattatctctaaagtgccagatcaccactcggagaacctcagtcatcagctattg

SEQ ID NO: 127554 - DNA, 490 bp, Zea Mays
gcttgagaagaccagataacgcgaagccaaagggcagaacaatcaatgataacgaaaaaagagttattaagttgggggcaaaaggagacaagaaaaagaacaaaaagtgtcaaaggtgtggcattgctgatggtcacaatagtcgcacttgtctatctatggaggagaataggcttcggttggccttactggtcgaaagagagggcggcccataggttctaggaacaagggttcatctaatgctccaaattggaatgagacatgcacttcaaaaaaacattgcggtggtgtcacagacaatgattcatctagtggggagtagatgatttcttattttatgacaaatgtaatgtagtgccatacttgttattagaaatatggatgaatttataaatgctggaaccagtcgatattcacaaagtataagtaataatgatgtactgcatgaaatggaaggttttgtaaactgtatacgaaatatgcgtaattg

SEQ ID NO: 127555 - DNA, 599 bp, Zea Mays
cggtgaggatcaccgacttgccccccacccggggcaaagcttcgatgaagtccatgccgatgtcggtccacacgacctgtggaataggcaggggcagcagcagtcccgccggatggagatgctctgatttgttgtgctggcaggttgcacagtcgcggacgaagtcttgcaccacccggcgcatggcggggaagtggaagtcgcggcgaagtcgatgtagagtacgctgtaccccttcatggccgtccccgtgtacagccgccaccaattccggcagcagtagcgagtccgggggaacgtacagtcgggcggcgtaagccaccatgtcgtccaggagggaccacggcgccccctggtccccgcggtaatctcatcacggatggcgacgagagctgggtcttgaagttgagcttgacgaagacggtcgatgaagtcgaagcgaggtgcaaatagagccaagactgccccctcctcgcaggtatcacgccgggacagggcatcgacgacggtgttggtggtgcccggcttgtactcgacggtgaagtcaaacccgaggagcttgcccacccagtggtgttgtgggatcgtcgcgagccgct

SEQ ID NO: 127556 - DNA, 1120 bp, Zea Mays
cgcgggctcccctcggatagcgccgcaaatcgggggccgttgcaacctccctagctccaatccgaatctccctagctataagaccttgcgaccgccgttccctacccttcctcttccccttttccctcaaccccctgccaggcgccagtagtgtggaagcaaagccaggcggtgccgctgccgtagattcgtgcccccgtcattgcttcgggctcggctcgtggtcggaggtattcgtcttgacgctctggtgctcgtggttccctcggccagctcaacggagtaacagagaagaacgaattgctcaccggagcaatttgtaccgccgcggaaccaagcctcaccgtggccagcatcgccgagtcatcgatcctcggtaataagtgtaccctcgtcctcattatgtcttccgcattaggtaacttagccgaattagaaaatgggcgtgggagtacggggattaacttcgccggtcagggctcgtcgccacggctgtcctgtttaccgccgccgtcgtcgggtcgggggtaggagacgcgtcctggtcgttggatcatgatctggcgtgctgaattagatgatgggcatctggtcgtccgttttgcgatgttcggccaggattagaaaacacttacgctttcgcgatgattgaactgtggtcgtaggattgtcagtggctgagatttgatcgcgaccatattaaatctggtgcgtcgatcggatcggatggccctggttgcgtggcaattcttttaatactggaatcaaatctggaacgttcgaattggatcggatggctcagaactattgataccccttcgtcgtggccttttttataaagaacccctgtggtagtgaggaattaacccgccgtccactgcggtgtagcttgagtcttaggaacatttgtgggttagcccctgcgttttttcagattggcatggaaaatcatataattaattacagaaattgatttttagtgcaaaaataaatccagaaacttgattaattcataagaaattcattttaattcctttttgacccattccaatttctataattttgtattaatattgtttatcacctaatgactctgttttgacatgaaagtcactttaaa

SEQ ID NO: 127557 - DNA, 702 bp, Zea Mays
atctaggtctatcctgttgggtgcgtgtaccgtttgtcctggcttacagtatgagctagcagagagagacgctaggatagctttgcttgaaaaggctagctcagtgagtgcccctgcacctgcgtagtgtgcactttgtgagggtttgcaatctgcccttgagtactacatacacgacaagacaagaatcgaggaagaaaacacataccttcgatctatcttgagttgggtgtcatgcagtgagccccagttgggcatgatggtcagtcagttcaagaggggaactggcggaccggggttaggctttgctactaaggatgggagtgtcgctcgcttcgggaagattggtgagtgcagtggtttgacaccttcagataaaccttcacccactcccaagcttatcaaaaccacctctgttaagcctgtaacccctatgagagatggtgtgattgatgaatctatgagagctcctcctctgaaacaagtgtggcttccaaaactgaaccatcttaggaacacacttgacacatttcccagcatctctagcgatccccttcctagagcccctcagccatccaaaaagaaagccccctcccacaaacaaaatccacccaagagagaggtgaggtaccattgtgaatattgtgagagggatgggcatctagcttccttttgctttaggaggaagagagatgagcggcg

SEQ ID NO: 127558 - DNA, 698 bp, Zea Mays
atcaacctctatgggtttatctctgcaccaggcgagtccaggaaatcacgatcttcaccttgcatctctgcaccggagcgatggacttggggtggtaaccaccctgactccacctccggtcaaaggtacatctaaaatcccatcacctgatgtctttcattcccctgtgattcatgcgcaagatccttattgggtgtcttatcagtcacgtttagccgcaaccttaccccaacttaattttccctcatttgacggacatcatcctaaaatgtggaaggctaaaagtgagaattattttgatgtgtacaccataccccgggagctttgggttaaaattgcaacaatgcattttgtggggtcggcggtgttttggttacagtcatctgatccggtgttacgtgtggcaccgtggccggagttttgtgctgtagtgtgtgctcgctttgagcgagatcaacacaactctcttatgagaatttttttccacattacacaaagtgatacaattactgaatacgtcgaacagtttgataccctcatgcaccaaattcttgcacatgatcctcaatttagtatttctgccattgtgaatagattcatagatggtcttgcccctgaaattcgttccatagtctttattcatcgtcccctcgatttggatattgtcgtctctctcgctttgttacaggaagaattgg

SEQ ID NO: 127559 - DNA, 559 bp, Zea Mays
catcaaaaggcttgctgttgtcgggttgcgctaacactagtgctgtggtcagatgctgccttaatgcatggaaggcatcttcgcacttctgactccaaacaaacttggcttctttcttcagcaactcagttataggcttcgcaattcgagagaaatccagaataaatcttcggtaataaccagctaatcccagaaaactctgaatctgacagacagtcgttggtggcttccagttcatcacctcttgcaccttatcaggatcaacagctattcctgcctgagagatagtgtgaccccaagaatttgatttcctttagccaaaaatcacatttggacaacttggcataaaggtggtgctctcgcagacgttgaagcactacatgcaaatgcctagcatgttcttcttcgttcttcgagtacaccaaaatatcatcaatgagaaccactacgaatttgtccaattcaggcatgaaaacagaattcatcaggtacatgaaatatgctggtgcgtttgtcagcccgaatgacatcaccaagaactcatatagcccatatctgg

SEQ ID NO: 127560 - DNA, 385 bp, Zea Mays
cgactgggtggagaaccagatgctggcacgtggcggtgtcgtactagaactccaaaagagcaggaggaggctggcagtggcttgctagaagatatagatcagcagtagtagtagcatcaatgcatcaccatcgtctttcgatccaactccatgcatatatatcatctgatcgaatcttctccaattctatttactcggatttaaatgacatggcacaaatccaatggctgaaatttaaccagacggagagccacatagaaagcaaccatagaagatccgaatagtgagtcagtaaaagaaagccaagttcgtacatgtggggaagaggtagcagtttcccttctccacgataactgcagcaacacaaatctcgaatctcttttcg

SEQ ID NO: 127561 - DNA, 434 bp, Zea Mays
ggctgagatagactttcaagtctcttgccaatttggattgcatgtgaacgtgaggaaaaaatctggtggtccatgaactcgacaaatagcaatgctgtcatgataattttggatcatgtagcgtctgcctcctgtgtgtgatgctggtaatattatagtttttcccatctcttcaccgctgatgcatccacggctaactgcatctgtgataccttgaatgctttccatccgtagattcttttgattattgattatatagttgagtctattttcatcaatacatgctctagcatctactttggcttgacttgataacattgcataacacaaataaggatttggttgattttttctataatggaactggtagcaataatattcttgcatagttaaatgttttcgtgcattttgtccgctggatgtggcaccattgt

SEQ ID NO: 127562 - DNA, 575 bp, Zea Mays
ggagaagaatgttagggttgatttgatgggctcagtttctattcgagttgtttctatccttttctatcctaatcgtatacaccctgatcgaaggtgcaacaacacgtaatagttgtgaccctccctttcatctatggagataaatgctaagatgggatcgatacgagaaccaatgttccccgtcgcacccgttctccacactcctatcttactttgatcctgcgacagtgaagagaaagctgctgccaagttcactatcccgtgtgaacccatcgctctcatctcattgttactagagaagaacactggcccaaatggcgaattctagccctaaagatatactatgttattgttcatagctctaatgtttaaggtttaatgaaagatcaattagatttagcaaacagagctcacgacctcatttatgcatgcacgttttccccatgcactcacattcaagagcttgtatcaagtggaacgagcaagtccgcctagatttggagaatggctttgccatgcatcttcacaaaatatgcatgtctctctcctccaaataacagactctctagatcaat

SEQ ID NO: 127563 - DNA, 521 bp, Zea Mays
ctcctccaactttaataatgaatgtgtcaccaccctcgccttcaacaagtcctctctcttcccaaaggtcaaccacaagggccttatggccaaggatagaaaaaagaaggtatacactagaaactctccaaaatatacttcctctagtgatgatgatgattctagtgaacacgtgactatgctcgtgggatcctagagcatgcaggtatggaaaattacaacctatgccatattctgatggagccatgcctaaagatataaaattctagcacatcataattggtggatgccattgagtatcaggtccttatcggctaactccggtacttggtgcatacctagctagacttcaccttcatcgtcgactatgtcagccaattcatggagaactgtaccacctagcacttcaacacggtgaagtggatcatgtgctatatcgcctacatgattgactacctctgttattacaagcttgataggaaggagataaagttgttgggggcacaacgatgccaacatag

SEQ ID NO: 127564 - DNA, 298 bp, Zea Mays
ttgtatgatgaagctgtgtgccctcgcttgtgtacgtgtgcgaaggcgttgtgtactttgtctggtttgttctgttgttctgatgtgattatagttggtcttggcggacggtttgatgttgtcgtttctgcctttgttaggcgacttccgagcggatagtcctcgcggcagactttggttttcgcgcgtttgttgtgctagtccaactgcacccttaggcgacttctgcgcggatagtcttcgcgatagactctggttttttcgcacttgttgtgctagtccggctgcacccttaggc

SEQ ID NO: 127565 - DNA, 395 bp, Zea Mays
gtgaaaaatcccccgcaaaagcatgcgtcgaaacaagaccgcgacgacggtcttcaacattcgaccaattcgaggtcaccgcgaggctaagcgctagccaccctcgcgtgcgacaaatccgcgcagaagtagcctacgggtgcagccggactagcacaacaagtgcaaaaaaaccgaagtctaccgcgaagactatccgcgcagaagtcgcctaagggtgcagccggactagcacaacaagtgcgaaaaaatcgaagtctaccgcgaagactatccgcgcagaagtcgcctaagggtgcagccagattaagcacaacaagtgcggaaaagccgaagtctaccgcgaagactgtcgcaccagcacagcataacaaaacacaccagacaaagtacgc

SEQ ID NO: 127566 - DNA, 695 bp, Zea Mays
caatactgtagttttacagtaccgtagtatttatgtcatgtacaattataagtatctcaaaactacagtatttcaaaactacattcccatacagtccctgagtttttaagcagtccatgtgtttcaaaacatgaatttagtatgcctctcgttcaaaaaaataataatttttggagaccacggacacagagcgaatttggctcgctgggcctagcatgtttcttggagtgtatcgaatcaaagctagcctgcctttggaaccaaacacgtccctaatgcgtgcatgctagtactacctcgatcgttaagctaattgctaggtggcttttaatatgcccgttcatgtcagttccaaatccaaacgcatgtgcttcgtctaaagaggatatatgcatgataaaatactcgatctgcgcgcgtcgacaagaaatatccaattgcctttgacgcttctcagttctctccctgctgtcagggaaaagtacggttagcaaatatatatcttattcttatccacaaagctcgcaaaacattgcaacatgggtagaccacacagtctgattccatagcgaaattcctcagcaaaggttgcacttgaataccagtttaatatctccccccaaaatccaagatcccagcatgttccaactgcatctctcaccagaacccggatccctctgatctggtccaattct

SEQ ID NO: 127567 - DNA, 564 bp, Zea Mays
tgacgacgggagcttgggcgctcaagagggacaggtgggaggaatatcatatcatactcgatgcctagagagatgaactcaagactcccaaacctaatcgtcatccctagcctgagcaggtggtgaaaacctgccatctagagtgctggcgagaactgggagtgtttcacgtgactgtcccctacctgacacgccaactatcggtgtttggaccgtgggtccttaaccaaccagtaaatgtgtcgcatggccgactctagatggtgtgcgaggagacacaagcgattatcctggtttaggctactcaaggccctacttccagcagagaggatgaggcttatattactcgcatcatggtgcctgtagtaggggtttacaagcacagatggagagggcaagtccctaggtccctagagatgattgaggcaagtgccaatacctaagacagagtgagagtgtgagtgttcgtctacgtgtgttgtgttcgtgttgatgtcgtcgatgttgatctctcgtccgtggagggacccctgtcctatttatacaccaaggggagcgtcctta

SEQ ID NO: 127568 - DNA, 550 bp, Zea Mays
gtcagccactccttgcggcgggctcatttcctttctcactggcttgcggacctcgcgcgtcagggagcgcgccctgtagatcttcccaggaccgcatcctcagcagcttctccgctagccgtgcgattttggcgctttgcatgactcgtcaaacagctccaaccgccgccgggctctgcgggatgccaaccagcttgccgcaaatccgcccatctcacccgagtgacttccccgttgaccccgcgctggacttccccataaagcgccccgctctaactcaaccggtcgattagccaaagaaagaggattcggtgagcagagagggagccgctgttgccgtactcttgggatgccgccgcggtcgtgaccggttgggcgtcgcctggcatcggcgtgtaaccacggtgaggctccaggttgaggggctgttcatccagtcatcggcgtgcgcgtgggtattcattggtggcggggattcctcgccgtagttgaggaatcaccgtgggccgcgcaaccgcgctggcactcatattggtgccgttctgatccc

SEQ ID NO: 127569 - DNA, 504 bp, Zea Mays
ccggtctccgccgccgtgaagaacaacttgccgcggccagctcgattccggttagctcgcgtccttctgttgcttgttctagcatccgtaggcaccccgcgaactcctcgaaccgtccaattgaactagatcaccaccactcactgggaacaccttcatccctctataacgttctcggtcaccgtggacagggcaaagtagagtgccattcttcaaattaacttaggggaaacgttctctaggtaatgaatttggtttaggccgacgctaagcactggtcttggcctcctccggccggtctgcatgctcgccggagttcatcctccgcgcgacgccgtcgtggacttcatcctgcgaagagttagaaaccagagggcttaggtgtaatctggcagcgacacataggaatagtaaagaagctcgttctccagttagctaaaaacccgagggtctttctgcaaagatgccagggcgcgggcgcgcgcgggcgcctttcctctctgg

SEQ ID NO: 127570 - DNA, 284 bp, Zea Mays
aatgtcgttgcaaatcgctagatttcagcgtggttgttgtgatctaggttgggcagcctcgattgggactccgtttctagtgtatataagtacccatacaaccaaagcgccaatgcaccgagcaccaaattcacgccgagcttcatcgaagagagagaaagacgctccgcttgggtggaggcttcgctggttgctgccatcgaagatgctccagtcgccccgcctccaatggcggcaccgaggatgcgacctgcagcaacatcgcccagcacccgaggtggaag

SEQ ID NO: 127571 - DNA, 326 bp, Zea Mays
tgcatatgaaagaatttagtatttgcatccccctcttttaggtacttaatcctggacctcaaacgtgcaattgttctttccatagaagcataaacaaaacaatgttgcttcagctttcctagcagccaaaatcatcccctgacaaaaactctattgtcctgtgttgattccaacctatgcatcacctctctagcaagacccaactggtttctcacattacccacctctctatgcccccaggactgcagatgtttagcaagccttctaagtttttgggataaccttaccaaagggcaggttgccaacattggctgattccaggaatc

SEQ ID NO: 127572 - DNA, 454 bp, Zea Mays
agtccagcactgggagggcatcagagatcgacactggcggccccgacactaggatgtggctcatccctagtggcaccagtgccgtgcttgcctcaccggcccactcagcgatgcgctagaccccagcgcgatgttctgcttggagatcttcgagggcctttctggtgtcctccattgcctgggggcccgacgtagcctgtgccgcattgaactggcggatctgctcctctagcttcctctcattttcctctgctttgagctcgtgctcggccagcaactcgcctcgccgggtgagcatttcttccctaaaggtgagatctgtctctcgcctggcgagatccgtctcccgcttgtccaaggatagctccttctccttaaggttttcctcggcgagggtggcgtcgctggccttgccctcgagctcttgctgccatttctgcagcctttccacagc

SEQ ID NO: 127573 - DNA, 513 bp, Zea Mays
aagatcacagaaaattggcatgaacataaactatcgaatctatcattctgcagaaactaaatttgagatcaaaatctaacccccacatccaatccaacgaaattgcagcacaattaccaaaaggaaaacaatatcaccttggactcattttctttctttcttcttcctcccaccaatccaccaatggagaatgcagcacaccaaaggaggaaccaggggcggctagggtttagagggaggtgggtgcaacaccttggggaggagaggagcggctgcaatggggaagaaggggggcggctgctgcaaaaaatgaaggaaggaggggggcggctgctgctatgagggatggggaggggcggctagggtttttgagaagaggagggagcgatgctcccgatgcccttgatgcgaaaccgacggctcacaaccaaatcccccatccatgccccgatttagacaaatgaatactcaaatgatatcgtataaatgagatcttcacatctgcagactccg

SEQ ID NO: 127574 - DNA, 345 bp, Zea Mays
cggaatttttcccggctcaaccggttttgaatccggtcgagtctccggctgagtagatcagtgaaccgagatcttcctagtggaaaccggttcaaccgatttgtaaaccgattcaaccggttttcggctcttttctcccaacggctgccagcttttgggggatcctttaaataccccccacactctctctcttcattacttctgctctctccacgatttctcagctgaccaaactccaaacaagggcattcaattcacatctcacacccaaaatcgcatctccttcaattgcttgaaggatccttggtgtgaggtgaagtcgatctaatgcgctgtcaatttcac

SEQ ID NO: 127575 - DNA, 631 bp, Zea Mays
ggtaaagctagataggtttttggtttcgacagagtgggaagagaaatttccctcctgctctgcccatggactgaccagggtggggtctgatcataaccctattattattgactccagggatcaaatccatcccaaaccaagatatttctactttgaaaacaactggtttttgcaacctgggtttgaagaattagtcaaagaaaaatggatcgagaagttaaggaaacgacctgtgggaatctattcaattgaagggtggcatgggagcttaacagcgttgaggatgttccttaaagggtggcataggaggctgcttgggtataaaaagaaagagaaaaatgatctcatccaggagctagatcagatagatatattgatagaggatcaggttaatctatgggagaactggtcaaaaagactcgcgatagagaaaaagcttgagcatatttatcatttagatgaggtgttctggcagcaaagggctggtagaaaatggactgttaaaggggactctaattctagattttttcatctatatgctaatgggaggagaaggaagaatacaattgcctatttggaaacagacaagggggtctgtatggatcagaaagcactgatcgcccacattgtg

SEQ ID NO: 127576 - DNA, 316 bp, Zea Mays
aaaagaaccgccatgcacatgtgatggcataaagaaagtgtctgtgaaaacgatgagctagtggtgcacccttcagatggggatgcttggaaggctctcaacacgtttgatccagactttgctgctgaaccaagaaatgttcgaatcggcctcacaaccaatggcttcacaccttttggtcaaatggcatcatcatactcatgttgcttcttctttgttactccatacaaccttccaccttctctttgtatgaagtatgaatttatatttctttggttgatcatacctggcccggaccatcatagaaagaaattca

SEQ ID NO: 127577 - DNA, 843 bp, Zea Mays
agaacatcactagggatcaactcagcaccaccagcaggcatcagaactctagcatccggtgcgccgacctctaaggcgacttcctcatttgaagcatgcgctgttaccatgccattagaatgtggaggagaagacccaacgtggacatccatggaggtatgagaagggagcccgcttggacaccctcgggggctgggttgcagcccgcaccacccatcggagccggatcaccaccggcaacacccttgggggctgggttgtagctcgcgctacccacccgagccggatcattaccggcaacaccctcgggggctgggcaaccgctggcaccatccttgaggactaggttctccgcaacagccatctctaaggctgaaggactttcagtcacctccatgggaattgaacaaccctgaccaacctcttggctccggagatcgccttccaaggtcgacgaggcacgaaacactactcgggataactctaatcccacatctggaatgtcagaacaaatgtccatcatatcaccatcagttggctcggacaacatatcttcaggaacgacatcctcgagagcctgatcaaagttggctatggataattcttgcagaccaacaagagtagacaaagctggagaaggaatatcgctactccccccactgactctgtaacgccgactgttcttccgagtccctcttcttcttcctcatcctcgtcaacaatacggacaataaatggctcagggtcacacccattgggatcagctctggcagggtcacacccactgggatcagctctggcagggtcacacccattgggatcaacatcagcaaggccacaccc

SEQ ID NO: 127578 - DNA, 1408 bp, Zea Mays
gtcctgcgtcttcggccgggtgtgcgcgggccacgccgaggggcccgacgagcgctacgactgcacgaggctggccccgcggtggtggtgcggctggcggcgggcgcctcgccggaccgctgtgaagcgcgaggcgaaggcgccgcccgtgttggaattggaagcgcctgccgcatcgccgccgcccggggagccgtaaacaagctcccggcgaagaggtttatggtcctttaccttcgttctcttcactcccgagttacggttatatattattagtaggatatatagtctaattaaataggagaaagaatccatcttagatcaaagtaaatttaaattatataatctgatacatgctctaagtcactaaatgttgtctgatcatctattcttcgttcgtgttcactttcgctcaacatcatgattagtatttctttatattgtttacatcataggatagaatgtttttgcttataatatatatatagtactttgaacctcccaataattgttttgtactcggatcaaccagtacgtgcatgatatgtgtatgcatacgtccgtatccatcgatcctcgttagactaaaccgaagagacaacatagcagcagctgttacacattcgacatttccagtgcagtacaaacgacacctttcatcatccaacagctctgagatcatgtatagtcagactaaaccctgatgctgcaaactgaggaattaatgaaccctggtgtttaagtttaactgtgacgatagttctctctgctgtttctgtatcacagatctcggtcgaaagctaaggtgacgatccgagtgctgatctgaagagcaccacgcctacagaggagtgcgatgatcatgaaccggtgacgacagatagttctttgctgctttggcattagatttgaaggccaatcgtgtgcagcagagttaggctgtccccgctgggccactgtgtctgtatgtgttacgtaaaaccagctgcaacagcgtacttgatccccacgctatatatcatccagtaggatggatggaacgcgaaacacagcgttgtacgacatcaacgccatctgctctcgcgcgcgtcttcgcatgctcgaatgaaagtagagatttagggttcggacagccttagacgtagttcggtgacgactaatatgccaatacagaaacacaacccgaccttattagtaccctacacactatcatcaacaaccattccccgcgtgccgtacgtcaggccggtctgttgcgttctttcgcggctgcttcggcatgtatgcaacagccttcggaaacggggccgagatgaattagaaatactggacgtactagattgaaagggtaactgatggttacacttctgatgatagactacagacaaatctcttagcagtgtaggcg

SEQ ID NO: 127579 - DNA, 274 bp, Zea Mays
cttctggattttcttcttgggagcaagcttctttagcttcttatcatagtccatctttaaggttcgataggcctcacgggtgttggcctccttgccttctgctatgtcgaggaactcctggagagatgccttctcctgcttaagctctttgacttgctgctctaggctttccacccgagagtttaggtgggtgcagtgggaggagagatcatcgtagtggttgtcgagggtgtggaggtatccggccatgtagacgatggtggggtcatcttct

SEQ ID NO: 127580 - DNA, 389 bp, Zea Mays
ctgggagacaacggtagcctggaagtcaagccaatgctagaagatctcataagcaaggctcaacgcctggactcagagacagccagacttatggaaagagctcgcaaggagcaacttccggatcttaggacagatgagcaaggagtcctctggttcaagaaccgcctgtgtgtaccaatgggagaggcacgggaagtcctgctcaatgaagcccacaactcagcttactccatccacccaagaaccaccaagatgtacctggacctcaaagccagatattggtggaaagggatgaagaaggaaatagcacagtatgtggcccggtgtgacacctgccagcgaatgaaggccgaacatcagaagcctgcaggcctgctgcaacccctccc

SEQ ID NO: 127581 - DNA, 359 bp, Zea Mays
gtagaactctctcatatcctctggaaaagcttcattattctgtagttctgggtactcattcctaatatcatccaacatctcttccattcggtctacatccaggtccccatccgactcaatagtatggtccacctctccatgctcatgccatacgagatagttcggcataaaaccatgtttgaaaacatgatatgagagctccacttttttcaaccgaaccaagttccgacattttatacacgggcacctcgctaaacgagcatcaccagcaaatgcgagtgccacgaattcatctgcaactctcacccatgcatcagagtgcccatgagtggcactgtcgaatccttcgtacatcgccc

SEQ ID NO: 127582 - DNA, 748 bp, Zea Mays
gggagccgctgcggagcgcacgatgcagccccgccgccaccccaagctccctgctgcaggacgagctggccgcacacgaggtgttcgtcgcggtgcccgaagaggtcagcgacgggaggagcacccttctgtgggcgctgcgcaatctggtcaaggacggatccaagcttgccatagctcatgtccattattgccctgcgccagcgatcgcccagagtaagtttacagggcacaatatagtagtctaaacgcatttgtttagttcaatatcaaaactgcttagctctaagatatttttagaactaggaaacatgtctctgtatctgaatttcgaaagcaattgcattcgttttacacccccctagcacgtacggctcggaattcgttgcatctgtcacagttttcttaacttgcactctgcagcagcttgtgatttccgttacatttcagacaggagtcataccagcatgaaaccagaagaaatcaaggagtacagaaagcagaagcgagcaaaggccgagaagagtctagatgcgtatgtgcagatggcaaaggctgttacatttcaggttgcctgtgcgaaagtaataatcgagacggatgatgtagctgaaggacttgaggagctcatctctcttaataacgtaactgagtttgtcatgggagcagctgcagaccgacacttctctaggtacggatcagactaacaaaatcgctctacttccttaaattggatgcacatcttact

SEQ ID NO: 127583 - DNA, 542 bp, Zea Mays
cggaggagagtcgtcgtactcgaaggagaactgctctttagagtactccgagtccccaaagtcctctgatggaggacacgaagggcgcttgcgcttcccctccgctgagtgacgcttgcctttacttcctttcccactggccatggctctcttgggtgagtaggaaaaggggaagaggagagcatatgaacaagaacaggtgaggaagacagccgagggcgagcaggctatttaaagaaagtagagggcgacccttcgtttcctgcccgttcagcgaacagtcataggacttcaatagcaacttaagtttccaagaaagaggtcagactactggcgccgattcacatagcacaacaccagaggaaatcaaagtcaaccgctcggacacagcattacacctctccatcacgtcaatttactatttctagactagacaatgggcaattttcaatggatatacacccgtcgaatgcacccattaggtgtaccatccggatttttcgagattttctgaagcggcgtgacctgcaaaatatacgcaa

SEQ ID NO: 127584 - DNA, 577 bp, Zea Mays
cgtccccgtccccaccccatcctctcgccggcgccaccgtggcttgattgaaccagcgacactgtcgctgccgctgcagcagcgtaggcttcctcactcagcacgcacccacccatccaccgacccaatccaccgcgcttgcagttgcagattcagccgaccgagcggtgccggggcgtgacacatcgaacgcgcacacttgcagccacaggcgccatccgcttggtttggccagcaatcatcagggcttcttggagccacaggagcagcaggtggcaactggcaagcataaatgaatcggatggcaacagatctaagctagcgatctgatctgagggccgacgagacttcattgccacggatcacccggagcctgtagcatgcatgtatagagtagtagtagcagcagcaggcaggttcacgttagacggaccgctcgagtcgtctcggcaagtaatagccgacacagtgctcgctcgttatcctcatcaatcatgggcttctgttttctttcccaacccatcatcataccatacgatagaagcacaatggcccaaaaaaaaatctttgcttctat

SEQ ID NO: 127585 - DNA, 622 bp, Zea Mays
ttccaaagatctgtgagttggatctacaaattcagttgtgttgtcgaaggtagcatgcacgaccataggaatttcgtcctcaactatcatattgtgaagtatgatgcatgtcgtcatgatgtcgtgaatgttggttgtcgaccaaccgtacacaggaccacatatcactgcacacctagcctgaagcacatcaaacgctctttctatatcctttctagcgaactcttgctttgttgcaaagtgctttgtgcgaggctcagaagggcgtcagactgttttcacaaaagccaaccaataagcgaaatatcgtccgcaaggtaataccccatgtcgtattggttaccgttgaccgtgaaagcaactgaaggttcctccacattgagatgccttttcgaatgtgtgggcgatgcaaaacattgacgtcattactgctatcgggcatgccaaagtatgtgtgccatatccataagtcataagatgcatccgcttctaggatcatggtcgggtgcttcccttggcctgtgaacatacccttccacacggacgtggtagggcagttttttcactcccaatgcatgcaattgatgcttccaagtatcctagaaatctacgtgactcacag

SEQ ID NO: 127586 - DNA, 731 bp, Zea Mays
gtggtttcgcgcaaaggtccctggccattcaaatatctaatacagagtccgcgacactatttacttgtatcactgacaatttcacataggtcctcctacttctattccttcacggttctaggtccccgacgacgctcgggtcgaacacttggccggaggtgtgggttcccgtcgccggcgaccccctcttgaggtaacaagcactcagacttcgtgctcaagactactcgagcatatgccctgaccaaattggactgatccgatcctaattcatgtttattcatgaccacagcggcactagagctccggtaagaacgtttcgagcaaccaaacacggtagcgttcaaattgaagctagggcgagtatcactgactcactagaggtatggtacacgcgcgaatttgaactaagggagcacgagaggtctggtcgacgtgagggtgctctcgggagtgctctatggtggcgacacgatgttctcgatgtccagctacagtgcgttcaatcggtcgagtcggtgagcttcactattactagaggacgctaaaacatggctcaaaggggcatgatataacctgagaagggctagccacgacgaggtgtctcacaacggcgttctggctggtttgggggaatccggaattcatgagctatggttgatgatcgggtgtgaggggtggtgcgcttggtgcgtaacgagaggacatagcaaggagaggcatcaatttat

SEQ ID NO: 127587 - DNA, 640 bp, Zea Mays
agctaattaatctgctcccactcatgttttgagtcgcaatgtctaaaatggtttgctaagttttatactgtgttagccaactcctgttaaataggagtcaattgcgttaagtgattgttatatatatgttgtgtctcggatcgcaataataataggttagccgacttgttagatggctttggttaagctcgtaatcacgatgatttgcttgatgtggtctaaatgcgaatagttatggtcgcggatgaaaagtagtagtgctcatgtgatgtctaagttaaaatgcaaattattgagtgaagagcgcattgatatacatatataccgggtctgattattgtggtggatgcgtttgttaaatgtgtgtggtaattctagtgcacggaatgacttggataaaatttgtaagtcgacttgttggccctcattgattattttaactctaacaaatggtaaagtgttagagtaatttcagtctctagagcatgacaattctggaaataaataggagctgaaatttattagttgctgttttgggctacacacactgttttggccgtgctatttgtttaatgaactaaattatgttttctgtagaaacgtcatatagaaaagttgtagataactttattatcttgcc

SEQ ID NO: 127588 - DNA, 488 bp, Zea Mays
ttgtgtttataggcccacaaggaaaggagaagaagaagatgaaaagaacagcaccttgaagaattactgctccccctcctaacagaaccaccaacactcacactgaaaaagatgcagaaaaaatagagagaaaaatgaagaacacttagtggagaaaggggaagggatggactgtgcaattatgatatattcatatagttggtgcaaacagcaaaaaaagtttgtttttctttcagttgagtcatgtaatcgcttgcaaaaacaaagtgttgaaaaacagatcatgcttgcctgattagatccatcgcatcagcccatccatgtaccgcatagctagcttatctggtattgggtcgtgctccattggctaggcccttcagcaatgatttacacactttataccgcaaaaacattatttagctgccacggattccaatctacttgagtttatggagatgataaagaagttcctattatctaagtagagc

SEQ ID NO: 127589 - DNA, 741 bp, Zea Mays
ccacgctcctattatccgagggttggttctccaccgggcggaggcccgtcgttctggcaatgagccagttacggattttactgccagcgggggttctgcacttctccaggacatccgctttcagaatcctgcattacgtattcgtgatgccaggattgatgggaatcggttctggactcttcagcatgtcgatttctacaactcggtaattcttcccaagaaacatcagcccattctgcatcagcggtacatcaactgggaaggttgtgaagctattggagatccggagatgacacaggctttgagggcctgtgagagaaagaaaatgaagaatattatgaccttccaatatgattggaatgatgaggtcattgctcagttttattccactctttggatcaagctggccgatgaggaaagtccctacaactttccttatcttaatttctatatcgaaaggcagctggtacaaggtgagctaccggcggtttgctcacattcttggattctctgatgaagacatctctggggacaagatcaaaattcatgattttcggcaacccaccaatgatgaagcccgggatcttcacatatctgagtctggtaaattctgggagtccacaaatctgcacaaatattacagatatatcaactctctcagcagaatgaccctcattcccaaagggggttaccagatgaacatcctgggtgagagcaaagtcttgctctcgtttatgaagc

SEQ ID NO: 127590 - DNA, 297 bp, Zea Mays
aaaggacctagctaggtgaaggtgaaaagcaagagggcttttgggactgaaggatcgtgagtaaggtgaagaagtaaagttcctgcaggaagtcaaaggtttgatcaagactgtgaagagtcatgttgtgttggagatcacaacattagaagatgtgatttaaagccatcagatttactcatatgtattgtgatggttcaaaatataaggctcaagggattatagatcaagagatcatgcatggtcacaagtccaagtagaagatatcaaaaacaacctagaagggctcacttgttg

SEQ ID NO: 127591 - DNA, 523 bp, Zea Mays
gatgatatatttcccagtttacagcgtacattgtcgtcccaatagcttttgagatgtagctaggggtaaaacttcctgagatgttctatgttccatgagttcccaatttctgtgccgtccatttgagtgagacgatatgatccaggccgagtgacttctgctactatgaatggtccttcccatagtggcgacagtttatgtcgtccctcccccgttagaattcggcggaggacgaggtctcccactgcaaaggatcgatgccgtatggccttgttatgatagcgcctcagagtttgctgatatcgggccgactgaatcaccgtattcaatcgttcttcttctagtacatcctccaacctagtagcctcagcttctgctatgttttcaaagattaaccttggtgccccaaacttgagatcagcaggtagcactgcttccgaaccatagaccataaagaaaggtgtgtttccatgcagagctcgactaggttgagttctcaggctccaaacaacatacggcagct

SEQ ID NO: 127592 - DNA, 897 bp, Zea Mays
atgagagtgggtgctttggcttggggataacctaacgaagctcacagaggcatctatttatagagatcgaccgtgtgcacgacgaatttgagcggtggatggctatcggtaagaaacaagatgagtcaccggcatggtgattcgtggccttcactgtggcgacctccccggcgatcatcggacatgaataatactggtgattgcgacatggtaattgctgaggcacgtggcgttcggtcgacgggcagccaactccggtgatgataatctcggccgaccgcgcggcaagtgggcatgacggccggaccagctagcgaccgaaacttatcccaccactgatcttttcaccccgccccagtgttatccactcctcatcgagcacgaatctcccaggtgaaacatggatcccgacgcgagctcaccggcgacgggtgcactgcacctatgatcttcttcagaccactgttcattctgaatctcccttcgaagttgcctgacaacccatgtttgagccacaattactccctgctctaggcagtaacacacctaccttcctttgacaaagttgtactccaatatatggtctccaaccttgtcacagagacccaagtcttaactccactggattagtcacaacttgactccaaagttgatccaatgtcactgatcatccaattttcagactgttttagtctgacagcccatctttgggtctaattatctcccaatttcttatgtaaccaaggcttaatccctatagcaaagttattgcccttttaaagctctacaaacttgatgtggtgacctagggcaaaatattcataacttggaagatatagagctccaaagttgagctaatcccactgaaattcagacttagcccataggtttcaaata

SEQ ID NO: 127593 - DNA, 397 bp, Zea Mays
attgggcccaatatcagggtttcacactatttagcagcgccgccacatggagtagctgacgaggagctaaagaaatatccgtgttacaagttccagctgaagaaagaagttgctgcacactcagacctgtacaaataaatccgcacatgcatcacacccaatccatttacaaataaaattgcagctgaagaaagacacaatccatcacaatatattcattttgaacaacaagccaccaattcatggacaatgaagttttattcttattggcaatcctcactaataaatatagaaagcaatctagtactagtgccacttatcagcctgagacaaacttggcgataatttttatttaagaacaacaagaagtctagcacactagaaaacaaacactgca

SEQ ID NO: 127594 - DNA, 368 bp, Zea Mays
gaaacgacggtccagattaacacagagaatgggtatgcgatggggcgaaatcagtcgctcactaaggatccaacggtccacagtgcgaccaaccacacctcctctctccccgatgaacaataggcggcgatgccgatgcttctcacggcaaagctacgttagagcccggttgttcgatgccctggtgccgtattccaaaattggataggtgctatgcgcagtgcaaagagtggcgagctacaggtggtggtcacactacaaatcgcatcgtgatgacgccgagccatagtgaggtgcggatccatggcggtgataaacaatggcgagcaatcgccaatgccctaatgctctaatctaacctaaacttg

SEQ ID NO: 127595 - DNA, 298 bp, Zea Mays
ccagggtgacctctctatcactaagcactatcgccgaatgaagggcatagtgaactctcttcgggatctctatgagcccgtctccagcactcttgtcctcaaccatctgtgtggtctcaatcgacgctacgataacctgaaggccctcatcaagcgcgatgtgcccttcccgtccttccacaatgtccgcaacgagctgtttctcgaggagttcactttgggcgccgagtctaccacgaccctctatagcgcatcctcggcgaccagtccccttgccctccctcaccgggggggctcc

SEQ ID NO: 127596 - DNA, 575 bp, Zea Mays
gcccagccgactgaggtgtaccaggggctctcgcgtgagggggaccatggcagtagcaatagatcggctgcgaccgcaccttgccgcatcgagggaaggggatggggaatctagcgttgcacacaggggaagcacacgacatgggaaggcagtggggatttcgggcgtccattctcacctgtggacgaccaacagcgcagcgggtgcgcagaggcctacactaggaggaggtcgcacctagataggggcattcacgtttggacgactcaacagtaggaagaaaggcagaagggagagaactcacatgtgtgtgaggatcggcgacggttctttgggcacaacggcgagatcggcatgcactctggcgcaaaggttgtgcgtagcggtgggggtggggcaatgtaggtgtatgggaggtgatgttgtgtgagggagtagggcatttaagcgagtggtttgaaagagaactagcaagcggttgtcgagctccttacgatgtggctaatccaagcgggactggaggttacagggaggaagatggtgggtgggcttcgtcgggcagtcctaagcgtggg

SEQ ID NO: 127597 - DNA, 519 bp, Zea Mays
tcgaccaggtaccagaaatcactctgacgctaccatgcgaggcatgtctagaatcggaggttataggagggtgacatggtgctttggttatgacaagacaaccgagggcaccacaagctcactccccctgggaaggacccttcatcatcaccaaagatattaaagcctggaacgtataaactctgcaacgagcaaggagaactttacgataacacatggaacattcaacagtcacgtcgcttctatccttagaattccatgcctaattgtactcaaactctcataaataataaagtttggcctccaagtgaggctcggccttgacttcaaaaccgagcctccctcaggggctagaagggggaaccccctctgtgtcattttctcatagttttttctttgaaaacgagtttcgtgccctcgccctagtcaaaaaaggaaccctaaagaacaggagacatctccattaggaaggatagccaagccacaggagcacctacgcctcagggatatcgtttcctc

SEQ ID NO: 127598 - DNA, 668 bp, Zea Mays
atttaatacaaaaaccccttaacaggttattacagtgaaattgggaagcaaaatttgttgtgaagtctttcctatagagcttgcaaggagaagaaccaacacaagccttgaaagtagtcctcatatttgacatgaaacaagaaaaatgcatgcaactgcaaacttacattaatgaagcttcttcaaggcctccaaaagtactttctctccaaccactatgatcattttcttcaccatttcttcacgagtaattataatttcctgtcaggtgaaaagaatgaaacaatggtcaacacacatcatacaaaccacgaaaaatacctaccttacctacagttactacataaattttcaagctgatattacctttagatcttcataatgatgaaagattagctcccttgccacatataatatattgtcttgaataactacaaacagaactttgaatgatatcgatggggaacttggtccttcactggtttcacacaacaaacacaaaagcactcaaaaagtcatgactcaatctaaatagtaaaaccactcgtacgtgtacacaccttaatatccttgaacaccctttatctcagatttaggttggaaagtgatcattctggtacagtcacctgcatatcactcaacatgtttttaatatggctttttaggca

SEQ ID NO: 127599 - DNA, 339 bp, Zea Mays
gaatttgcttgcggggcttatttcttttgaaatgagttgaagcagaggaagactggctagcattgctatacttttcagtgatccctatcggcatgtcagaaaggacttcgaatggattagaagaggttctcttttgagttgagaagggagcacgtgatgatgttgaccttctcgaccgtccaaccaacctttcatgaatagggcgagcatggttggatgtcgagttactagtacatcccaccctactagccatagagtcagctggaagtgccaactctcttcgtttgttggcagcacgactagcgcgcacattaacagcttgtttgacatacttcttgc

SEQ ID NO: 127600 - DNA, 541 bp, Zea Mays
tgttcgcgtcgtggaaacgatggtgctggtcgtccgtgggcgcggtgaaggggaccagtccgccatcgatgcaacctccatcgacgcgtcggctggatcgctctcgagcgaagacgaaaagcatggaggcgtccaggtacgtcatcgcttccggtgggcggaggcccatcgtagcactcgattgaggcaggttgcaatccgcagagaagaacaaatagcaaaggagcatttttttggccaagaaaggtgaggattattttgcaaggcttcgtaggcggagcgtgacgctgcggatgtattcatcttccatttgctggaaggatcttcgagcgtccttcctagcggccggttactctgaggccgaatgggagatctgtcgcaagtcttagctatcaacttctcattcagatgtaaagaagctagctgcatatggtttttcttcaccattggctatgaagccgtggtgtggtctgcttcctaaaccacggatctcgccgtgtctcacaattggcgacgtcattgataggacttgcagtcgcga

SEQ ID NO: 127601 - DNA, 637 bp, Zea Mays
ctatgatcttacatatgaaattatgaaatgcattgaactacactttttgagcagctgtaaagtttaattaacttttttaaatttctctgtccaaggtgcacttctgattggattttaatacagagcatctatgaagcccgagcacttgcataggaaagcgagtagaaacagattgaattgtgacctttattttttagtcagatctggctttctgagtgatcggtcactgtcagttttttatccacttcatttctctaaatgttcagtagataaagctctgtcatctgtatcttggggctgcgtcgggcctcgtccatgtaaacaacgttcgtagtttctaccaatgtagtttcttacctagaaaagggaagaaagaaagaaatcatgttcatttgcaaattgccatctatatacatcgtctcgtctttctaatgttgtccctattgtcagtaaccattgtaaagttcgctgatcaactagccattcttatatgtttactcttcttacagcaggaccgagctgcttgttcaccatactgcgcttgtcgtcagcagcaagactaggaaagcgaggagcccttgctgaactctctataggaactgaacgtttgctatcagcagcaagactaggaaagcga

SEQ ID NO: 127602 - DNA, 448 bp, Zea Mays
gctggccgccgtacccccttgccttgcggccggcgcagataagctcaccagcgttggctgcctgccgatcttatgccacgtgcccaggcatcttaccacgtcgcggttagtcgtgttaggcatatccggtgatcgccggagggtccgccacggtgaaagccactaagcgcttgcgccagtgcccctcttcctctccgaccgccgcgcgtcttcgtccaattcaccggccaccactcacggactctataaattgggcatgccatcagctccgtagggtagtcaagcaccaaaccaccaagccgtgccctcaattgatctccagagctcgctaatttctcattctccccaaatctgttctccaccaccgtgaaagagccctcaccgtggtcagcgtattccaggtctgttcgtactccctgctctcttgttctagcatccttaagtcctc

SEQ ID NO: 127603 - DNA, 413 bp, Zea Mays
atgaggtcggattccgaaatgatagacatatggttaccagcgaatggaagctggctgttggggtcgatgggagggatgattgcagcaacggtgctctgcctcttccgctttggcgccatcgcaatctttccggcggagcgagcaggatcgaaatctcagggaagcggaggagtggatcgaagggaaaaagtgaagttagggctcagaaatcaaaaaagcacgtcggcgtgagtataaatagggtttcccggatcgggtactatttctaaagtgtcaagtcactacttgggaaagcaaagtttcaggcattactcggcggttacctctaaaacgatggcggtattaggcattactcggtggtacctctaaaacaccggcaatatcaggcattacttgtcggttacctctaaaat

SEQ ID NO: 127604 - DNA, 386 bp, Zea Mays
gtggtactagggtttctttatcatatgatgctctaagtgttttatatttgcctagcaggtttgtggttggaatcaagatgtttggacatctttcatggttttagtaggtacttagggaggtttggttgcaggggtgtgggtaacatccttcatctccactaattctccttttcattttctacttatgttttaaggtaggcttgaactaccatagtgatttagaattttccaaaaatgttgcaaaaattacagtgggctaatatttagcattgtagtctgttctacaaatttgaggttaagaataattaggataaactctaggcaaaaataacaaaagtgagggtggatggtcactttgcactatagctctgatttaggtggggttt

SEQ ID NO: 127605 - DNA, 774 bp, Zea Mays
ctcatccatcagatcttaaatcaacgaccgagataagattcgagtgcaagcgcgcgcggatgtgcggcaggcgctgataggtgcgctaagaggggggttgagacgctgacacgcggggcccacgggttagcagtatgccgagggcacaggacgcgctggccactagatcgcagatcgacggctctacttccatgaaccgcgcgaaccgttatccgcgaatccgggccgtcagatcaaaactagacggttaggatgggcgccatggggctttaacttctccggccgaccaggggcggtgccatatgcgcccgcagcgccgcagctgtcggagacgaggtagactggggctcctagggtgctaggggccggtctgggtagccagaaaggttggggacactcggcgaatcctatgatagggtcaggattacaggaatggggctgaggcgaccagacggcgaagggggagtcctcagcggaccgaaggatattccggcgagcaatcgcgcgtgactaaggacataccaggggaaattaggggcagggttagatcagttaccttgagagaaggcttgaggactcacgaacggcgtccggggcacgacgagaacatgtgtcgacggagtcggagctgcggtggggcagagagagagagaaccggtgagtgtggatcaagagaaatagagggggagagagcgaaccgaggggtgtcccgggtcgcgggtgatgaggcgaagctcaccaagacaacttacacggcgagggctcgacggtgac

SEQ ID NO: 127606 - DNA, 693 bp, Zea Mays
agtgagacgatatgatccaggccgagtgacttctgctactatgaatggtccttcccatagtggtgacagtttgtgccgcccttcccccgtaagaattcgccggaggacgaggtctcccactgcgaaggatcgatgatgtatggccttgtcatgatagcgccttggagtttgctaataccgtgctgactgaatcaccatgttcaatcattcttcttctagtatatcaatatcctccagtctggtagcccagcttctgctatgttttcaaagattaaccttggtgccccaaacttgagatcagcgggtagcactgcctccgaaccatagaccataaagaaaggtgtgtttccatgcagagctcgactgggttgagttgtcaggctccaaacaacataaggcaactctctaatccaatttccaatgaacttctcattcttgtcgaaaactttctttctgagcgcttccaatatcatcttgttggctctttctacttgcccgttggctcttggatgcgccaccgaggcatatttgatctgaatgcttttttgtttgcagaaatcaaaaaactctgagcttgtgaaattggatcccaggtcggttatgatgctattcggtattccaaatctgaatattatgtcttgtatgaattccaccgccttggctgaggttagagaagcaatgggtttgaactct

SEQ ID NO: 127607 - DNA, 439 bp, Zea Mays
ggcgggtgcagattagcagggggcggcgcggcgggcgccaccgggtttgccggtttggacggaaggtgaaaccgctacggggctagcacctgatcatcggtggtagtttagatactctgtccattcacaattactagaaaagaaaacgccctatcaggcaggcgcgggacatttcacgcaagtagtggaacaagctattccgtatgttatagacagggtgtgcccagtatttgaaggatgggtattcgaaattctagtagacatacttttttaggagcctaaaattgttattcatgctaggaacatatatgtgtatgggtgtggattaaattttgtctcgtagttatagatttgcaaaccatatactcgtgtcccaactcccaatccctagtcgcacggtaggaaaatgaaaaagaccagcaaaaagcgaagtttgagt

SEQ ID NO: 127608 - DNA, 628 bp, Zea Mays
cagtaccggaagcatcgcaataaacctcaaagggtttggtgttgtcaggctgagctagcacatgtgctattgtcaaatgctgccttagtgtatgaaaggcatcctcacacttctggctccattcatacttgactcctttcttcaacaattcagtcattagcttggcaatcctggagaaatccggaataaatcgtcgataataccctgccaatcccagaaaactacggatttgtcgtactgtggtaggaggtttccaatccatcacttcttgtaccttctcaggattaactgataccccatcctaagagatggtgtgacccaaaaactttttctccttcagccagaaatcacatttggacaacttagcatatagacgatgatcgcgcagtcgctgaagtacgatgtgtagatgctcagcatgctcagcttcatttttggaataaaccagaatatcatcaataaagacctccacaaacttgtccagctctggcataaatactgagttcatcaaatacatgaagtaagccggggcattggtcagcccgaaagacatcaccaggtactcataaagcccatatctggtagagaaagccgtcttgtgtttatcttggagaatactctggctccc

SEQ ID NO: 127609 - DNA, 896 bp, Zea Mays
acataacgggctacctgaggtttcacaagctaatgctctgctcatcttatcaactagcagagcacaaagatatgtaaatattttagacatcttcctccttaattgctgtaatacccaaaaatgtaagataaaagcatagttgagatacatacatggtctttgcttatgtttattgtaacatgtgaaccaacacctcaaaagtcattaattaattagtgacacttaaagtaatttgtgcatcatgctgtgatttctttgtttgtgcattcactcataaagataatgataaaagaaatatgcaaatggtaaaatcaataaaatataattatgttaatgttgtgaattgagacttaatttacaattctagaaattggagaagtaaaggaaaactactatacaaaataaaacaaaatatgggataaatgaaaccttgccatgatggtttgaccaaactacacaattaaaatgggttcaaattcccaaataggtttgaattcaaatttggatttaaaggaattaaggataaaagaaaacagaaaataaaatccaaaaaaaaagaaaaagggaaaacatggcaactgggctcactgctgggatttcggcccacctagtgatttcctcgcgccagcccgctacaccgaatccgtgagtgcgccgacaggtggggccacgttgtcatctctctccctcgcaaccgagcgcgaagtcttcgccgcaacgaccgccgcgagaacgccggagctgctggtggccgaaccctccgaaccgcgcggcgtacgactcggtactacgccctgctcaccatttaatagtcgggtctttcccctcctcgcgacaccagccatatacccgccaccgccgtgccgcggaggtaaaccagccgccgttggtgattc

SEQ ID NO: 127610 - DNA, 631 bp, Zea Mays
tcaccccccccccccctctaggtgctctcactagcccaacccaacgatttaccaggcacggcaaaggctcggtggcccactccccagtcctcaggcggccaggcctgcaaaacccccaccggtgactggcccactccccagtccctctgtcgcgatcctcagcctcactcgatccctgtcccactatcgtggactctgtcggcgattcggtgactccgttggcgaccaaaccctagccaccaccctccggtttcaagtcccgccgtcggccaccgcatcgcgctcgtcgcctcgtctatgtggatcaatcaccggcggctcacaggatctccctcttctctccctcctgtcatccacggaccacgtcgggtacggtatggactagctctccttcctcccttcctccttaccgtacatcatcgttagctggtggtctgctctgtgcctccgtcgttgctgtgctcccgacgtgtcttgtggttgtggatctcctcccaggcagctaagtagctaaccctaaccgtaatccctaagtccctaacctaaatcgcactcagcttctcttaatcctctgtcgttttggtcaagtcaccatctctgctggccagatctccatcttcctctcttctcc

SEQ ID NO: 127611 - DNA, 391 bp, Zea Mays
aattttgacatatggatatcagtttagatgccataaaaaatagtcgattctctatatacaaaatagtgagcaaagctccccatcccatgtggcctcaccgtcttatggctagtttgggagcaagagaattgaaagagattgagggggctaaaattatcttcttattcaaaattaaatatgatggagattttagccccctcaatcccctctaagacgtcttcaattgatcgtgtaaaatagaggacacgacactgtagatgacactagttgatactatttacaaagtgaagtttgaaatagaggatgagatagggggtccactgaacatggccaaattcctttggttctcgactagccctcataaatttgcaaccgtgtgatatctactact

SEQ ID NO: 127612 - DNA, 1121 bp, Zea Mays
ctccttcctagctcgtccgtagtagagtcaacctgctgctgccacagccaggcgcgatccagatcttgcctgccgcgtatcaagctgcgcgattctaagcatcgaatccggtgccccgttcgtgccgtgtcccgcgcatcgtatattgctgctcgatttgttatgcgtttttttttgtgcctctatgcaagcaagcagaaggaggggaataccttgctggcttgctgtctagtgctgcagtgggaaactgtaaatggaggacgacccaggtagcggtggaggcaaaacactttattcacctatatatatctttactgtatgaagtgcaggaagccgattgtgaagctaccacaaaaaaaaaagtcagcaagatatgcattagaaaatgcttgatatgcatgtgcgatgatacaagatcagcaagcggaaatgcttagaaaaaaaactgttcttatcgatcctcactgcaccagagtaactcgattggaaaggaaacatttgaaagaaattgccagtactcgccatttgcacctatctgctgtcactctgtctacagaaacacagggccttttcttctggatgtggagggccatctggaacttgttagcgaggcttcgtcttgtagggtggtggttttgatttcccatcatgttctttgatcagtctggcgtctagagatatgcggtggttagatacttttgaatatctgctgtttctttgcacaagatgagcagaacactaatctaaaaaaacattactctaatcaactgatcgtttgagtttaaaaggaatattaatgatcaatacttggtgctgactatttgcgttacttgtttagagatttttagaggacacgggacatccgaatttatcatgtgccagttttttttaaaaaaaaacatcaaaaagtcatgtatgtagtacacagacttaaatatagctaaggataagatcaagcagagctggcactacaacaatgccctagatgtcgagagtcaaaattagcaagcagtggtactaatcatatgttcatagtacaaagttgaataaaaactgaagagatgatcaagtcgaggaagtggatcaatttggtggctttgatttttttccctagagtacat

SEQ ID NO: 127613 - DNA, 1019 bp, Zea Mays
ctcgtcggtgccattgctgatgtcatttgtgttgtcgtggagggagcgatggtgcccagggcggtggcggattgcctcctccagcgggtccaaggcgcatcaaatagaatagctcgtcggccctgcatgtcagtggcgatagagacgacaaggccctagatctgcttgcttctcccacagctgcctcccaccatcaactacgacacgttcatcgtggcgattccgagcttgcttcttccgacactgcctcccgtcgtggctcacaaggacgaaaagaagcgtggcaaacaggtcggatgtgcacgctctagataattgggggagactttccctcacgtaaatatgcgggacgaatcgccagagaaatgtcgcagcaaaaaaaattgggaaggttgtgggatctgttggaggcggagaaaatggagcccccccccaaatgtttttccagtgagttttggtgtcgtttttatagttgctctaactatttaacatccctaaccactccttttctctctcacatgcacccctcctcacacacacatctaaggctattcctagtcatgattttatttgaattttgtttttatcaaatgacctgtcattcgacaagtacaatgatatgacaaggatttaataaagagagatagggagggttttatgtgaggcgagagcaagtaacgaaactctatactaggaatagcctaacccacttagagcaagtataataagaggttgtaagcaggctaaatgttgaggtgtgaggtggaggacagaagaggagaaacaagttgtaaaaactttgtgagagagataagtaaggtcctacattaataatgaaatgctaactagtatataaatgagctaatagcatctttaagagactagtgaaattattcatcatgcctaattttagctacttaacagaaaaaactcctcactagactaaacatctaactcgtcaaaacatccagctctacaaattggtcccctctctatccaaatttagctagccattctag

SEQ ID NO: 127614 - DNA, 398 bp, Zea Mays
aactttgttctttgttaacaactcggtatggatacaaggtagcagtagaagagaacaacaattaagagtagcagaggacgattaggagtagcagagggtaaagaggaagaagagtggcggcggacgagcagtagaacttggagaaaaagttgtagtgaataattcttacatgcccttcaccaggcaactctcgttctacttattcgcaaagcgagcacagctgcagcccattcacccaatccggcccatacacctttgtagatttcttggtcggcctgctaacccgttgtgccacaatggtcccagtagcagaagatgtagtaccgctaacagtcccccttgctgaaaacactgattgcccccaaacagcggcctttggaaattgttgcttcaattca

SEQ ID NO: 127615 - DNA, 306 bp, Zea Mays
gcctacaatcttgactacctcatccctattctctatttgggacttatatggagaatggcttcggctgaatgcctgaatcgggccgggaagcacagagcagatagaagtgcactttccaatgcagttagacagagaaggcatggatgtgatgttataatgctgaaggaccccaagaagagattatggcctgtcatttaccaccactgcccgttatttgtgggcttcaccgagggctggaaacatttggtggcagcaaacgaccttcgggctggggacgtctgcaagcttgttaaggggccagacgat

SEQ ID NO: 127616 - DNA, 539 bp, Zea Mays
gacccttaccgtgcaagtcttcatcatgatcctatactacaatatgttatgtcgtgtgtctctaacgcctctctgcctactagaggatccgacaacgtcatatgtcctatggcttcgggcccctagggttctaggaagcattccacaagcatctgatctaccaactactgtagggcctaggagtgccacatgctggaggcctagtgggcccttgtccgttacggggaacgagcacaccacatgcccctggccccgtggtggccttggcttagggttcccgatggggcacgtgtaccaatcgtctacgacgcagctggcttaagagttggtagtgctggtcgaagatcaattttggcttcccgttgtgagagtggttgatcgttgtcagtcgcctttccataacaggtgacatccccatcctcacatacttgctccggtgttgtcattctggctatgtgccagcgcgtcgcacgtctgtagtagttgaggcggtatgtccccaagaatttcgagcatgggtggtcgggcaaagttttcga

SEQ ID NO: 127617 - DNA, 478 bp, Zea Mays
cggaggtggaaggattcccttaccttcttcggagttgtgcgcttcaccttggagttcgcaagaaaccagagtatgtctggaaggaataccgtgaagatggagttgagaggtgctccatggtagtctacctaggagaaagccgaagctacccaaaccacccacctttctagatcaccgctactggctaccgcttcccagaaacatgccaaaatgcttccctaaaagccctccaccaactatgccaaaactacagcaaagaagtcgtcgagacaccccttcgctactttccaccctgcaacaaaaataacctgcttggaggaaatgactccaagctttgttaggaagagagcataatgaggatgatcccactgtaatctacatggccagatatctccacacccttgacacccactttgatgaccttttctcccattacacccacctaaactctcgggtggaaagcttagagcagcggatc

SEQ ID NO: 127618 - DNA, 370 bp, Zea Mays
aaatggaggaaaaagttcaacgaattatatataatttgaaagaagcacaagctcgacaaaagagttatgtagacaaacgaagcaaacccttgtactttcaagtcggagatcatgtgtatctgaaagtatcactaatgaagggtgtaactcgttttggggtaaagggaaagcttccaccctggtacattggtctgttccccattcttgaatagtgtggaccagtggcataccgactccaactacccgaaacattgtctgcagtgcacaatgtgttccatgtgtcccaattgaagaagtgtcttcgggttccagatcgaaccgttgaagtgacggaggttgccttagaaccagacttgacatatttcagaac

SEQ ID NO: 127619 - DNA, 1894 bp, Zea Mays
gataagacatactgtgaataacatagtaaacagtgaattcggattagttgatgatatatataatataaaatgtaaaacttatctctacaactttatatagatgataaaatggacccaaatgcgacccgatcattagtgtgtcacataagtcatcattttgcttgacatcgttctttttggagaattacaatttaattttttaagatctgagtggtttagaatcacgaagaagattatgaactctctagtgatatgaccaatttagataatatagtcatagatatggaatgagtttataaacaataaaagtgtgaacgtgtgtgacagagtccaagtcatgccctgccctgcacactccgtagtgggcctgtgattcaattaaagtccagcccgacatcctcactccaaattgactgctaaatcctccaccagctccaaccactagggctgcaatcatccaccttctgctcgccgcctcctccaacgccgactcatgctcatcggtcgccacctctccggactcgcgtagctccctcctgctcgtcgcgtcgtctacggaatctagcctgcggccattggcggctagcgccccgccgtggtgccccccaccagcaatcagtgttcgcggtctatcccttctcaccccttcggatctgctaagcgtgaggcacagccgcgtctatggtctgcctggctggtccctccctctccgcgcgcgacgcgcctctccaggtccgaccggcgtcgagcgcgccaccgtgggccccctcctctgccttagatgacaacatttggtgagtggtgatgcaactgggcagagtggtgaactggtgtttgacgcgcttgccgacgagttgcaaattgggtgaggatcgacttctcatctgcttgttcttaagtctgaaaattcactcatagttcatttgtgttgtgttttttagcccatagcttttagatgcctggtcattttggagatagtatgggggtcatgtaggtttttggtttagaaaatggtacttaaatgaaagcaaatgagataaaagggtaactttgtatagacaaggaacattgtccagcactagacaggagagatcatgtcacataaaatcctcaagctgaaacaagaacatgttccactggattttattatccttttgttattaaatttggcctggggctttggtaatatctgaatttgccactgcatagagtagtaaacctaaaaaattcagctaaaaagttattaatggcccataccttttctgtgatatgttttggtagttgaaattgattacaatgttaccttttcaaatatatcggcaacatcttttaggactatgacagttatcaaatttgtggagttcctaaacctgtgatacatctcgactgttgtttgatagagatcgtgtgaagataatttttaaaatcagtgttcacataaaggtaccattggattcatatttgaaagcacttccatatgctatgagctttgttgtcatgataaacatcataatatatgatatattggtggtcaaagtgtggtgttggcaggtcaaaccgcactttacatttcgaaaaggatggagtaatattttagccttgattttgacatccttttttgcagagcagtggatcaacattattcaaaattttgctcctgacgtctgatatgtggacagttgccattcaagttttactctatcatcaacaggtgaagattcctgatccagaatacttgtgtaagattattaacatgttacccaataataatcttacataatttggcccaacccaaagatatgttaatttaaactccctagattattttgtggaatcccaacagagtttattcatttgcttgtactctatgaagtggaagttcttgagatgccaa

SEQ ID NO: 127620 - DNA, 324 bp, Zea Mays
caagcggtggcaatggtgctcgactcgtcagtgaagcgcctgctgccgcaggcggccatgcagtgactggagaaggccgatctaaccgttgcggtgatgctgctgctcctcctccacctcgatgccacctcgctccgcgcgcaatggaagcaacaaacctctgtaccatcagtgacctaacaaacaatccgctatggctatcggataagccttatcttctccaacaaacaacaaataaatcctgccattacttctcggacgttgtagcatgcatgacgatcgtgctcgccgaagtgatccatgtcttctacccgctcgccagca

SEQ ID NO: 127621 - DNA, 429 bp, Zea Mays
gtctcctctacctttgggatactagataaggtccatttacattttgatgcactaccagttatatacaaaggactaaaggagtaacaaggtagaattcaatagtatgtgcagaatgctcatttggtagtttcttttcccatcaggaggactgttgaatttcttgctatggttccaatgtgtatgtatgtttcccaacagaatttttataatgttcagacctattatacaaacgggtccggtgttatgtacctacataagtttttcttggtcttgcgggttgttgatctagctctatgtttttttttgcttataacccactagaaatttaggtatctgtcatgtaatatattcagaaaaggagaacatacctcagaatattagcaaaaggaatttgcatcgtcactatatttgtataattccatgctagaa

SEQ ID NO: 127622 - DNA, 712 bp, Zea Mays
ccagcatgaaattgtcttgaataatctcccttttataaatgcgctcttattaggtgacaccatcacattgagcttgctggccaatctattagcaagaattttggtgaccaacttggcaaaactatgcaccaaaatgataggcctaaaacctttaatattatcaactccatcttttttggggatcaaggtgatataggcggtattaaggcacccaaaattggtaaatttcctaccccaaacaacagagatggcatccataatatcaggcttaataattgtcctgcaaaccttgtagaacgttcctgtgaatccatcagggtctggagccttatctgaaggaaggcatttgatggcatcccatacttcttgttttgaaaagggggcttccagatcggccagatcataactaggtattccaagagcctccaactcaatcgcctgttccctatccatactgttccccaacagatcggtgtagaattggtccacacaggcaggtttgtcctcatgactagttaggatttgttcttcatcaaccagccttgccacaaagttttttctcttaaggtgatgggcatgaaggtggaatagctttgtattagcatccccatatttgagccatgaaatccttgctttcagccttgctatagttcgcttgaaagaggataataataatgcctgtttcttgagtctgaatttgagccagagttca

SEQ ID NO: 127623 - DNA, 563 bp, Zea Mays
caagatacgtggaaagtcaaactctctaagtgcaagtttgcccaacagcaagtgtcttatttggggcatgttgttagtgctcaaggagtatccaccgacccaatgaaaatcgaggctattgccacttggccagagccctcctgtctcaaagagctacgtagttttttgggcctagcaggttattatcgcaaatttatcaggcattttggagtaatctgccagccgctcacagcactcctgaaaaaagaggctctatttgtttggaccagtgaccatgttgtcgcattctgtacgttgcaaactgcactttctcagtcaccagtgttagcgctgccagattttgctgccacctttttcattgaaactgatgctagtgttgttggtgtgggcgccgtactcatgcagaaaggccatcccctcgcatttcttagtaaggccttgggccctaaatcgcgcggattgtccacctatgaaaaagaatacctcgctgttatcttggctgtccagcaatggagatcctatttacagcaccatgaatttgttatcctgactgaccataaaag

SEQ ID NO: 127624 - DNA, 487 bp, Zea Mays
taatggctcagggtcaatttcatcattaattaatctgttctcatccatgaaagcgcattggacatctatccttggcagaccgtaatcatttatgttcccgccactattagcaaaggcagccgaaagtttgcgtatcaggagagacatgagttgttcatgcggtatgttgtagttaggatttcccaatgtatctctaagttgtcggacaatgtcatctgtaaaagatagccagtatgtatcaaacaatgcacgcacattagcaacagggtagaacataaccacggtcacaaaaagctgcctgagctggtacgacgacgcggatacgatcgcctcgtcaaacaacaacttccactcattatcgctctcaagcaacccacgcgcctcgcaggcagcacgaaatgtgtcgtacacttgaccgttgaacgtcctgatatcagcgtagcttgttgaacccttaactatcatcaatagcatgcgtaagtagtat

SEQ ID NO: 127625 - DNA, 446 bp, Zea Mays
gcagccggaataataggcacgcaacaaagtcttttccaaaagtctccatgcaaaagtcacctacgggtgcagccagaataatacatacacaaaatcaaagtcttttccaaaaggctccgtacaaaagtcacctacgggagcggcctgatcaacgaaagtgcgcggcttcatcacacaaaattatggttacataaacacaacgagggcatcacatattacattggctcaaccttagggatgatacccatctccctgtagttgaacaacattatcctcagttcctcaccctcaaacagatttcgcagctccccctcacccacactcaccccaatcggtgaggacaacaattctcgcttaccagtcccatccacgcgaagacaacccctctccacctcgcttcgacaacgcctaccacttcgcgacaattcactcactctcagcttcgc

SEQ ID NO: 127626 - DNA, 468 bp, Zea Mays
gttcatatgaattatttcgtagctgccatgatgtcgtgcttccatttttctgtttaattactgaaaccatagttccttatatacgaaatctagttcaaaacagccgctctcgcggtgtccacgtcgcccagatgttttcaggtgtacgatttccaatcaatggtgaaggcaaggtctttctctcatggtcaatgcatattctacttatccagttcggcgccatcgttttgttcagtgtttgctcggcttcgtggttttggggttcgtattcttcgtttgtgagattcatccgaaactaaatacccttttttcccttatattttctacctgttgctgcgtattaaagaaccttatcaagttcgacgtcagtgcctccaagcgttttctctagaaactctttccctagcccctcacccttttctcctcctctgttagcagaatcaacaatgagtgtagtttgtttcgttt

SEQ ID NO: 127627 - DNA, 359 bp, Zea Mays
gtcgccagggcgattcttcttcatccgccgccgccagcacgtttcgccgtcctccaccgccgcacgccctcaacattaatcgtcgccgccgttgacagcatcgttgagccgctgccgttgtcaatcttgcgcgccccgcgtcacattggctcacgtccgcgatcgctatgtcgtccggattccaaggtgctcgagttgattttttaaatttatgctttacaatgcaacttcctaatctccttccccccttccggcagtgtgaatcgccttcatttgtctccgcgcgaactcaaccctaatcgacgccgccgttgacagtgtcgtcgagccggccgctgctgtcaatcctccgccaccgc

SEQ ID NO: 127628 - DNA, 503 bp, Zea Mays
agagatcgtaacgcggcaacagacgcgttgtcaaaagtaggatccagtcggacccaggttccacctggagttttcgtccaaaaggtaccacgcccaagcatttcttcagatcaagtagaagagtgcaatgttttaagccagccagagtcagactctaatgaccggaggaagcccatcatcagatatataaataatgaagaggagccggatgacaaagccgcagcagaacacatcgccaggcagtcagcccactataccctcattggggatgcactgtacagaaggggcgcaataggagtcctcatgaagtgcattcctttggttactgggaagcaactgttagatgagatccacgccggacagtgcgggatacacgcagcatccaggaccctggttgggaaggtcttcaggtctggtttctactggccgacagcaaagagtgatgcagccgagttagtccagaggtgtgaagcttgccaattcttatcaaagcagcaacattt

SEQ ID NO: 127629 - DNA, 1157 bp, Zea Mays
aagaggaggaggaaacccccttaattcagaagaacagtcggcgctacatagccagcggggagagtagtggtgttccttctccagctttgtctgctctcgttggtctataggaattttctctggcaaattttgatcagactctcgaagatatggtccctgaagatctgttgtcggagccggcagatggtgggacaattccgaatgttcttcttatttcgcgaggcatggagatcgccctaagatgagtaattgcgaatgtgcttgtgttggatcgagtaggcgtgagcgtgtcgtgccgatttaagtcactgtcgacttaaaccgaccgctctgttagtagggtatagtggtcaccgtgagttacgcatgagcatgtcacaccgccttaagttgccgccgacttaagtcgattgctccgctagtagggtatagtggtcaccctaagttaagtaagtgtgagcatgtcacaccgccttaagtcatcgccgacttaagtcgattgctccgttagtagggtatagtggtcaccctgagttaagtaagcatgagcatgtcacaccgccttaggtcgtcgccgacttaagtcgattgctccgttagtagggtatagtggtcaccctgagttaagtaagtgtgagcatgtcacaccgccttaagtcgttgccaacttaagtcgattgctccgttagtagggtatagtggtcaccctgagttaagtaagcgtgagcatgtcacaccgccttaagtcgtcgccgacttaagtcgattgctccgttagtagggtataatggtcaccctgagttaaataagcatgagcatgtcacaccgccttaagtcgttgccgacttaagtcgattgctccgttagtagggtatagtggtcaccctgagttaagtaagcatgcaggttgacagtaaacaatttgagcgcatttgagaatgaagtctttttattgatgatatatttcccagtttacataatacaaggtagtcccaatagcttttgaaatatggctaggggtaaaacttcctgagatgttctatattccatgagtttccaatttccgtgtcgtccatttgagtaagacgatatgatccaggccgagtgacttctgctactataatggctcttcccatagtggcgacagtttgtgacgt

SEQ ID NO: 127630 - DNA, 1113 bp, Zea Mays
cggagctaagatgaattaaatatgaattaaacaagtttgagttgcatttattattaattttaatgccaaaatagatgccagggacttttctgaaaatttggaggaccgatctgcaattccagaatttatttccgaggtcaccgctgtgaaaggtaggacggcgggtttattttaatgaaatcgaggggctattttgcagttttggctcggcgaaggggtaagctcaattctgggccgttcagatctgatccgagggccacaaatagatcccgcacatcgctcaaccacccactcccgtgaccgcccgattaaagtttaacggtcacgatataaaagaacccggatctaatccgatgcgcacaatacgggatcaacggctcgcagcgaaggggtaagatgtgatctaatcttagccgcagggaaccaatccaacggacatggcggcacgcgcgctctccttctcaaacaccgtacagcgacggcggcgccgcccaccaggctgcggcggggcatcgccggagtcgggctaaatcccatcgcgaacgcgttaatctcggaataaaatgacgttgtacgttggcgggggcaaggcgaaccttatggggggaaattcacctgtggtgccggtgcagaggactccagggacgagaacgcgcggcccacggcagtccgagcagctccgacaagcaattcgaggtcgaccgccgcgcaatccgccgaggcgaagtcccggtcgtaactcgctcgaccagaagaagctcccgcacccagaccgaggcctaaacactggggaaccagccggtcgacgacggcggcccgaagcttgccccgatcgcgattcaagacgacgaagcccaagtcctgccaggtgccggattcctaccagagttgagcgctcacagatgagggagacgagacgattgcatgggagggaagactcaccaagccacgaacacggcggagctcaattccacgacgagctccacccgacggagctcccacggcgccagagcccacaatcccacgacgcggcaccacaacgcttcttcctcgccgacggcaaacaccacagcgatactacggccggatctcccaagtcacgcgctagctccc

SEQ ID NO: 127631 - DNA, 582 bp, Zea Mays
ggatctcggccgtccaatctgcttcctacacacaggattagatcaccactcgcctgaaccggtacgccattagggccctcggattcaaatcctacggttacggttttaagaagcgagatcgcttgggaaccatccgatcgaagatctgcggtcaaatctactgctgtgaatggttatcccctcctctaatcgcattcgttcgttaagatcagacggctcaccggcctcctaccccgagctaccgggtcgcggcggtgccgcctgctccctacggtggaggtgacgccggagtagcccgtccaggcgctccggtacgagaacccacgcgaaatgaagtgcaatacgcagagggcatcaaggcgaaaacgataggggtaccctcacctcgagctatgcagcgtaggggcctggcgtcgttgaggggcggccccgcggtgaagatgctcctccggcgaggaattcatcgcgcaacgaagatgcccgagccagcacgaggtcgcccacagcttcacggtgccccgccgattgtgattggtggcacgccgcgggtgggtcgctagcctagaggcagttcactggcgg

SEQ ID NO: 127632 - DNA, 402 bp, Zea Mays
gcagcctcgaagcggaggaactcagtgcagaagtgatcaggcatgtcgaaggtgatgagtaggtacatgtgccctagtgagtactcgccctgacccgttatgatgccaaataagggattgtttgacccttgaagttatgcaatggagatcccaagttcctaaagtgtcttcaggaaagtgacggtgacactgcttccatcatcgatcaacaccctcttgactcggctcctgcagaccactaggctaaaaagtaatggatacttgcccaggtgatcaaacttgagccattagtcagctcagctaaaggagatcggaatcttagaccagcgatatggcgttggtgggtcagtcatagctaccaggacttagcggtcagacaacttctgctgccttttgttctct

SEQ ID NO: 127633 - DNA, 403 bp, Zea Mays
gcagtatcgaggtcgccaggacgttgtacaagaatgacagacttgatatcagcacgcaagccatcaataaatctcatagtataatacaatgggtctgttgtgtgttcataggtgacaagcaaatccactaactcgcaaaagcgatcaatgtaatcctggacagtggaggtctgtttgatgtggaataatttttggataactagctcatgttgttgacgaccaaatcggtcatggacgaactgacagaactgtcgctaggagagcgagggcaagcgaggttcaatggattggagccagcgcgcagctacgccatggaaatgcatagttgcggctttaatccaaacgaactcctcggtagcgtacatgtcaaaataatcttcgcattgtttttgccaaagtttgg

SEQ ID NO: 127634 - DNA, 467 bp, Zea Mays
tggactgtcaggctgattcagtctgaaattcagatatttagtgtagcagagccaactttgagtatgaattcaaccttgatttagtactcaaatgtgttcaagtcctatagtcgaattgtagctggtttgtaactctacaactttggtacagagggttgatgaagttcatatgcaaattctagagaaaatggagctctaagatgatctgtcaggcgactgaatcagatttttttcccatggaacagtgactgcagaagatacccctctttcccctccgccgccgatgacccacacgccgtgattcacgccgtcgttgggatttgtgtccgctggcggggagataacttcggtgaagtaaagatctcgtggggaggagtggataggatcacacatctaagcttatcgccgtgattcttgtcactgcgacgtgggcggtctgcctgtgccgtcgtggaaacgccggtgac

SEQ ID NO: 127635 - DNA, 554 bp, Zea Mays
tactcaagccgcatgagcagaattatcccacccatgatttggaattggcagccatagtgcatgccttgaagatatggaggcactacctaattgggaacaaatgccacatcttcaccgatcacaagagtctgaagtatatcttcactcagccagatctcaaccttcgtcagagaagatggctggaactgatcaaagattatgacctcgagattcattatcaccccggaaaggccaacgtggtagcaaacgccctcagccgaaaaccttttgggataaagggaaccaactttttagaagattggaagaaggaatcagctcaactgaatgcatgtttgggaaacaacggcaacctcgaagtcaaaccaatgctagaagacctcatatgcaaagctcaacgcctagactcagagacagcaagactcgtggaaaaagctcgcaaagaacaacttccggacctcaggacagatgaacagggagccctttggttcaaaaatcgtctttgtgtaccaaaagaagaggcacgagaagtcctgctcaaggaagctcacaactca

SEQ ID NO: 127636 - DNA, 692 bp, Zea Mays
tggtgataggcccagagagggcttgtggttcgtcgccatcgacgaccttgagacgatcaatcgcttcttcaatcgtcatcgtggagaggtttagcagagactcaattgagcgagcgatttgcttgtacttctcggggatgcaacggaagagcttcttgacggctctctcctcatcgtaggtgtcgtcgccgaactgcaccatcttctgcaacagagtgtttaggcgaatagcaaagtcatcaacatcctcacctggcttgaaggctaggttcttccactccttgcgaagtgcctgcagtgtggtcttgcgggcacggtcgctgccgatgcgggtcgcagcgatggcgtcccagacttccttggcagtccgcttctgggaaagcgaaaactgcatctcgggcgggactgcaacaatgagggcatctagcgcccgtcgatcctcgtagtagtcgacgtcgccgtaccaaactgcttcccacatgtggcggacctagagccgtaccctcatcaccacgccccactcgacgtagttggtcttggtgagggtagaccacccaccgccgagaccgatgtccctgacaacagcctggacctcgcggtgaccatggtaccgatccggggagggagagccacgccgcctgtagaggccgcgatctgcgtcgacccggccgccgccactgggagcaccgtcg

SEQ ID NO: 127637 - DNA, 384 bp, Zea Mays
cacgggtgttcccgacgatctaacgcggtttagcttaattgaatgggtcgaggagcatcaggagaatctaaggacactgaaacgggaaagcatagagcatgaacggacctggaacgagctagccacggcgatcaccggagagaagggggtgcactggcacaagcgattggtggcatttaccgtggcaagctcaccggcgatcaccggatgggctaagatgactcacggcggcatggttaaagccctgaggcacatggcgcaaggttgtgaggtggataactctggcgagcctatccaaagcggctgtgacttaggcgggtacggcggccggagtagaatagtggccagagttcatccacggtgcgatatttcttaccctctgcg

SEQ ID NO: 127638 - DNA, 428 bp, Zea Mays
gaagcaagagcctatgtaaaaatgtgtgttgccatcgccgctctttggtgaatttaagcgaaaactctgcactcacccaccttcgccaaaggacggctatgaggacatgcatgtgaatgattttcctgtgcgtgttgtgcatcttgtttttgaaatatgatgtgccttttattttgataccttttgaaatgtgattgcgctatctaagctgcatccttggatgttttcgtgcgcttgagtgtcgttaatacatttataatgacccggctgcacctttaggcgacttttggtacgatataaccgtctgttttggcgacgacttagcaccattgtgaagcacctgctgtgttaatccagctccacccttaggtgacttttgtgtggatagaaatatgcgtctctaggacgacttcgcacccttgggtgct

SEQ ID NO: 127639 - DNA, 668 bp, Zea Mays
cactcatgccctaagactaagattgaaattagaggcctaagctttctagtagagctgataattttggaatcaagtggaatcgatgtgatactcgaaatagattacttgaccaagtatggtggagtaatatcctatgctaaaaggatggttacattaaccagcccgcaaggagaaagaattgaagtcaatgtcagtatgccagcaaaagcagaggcaatgataaatcagttggaagaaaaatctttggagcacatcaggatagtgtgtgaattcctagacgtattttcggaagaattaccaggtatgccacctgatcgtgatatagagttttctattgaactactacccggaaccgcaccaatttcaaaaagagcttaccgaatggatgtcaaagatttaattgaacggaagaaacaaatagaagaattactagataatggttttattcgccctagttcgtctccatggggagccctagttctatttgtgaacaagaaagatggttcaaggagaatgtgtgtggactatagaagcttgaatgaagtaacgattaagaataagtacccgttacctcggattgaagatctgtttgatcagatgagaggagctaaagtattctcaaaaatagatctaagaccaggctatcatcaattgaagatacggactaa

SEQ ID NO: 127640 - DNA, 598 bp, Zea Mays
gctttcttgaagggtccaatcatgtccagtccccagctcgtaaatggccatgttacgagtatggtctacagttgttgtgctggtaaatgctactgctttgataagaattggcaagcttcacacctctagactaactcgcctgcatcactctttggtgtcggccagtagaaactagacctgaagaccttcccaaccagagtcctagatgctgcgtgtatcctgcactgtccggcgtggatctcatctaacagttgcttcccagtaaccgaaggaatgcacttcatgaggactcctgttgcgccccttctgtatagtgcatccccaatgagggtgtagtgggctgactgccttgcgatgcgttctgctgcggctttgtcatccggttcctcttcattctttatatatctgatgatgggctccctccattcattagagtctgactctcgctagtttaaaacattgcactcttctgcttgatctgaggaaatgcttgggtgtggcacctcttggacgaaaactccaggtggaacctgggtccgactagatcctagtttcaacaacgcgtctgctgctgcgttgcgatctctttccacatgat

SEQ ID NO: 127641 - DNA, 392 bp, Zea Mays
ctgtcttcttcttctctccctccgatcccgatcctcacggtacctcacggggataagcatgccgatgatgcgggcacgccagcctccgatccgtttccaccgccgcgcgcgccgcccggccgctcctctcgttcgtcttgtcctctccgcctgtctcgcgtgtcctcacccttcctccgtcctccgtcgtccccttttctttaatgacaaatcggctgcgagccaagtggggcgtgcactcaaacccctcatccccatgagaccgcacgagttggagcaaggctcagtgcccgcctgcccccgcatgccgtgcgatgccatggaggcgcgcgtccctgggcgtcgtcacgtcctcactccttgtccgtctgcctgtcgccttgtctcgcctt

SEQ ID NO: 127642 - DNA, 564 bp, Zea Mays
tgcacaacctggaggtaggatttcttgtgtatggggggcggttgactgagtggcgccttactgcgttgctcatggttcctaccgcaatgctcaaggttcttatgtagatcgtcagtccatagtcgtgcctcatggtaggtaggggtccttgatggttgttcgactggcttaggaaaaaacccagcagcagtgaatgtcccctgagagcttttccggttgcagtatctcgctcgatgtccggattgaaggcaaagccagcagcgcgaaggagcctggcagcaaaaagctagatgatctggtgagaagcaattgtaacatttgccctttagcttcaatttgaaaagaccagtgcccttcacgtcgaattgatgatattgccgtgttcgctcagtagacgtccagctcttgcgccaccagtaccgcggtctgaccaccgaccagtccccttcaatgccatccgacgcagcagggtatggcctctgtccattcaaacgcggcgcggcatcgagaccagcagcacgccgatgtgaccaaacgttgcccgaattcaaatccccttccggc

SEQ ID NO: 127643 - DNA, 772 bp, Zea Mays
tggtgaacttcctcatgcagtccattagagtaatcctccagatcattataagctagaaccaaatcctagaaacgacccctcaagtggtcctcacgggcaaaagctacctcccagcatcgcatggttgccgccaggcgttccttctgctcagctaattccttctgaagctgcttcttttctgccagcaactcaagaatatgggatgcgtcgagataccgctcattgaaggacacatctagactttgttgcagctgctccacctacgactgaggtgcacgactgctactgctggtctccactgcacgggaggccatctgatgcttgggcactcctcgtggtccaacccgcatatggggcgtctacttagggggagccattctgaatttttaaggaatatagatgtaagaaaagatcaaaggattactaggattagtaagaataatttttaaacccacatatattcttgtaaccatttagctttaggggaaaacctttatcaaatgagtgaatatatgatgcatgcttcgtttcctattcgcctatcatctactgccaacatatttggctatcaccctttatggcggtggcaatcctactcactccgaaattactagtcgtaatcttctagggttttgtcagtgtacctgcagaagattctattccagcctaagttgtgggttagtggttagcacctcaagctaagccacctattagtccttaacttactataggactaactgcacttttttttaccaggcatgtaatcctagtt

SEQ ID NO: 127644 - DNA, 994 bp, Zea Mays
gaggagcatacgcgctgataacattgagaaccaagtccccaatgaccagtttgactaggatgattctatctcctagcctcttaacatctactaccccatctttaaggctcttgtcgatcaagacgcctactccattcttgtttgttgcagtcctcgtgtaccacaacttgaagcctgtaccttccacttccttcgccttttgtcctttccacttggtctcttgaacgcataaaatatttacccgtctcctcaccgcaacgtcgactatttctcgtaacttacctgttaaggaacctacgttccaactacctacacggaccctagttggctcgactagcttccttacccttcgcacccgccgaggaagatgcaaagacccttgctcattttccactacacacgggcgccgatgtagcacgccactaaggatgcgacgacctgatccttgctcacttatcaccggctccagatcaagagacggcgcgtcacttaaggggtgacggccaggcccttgctcatttaacaccatacccgggttccgatatggcgcgtcgctaagagggttacgccccaagaagaatatgaaaggtacacaggaagaatatgaaactaactgaatatgtttaacttccttaagagaataactgataacaatagattaaaagttggacaatatttctatgtagaaagtgttgatacggtaaaggaacgtttgtagaaaatagtgtatttatagcagagtactgacccagtctgaaacaacgacaattggtcatcaacattgaaaacattttttgctggaaaacaaagattatcaagtgagaaacatctagattgtactaatagtgataatttttgtacagtaaataaattgaacagatggtacacatgatgtcacaaaagagaaaaaaaatcacagtgaaatcaggcatataccttgcactgcggtatttttctctagtgtaactggcatgccattcataatcaaactgcc

SEQ ID NO: 127645 - DNA, 299 bp, Zea Mays
gtcaaataaaatatagagccaaacaaaattgtttatgaaggttgcgcataatgtgactttaggggcttgaacaacccaccacaatccacgcgagaacaagctctagcgtctggtgtcaacgtgtgtgcggccatcagggctacaacaacgcagcaagccttcgtaacaagcgcaatagacacaattatggctcggtaatcagggtacacgataagtccacgcaacgtgcacaacagacgcaattgtggctcgatgatcacgacacacagacagtgcctacagggcatgcaaaaaatgcg

SEQ ID NO: 127646 - DNA, 274 bp, Zea Mays
tgctacaatgcagtttgttggaccagctgcacgttagttgcagtccatagaacatagattgcatctcatttcttggatagaattttgcactctgatccaggataggtttgctaagaatcagcatcaatggttgcttagacaattgttccatatatattaggcaaacaggtacagtctcagcttatgtcgaggagttctcccaattggtagaccagcttaatgcttatcaacatatgtctgaccccttgtactatactcttaaatttgttgatgg

SEQ ID NO: 127647 - DNA, 524 bp, Zea Mays
taaaagcagcctagactccctaggaattagggtttcggggcttgacggtagctgcaactgcttgaggcgcgtgcggtggctggacatcgacgactgcttcgtgtggcacgagacacgagcggtggcatgaggcacgagcgacatcggcgagcggcggccccagacgacataggaaagccacgccccaaggcgcgagcggcaaccgcccgacgccaagcggcgatggtggtggtgaccgcccacggcagcatctgaagacgatgatctcctccgatccggtgcgtctcgcatgtccttcgacgaagaccacctccaatctggtggcttcagaggcgttcgccgatctggtggccttagggtcgtcttccagcgacatcctccaactgatccgtgtttatatcttccatgatgatgttttatgcctactacttacactatttatatattctattgagtatttttatgatgatcaatacgacgtctctcacatggcttcggtttttatggtaaccacatgtattcat

SEQ ID NO: 127648 - DNA, 469 bp, Zea Mays
gactatcgtagccggctaaggggttagtctatgttaaatatatcttatgtattcatcgtggcgtaggatagcgtgggttgaaaatataaattatgtgacatgtgattcgtgttttaaagcgagatgtgcgaatgatcggttagtgtttcacttgtctagtcgataaacgttgtcataaataattgtgctaaaattgggcatgagaaggcagtggggacacgtatgtacgtgtgtgctgtggtgtattgtagtagtggtggcgtaagataattgattgaggtgtgcgggtatatgccgtaatgtggttatactcgcgacgaggaaagatgtatgtattgtgtaacacgacgtttaggtcgctattatataatcgtgtgaaggatgctcgtgatggttgtgtgattgaggagtgatgtaatggcaagcgagaagtaagtttaattttttaacggttagtggacagtatctg

SEQ ID NO: 127649 - DNA, 493 bp, Zea Mays
tctgggagttcgattgcgtggacggaggagtcttcagatgaggacttggattattttgcagcgttagatgtggctggagcggagccttcgccgcgcgtggagggttccgaggggctcccgggtgcgagtactgggtataggcgccgaagggcggtggcgaaacagagagtgagtgaattgttgcgaagtggtaggcgtcattgtagtgaaatggagagtggtcgtcttcgcgtggacgggactggtaagcgagaattgttgtcctcgccgattggggcgagtgtatgtgagggggagctgcgaaatctttttgagggtgagtaattgaggataatgttgttcaactacagggagatgggtatcatcccgaaggttgagccaatataatatatgatgccctcgctatgtgtatgtgactgtaatttgtatgataaggctgcgcaccttcgttgatccggccgcgcccgtaggcgacttttgcacggagtctttt

SEQ ID NO: 127650 - DNA, 853 bp, Zea Mays
agggtttatagcgcaaatgtgtccaagacacagagccggtccagccggggactgcgggttaattcctctattttccaggggggtctttaggaaatgtacacgggcgaagaggtacccgcacattctggtcgtccgatccgagacacacgaaccagattagatcttactatctccgaatgggtattctaccgacgcccttggatctggatcctacggtacggatataatgaagccgagatctcgccgcagccctcggatctagatcaacggtcaccattactcgtggcgaaagggtacgccaactctaatcctgaccgtctggcccgaatccaacggccaacataaaacccccccttcctaagtcatccccaaaccccgacggtcgtgcccaccgcggcggagcgccatgaccggagcagcacccacactaatcctgtcgccatcccgcaatttacttgtgctacactgacataagaccatggcgaacacgaaggaggtgaagaataccggaaatcgggtgcgcagacaggttgttctcgcgttggggcggctcggcggtgctctatctactccagcgaggaattgctcacgcaccgcaggtcccaacctccaatagtggcctcgaacgattaccccaggtactgacggccctcctcagccccacttcgaggacagaggcccgacagcgatgagattcaccggcggcggcacactcagttcccccctctcctccctttcagtcgaattggcgtacggctccggcgaattaggagaacaggagtgttgcgggcagcgattatatacgggtggactgcccaattcgtaggaacggcccccgacgaaaacggcggag

SEQ ID NO: 127651 - DNA, 429 bp, Zea Mays
ttctgctttttttttcctgacgggaaggttgctacacttaggtctgatataggttaactattagtctatgattggttctataaagcacaaacagtttctcagaaaagagaaagcttaaagctatttttagcttcacataaaaaaactgcgtatgtgacagaagctgaaaaacaaggttctaaagagaaattttatatagatctaaaatcggctcagtcaagtaaaaatacaccaaacacattcttatagttgctctatattctattgaactttctccgccaacacagtggcagtcgatagaccaagctgtctagctacatggtgcgccaaccggcgccattacccacgctcacaccacatggtaaacctagaaaaaacggccaaagagtgcccacctaaaccacaccgaagaccgaactgagaccaggc

SEQ ID NO: 127652 - DNA, 705 bp, Zea Mays
cttccttccccagtgcgctcacgtcgcagaccgtttcccctcctccgcgacagtttcttctatcttcattaatggctacaattgctcctccccataattcctctctcggtgtatgtttcttcttccctgggatataaatcaaagcaccgcgcctgtgacgattcccttctagatttcccctgtctcttcccctctcgtccttgcctataaatggagtcacaatgcagttgctcctcctcccccagctgctctcttcctgctctgctctgacgcccatcttcgtgctactcgcccggagcagcgccaccgctcaccactgagccttcctctccagcagctccctcctctatttggcttcctgctcacgacgtcaagactccgttgctatcatcacatgctccttggcgccatcgctcatcgagccgcgccatgctgcatcatcgctgggacttcctactacgtcgacttgtttgctggtgccatcctcattgccgctataaatccatccccatcgccgaaacaaggtataggaagacgaacattttactagctacccccttcatatgtatgtttaattgcgtgtagacgcatgcgataggttccatattttaaatacgtatttaaaacccacataaagtaaatgttgatttattagcttcataaatttgtaatacacatttaaaattagtgtttgcaacattttac

SEQ ID NO: 127653 - DNA, 525 bp, Zea Mays
ggagatcagactcggagacaacagacgtgtggttacctgtgaaaggcaactggctgttggggtcgatgggaggaattactgcagcggatgaactcgaggcctttctcttgggcgccatctcaattctgctagcaaacagagcgagagccgaattgcagagaggatttggaggcaggaaggcaagaactagggcacgaaaagcagaggcggctgaaagcgcagtatacgcgggatattcctgagtcggataccgtctccaaaagcgcccagtcagcacccggcagttacttttaaaacatcggcgtgccacgtcgtcacccggcggctacttctaaaaccccggtgcgccacatcatcactcggctactatcctcaaagtggccgacatggcccgttttaactcggctgttatttctaaaacgctgacattatcaccagtcgctcggcatttatctctaaagtgccgacgataccttcagtcgctcggcagctatctctaaagcgccgacgatatcttcagtcgct

SEQ ID NO: 127654 - DNA, 406 bp, Zea Mays
ctggggacactattttgcgaaagactaggggctgacgtataaaattccatagactcagtccaaccccgcagtggaccgcgggttgatttatattaacccgagggactcttttgagaagttgccacgcgaaggggtatgcaaggatcacgaccgtccgatcagaaagcaagcgccaagatcaaacgacacatgaccgaaccaatattatatcgttcccatcggatctggaatcgacggtccagattttataaagctcgagttacactaagccgcccgatcatacccctacggtcccgatcaaatcgcccaggggagtacgcaacgctcgatctgagccatccatcatgtatcaacggtctatggtctgtcttctttcccagctacccagccgacccgaactacggcg

SEQ ID NO: 127655 - DNA, 274 bp, Zea Mays
atgccgtccatcctatcatgatcatcatcaagttccacctccgcgtcaacgtgtataatagactctccatgccagtaccatgcaaggtagttcggcataaacccacttttgcaaaggtgtttctccatttcttccttcttctaaggccacttgttctcgcagcgattgcaaggacacttcactagacgaccagttccatctttgaaagcgtgctcaagaaaagcctttgttacaaccatccattcattcgaatgtgccccatcctttctccacc

SEQ ID NO: 127656 - DNA, 494 bp, Zea Mays
caaagatgctaaaacgagaacaaagagggcatgatcatacctatggagggctggccacggcgagggtgcgctttgcggtggcagagaccagtttgggggaaaactaaaattcaagctctctgacgaacgattgctagtgatttttggtggctgggtgtgtgatgaccttgcggggctggcgggggcttcaatttatagggatcaatggcggtggccgggaatttcagtggggacgcgcagcggtcggaggaggaagaagagtactggcgtagtggcttggtgtccagcaccgtggcaattactccggcgatcaacggggagctagagtgaatcatggtgttgcgatagataggtagagacacgcggcggacaacgatgatggcttaacggcggtgagaatccttatccgagggcggtgagtaaggggagaggtaccgcggctagccggagtggcgtccagctgactggcggcgaagattctcttaccccacgat

SEQ ID NO: 127657 - DNA, 410 bp, Zea Mays
aaagagattaaatagagtgttcgatgttatcgggtttgtgtacccagactactgtatccctcgtggaaacaacggacaaagaggaaagctgctacttcggcgagtgctggtacatcgaggtcaaaaaaggttaaagttttgacacatcggcccaggcgtattgaaacgtccaacgtgccgaagctaactgagagggccactccaattgcagagccaagtcactctgtgccaatggaagctaggacaaaaccggttgaagagctgaaactggaaaaggcgttagagtagttaaaagcactgagcccaccatgcacaacggaactgccgaagccattaagcatccccgcaacaactccaaggaaaagaagaatggccaacatgctagatgctgttatggagtctgtgaaaac

SEQ ID NO: 127658 - DNA, 652 bp, Zea Mays
ggcacaaatcgtgattttttttttgaaaaaggggtcaaattccaaaaaaaatcaggctcaaagaccacaacaagggtaaaacggtgaattttcgcgcatcttttttttcatgtgggagaccgaattatggctaccaggccgtgcaccatgcagcaaagtgagacaaaagcaaggagaaagaggcccgcgcaactcaaacgggggccatgaccagatcatcaacgttttgcatttgcagccttgcaggactcgaataaaacaaagcaaggccaaaaacatacagagcgctggggtcaagcaggctcaagacgagggtaccaagttttcgacgtcgtaattcacgcgctggacagtgtcaggatcgctcatcgatctgcgtcatgtcatgtgcagggagaacgcactactatactgcatgcatatgtatatacagtatataatgagtatactatacgctgctgctcgatcgcataattgtatgtgcagtcgagctcatcatagcgattccaagtactcttctgaattttgcatgctgtacgccgtgtgccagtatgcgttgctttggagtgtccaattatataccctactactactagtatactagccttttgcattacaaaaagactggaactcatctatgcatgcctgccac

SEQ ID NO: 127659 - DNA, 1103 bp, Zea Mays
taaatacaacacataaaccacacacaattatatagcaaccaggctaccaaatagataaatacaacacataaaccacacataattatatagcaaccatggtaccaaatagataaatacaacacataaaacacatatttaatgttgctcagcgatgaaacaacacacacaagcgtagacaataaactggtggtggtgatgtggatgcagagaaaggcagaagaacaacgtagttgaagcagagggaaccaaccacacaccacgacttgaagagggagataccaataattaataggagtcttatttcatcgactgctgtcaggaatggacgtcgatactgtgcaacctgcaacatatatatggagtggaggggtccattcgcctccaatggcagctgttgttgattacctgcaaggaattattcagtaaattgatcaacaacactatatatacaacagtatgggatgattgagtgaatgtctaggcatgcatgcaataaattggcagattacttgacctgaggacgctgcctctaagaagcttgggcttcctgtagtggcatgagtgcttggggcggaagagggaagggtggtgcttggcctccaacccatcccactcgaggccatcccaccagtccttctcgcacaccactgtgggtggctgcgcgagacggccgccgaccgccggtaaacgcctgagtgctggacagcctgtgacattgatagtctcgagcattggtgaagacatcatgcggccacaaatgccgcgcagcgtcgggaggttgtggaggtggatgcgtcgtagcttggggaaatgcttgacaacctcctcttggttctcgagcctgggatcccatgagcgaaagatctccctaagatcaccgcaacaaatgatctctagggtctcaagctgaggcagcgacatattcgagtccaaggggagcacgaagatgaccctcgggcagtagtccaggtgcaagaactggagctgttgaaaggagtatgcagatggataagctcttggactccagttccagatgtgctttgccatcgggaggtgtgatgcccagaatgttgtcaggttttgaaatatcagccatgaatcac

SEQ ID NO: 127660 - DNA, 449 bp, Zea Mays
cagtcctccaaaagtcttgaagaagatagttacaaagtggaggaaagtagtggatccccccgacaggttagaattgatggtcaatggcaatatatcatttttctgcgtgaaattatgttgttttgagatttgatttaaacattgagttgcgattatgcagatgtaaatgtttacgctattcattgtatacattttttagcagaggcttaatgtgagatgcaatccccaagacatattagtaagcatccagatattaaatgacagacagcgccaagctattgcacggagggggttctccagtattcttgatatgagagttgacgcacttggcagtagatctcatttagcttggctgatggaaaagcttgaccataatgacatgacaattcgagccggcccagggaaggagctcaaaattacaaaggagacagtgcaccttattttggggt

SEQ ID NO: 127661 - DNA, 1128 bp, Zea Mays
ttttgattttgagtcattcaatgtaattgtaccgattgattgggttgtagtaaacaaaaattaagagagagtgattgtttcagtgaacaaaaattgagccaatattgtgaatgtgttggacaaaaattgagtgatggtttcagtgaggactcacttaacattgagaaccaaaatgaagataatattcagctaacattcagtaccaaatttcagcaacattaaactaacacccataagcaaatttcagcaacattcactcaacattgagaaccaaaatgaagctaacattcaactaaattcaaccagaattctatacatgtggctccttcaccatattcttcgcattctttcctttgcgaggcttcaatagttcttttgctctcttgattcttttacttctaccctttgatcgaacatcatttggagggtgtatttgtatttctggtggaattttgcaaccaataaaattctcatattcttcttgtgtaggttgcactatgctaggtacaatgtgtcccaaggaatcacctatgttgagaacacttgaaactaagaaatccaaggcttcttttgaactctttgctctttggatcgcctcttctatcttgtttcgcaccactgctatcttttttcttttttccacttcattagcgtcttcgggcttttcttccaataggttgccttcatcatcatacacacacgctctaaggtaacatgtcaaaaagatgttcaagtaagaggatacacaaataggatgagaagattagtacaaatcataatttcttttacctcttgcatcttgtttcccatctcttcaaaatataagatgaaggtagttcatatagcttttcacctcgcaatgtcaaaatgatatggcgacatggaattcctattttttcgaatagtttgcacgagcaacatccaaaaacatttgatgtgcaccactgaaccactctatccctcatagacccatcactaactataataaacttaacatcctcttgttttgtagttcccagaacagagcaatggtctctagcagcaatcacttattcctgaaatattttgaacacattgtgcgtgtacaatatgcttgcttgtttctccacagcccatggggtacataag

SEQ ID NO: 127662 - DNA, 276 bp, Zea Mays
ctcgaggtccacctgcacggcatcgccggctggcagggcgaccgcggcgggttcgagttggtggtggaccgggacgttgcactagtgaacaagttcgacgactgcctcgccgatgagtaccccgtgcctgtgcgctggaaggtacaccacaacaagagcatggtgaagggaggcgacggcaggtgggtcttggaggaccatgaccctgattacgaagacgaggatggcaacatcaacttgtagtgcaagccagccaattgttgttttgtgttgctg

SEQ ID NO: 127663 - DNA, 894 bp, Zea Mays
cgacaggagtcctcatgaagtgcatttcctcgactaccgggaagcagctattagatgaaatccacgccggacagtgtggaatacacgcagcatctagaactctggttgggaaagttttcaggtctggtttctattggccaacagcaaagagtgatgtagccgagttagtctagagatgtgaagcttgtcagttcttgtcaaaacaacaacatttaccggcacagcagctacaaaccatacatgtaacatggccatttgcatgctggggctggacatgattggaaccttcaagaaagctcagggaggctatactcacgtgttggtcgccattgacaagttcaccaaatggatagagtacaagcctattgcttctttaacctcatccaaggcagtggagttcatacaagacataatattcaggttcgggataccaaatagcatcataaccgacctgggatccaacttcaccagctttgaattcttcgatttctacgaacaacggagtatccagatcaagtatgcatcagtagcacacccaagagccaatggtcatgtggaaagggccaatggaatgatactggaagcactcaggaagaatgtgttcgacaaaaatgaaaagtttgcaggaaagtgtatcaaagaactgtcgtatgtggtttggagcttgagaactcaacctagtcgagctctacatggaaataccccgttcttcatggtctatggttcggaggcagtgctacctgccgacctcaggttcagggcatcgaggttggtcttcgaaagcatagctgaagctgaagctaccatgctagaggatattgatgtgctggaggaagagcgattgaacacagtaattcagtcagccagataccagcagaccttgaggcgctatca

SEQ ID NO: 127664 - DNA, 677 bp, Zea Mays
ctgaaaactaaaataaaagtataaatttgaatttggaatagaaaatagaaaataaaagagaagagaagaactaagaaaaatattacataaaataaaataaacatccttcacacttatattattaaattatacctttcaaactgaggacaagacattcacaaagtttgaatttaaacttgaactcaaattggatttgaaaatgaagaaatagaaaataaaatggaaaaagagaaaaacctgctgttgggccggcgactccacaattcggcccacctggcctttctctcctcgcgcggcccagtttcccccccccacggcgccgacaggcggggccaccccgtcagcctccctgctcacatgcccgcgctctcccctttcaccgccgtgtgggcccgcctcgtcagccagcgcacttctctcttctccccgtgagacttacttgtgggtcccgcctgtcatcttgtcgcctcagctgatcatggccgaacggaccgcgtcttccgccatggctgttggccagccgttgcaacctccgcggtgatctcgggcacctgggggatttccgcgacttcacctgccggcaggatcgggtctccgaaatccgcgctcccctggctataaagctgtgccccgtgaccccctttccatcggtgctcgctcgcgccgctgccaccgag

SEQ ID NO: 127665 - DNA, 375 bp, Zea Mays
gccgtctctcttattttgacatgagcttgagtcagtaggcttgtcgtctcttggcttgttgaagacggactctgtaacaccccaggtgttacttaggattttcactcaagaccacaagtaagccatcatcacatgtgacttaagttgggaaaaagtacaccaaagttggagctcaagatcctaagtaagtgcaacccaccttaaaagtcataccttggcttgttatgcacatataatggggagaattgcccaagccctaattcaaaccccttttggacaagtgcagcactagaagtaagcatgaacaaaagggtatgaaaaccacatgatcatgacttgggccaattataaaagatgtagcacacttgatacccc

SEQ ID NO: 127666 - DNA, 306 bp, Zea Mays
tggacgtgctcggcgtgggcgtgcccatcggcgtgacggcggccgtgatggtgttcgacgacgagagcgtggcggtggcgcgtggggacgtcgcgcgggcggtgtcggcgctgatgggcgaagggaaagaggccggcgagaggaggcggagggccagggagtacggggagaaagctcacggggccatggagaaaggaggctcctcgtatgagaacctgacgcagctcatcgagagcttcgggcaagtggaggcaagaaaaggttaggcttaggctagaacagtgcatgcatggagctagccgtgga

SEQ ID NO: 127667 - DNA, 317 bp, Zea Mays
aaatacgaaggcataaactggtaacttgtaaggcttcaacagttctactcatctccagaatctgaatttgaagcttcaatttgcatagattcattatcttcggattcagaagatgaagcacaggttgcaggctctaaatcaccagacaagagagatttgaggctcctaagtttctttttcctaggatgcccatgcctctttcttttggctggtagttgtgcttttgatattgatggttcctgtgatggttcatcatgtgcaccctcatggtcttcatcttgatcaacattttcatctggaacaacaccggtaataaa

SEQ ID NO: 127668 - DNA, 321 bp, Zea Mays
ggatggagtcggggggcgcgcggaggacccctttttgagataaggggacttattccgcggccagcagttttgctttcgcacttttcttcaattgttgcgttcttcctcctctaagtcctctgcgcctctgtcgtactcacacttcattgcctttcgccgccatagcagccatggcttcgctggttcatcccgagcgttaccggaccgagaggaggctcaacaccgtgcgcctcttgcttggatggggtgcgccgtcgcacgcctgtaggatccgagccggtgcttccccccattggcgatctcgccgccggggagttcgtg

SEQ ID NO: 127669 - DNA, 310 bp, Zea Mays
tgcagccttgacaaacctgcagtctgaacacgtcacagatgatgtcttgccttttgtggatgtacatcttggtcacctctgtttatcgcttttgtggatggattgttcagctgcctttagtagatgaaatggctctgcacttgtagttgcgtaatgtttgtgcctagctatctggattgtgccggccaagagttggctctaggtaccttgtaaatacctctggtttggttgtctgtcccccactgtatcgactagacgtaaacttggaccatgtaatcttattctggaccagtttccagctgaaacaagc

SEQ ID NO: 127670 - DNA, 293 bp, Zea Mays
gacgactccctgattcggagggcgagcgacgacagggcaccggggcgggtgagcagcggcgaccctaacgagcgagcggtggcaatgccccatgaggcgcgacagtctgtggtggcggttgccacgctaggcataggtggcttcagcggcgacatcggtcgcgtgagacgtgggctgcgaggatcggtggtctgcacgacaatttgggtgtccttcgtttatcaactcctccaatccggtggcctcgacggcgtccagcgacgatatcctgcaatcctttgtttatgcatgcg

SEQ ID NO: 127671 - DNA, 625 bp, Zea Mays
tgtgatagggagggtcatttggctacttttttgctttaggaggaagagagatgagcgacggggttctgagttgagcagaaggaacatggctcgcccctctcatggtgtccataattttcctgctcagagatgtcttgcgaggtatagaggtgatttgccttttgctgctaggcttcaggcagtgagaccacaaggtggtcttgcctggcggggtactggtcatttgccatatgggaccctatgccagtggttttggtttctacttccctagtggaccacagtttccttctcgtggtgatcgcaatcccctatgggactggggatgtttggtgttttcctaacacttttcaggggcaaatgctatagcactagtatccttcacagtttactaaccccaatgctatgtcatttgctcactacgtgtcttataattgatgcaggacagaggcctagagaagacatggctcatggattcagttgttcgcgtcacatgactggaagctccaaatggttatttagccttgatcccgtgattggtaaggaatacatcatattcgggtataagtcgagaggtaaggttgtctttcttggctctgttcgagtgaatgacagttttatcatcaag

SEQ ID NO: 127672 - DNA, 385 bp, Zea Mays
aagacaatatcggcagcaccaccgtgcaggaaacgaagagcgcgagctccccggcggtgagaccactggggggtggccctgacatggatccctccaacgaacaccggcgcgccccatccagaggcccagaaggcggaagggcgcggcaaataccggcgcattccatccaagcaggcggtataccatttcgagcactcactcagtctgggcgcgctcgggatgaagtcacaaggccatggcaaactacgacaacacaaagcaggaaccttgaaggcaaaggggcgcagatagctcaaaggcggaagggcgccgcgagtgggagagaagcaaaacatggctgctactcgaagggtgaacccctttttaaaggcagattccccgctcg

SEQ ID NO: 127673 - DNA, 314 bp, Zea Mays
cttctgctccccgctcaggcggagacccgatgctgccacgtggcatactgcgtgcggcataagccaacgggcggaacctggcatgacgcctttgggctacgcgcgccttcgcattcattacgaataagacgtgcggctgtccattccactgacaggcggcgtgctcagtccacgatacgtgggtcgtgcagttactcaccattactcatacggtaactgcccatcaatgcagcatggattgcggacatcatgacttccgctgtttactcatgcgttactctgtgagcattagttattcccataatgtatttttt

SEQ ID NO: 127674 - DNA, 617 bp, Zea Mays
tggaaccgcgtgaaccggctggccacaagttccagctcctcatccctaaggctctccacctactcctctataatagacaacaaagaagatagagcaaacatagcaggtgaggagttaaaagcagaaccacgtccatagactagggccatggtgggtgcactagggttctcaatcttggcccgagtctagtggtcaatctctatggacttgagcttgctaaagagattgtccacgctgagagtctcgtagttgggtgactcgatgatcgccgagaccttcacctcccaaaccctccgatttagagcatgtagtaatttcggcgctctctcatgatcactatagggtagctgtgccttgttggcatgcatcttgttcacaatagactagaacctggagaacataggatcaatggtctctccagccaactgtgtgaagttctcgtactctcgcctgtacgtctcaaaaagtctggtcttcacatgatcgttgccctcaaggaatctctcgagggtagaccagatctgatgagctgtagtcagatgtccaactcgctcaaactcaccaagtgagagacacgagaacaaagcattttgagctctgttgttcgaatcatggaa

SEQ ID NO: 127675 - DNA, 329 bp, Zea Mays
tattgggcagagagcagcagttagtcaatcagtagtcagacagtgcaaaaatgttgttctgaaaaataataaatgggagagggaaaagagacagaccattcacaggcttgttgctaaggtaatgagctccatcggattgggagcaccctccttttcctccagcatgagaatccgccttctacgagaagaggtctaccacaccaaatctatgaaaacagagtcaagatctcagagaaatttttgccccaaaacaattggaatgtaggggaaaacgaacatggacagagtagcactttggcaattactcgtcagacattgttgaatactgc

SEQ ID NO: 127676 - DNA, 827 bp, Zea Mays
aggggatatgctgcccaatttttgaaataatgtgttgttagttctacaatgtcattatgattaataactttggatggcaatgatgtcaattttttcggttctctttccaatatttgagttatcgcgtacatgattatatatttcttaatttacgtatttgctagagggttcgataattaatattatcggaacgaactacccaacaattattcggtatctacctgagtaatatatgttatccgtttcttactcgtccgagtcattattcaatcttctcccgaattttaactagttgtatccgagaaaaataagttagggataggatacatgataaaccctatgtccatcccgttttcatcgttacatcctagtggcggccccttctatctcaattctcaaaagaaaaccgtgccataatctaaacggataggaagttgtgaaatgctgacgtggtgggaccatgtttattattttggattgaaccgaatctaaccctctcgtaatcctataaatgaaccaagggcgaccgtaccgtcgtctctttttccatgtgactttcagcttcccgcacaggtctgcgccgtcgctggtgacgctgtcgtcctggccggcgcgggccccgtgcatcacgtttcggttcaagagagaagccaacccttacacacccgccttagcctaatgatgatggttccaggcccagcacggccgttactgtaggacgaccaacagctcgcacgagatattttttttgttcagcgcttcgccagatgtccttttaattagaaaaccagatgcgacatgcatggcctcggatatttgcagcggct

SEQ ID NO: 127677 - DNA, 454 bp, Zea Mays
gccattgtctcccagacatgtattcagttgagctgattctttcttccagtcttccaagaagttggtttctttcttcccgaaaggttttcggctgagggcgtctgttaccacgttggctttcccagggtggtagtggatctcaaggtcataatctttgatcaattctatccatcttcgttgacggaggttgaggtctgactgagtgaaaatgtactcaggctcttgtgatcggtgaacatgtgacatttgttcccaatcaggtagtgcctccatatttttagggcatgcactatggctgccaattctgctcatgcggcttgagtaggcgcgatgcataggcaatgactttctcattttgcataagtacacaccctaaaccttgccttgaagcatcacagaagacgatgaaatcctgatggatgtctggcagtgtcaaaacgggtgcggttgtgag

SEQ ID NO: 127678 - DNA, 764 bp, Zea Mays
gacaagggcgtgtcggatgtttcccccacgtccgctcgtcacagcaccgacaccttcgagcccacgcctgcccgagcctcaagtcttcgcgcctctcttcatgctcaggcggcaaccctcactagcatccgggaaaccgtcaccgacgttctcgcgcccgactccactcagtaccctcggtggtgcgaccaggtcctgtagaccctccgtcgctacgccctcgccgaccacgtcctctccatggtcactgacccgttggaggtttggctactgatggatgaggtggtgctttcctggatccatggcaccctcacgactgaacttcaggacatcgtttgagtagcggacgataccactcaccggatctggggtgcacttgaggctcagttcctcggcaaccgccacacttggatcctgtaccttgagaccacttttcgccagcttgatcagggcgatctctctatggatgagtactgctgccagatgaagacgatggtggacactctccgcaccctcggggcccccatcaccgatgagagcctcgtgctcaacctcctccgcggcttgagccctcccttcgatcgtgtgacgcccatccttacccgaatgaagccttttaacacttttgcggaggccaagaatgatatgcttctcgaggagctttgcctctccgccactgcgaccgccacgacgctctacagcgcacctcgggctgcctcctctaactcggggggggggggggggggggttcctcttcaccgcat

SEQ ID NO: 127679 - DNA, 479 bp, Zea Mays
tggggaaaatctacacgtagttcttctctttcccaagtagctacgtcttctccatggtgactcgattgcactttgcacatctttatcactttactccttatgacatgagtcagagtatcaataatcttgataggatacttcgtataggtcagatcatcttgaacactaagatccaccataagtaactactcttcgggtacccttacgcacttcttcaattgagatacatggaagacatcatgtacatccgcaagatggttggatagttctagtttataggcaacttcttccactcgcttcaggatcaagaagggtccaataaagcgaggggacaacttccctttgactttaaatctcctcataccctggataagtgacaccttcaaatatacgtaatcaccgtctttaaactctagcagtcttctccgggtatccgtatagcttttctgactgcgcagtcctcaagttctcccttatat

SEQ ID NO: 127680 - DNA, 488 bp, Zea Mays
tctcacgtactgttgccatcaacaaattcactaaatggatagagttcaaacccattgcatccctaacttcagctaaggcagtggaattcgtacaagacataatattcaggttcgaaataccgaatagcatcataaccgacctgggatccaatttcacaagcttagagttctttgatttctgcgaacaaaaaagcattcagatcaaatatgcctcggtggcgcacctaagagccaacgggcaggtagaaagagccaacgggatgatattggaggcgctcagaaagaaagtctttgacaagaatgaaaagttcacagaaaagtggatcagagagctgccgtatgttgtttggagcctgagaactcaacctagtcgagctctgcatgagaacactcctttctttatggtctatggttcggaagcagtgctacccgctgatctcaagtttggggcaccaaggttaatctttgaaaacatagcagaagctgag

SEQ ID NO: 127681 - DNA, 574 bp, Zea Mays
ctccggcaagtgtctagtttggatcggggtgctggtccttcggctcctgctgctgaggaggttcccgtgcctgatttcactgacgccgaccccagtgggtgtgctccatctgctactgatcccaatgggggtgccctgtctgatgctgatcccaatgggtgtgctgcttatgttgttgatgaaaacgacagggaggaagaagatgaggtccctctgactcggaagaatagtcggcagtatattgccagtggggagagtagtggagttccttctcctgctttgtcagccctcgttggcctacaggagttatctctggcaaactttgatcagaccctggaggatatggttccagaggaccttttgttagagccagcgaatgatggtgtgatggaggtttgtgctgatgtgcttgatgctgggttgaggtcatcccgcgcctcatcgaccttagagcgcggtcttgaaggctaggaaactgatttggatcgtctcggtcccatggaaacaactgaggggccttcagccttagaggtggccactgcagagaactcggctctcaaggatggtgttgacg

SEQ ID NO: 127682 - DNA, 398 bp, Zea Mays
aaatcctgcaggtctcgtgcctgtatcaaaggatggctagtatcaggcgatgggccctatgggtgtgctactaacgctccctagccgaagctgtgttcaggtctaggtcctagtcgaggctgcctcctgggggccgttgccaactcttttaggtatgctggtatccagcctagacacgtcgagcctacatccaggggggccaagtaccagggaggagtcgacaacgccacacacaacaagaacaagcatcatacagataagagctatttaattgatagttcccaaaagtatcttacaagaacaaagttattacatctgctttcaagtgggaccctagccttatgtctacaagtatgacctactcgacgtcagtagggtcacgctggaggcgcgcggcc

SEQ ID NO: 127683 - DNA, 579 bp, Zea Mays
ggcatctcacattctatgcctcttttctttgctatatgtgaaggtaggactcactaataccatagacgagttagatcggtagaaaatgttaagctcttattattggggttcctaatgctctagatctaccgtaattgatggatttgatttaaacattagatatatcgacaattaaggagatctatgataatggttgatggagcaagcatatcttgattttagacgatcgggggagtaaaattcggcgccctaaagctcagatttctggtgcatgtaaaaatactgggccgggaggctcccaaacccctttctggttcagtatatgaagtatttttactcctataagtttagttgtgaagtattactaagcaaatcattcacactttatggtgatctgttagactcttactctataccatgacatggtaatatggtagatactttttgtttcttatatgtcacttctgagtatatgttgttgaaaccttactgttcatgctcttgttagtttccttactttaaccctccttttttatacgtatgtttggctattacactgttcaggtgaatttcaatgga

SEQ ID NO: 127684 - DNA, 585 bp, Zea Mays
gccgatacttcacgaataggtttatatgggtgaatatgagtgaagtgtgtgcttggtttgaatttaggcgaagaaaatgaaatttgggcactcggctcggaaacgatcgctcgaaatggggaatttggtgaaattaaagcctggaatatcggatgggcgtgaaatttggcgaatatgttactggaggtgttgtgaaggtgcctgaaaaatttgggttcagtcggagcatttttggctggtttgggcatttcaccgaacacgtgacgtgtggagttctagggttttggagaaatggctattagaggttgtgaaaccctccctaaggagctagaaacctgcaggagtactcaaggaacataaagggactcaatcatgcacttggattcacaagatttgatagaaattggaattgggcacaaaggggtggagaggggagcttactgcagagacagacagagaggaaagagagagcagatgatgttcaccagagagggaagggaagcacgagcactggaggtcgccggagagatcaccgccggtgagggaggggtcgccggagcgcagagggtgtcgccagagaccgag

SEQ ID NO: 127685 - DNA, 343 bp, Zea Mays
atccaggcttttagcaggcctaaccacagctagaagaatttatagagcagttgttcgcatatttgttgttcaggaccaggcacaaccttatttgtgtcaaattgcattctagaattttactttaaattgcatcctagaatttgcaagagttaagcaaaaagaacaaattgcaggctagaattttactttaaatagataaatcaaatttgcagactataactttgttgttctataatttgacatcccatctagactgttagcaagcctaactggaactagaagtattttagtgaaacaatcagacaatacaattcaaaagatatataagcagaatcatatggag

SEQ ID NO: 127686 - DNA, 493 bp, Zea Mays
gaaaaaatatagaagtaaactaattggtttataaaagagcaactaatttactacacagataaataagttacaagaacaatgccaaacactagcaccggatggacatttaataacaagctagttttagggagttataaaccaatgggaagacaaatgctgacatgatgtgttttctctcgaggtttggtggtttattagccactcactcccccattcagactagcctggagttgtcattgttcctattgctaatggtgatccataggtcatattctcctatgtagagtgcttgcaagcaagctctagcacttgatctgctcgaatcacttggcactcttcacaccttgctctactagtatcgatcttcacctctcatgaggtgagtattagtcctcgtagagccttctctagagccatgcacaaccttcttgtgtggttcaacagagacacaaccaccaagtcgtctagatgaaggcaaccttcaagagtggca

SEQ ID NO: 127687 - DNA, 299 bp, Zea Mays
gtgttgctctagtagataggagtgaatacccaactcttgtgtatgaaatggatcaatgaatgcttgtgaatgggttggttggggtggcttttatatccctcaaccacacatatagccattggggcgcatctgccagaaattgcactggcggacagtatgcggctaggtcccggacggtccgcgaccctccaacggtcgattctgacatcttcaacggatacgcctgacagatcaacgactatttgcctcgatgacaccatgtggacggtccgcccttggtcccggacggtccacaccag

SEQ ID NO: 127688 - DNA, 548 bp, Zea Mays
tccgacgagcaattacaaggattagacgttttcaagcgcggcgcggtgtgggctcctatctaccaaggaatgatccgcaatccagagaggggaaagttaccgtcgaggagggccgaggggatcacttgtgcggcgttggtcgactccgcggcaatggcagcgacaaattcatgggctctccgttgccaattccgcccgactagcttggggttaccgacagagagtggatccgaagcaccctggaccgaaaggatggctcgacggcggctatcgcgaggtaatgccaggacgcagggtcggcggcaacggtggctaagcgcacggcaagaactccctgggcttgcgcgagaaacgcagcggcggtacttatctctgggtgccagacccaactcttgtgcggctagcgcaacaacccacgcaccgaacggcgaggtcaaccatggcgcgcgattcttacgggaagagaaacagggcgagtccgcgcgagtctgttgcgacggagatgggagccctgacgaaatggccccacgcggcagtgaagagatgag

SEQ ID NO: 127689 - DNA, 331 bp, Zea Mays
cttactttccgttgcctggtttctagccgccaaaattaaatgcggccatcaaaaatagatgcatggtgccatgtgtattttcggtagccgctgtcaaagccaccaaaaattaattattctggccgacaaccaccaaattgaagctatggcttactatcggtgaaacaccatcaacacgccgaaaatagagtattactgctgaaaattacctatttttctatagcgtgatatcaggtgatcttcatcaaggactattgcaagcacatgaaggtcatggccaactctttacgtaatgttagacacaccatttctaagccccaactaacgctcc

SEQ ID NO: 127690 - DNA, 425 bp, Zea Mays
tttagctttttcttgagcatcgtgagattctttttcattttttctaatcgcttcgtcagctatctcacgaccgcccttcatccacacctcggagtaaaatctcccgcctagcgcagaagcttcagccgaagggtctttgatgtcatccaacgagaaaacaaatcctagctgaactacaaccttagcatattcgcagccagctttctctaagatcgacatggccccctgtgcgccaggaaatgcgcagatgtctcctcagtcacttaaaatttcttcaaaggcttcgacttcttcgctgatccactagacgacaccatcagggtcgccacagatgaatttttgctcagaagaatatgccccaactctagcaaagttgtccttcaatttcttggtgcattccaaggatatttcataacatttctctt

SEQ ID NO: 127691 - DNA, 367 bp, Zea Mays
gaacatatcttccgatgtgcatgagctggcgaggcgtcagcgggagactgacgacaaccttcgtcgtcaagcttcttccatgggtatgccatttgctcctcgctcgcctgatgtgcctcttcatcctcctccaccagaaatcaatgaatggcaccagcaggcctatggggtgccctttatgtcagctgaagatgaagaagaagaggaagaatattttgatgatcgtgagcagtttgccccgcctccccactagggggatccgggtcaatcttcttcttatcctccaccccaggatccttcgggcagctaccctcccccagctcagcctggggaagaaaactttgcggctaacttggcgactcaattc

SEQ ID NO: 127692 - DNA, 336 bp, Zea Mays
acagagaaaagcacatataattcaattcgcatgacatacaaacaaacaatatatattggtattcaagggaaaaatcactttatcgttgttctaacagatcactatttacttctatatcataggaacgtttcagcctttaacaatgagtttaaaaccaagttatttaaacaactacatcaatagaacacaattaaaacaagccaagtttcctatagaaacaaagaaatgaatagaccacacagtgctgacaacatggaggacaagaatacgacaaatatgaaagtgaaaaatgctataatctgaagttgttgtaatgctacagagtaaacccaattt

SEQ ID NO: 127693 - DNA, 409 bp, Zea Mays
gagtatcacctctttagaaaatcttgaagattctgagcgatacatccaatgggggtgcccaaagggtgtctgccccgtgaaaggtgtttatctcgttgttctaaagtagtaatttgatgtgacggaggggtgtaatcatttgcctgagcagttgacttgagtccaaccggtgccgtgtcacgcgaaaaggtgtcagatgcctaactcattttcaggcggcttgaattgcttattgaattcttgcgactgttcagtgagcgaggtaggaagtggacggtcacccctcagcctccttaaatagccctcttgccctggctgctttcttcactcgcccttgatcacttgctctcttcttctttcttgcttctcccctatctgcacgaccatgggcagaggcaagaggggaaag

SEQ ID NO: 127694 - DNA, 755 bp, Zea Mays
gcctgttcgtggaaacgtcctcaagcagaagcagtcctagggatggacggttaacgtgttcgacgttgacatgcacgtacgtattgctggatgctctgtggcgctattgctggagaggcaggaggagagcggcgcctgtattttcagctctcgtcaccccactctggaaacaaacaagaatttgcaccaaccgagcacatacgctggttgtggttgaattcttcaatttgttatttgtcttaaattaacacggtgtcgtttcacccaattcattattgagactgggacatctcaccttcttcttttgtctttttagttgacctgactcttctaactcatcgcccatccctttctggctttttcgaattcttgtcgctaaggataatatatgtcggttttagtgaggacgtacagaaaaatgtcaacgccgcgttagaaccaaaatcaaagaaggtcactgcagacctgaagcctagcaactaagttgtgcctaaaaggtctcttcagccaaaaccccgcaagctcagttttccattgagaagatgcctggagattgcagggtggacagctgttgatgaggttccgaggtatctgctgctttttagacaagattaccctcttcctttatgtggtttttgctcaggtcatgctcgtctgttctttctctggcatcaaccatttccttcaacaagtagattttacattcgttcttctctaggaggactatatggcatactgaagatccaatcagtaaa

SEQ ID NO: 127695 - DNA, 406 bp, Zea Mays
gcatgatccatgggtgtcatgctggggtatgggctcgggtcggatcatgcacgcatgcaagttggcgcagcagtgacagactcgagtgagagcgagtgcgctggcgacatggggtacctatgatatgcatggtgatataggcgacatggtggtgataggagtaatcaggaccgagaacgagtgcagctacgcgcgtttggcgccgagtgcacgcatgaggccaagaatattgaacgcttgaatctggacatttggatttgattgaacaaaagatacaatgttggatcttgcagctcgctgatgagtattccggcccgttgaggtgctgtttggaattaagcgcatgtttgaaaccactcagtttttaagaaactagtttatgaaaattgagataagatggttctaa

SEQ ID NO: 127696 - DNA, 551 bp, Zea Mays
gacacaggaagtttgtttatgttctagctagatgggaagggacagcttcagatttacgtgtgctacatgatgccatatctcgggacgatgcatttgctattccaagtagaaaatattacctagtagatgctggatacactaatgaactaggctttcttgctccatatcgatccactcgctaccacttgaatgagtgggctgcccaagggaataacccatccaatgccaaggaattgttcaatttgcgccattcaacagctagaaatgtgatagagagaacgtttgggctattgaaaatgaggtgggctatattaaggaaaaactcatattttgacttacaaaaatagattaggatcatcaatgcttgttgcatattgcacaactttgtaagggataggcaaagagatatggatgatttacttttaggccaatttgatcaagtaatatctattgaatctcatgatgttcaaagtgaagtgagtatgattaccaatgtgcaatcatcaaatcaatggagtaacttcagggacaccaaagctaaccaaatgttt

SEQ ID NO: 127697 - DNA, 489 bp, Zea Mays
cagaccaccagctccgagaggcaggggaggaagaagcttcagtagaggaaggttcaacaatcaacctaggaagttgttcagccttttctgtggtgaggacaagggtcacacaatgaggacatgccaggtcacgatccaaaagcaaaaggaaattggtgaaactgaggcgtgacagaatcagccgaagcaggtcctccatactacttcatgctactctccatacatcccagaatacataggcaatcaacagcctacggcttctttagcttcagcaagtcactctcaaacctcttggttcaattaccaccacccccaccaatggcgcccgccccaaatcatgatcaacagccagaagggcaccttcggcctcaacaacatgaccttcgagagcagtctaaagttcgcacagttaatagcactgtgcccgaatccaggcatatctactgaagatgacataatgttttggccaaaataaagctctgatttgtt

SEQ ID NO: 127698 - DNA, 303 bp, Zea Mays
catgccacctgtatcatctgtgcatacgccagcaggtacgtctatttcaatggacatgcatcctgtagcgtctgcgatcgccccatacacagagggtgtctccgttactcccccggcagcattgagggcacctggacatatcgatgagcacacaaaaacggcagatgtggtcggcgcagagaagcacatccccatgagacatattggcccgcatgaataggacacacctcatattcttcagagccatgtaagttctcccaaatatgatactcttattttcttacatacttctttgtaatgttg

SEQ ID NO: 127699 - DNA, 684 bp, Zea Mays
tcgaggttttctcgatttgtgtgataatgtcttcttaatacaacactcatgaactgtcttacccctgcaagttgagtttttaaatttctctcttagtctatggcatctatttttatcctagtcaaaacctatgcaataaaacgaggctttctttgcatctaaggttttgactaagtgttgttatctcgatcgcaaaagagttatacaatctaagctccaaacctatctagttgtcaataactaagctaggaaggtaaagcacataaccaaggtaacaaaatataaatgctaaagcttaaatgcgataaacatacaaactctcattgacacgctagtcttttattaaagtatcaagaaacatgcaagctttctcctaatccttattagagccctagtcaagtgaatgcccatgtgagggccaaccactcgatcaggtaactccgtagatagccatgagccttctatatgtgcaagtggtgcttcggttgtggcctcccccaaatactcctagctgtctcgactatcgagtttttagccaaaacacaacaatcctcgttccctccagtacatgatgtcgaccgcaccacaaaaaaagttagtgtgatcttgcaagattacaagctctactagtacaacctacgatgacacacgcaaacatcaagtgataaaatggtgtgtgcaagc

SEQ ID NO: 127700 - DNA, 589 bp, Zea Mays
gttgcctatatgacttagagttcgtgggatcattgagtgactattgaagattgttgttggctccgatcattgattgtgagatgctcttgtgctcaatttccatgggagttcatgaagtgcaactctattggaatcatggtttgttgaaatgtttctctagtgtggttcttatgctgccctaattatgggcttggcacatggtaccaattagcgcgtgaatcatctagcttggactcaccataacgaggacattgattgctggcaagaaattgaagctcgtggatatatattgtggcatctcttgatccatatggtttgctcactatacttactcttacagttacactcatttacttgttgtatgatattttctcaactagcccaacttagattgtaactagtggtaatagcctttgattgatagctcttgttagttgtattctaccttgctagttagtagattgtttttttatcaacatagactaatgaccaagctattagaattgtttgtagtcatgtatagggtgaattagtgctagtgtaagttgtcgctttaatgccatttttgtaatgatcaaactttgctccg

SEQ ID NO: 127701 - DNA, 612 bp, Zea Mays
attgggcctttccctgagttgtgtgtgcgtaaagaactgttgggcttcaggcaaccctaatttgttgggcctcggccaaccccacctaggctgggtgtatcatctggtatcagagctagggcccattttaagaaggtgggaatgatgaggacatcctccactattacccgttggcaaagacgcaattggcctagttggcccaattgtagtcggacggcgaccgtgtgagcctcagaattatcccaccttgcttaacttgggaggaggaagccactttaaaagggagagccacccttcccccattggactagtcttttagggcgattgggcctttccctgagttgggtgtgcgtaaagaattgttgggctccgggcaaccctaatttgttgggcctcggccaacaccacctgggctgggtgtatcaccaccagttgtctttctgacgcttctggggagagtccgaatcgaggggaaggtccgagacaaaggacccatcggcgcgacgcagtcagggtcgccttactccctccgacctcccggcgacgtccggagtggaggagctgcatgcaggccccttgcccttgtccgaggaactagggcccgcagggggg

SEQ ID NO: 127702 - DNA, 534 bp, Zea Mays
agtaacaaccgtacgatgcgagatcaacgaccaccacttcctcggccgaaacggtacactaggatttaatcccaaccgcacactaccggatcaatggcccacgtcccggctacaaccccgcgcccaccaacgtcgatcatgaggcggtgccgccctttcctcacggcggcaagctcgccggaataccgcccccgaagttctaagggtagaattcctactccgcctagttcaacaggaaggggacaacacggtgaaccaaatggttagtgacataccgaagttgggcgcacgtgtacatgatgcccaggtcgaggcggatccacggcggtgtcgtccctccggtgagcaattaaaccgccgctgatgacgctccgaacacaccccagctaccgcgagattccttgaacccgaccaagccccctcgcaccacgaaaccgcccgaacgttgtttaatcccgaacaccacggcggcggcggatttctcttcctcgcgattcaagacgacgacgccctcgcttccaggtggctagccgg

SEQ ID NO: 127703 - DNA, 535 bp, Zea Mays
ctcccccgcgccagcccaattgccaccttcgcgctgaccggtgggtcaggtggtcagcctccttatccgagcacgcacgcttgcgctcagtcactggtgtgggggacccagttgccagttcctccctcccccaaacgagatttgttagcaccgactgcgtgaacttcagggaaaacaggctcgtcgtgatccctccgcctcctaatccgcgagcttcgcgaagatataaacccgatatccccgtgacctgaagcccgaccgctataagtcatcgccctgctcgattcacctcatctattgaaaccactgagggcctcgccgctgtgttgtgttcatgcgtgggcatatgcgagccaccgcccatgttacacgaccattgttgcggtcggtctcttggtcgggaggattcacggggtcccctaggtggtacccgaggcatctgcaggtaggagggagcctcttagtcattccaatttctcgtcatctttccccaccaccgcggagccgtcgggtggcgtcgctagacctctacctt

SEQ ID NO: 127704 - DNA, 380 bp, Zea Mays
gttccaacagcacggaggcagagctcctcctcaaggaccgcgtgatactacatatctggaattctctgagactcgacccccgctcttcatcaaagcagaagaacctctagaagccgatgagtgggtaagagtgatggaacagaagtttgggttgattcgatgcacggagatacgaaagccactgtttgccgcacaacagctaagagggcctgccagcacttggtgggcaaatttctcagcaatccaaccagccgggcatcaggttacctaggaggaattcaagctagccttccgggagcattatgttcctgagggagtgctccatatgaaacaagaagagttcatccggttaaaccaaggggagatactgtaatgcagta

SEQ ID NO: 127705 - DNA, 556 bp, Zea Mays
cgaatatatgagggtgaggggggttcgttgtgctatatcctgctagcctattggtgtcgctcgtacagttgccacacacgctggccatgctcgctcagagttagagcaagtccttctagaagagctcagagttagaacaagttcttctagaagaaactgggaagcttatccagatttccagagggacaggcatgtcctcggtttaacccaatattcactccttgtggtcccaaaaccagaaaacagaaccgatcaaccgacccatcacatcccctctattcttctaacctaacacactatttagggcgtgtttgcgcctggctggctcggttccctggccgtctcggtctatccaactggtctaggctgaggctagtctatcccagctattacaactcactttatttatgcacttgtaagaagccttgcgccatgaacagtcaggctcttaggaaacggaccttgatcttgtttctgtggagccaatctaaaaggccaaatttgcacgcgcacaaccagactcccgcgtacagctagactcccgagcaagccaggt

SEQ ID NO: 127706 - DNA, 430 bp, Zea Mays
tcacgtgaaaaactatatcatgcatgcatgatgttttctagagagagagagagacagacagagagagttgcacacaataacacgtacaggatcgagagatgaggaacgtacgggtgtgcacgtacgctggccgcccatggtttagctacagctgggagagctgatcgagagggtgcatcgtctggtcaggatcggaggccaggctgaccattcatcgatatcgtctggaaaggtgaggctgacgtttgttttgtagctaggtatatgcccggcccgtgaaccctagggttttgttggcttgcgcgcccataatttgcaatccgtgaccagtgatcggtccataatgcatgcatagaataagaaagcatagcagcacgagcaactgtacctcccccctctccatccgcatacgactgtcgtcatccttcgc

SEQ ID NO: 127707 - DNA, 365 bp, Zea Mays
cttcgttgggatcagaatgttgtagtcttcttcactctcaacatcttcaccctcaatcacagtctgctcagcttcgacattagaagtaccttcgtcagccacatccagacctggtcgtttcattacttttgaaattggtgccgtttcagtggcctcggtttcgtccccctcacgagacacccttgcagttgatcacactctggccattttgatggacttttgctgtttgatgaagctaacccgtctgacaatgttaaccttagacgatgaagtgttcgcttgaaagcgcaatgcagaaagcttcgactatggttaaattttttaacagcacaacagtgcaatggcaatgaatattgtggtaactc

SEQ ID NO: 127708 - DNA, 407 bp, Zea Mays
aacgacgccacagatgactctgacttagcatccaacggcccacaatcctttttcccacatccatgcaccgaagatcaacctttggcaagtttttttgggatattacactctaccccccttaaaaagaatttgtcctcgaattcgaccactccaacaaaacatccaaggtaccccatatagcaacaccattcaaaacatgggtccattattggtcttaattaacacaagaacttctacctcgactaattgtctaaggaaactacaccacctgacatcaagcatgaaccaacatgtaatgaagctcaaaccaagtcatagatgcaatcaacactacgattttacaacatcgaatttggatgcaaccatacatcagcatcaatgttttaaaatgacactcttttatgaag

SEQ ID NO: 127709 - DNA, 529 bp, Zea Mays
gtgctggaaacatccagagattgccatatggaaaaaaaaggaaaaccagatatcttctttctactctggccgaagaagactggagatcacaccactgaactgaacgaacgaaggcgacagatgcgatgtgaaggttgcaggtgactctcgatgccgcaaagcacgcgacttggacatcctcctcatctatcctgctgccaaaaattgccaacgcttccttccaggtgagattaatagtctcatttttctcccattcggtgtcgcaagtcgtatctcagttcaagctaggattgatattgcattttcattttttcccaattggtacatgtgttgttcctttgaagtccttcacgacatcaatctagccatctggctttgccgaatccgagcgcagacgcaacagcaacatctcctaatctcttttctcttcctccccacatcaacggctccaccccggccgacttttttttctttaatttttcccacaacagaagccacgaaaggaaggccagacagacgcaaaagcagc

SEQ ID NO: 127710 - DNA, 669 bp, Zea Mays
gggcgacgacgacggtgcgagctctagtgaggcgtcggcgagcaaccgggtcgacaccaaataacatagacaagcgcggcagcacgacgcgagcgtgggcgtacaggatggcgcagcagcaggggctgagttcgatgcagacagggaatcggccgcgagcactgaggtgcgcggcgaacagcactagcagagaactgtgggggtcttgagcagcatggcgagtggagtttcggcgtggggaaatgtttggcacggcgacagagcaggaggaggaggctccgtcatgggctctatttataggcgggagagtaaatcaaggccattacagcatgtaattgatagaaacggaagtttgattgcgttattaatggagacggcggggagaaggatcgacaggggagagtaagagctcggtagccattaatggcgctggaaagagaggaaactgccgactcactgaagaagaggaaggggagaggaaacggacaggtgcgggcataagcctgctctactcgcggccagagcggggaggtgtagaggtggccgcgcggaggcaaaagggcacggcagcagacgtcccagcggcggctgcgctgtccttgcgtgcgggtgaggagctggaagacgaccagggctgggaggggtgagtggggtccacatgccaggaaa

SEQ ID NO: 127711 - DNA, 359 bp, Zea Mays
cgaccacacggatgaccacaaatactgcgggtgcagaagatccgtagaggaatatgtggaggcggttttgcatttggtggaattgtgttgcgtgcagcagctctgaatttgcgtggtgcatgcaatggggtcacggtcaaacacacggcaagggaatagtgggagagaaaatagccatgcaggtggggcccacaggcagtttcctagcagcaatcacgcacaggtgggacatgcatgccgagtggggacaatttctcctctcctctttcttctccacgggaatcgtacaacagttttccatcttcttgaagcttcaaactcacacacgacatgggataaggattgggattgcgatgcgg

SEQ ID NO: 127712 - DNA, 527 bp, Zea Mays
tagctagtgttggtgttttgaacctcgtttcgacaagtgaatttgttgtgcatgttccggactctggacggtatgcacggtgggcaaaagatttatactggttcagacagaacgtccttactttcagttatcaacggcttacgctaccgacaccattgatgatcaaagcacgtattagaggttacaagcgggcgagagagagaggagaggctcctaagtctcttttcgtggttgaggtggttataaagtggagttctagataagtcttggcttggtggcggggctctgccctctaggtcctcctcttgttcgttagtccttctgggtgtcttctcgtctggagtccgtccttgcgttcgtccgtctcttcagggatccaagagtctcttcgtgtgtccatgggaatccaactccctagcctcgaactggcctccttttataggcaaagaagggagggtcggccagcagtggtttactcaagaaggagccatcgggcgatggtaaacctgagtgttctaccatagggt

SEQ ID NO: 127713 - DNA, 314 bp, Zea Mays
ttcgccggggacgcataggggcgggttgctgcatggatgcaggtgcacaggttgatggacacggtgtagccttgcaagcagggattagtggttgcacggtagcggtggccatggccgccggcgtgtggggtagacaggcggaatggggtagacaccgaggttatggtggctcggccaaggagaggtgttgttcgccgattgctagatcaacaactgcatgcacattttgagaaaacgtcctagcaggaacacgacgcgccctccacgcgtgggttccatgcacctcgatcgtgggcacggaccatgcaaatggt

SEQ ID NO: 127714 - DNA, 1127 bp, Zea Mays
ctcaactcgggttaccaacagaagaattccctccgtagacttggtgagccaacttgagatgattcttagaggcaaagtatcaaacgttggtgccccggtggcatactcggcctggaacctgcctccttccaaagccttcactcattttgtttcaaatccacctgttgctgatggcagtttgggccttagagtgcgaccctctgctgaagaagttaacgctttggttgcctcgctcggggaaattcctgatgatgagcggcaagtccactttgaggtacctttggatcctagtgacgcagagataagtgttatgcttgatttgctggctgaggactcttctgatgctgctcctgctgggacgttggtggtggcacctcccccagaaactgatataaccttggatattcagaagcctgtcagtactcgcccaaggcgcccttcccgagccaatcaacttgatccttctgctgacgagccgaaaaagaaaaagagacgtctccggcgagtatctagtttggatcgggatgttggtccttcggttcctgctgctgaagaagtgcctgttcctaaatttactgacgctgaactcgatgggggtgctctacctgctgctgaccccaatgggggtgctcctcctgctactgaccccaataggggtgctccacctgtagctgaccccaatgggtgtgttgtctgtgttgctgatgaagacgactgtgaggaagaagatgaggtccctttgactcggaagaacagtcgacagtatgtcgccagtggggaaagtagtggagttccttctcctgctttgtctgccctcattggtctacaagaattgtccctggcgaactttgatcagactcttgaagatatggttccagaggatctgttatcggagccagcggatgatggtgtgatggaggtttgtactgatgtgcttgacgctgggttggggtcatcccgcgcctcatcgaccttagagcgcggtcttgagggtcaggagactgacttgggtcgtcttgctcccatggaagtaattgagggaccctcagccttagaggcggctactgcagagaacttctcaaggatggtgctgacacttggccatcccccgaggatgttgccgggga

SEQ ID NO: 127715 - DNA, 441 bp, Zea Mays
gaaccgatgaaaggcaaatatttttatgatgtgtctatagtgagggctaggggagaagacactgttccccttcctgaaggtgatgaagtggtggtcttcaggagcttcatgaaagctgggcttcgctttccagttaacaaaatgttggtcaaagttttgaagacattcaagatataccttcatcagcttacccccgaagctcttatcagagtgggggttttatatgggccatgaggagtcagggactggagccggatgcaagatgcttctgcaacgttcatgagctatcttactagacgaaggcaaccagaaaagaacaatatcataacaacttcgactgctacagcttcgtgcctcgctctgaggcaaaataccatgtgcctacatttcagaagaagtggccaggttcttggatgaaggaatggttttacctgaagaatg

SEQ ID NO: 127716 - DNA, 655 bp, Zea Mays
caacgatgcaccacgaggttccccacatgatgcctttaagcaggatggcgtcattgattgcgactcgatggtacgtgaggatgcacgtcggatcacacaagggtttatacaggtttgggctgctacgatgcgcaacaccctatgtcctatctaggctgagtatttgagtatcactggtgtacatgggttacagatgagctgtgggtggtggagggtgagttctcctatcgatctagtggtggcctagttgctatgtgaaggctaatgatctatgaggtggtgacgggatgtgatgagatgaaatgacatggcatcataggggtaccccctcggccttatataaatgaccagagggttatccctttacaagtcatgatgactatctaactctatctgaatatatccttttagcacggcatgcattccttcttatctggagttcagctcccaatcatccgagttatttccgagtatctagctcttctagtatgttcaacctccctgcctgaggtaccagcgctccttctgcacataacttggttgtccggtattcatctccctgggtcaagctcatccagtctggttgcggcctgagggcatgccttgctaggcaagtcatcgagaggcccatcaagaggcccatggagcgtttctg

SEQ ID NO: 127717 - DNA, 792 bp, Zea Mays
gcgcatggttgggatgtgggcgaagtgaggctgcgcccgatgcctttcttgaagggtcgataggtgttgagtcctgccttcaacattgaactgcggggccaaaacgttgtagcttttgtctgggaagtggaagcggaggctgtgaggattgtacggaaatattcgatgaagacggagatgccaaggaactgggatatacgcggtccaaacgtcaggttgaatcgtgtctttgagctgaatggtcttctgcacggtgcgtatcctgaggactctgctgaagctggggatgatcgaaggaaaaagagagtggcgacacgggtggacgaatgctgctctaaatagaaggttgtggttacagtagcaagaaaaagaagaaagttggtgttatggcgaagggtgcgacaaaagtatctggggctgatggggcctcagacaaatttgttgaggagttagcggagacgtgtgccgagctgggggaggtcatgacttcgctcgaccttcgaaaaacatcttcgcggatgccgagggtgatctggggtgagtggcataaaaagatcccattcctatggcttccggcgaggattattttatgtcttgttcggctcgagattttaaaatttttccttacggacgaaacattgtcgatgttgtaacaactatgatagataaggaccaccaggagtccgcgcgaaaaaaatggaaggcaccgttgtggcttgtgggcccatgacgtgaggcaaaggtgatgcgccctggcaccaaggattctatagctgcggcaatgcctccgcc

SEQ ID NO: 127718 - DNA, 519 bp, Zea Mays
gaggcaccctgcgcatggcccaacaaagacattaaaatacggaggtcacgggccagtcagccgcgggggcaggcgtggcagtcggcgtgaccataggcgggccgatagtaactgcatcaacgagcgcgcaggagcaacgagccaatcaccagtcaaactctagccccacctacagactcgcatcctcccctgaggcaggcccgggggccactgtcggtaccttggattaggggtaccccttaccacggtataaaggcatgatgccggcgcagttacccttaaccgcgcagagaacaaccccaggggtatctcgtgagcagttaaggtggcgttcccagaggcaatgtcgtcggacccagaaggcacgggacccctgtacgcgcaacccggaccccgaagtaaagcagcccggagccattggatagggttcggaccccaccaaatgagctccggaccacccgtaataaggactcgggaggggaagtgtcgcggcctaggcatgggtcgggtattgacgcg

SEQ ID NO: 127719 - DNA, 432 bp, Zea Mays
caagtacatgaagtaagtcggcgcattcgtcaaaacgaatgacatgaccatgaactcatacagtccatacttggtgatgaatgttgtcttcggtatatccgaaggtcggattctgagctgatggtggcctgacctcatatctatcttcaagaacacactggctcctctcaactgatcgaataaatcttcaattctgggcagggggtacttgttcttgatagtaaccacattcaaagctcgataatcgatgcacatcctctttgggccatccttcttctccacaaacagcactggggctgcccaaggcaaggtactcggtctgatgtagcccttctctgacaactcatcaatctgtttcttgagttccaccaactctggtccggacactcgataggctctcttggaaataggggcgatgcttggtataagctc

SEQ ID NO: 127720 - DNA, 629 bp, Zea Mays
ggcaaccaacacgtgagtatagcctccctgagctttcttgaagggtccaatcatgtccagtccccagcacgcaaatggccatgttacgggtatggtctgcagttgctgtgctggtaaatgctgctgctttgataagaattggcaagcttcacacctctggactaactcggctgtgtcactctttgctatcgactagtagaaaccagatcggaagacctttccaaccagagtcttggatgctgtgtgtatcccgcactgtccgacgtggatctcatctagcagttgcctcccagtagccgagagaatgcacttcatgaggactcctgttgcgccccttctgtacagtacctccccaatgagggtgtagtgagctgactgccttgcgacgcgttctactgtagctttgtcatccggttcctcttcattctttatatatctgatgatgggctccctccagtcattagagtctgactctggctggctcaaaacgttacactcttctgcttgatcttcggaaatgcttgtgtgtgacacttcttgaatgaaaactccatgtggaacctgggttcgactggatcctagtttttacaacgcgtctaccgccgcgttgcgatctctttccacatgat

SEQ ID NO: 127721 - DNA, 540 bp, Zea Mays
ccaaggacggcagcggcgacttcaccaatatctcggccgcgctggacgccatgccggagaagtacagcggcaggtacttcatctacgtgaaggaaggcgtgtacgaggagacggtgaacatcaccggtaggatggccaacgtcaccatgtacggcgacgggtccaagaggtccatcgtgacgggcagcaagaacatcgtggacggcatcaggatgtggagaaccgccacttttggtaggagtatatatcattgattgattgattgaaacacgcatatgggggcttgggcattggcgcataataacacccatgcctgcactgcatgcagcggtggacggcgacagtttcatggcgatgaagctgggcatccggaacacggcgggggtggagaagcagcaagcgctggctctgcgggtgaagggcgacaaggccatcttcttcaactgccggatcgagggcaaccaggacacgctgttcgcgcaggcctaccgacagttctaccgcagctgcgtcatctccggcaccgtggatttcatcatg

SEQ ID NO: 127722 - DNA, 678 bp, Zea Mays
atcacttccagctcgatcagggagacaacccgatgtccgaacgcctagctggacagaggtcctaacatatttagagcttgctgagtccagggtgttgcttgccaagatatgtgcgttaaagaatagaggcttgaccgctaaagctgttgttgttgactttgttttcaagaatattcaacctttgaaggatagagtctaccctgcttgcctatacactggtgttaatgaccattcttgaattaccaacaagcgaatatctgaggaggacgtgctgagtcgggttgactcgatgctgaggggcaaagcttcgaatgctggtgctccccttcgtattctgcttggaacctcccactgtggtaagcattattgcttatgagttcctgtatttgtcatgcatagtgtccttactgcgtcattttgtccctgcagaggtctttttcagagttcgtatccaacccgcctgttcaagacggcagtccaggccatagagcgtgaccttcttcagaagatattgaagccctcattgctacgtaccggggtctccctgaagaggaaaaacagactcatctccggatgcaagtgattgccaatgaggctgaagtaaatgttgttcttaatatgctggctagcgagtcatctgaatctgctcacactgagtcaacgagtgctgcagctggg

SEQ ID NO: 127723 - DNA, 649 bp, Zea Mays
ggaaagtagtggtgttccttctcctgccttgtctgccctcattggtctgcaagaattatctctggcgaactttgatcaaactcttgaggacatggttctagaagatctgttatcagaaccggcagatggtggcgtgatggatgtttgtgctggtgtgctcgatgccgggttggggtcatcccgggcagcgtcccgcgcctcatcgaccttggagcgcggtcttgagggtcaggaagctggtttggattgccctactcccatggaagtgactgagggaccttcagccttagaggtggctgctgcagagaactcggccctcaaggatggtgctagtgcttacccagcccccgatggtgttgccggagatgatccgactcagatgggtagcgcaagctgtgacccagcccccgagggtgtccgagtgggttctccctcccatacttccatggatgttcacatagggtcttctcctccacactctggttgcatggcgatagctctagccttggatcaaggagtcgctttagaggccagcgcacctgatgtcagagttttgacttctgttgatgacactgaattggttgctgctgattcgttgcgagttgttccggttggtaacccttcgccgagccatcaactgatctctcac

SEQ ID NO: 127724 - DNA, 338 bp, Zea Mays
acatcttggtgctaccagggtgcatggaaaattttgaaagatgagcttcgtccagtatcttccttctgagctccgggtccttgggaacaatcaatcaatctccaaaccatagaattcccttgctgtcttgccggaagcacttgtatttttcggccttttgcttgatcatttccttgataacctgaacacccttatcttcaatctgtgccctgactatctgctcttgcaatgtgggctccaccgagatgtagcttaagtcacctgaagaaacaacttccaggttcaatctgcacaactcatcacacaaggtggtaactctcacatccatgttcatacaa

SEQ ID NO: 127725 - DNA, 609 bp, Zea Mays
agtatgatactttgttcacaatgtgtctgcgaaacaaccgagtgatttaccttggatacttggatccaaaatgaaggggcccacaccttaatcttagcggaattacggggattaggcaaaaaaaacgagtgttagattgctccaaaataaccaagtgtcatttaccatctctctttgtttatgcaataatagacatgcaaagacaatttatgtatagcatatatgatatttgtcctaatgccaaaaaaaaaagttgaaaagcagaagtcacgtgttaactttactatcgaattactgcaatggaacttagctttcagaaaagaaagtaagcttcaaaaggctaggcgcgattacaatgtgtaagaacaattgcgggcgccaacaaatcacacgacgcacaatcacgtactcgagtatacgtgtggcatccagagtcccagcatgaaaaggctagtggcaatcaaactatggtgagctttatttgcaatatgaaagtatatctgctctcgagaacgacgacctactttcgtatgattttttgtgctttgcactcctcctattgcgtctgctttatacacgtggaaatgttgagtgaaagtgtacgtgttt

SEQ ID NO: 127726 - DNA, 828 bp, Zea Mays
caatggtctagagagtgatcttcaccccaaggcaatccccacacaaaccataactcaaggaatcgaaagttctcccaaaatccaaagagagaagaggggtcgagagcggagacaaaatcaaattgaaaatgtagctaaacaaaactaagcatgtgatttgagcaaatgctagatgacatgtcgttatggccacacttcctctcaaaatcacgagtacatagatgtgagaattacaaaacacctatggatctcagggcaagacaccagcagactagagaatggaaactagggttttctaagcaagtgccaaatgaaatatccgaaagtgatggctacacaaccattcctcccctcctatttatagagggttagttcactaacctaaactacccctagatatatatagctcgtcaacataactgaggaaaaatggaccaactcctaggattttcatctaacgaccacgctctccacacaaagttgctttgccttgactcacccttcatgatggcgccacatgccgcctttgattcccgccaaaaccactaccgctgacttttgaggcccaaactcggcgaaactagccctacatagcgctcagtggttttgaggctgaacaactaaaaccgctgcaagtagcgcaccgcatgcatgtccccccatgtcttggacatgtgtccccaccagtcctcgatcacaccaacgacacgatttgctatgccacatcctcgcactagtgcgtgtgccagagtgtcagccactgcgactagtcacatggcttctccgatccctcaatcaaggcctagtgctcatccttcaccgctccta

SEQ ID NO: 127727 - DNA, 1044 bp, Zea Mays
cagaggtgcatgataatctcttttgaatcctctgaatgagtggtaaaaagtgacatgttttaggctttgaaatacccaacggaacaccaagataggtaaagggcattgaacctatctgacagttgagagttcccgcaaggatcgccattttagcaggactgacgttgatggggtacatacttgatttgttgtagttcaccttcaaccccgtcgaggatgcaaaagagttcaggacagctctgagaaaaaagagctgtctagggcaagcttccaatatcagtagagtgtcatccgtatattggactatcggaaaatcttgaccacaattctcgggaagtggtaacttgagtaggtcttgccgccgcgctttattaatgatgctctgtaacagatccgccgcgagaacaaaaagaagaggcgagaggggatctccctgcctaaccccacgcttgcagtggaaggttttccccggaacaccattgagaagaactgaagacgtgccagaccgaagaatatccctaatccagctcagccatctgggcccgaagccattgtgcagcaatacctgaagaatgaactcatgttctagagaatcaaaagccttttcaaagtccagtttaagcacaataatctctttttttgaaatatgacaaagatgaatatattcaaatgcccaggccagacagtcctgaatggttcttcctttgatgaagccatattgatttttgtggacaagggaagtcatcactgtctgtaaccggttagccagcagcttagtgatgattttcatactattattcagaagcgagattggtctgaagtcacccactactctggcattatccttcttcggtatcaggacaatataagaaccattaatgcttcgaaggcaaacatccccgtggaaaaattggtcacataagtcatagaagtcttgtgaaataatcggccagcattttttgataaagttggtattaaacccatcaggtcccggggatttatcagaaggaagggccgccacaatactatcaatttcttgctttg

SEQ ID NO: 127728 - DNA, 383 bp, Zea Mays
gtgaaccagtaacaggtaaccaatacccttttaaatttgagattggatggttattacgtgatggattctttgacatggtaaaggatatttggacttcagtggtggagggcgatacaccattggaaagatggcagtccagaattaggagagtcagacaatacctcaggggttgggctaaaaatactagtggtcattataaaaagcaaaagaaagatctgctagataaattagatgatttggacaaaaaggcagaagtggctccattgtctaatcaggaaatagatcaaaaaacttgtttgcattctaagttggcacaaatactaagagacgaggaaatgaagtggtaccagagagctaagtctaatgagctgttgcaaggtgac

SEQ ID NO: 127729 - DNA, 695 bp, Zea Mays
tgacgtcgtgtcttgtcgcgaccatcgttggccgacaacgttggtccgggttccttcctcgaggattcattcggtgaggactttgtcgtttgcgccgcctcgcagacttgctcggcggggacttggtcgtttgccccgcctcgcatacttgctcggtcgatatttggtcattctccccgcctcgtggacttgctcggcgggggcttggtcgtttgccccaccttgcatacttgctcggcgtggacttggtcgttcgccctgcctcacagacttgctcggcgggggcttagtcggtcgccccaccacgcagacttacttggcggggacttggttggtaaatgggccagagagagtttatgggtcttacattgggtacccctttcctgggtacccgacaaacttgttgctatgcccaatcgttttttgttaagctcttgtcctatatatcgcggctaatagggcctggtgcatccacactttactgcaactctaagttatgaccatcgttcaagttgagacataattttttgctcccatcgcttgagtcattgccattgtgcttcgcataccacttggcctaatggcgaagagtgcaccacatgtgttctagcttgaacttggtttctccgagcttgttgtgaaaaactctccttgaccgctttaagcagtatagcatcatcaacttcactcgttca

SEQ ID NO: 127730 - DNA, 759 bp, Zea Mays
aggtggacgggtcggggtgatagcctccagtgctgtcgaggaggacgaggaccccgggccgaagagcgatgcagcctgagcacccagagtgatctcctccagggcaaggtcatcgcggacctggaggaaggtagggaagggacgctggcgcatgatcaacgaccaaaggtgggtgtagcgatcgctgaggccgcagaggatgttgaggacgagcatgcggtcctccacgggacagcccagatcaccaagtgagtccgccacggccttcatcttgcggcagtactcaccgacactgaggtccccctggacgaaggtgaggaaggtcgcgtcgaggcggagagcccgagcttcggcgttgcccaggaactggccctcgatggctagccaaacagcccgagcgtgaggaaggttccagaggaggctatggaggtcgacggagatcgtccccacgatccaggtgagcatgatgatgtcgaggcggagccacgtggcagtcggcgccacgtcggtgaggtcgcagaggacgtggtcatctagggcgtagcggcgaagggtaaggaggagtaagtcccgccagcgtgcgtaggacagcgactctggctcgaggacgacaggaaccatgagacgaatgttctggacactcccggcctgaaggtggagctgagccacgagcgggtcattcgggtcatgccggagcaccgtggggatgatgcggggcccggcgccgacggtcggtgcggtcgggacgccgtatgcgcc

SEQ ID NO: 127731 - DNA, 315 bp, Zea Mays
atctctatagtaccttgacagaagaaggctcatccatggagttcttcggccggcgagaaccctagaggaaaagaagctacataatagggtctggcccctaatcattccgtctgacccctcggacttatctaatagatccttctctaaccttggcctatgaaaggaagggaaggatcatgatatgaggacgtgcaaccacttgtagacatagccaacaagtcaacacatcacacttgtaatcgcatagagaacttgtcacctcgctcgcacactcactagagacttgggagctcttccctctctcgcctatttgta

SEQ ID NO: 127732 - DNA, 384 bp, Zea Mays
gctgtaaggtgcctgccaccttcaaatggctggccttgactctttgggaagtgtcgcattcagatatatacttagcaatttccctgttcattctggtccaccagtacaaggatctgagatcatgatacatcttgttactgccggggtgcatggagaatttggaaaggtgagcttcatccaatattttctttctgagctcgggattcttaggaacaaccaatcggtctccaaaccatagaattcccttgctgtcccgacggaagcatttgtacttatccaccttttgttcgagcatatccttgatgacttgaacacccttgtcaccaatctgtgccatgactatttgctcatgtaaagtgggctccactgaaatataactcaagg

SEQ ID NO: 127733 - DNA, 479 bp, Zea Mays
agccgcgttgtatccttggtgggtgaccaggaagatcctccgtgacgccgtgaagataaccaggagccgatcaccgccgtagagttgtgcaggagtgggttgccgtcgtggtgtagtgcatcctggcgtgcggccactgctgactgccggagctcgctgcgtcgtcatcactgtccagccgaatgatggtctgggcgaccgcaggggagggagtcgagcactgggtctgcgcctcgccgcgaaatccgtgctccatcgtcggccagcctcaccaccatcgacggtgagactcctcttccatgccggtggtgttgggttattgtacctactgttaccggggtctcgcatacgtatagaaaggggtaagcagcatgaggtagaagacacacggtcaccgtaggatcttcatcgaactagaagtagatcgttccatggttgattctggaccgttgatcgtccaacgcatggtccggatatga

SEQ ID NO: 127734 - DNA, 525 bp, Zea Mays
accgcgagcctaactcactgattcgtgggactgagctagctacgatgttggctagattcccttggttcgggtgcataaatacccccctcgaactccttaatccatccatccgtcgaggccatcagccaccagaataaagaggaagcagagagatggagagaagctgagagagagggcgccgttgagcgagatgaatcgcagctgccttgcgggcaaagccacgctgttgttcagtgcccggaagatagtccaagggactcgcatgatctcatatatgggggacatacaagttgtcggtcatgagggtcctcggaacattcttgattcctcgtcgaacttggcgggtttctgtcgggtcgcaccacaccataggcaggtcaaaatgcaacaccattcaaggtaatacctcccttaataagttcgcataggtttctgcatcgtgtagcatcccttgaatcagatagggcttaggatcgatgcaaggtgtggtccggcaatgttttcaccgtggggatgctggcaccg

SEQ ID NO: 127735 - DNA, 661 bp, Zea Mays
ctctgcagcagccacctctaaggctgaaggtccctcagtcacttccatgggagcagtgcaatccagaccagcttcctgaccctcaagaccgcgctccaaggtcgatgaggcgcgggaagctgcccgggatgaccccaacccggcgtcgagcacatcagcacaaacatccatcgcgccaccatctgccggttctaacaatagatcttctagaaccatgtcttcaagagtttgatcaaagtttgctagagataattcttgcagaccaatgagggcagacaaggcaggagaaggaacaccactactttccccactagctatgtaacgccggctgttcttccgaatcagagggatttcgtcctcttcttcatcatcctcatcaacaacatggacagcacacccattggggtcagtttcagtaaattcaggcactggcacttcctcagcaaaaggagcagaaggaccgacaccctgatccaagttggacacccgacgaagacgtctcttcttctttttctccccctcagtaggaaaagaggcttgatcggctcggcgagaacgtttcgggcgaacattgacagacctctaagcatccaaagctttgtcagcctcagggatgggcgccaccaccaatgtttcagcaggagcagcatcagaagaatcc

SEQ ID NO: 127736 - DNA, 842 bp, Zea Mays
aaattctatgaattgtttttatactaaaaactcattttctaattcattttcttgattttataactctctggattgggcctcaattacagggaagtgtaggggcaaaaccaaaattgttcccaaggcacagatcactggcacttggagtgcgggttgatttcttttaaccacaaggtctctttagcaaaaggcgcaggccgaggggtattgcggatttcagaccgtccgattagaaatcacgcatccagatctgttgattcataaccgtgaaccggtaagcgacacaggccatccgattatagatctacggtccaaactctacctacgaagggggtacgatggaacccccaacaaccgtccgatcacgatctggcgtccaagcattcatacccgaagcggtaccctaggtcttaatcatggtcgtagccacgagatcggacggtcgcgagctcttcacccatcgcggcggccccaaatggtggtgtacaggatacccgcggcagagctcaccggagaaatgcccgcctgcgccccgatgtacaacatccaaaaccgaaaggcgctactcatcgatgggccaacaggaaacaacagggaagagttcataccaattttagcacagtggggaaagttggccgcgagcgatggcggatggcggtgatccatcgattctggcgagcaattcgccgccggacgatggctcacgagctcgattgcccacccgcgcgcgatccacacagaacggagatcccttggtcaactcctcagccaacgagcaacaccgggcgtgggatgagcacatggcggcgaggttaggcttccttttcccccgtgattccggc

SEQ ID NO: 127737 - DNA, 336 bp, Zea Mays
taagaatcaggggtacgattttaccgagagtcatgtagccaggtgcctgccccgcaattgggcggatcgcggttgaacccgatcaccggcgaggaattccggccaccaccaaccctggaacaccgagactcctccgcacactggtccaatggcgcatggagaacactcgggcacaatcccatgcaccaaaccccaccgaggacgaagaatcacgttggcggcccatggacgctattcctttgccaccactgaaccctctcctcttggtctccccaagccggtgtggtctacgtacgcaaggttttaggttagggtggagatggcggccgaggcata

SEQ ID NO: 127738 - DNA, 343 bp, Zea Mays
gaggagctggagctagtggtggagacgaatatgatgcctccatgggtaatgtcaggggctccaacctcgaggatgaaggcagaggggttgagaccttcagtacatgtattgccataagagttagagtcaccgagtgggtcggaacctcaggcatcaagaccaccataggcactagggctgtcgtgcatgccagagcctcgagcactagggttgtcgtgaaagttggggtttttgcatgggttaatacttcaggtatcaaggacatcgagggaggagtcggacacctcgaccttggagttgtcatgcgctcttgtctcgatgccatcgaggaagcgcccaagcg

SEQ ID NO: 127739 - DNA, 854 bp, Zea Mays
tgtgaatcgcgctgcgttgcagctctcagaacttcatcgatcatttcaccaaatgtttcagagagttcaatctgcttcgaaacaatcatctgatggctcagctgtagggaatcacagtatttatccacctctttgtcatgagcatcaaacaatgattgaaacattggacgctgctgggagggcaaacattgcaacttgttgccaatcaaattattgatacgtggcacatatatgttgaaaacgacagaagcaggccgttctggagcaatgacgtaacacgtttctgaacggctacgaaactgtataaagtaatatagaacagttagcagtaataatattttaacatctgcataacaggacaaaaagttgtttatgtctaacctctgcatatccgcatggttcaccagttttacggggggcgcctgtcaccacgagccaactcttttatggtctcattgtcaaaaacttaatgcgtggagtaccatatttgttaacaggagatgcagggtgatgtaggtgatcaaggtagtaaatctgaaaaaatgaatgcacaaatatataaaattagtacataacaactatttgcatatcatatatatgcacagtaaacaaaaaaaatacttaccagaacaatgagtgagcatccatatattgttgctgtgatgtttgttttgttccttttatgccaacgtgcggcagcatcacacaaatccgtgtaaactagttgacaccagtcaatatcagacattcgggtcatgtttgaagtcatgagtacctcattgtttgtaatgccccaagaagcagaaggaaaaagaagccgattgaatagaatcagaaaaaaatatctaattgat

SEQ ID NO: 127740 - DNA, 753 bp, Zea Mays
gaccgccagatgtacgtactccgagctgggttgagtctccaacttccttggaggtaacagaggctagagttctgcttggtgagatctgtctgctgaaggagagaggtctgactgccgaagctgtggttgctgactttgttttcaagaacattcagcctttgaaagacaaggcgtatccatcttacttgtacagtggtattactgactctacccgggtcaccaacaagaaaattcctactgaggatctggtgagccgactagacatgatcctgaggggcaagatatcaaatgttggtgctcctgttgcctattctgcttggaatctaccacctcataggtcatttttcaatttcgtgtccaaccctcctactagtgatggtggtctgggtcttagagtgcgaccctctcccgaggacattgaggctctggttgctccccttcgtgatattcccaatgatgagagacataatcactttgagatgccagcaagtccagatgatgcagaaatagatgctgtactcagtatgttggctggagaatcttctgactcgacccatgctgaaccgatggctatcaaggttggacaagagcttaacaaaacagtggagacccaaaagcctgaaggtacctgtacgaagcgtcctcgccaagttagccgtccgactgcgcctgttgaggaaaagaagaaggaggaggcggctttggcgactgtcatgcttggaccaggatgccggtccttctgctccgatttgc

SEQ ID NO: 127741 - DNA, 306 bp, Zea Mays
acccctcgctggatttgacttcattttgggcgttcagtggctccagtccttgggaccaatttcgtggaacttccgtattctgcatcgtcagtggccaaggcattctttgatcatatagtcagattgcacgggtttccatgctcaattgttagtgacagagacacagttttcaccagtgcgttttggaaggagttgtttaagctcgctggggtccaattatgcatgagcttggccttccaccctcgatcggatggccaatcagaggtggtaaacagggtgatcctaatgtatttgcggtgtttggcg

SEQ ID NO: 127742 - DNA, 823 bp, Zea Mays
tgctgggcagggaggacgcggagacgctggcgcggtgccagcagatgatggcgcgcggggagtggccgccgttggtcgtggcgtacgaccccgtggaagggttcacggtggaggcggaccgccccatccgcgacctcaccatcatcaccgagtacgtcggcgacgtcgacttcctccgcaaccgggagcacgacgacggcgacagcatgatgacgctgctgtcggcggcatcgccggcccgcagcctcgtcatctgccccgaccgccgcagcaacatcgcgcggttcatcaacggcatcaacaaccacacgccgtgagtagagagccccatgccgtcggttcccattgcgcattgcagtttccgtcgatctttggctgaacgactgaacccttgtgtgcttgtattgattgctcagggaggggaggaggaagcagaacgtcaagtgcgtgcggttcgccgtcggcggcgagtgccgggtgctgctgttggccaacagggacatctccaagggggagaggctctactacgactacaatggctcggagcacgagtaccccacgcaccatttcgtgtgatgtgaccacgaggcgaggcaatctcagtccgtgtccaccattgcagctccagctccacagctgccaaaatttcgtgtgatgtggggacctgtttgaatcggctttggctagtgactagttggagcgggaagttaatctagattagctggccttcttgtttggacagattagagtggctaactaaaatgtcgattcttgcataacagtgagggcagatgaagcaatctagatattcatcagcacctag

SEQ ID NO: 127743 - DNA, 467 bp, Zea Mays
ccgccgccgcctcaccgtccgactccgcctctccacctcacggtccgactccggtagggtgctccaccgctcctcctcaccgtccccctggcttcccctcacggcctcacctggtagctgcttggctggtgcctggtggtttggtcacggctttggttacggtaagctttctgtgttcgtcttcttcagcctctagccgacatctccgacgaggttgagacttcctaatctagtgcttgttcttgtgatctgtgcttgtgatctgtgttcgtaccccgaaccctaatctactctactgccttcttgctctgtgattgtacccgtgagggaccgatctggtgctccggctttggtaagtgcttaatcttgtgttagttcttgtgatctgttcttgtgatctatgtttgtgatctgtgttcgaaccctaaaccctaatctactctactaccttgtgttctgtgatttta

SEQ ID NO: 127744 - DNA, 307 bp, Zea Mays
caagcacccaatccatcaactcgtgcctcaaatcatccaccagagctcgccaatttgaaacttcccccaaatcggtccagagcaccgcgtagagtgacctcgccgtggccaacgcgttacaggtccgttcacaacccctattacctcgtttcattgttctggtatgcccttgatgcttcccgacccgaccaattgagctaggacccattgaatcaccgggaacacttcatactgcccgttgatcacgctgtcaccgtgggcagtatgattaagagctcaaaccttgcaattaagtgaggggaaatgg

SEQ ID NO: 127745 - DNA, 422 bp, Zea Mays
ctaaatcctcgagcctcttttgcatttaccttcacttcttggtctcgcaatccaccccataaatttagtaccgaataatcctcgatagttggtacctaggtaggggaaatcgtgctaatcatagtagatctgatgtcaactatgggctttgcacagggagacatcatcttcggtaccttcagattcatcgccaacacgctcgagaacattaggcttgtcccagattccccgacgacctcaatgtccctcacccaagatccagtagatccaatctgcactttgtattagacttctcctcgacaccagctcaaactcggaccatgctttgactttgattccgaccatgacttgaactcggactcctactacttaggagattagttcatgtttagggcaagctctgggcactaggaaggtcgatc

SEQ ID NO: 127746 - DNA, 351 bp, Zea Mays
aatagaaacatcatgagtaaaaaaatcagtatttccatacacttcggctcattacccacttctttgagttttaagccagcaactcttcgacctggaggaaagacagggccttggctccagtcatggactagaggaccgcctcttccctagccaccataagggctgtgatcaagctaggattacatccatcaaagacacatctattcctatgctagtcttgtatctgggttgttctgttgttattttttactttattctattttcagagtgttgtatggtatttgaggatactttcctctagctgtactcggttcttcctcttaatgaaatgacacgcaactcctcctgcgt

SEQ ID NO: 127747 - DNA, 631 bp, Zea Mays
cgcccgcctaatcacgattagacgctaagcggcatgttagcgctgcgcttaggccctgggcggtggtttccgcggtgggcgcgtgtaggcggcgcatgatttgcgctatgcgcgttgaggcggaaacgaggcgtgtggaagcggggttcgacgcgcagggaaaagatgagcacggaagctgctgcgcgggaatagaaagtgaataggagggaaagaggcgggaactgttgttgcccgggagagagtgaaacaggttgggagctgcagctgctgttgcatgggagaggaggaaaatagggtcgccgccagaccggtcctcttccccagccgtccagggccgccaccatcggtgtcctcttccccttctggtcaagtcgtccaggccgccggggtcatcgcctctctgctccttttccctagctatccaggcgtgctctccctctccctcctttgcttttgctctgctcctccatctcttctgttctatacttttattcattattccaggtaagtacccctaattcctagctaaaacttttttttctgtgcaaatatatattatattgtatattcctacaaacgcttaagcacgattaatctacgcctaagctctctaggcgctaaacagtgg

SEQ ID NO: 127748 - DNA, 521 bp, Zea Mays
gaatttttcgatgaagcagttctgtcaccacagatcctcccccgcccgtggtcggggtacctcgacgtcctaactatgggtaagtgtgccctttacctactcgccttagtctcagcaatgtgtagctctgtttcgatttgatggagtttgatggggggaacttatcgttaggtcccggccatggcgccaccgcgatgatgacgacatcaccgcttggtctcggcgtgggtggggaagacatgtcggtaaccgttgatgcgtaatcgggcgaccaagatttgatttgggcattggtctgggctggagggtattgggtcatcaatcatgaatcaaacaggacaggtcggtcaggatcgagtccccggaactttaaatcgccgctctcgattcttgatctgaggacccatgtgacatgcgactatggctgaatctgggccgtggatggcggatctaagggttttggctacataccgattcaatctaaggctagtttgatctacgccctcgattttggatccaac

SEQ ID NO: 127749 - DNA, 587 bp, Zea Mays
cggttatgagttcatcgacataccataatatggttgggactgagaagtcccatttgtcgccgatgtttttgacgcagttattttagtgtctaatttatttgacaaaaaatcaggtgtatgagtattttctaatgcatgcgtcatattctccatatcctccattataattttaatctgattagcaaaagaaattttaacagattgaatatcggctagtggtgtggtgttacttacaatggggagctgatgcagcaaggctgatagtgaatcatactttacttccctcttcttgacgaccttctggtggtgatctaccttgaagtgtgagaggtaccactttttcgccaccttgcttatatgagcctgttgtcgttggaattcctcgtatagccttttcatgtggtcttctaatttctcattctcatcggccggcgagttagtcagccttgtgttaatgtctaggacgacattgttgtgatctttgggattggccattgcgaccgatctgataggtctgatttaatagatctgatttttcggttcccagtggagtcgccaaaagtatgttggtgcctttttggtcacca

SEQ ID NO: 127750 - DNA, 389 bp, Zea Mays
ctcgtgggagattatttctagctgaaagtttcaccgatgaagggtgtatcgcgtttcggggttaaagggaagcttgcaccacgatatattggcccttttctccttcttgaaagatatgggccagtggtgtatcgacttcaactacctaaaaccttgtctgcagtgcataatgtgttccacgtgtcacaattgaagaagtgtcttcgggttcccgatcaaaccattgatgtaacggatgttgccctagacctagaattgacatattctgagcaccctattcgagtcttggatcaaaagaacagaactacccgaaggaaaactctcaaattttacaagatactatggaaccaacattccgaagataaggctacatgggaaactcaagactt

SEQ ID NO: 127751 - DNA, 517 bp, Zea Mays
acatggacgggacatgaataacaagacgctatagttccctgcctaccgttttgttgtgcacatgagccttgtttgacatcctaagtgtttgggcccgcctgaccatctgtcagtaggttaaacatggtggtgatgaggatatgacgcctttaaatatgattactagtgaaattaggaaaaggcaaggatgaacttggcacttactattttcaaacaaggccagacccatctatttcttatatcaaacccttgctggcgagaagtgggaagattggagccacgaatgggtgattgcaatgaacgagtctagcgaacgccttgtcttaccgattgaggggccatctgctgaccgcaagctttagaggggaccgcttcctccaacaatacttgacctggtgttggacagaatcaagacactgacatccaagggtctcacatcaatgcacgtgcttggtgattttctgaagtgccggatcatgccattatagcagaggtcacaattgtcttgttggttcac

SEQ ID NO: 127752 - DNA, 417 bp, Zea Mays
gagcaatatcacaataattttggttgctatggcttcgttcctcgttctaatgtaagttatccagttccaacatttcgaaaaaggtggccaggggcctagatggaggaatggttttatgtaaagaataatctgattgaaagggaagacataaaggggattatccaacgcactatctggtctcgcttcggcatcagaaggccggctactgcgcttgggaacgatatcgaagcatgctagaaggctttcaataatgtttgctcctttattggcacaagagacctagttcaggagcacatagcctacagagtgtggtctcttgtgaatgactgggagatgccgaaggagactgctactgggtccagtcaaggtggtttggtttatttgaaatacaccttcagatatagagatcagtttgac

SEQ ID NO: 127753 - DNA, 1293 bp, Zea Mays
cagaattgaactcatttccctgcggtttggggactcttctctctgcttgattccaccaatcctgaaaattgacctccctgggcattgggctaaggtgctgtaagttgattagagaaagaacttgaaaccagacctgtctaccaaacgcacaggccaccaacaaatgctgaactgtttcctctttctgatcacataacaggcaaagttcaagatgctcaagtcctcttctagcaagccagtccacagtccagcacctattgaggctcgcaagccaaatgaaaaacttacatttcggagggccccaggttttccaaacccttttagccggtttaaaggctactgaccctacgaagaacctttcatatgctgacttggaagagtagcacctggaagcagaaggggtccaaagatgcacgtcttgtacacccggagccaaattgaactcatttaggatgacctagagctgtagaaattccatctacgtttgagcattactgcacctcttatatgtctgacaccaacaaccattgttcatagtgtcctgtactgtttgtatctgctgaaccttactggggatgagcttgataagagagggtgccaagaccgacaaggattgcccatggagccacctgccataccaaaacgtgctgctagcaccatctcccaccgcagttacaagcgaagcagtgaacatagcaagaccagaacatactgaaaagaaagaccaaaagcaacatgaccaaaactaccacactattgcctgtgcccctcctaaaggtctcccaataagcttcaggaggccctttgctctagctgagtaccaaaggatgcactcataagttacagcttgcaacaccgttgtaaggcttggagtagagccgttaaaaacacagttgtcctgtcccaagccaccaatattgccagtgaattgaaccccttctgtagtccattgttacctctttaactgcctggtaggctggtaccactagcttgagaatctatgggttgatggttgggctgcaatggagacaaaagcaattttctgcaacctgcaaaatggtgaactagattttccaggcgaaaacacatgaaatcaataggtgctgtgtggtcttctcttcttcatcagaaggggcaagcagctgggtgggaagtcctcttttagtgatccggtccgcatttcaagaacggttctttactgcaagccaaatggagagcttgcagcaaagaggagcccaggacttccaaattcgtttccatggagcaaagcggatggaactaaggaaaaaggta

SEQ ID NO: 127754 - DNA, 876 bp, Zea Mays
acttgaggttcccttgagctgtaggcagtggtccaacgatgtccagtccccaacgttggagtggccatgtgtgggcgatgagcttggtgaattgcgaagggttgcctcagcgagcagagaacttttggcatgcttcgcatgacctggtgactcggttggcggtgcaaactatcgcgggccagtaaaatccctgacgaatcaccttggctgcaagggccctaggtcctaagtgtgagccgcaggttccactgtggacttcgtggaggatttctatgcctttggtttcggttatgcatatcagcataggctagctgatgccctttttgtacagctgaccctcgactattgtgaagtccctgctcctgtgcttcagccgtttggcctcattgcgatcagttggatggtagtggccttgcaggtatagtgttattggggcccgccagtcttcgaccatgatgaggttgacgatttgatggccctcggtgtcctgagttatttgcaaaccttcggggttgtggacggttggcgtgccgatgacgtggtagaacacgtcagagggcagggcctcgcccttggccgctgctttggccaacgcgtcggcctcttcgttcttgttgtggtcgacatgctgcagggtgaaacccttgaattgtttctcgaggctgcggacggcggtgagatattgcatgagcacatgctcctttgctgagtactccttttcgatctggccaacgacgaccttggagtctgtcctaattatgcatgtggtgacaccgagggatcataatttgcgaagtcccaggatgacggcttcgtactctgctatgttattagtgcacctgtcggactctaaagcaaagctgaggcgcgttgcgt

SEQ ID NO: 127755 - DNA, 318 bp, Zea Mays
gcagccgccgcgccgattctactgtctcttccatggcgaagactgcgcccaccaaaccaaagactgcctagaaacgaaggccaccaaagacaggatggcacgggtgcagccagccgacaaccaaagagttgtcgcgcacacttatcagcaaccccctccaccctacatccacgcccccaccccgcatccaccgcaccacgcatactaacaccaccaggaagtacaaatcgtacctcctccaccgccacctccacaccagcaacatcagaacatcccccacccccacgccctaaaacaagaagacttcgccgatcagcc

SEQ ID NO: 127756 - DNA, 273 bp, Zea Mays
gtcggtgtatattatcagagttgggggaatatggttaagatagttatggatgaagtaggctacatgatgcaagtcaaaatttggtttgatgtcaaatggtggttgatagattatgcaatccattaagactctattgattgggtaagttatgtaacttgttatataggtcgagttgttgtgtatggccaagttgatataagtctccaaattaggcttaagtgatttaggagtatggccttatcctttctaccagcattaagtaactcacactag

SEQ ID NO: 127757 - DNA, 435 bp, Zea Mays
actgttgtgctaaccatgaggcttcaagattttttaaagaaatcttttactatgtacatagttgtcagaaatcttggaagcactactatataaacattttaatataaattgagtttgcgcatcgtcgagcccttcgggagcctaactatcgcttgtcgtccctccacccccaccctcacggccctagatcgatcgccctcttttgaagcggcaagcgatgacagcgcattgtcgagctcttcgggagccattgatgacaaccatcgaggtctgtgtccccacgtttgtgggcagacggagatctggatcttctttccttcgcttcactgctcgccagtctcgttgcggcagactgaggccacactcacctacgtctccaccatccaccttctccaacgaggtatctagcaaatgcccacgacgctacacctgcaa

SEQ ID NO: 127758 - DNA, 605 bp, Zea Mays
ttgtcctgctgtgtgccttttcttttccttggaaggttctagaattatttgttataactttctcagaaattttctggctctgtaacacttgtctatacttctcattctcccattaatttttggagtttgcaagatcttttgttatggcgttctgtattaatgattttttggtcatgaatcacagatacatagtgactcacttctgcttgctgcatttttgagttcaacaggttgaaaaaatgcgtgctgctggactcatcaaaggagggtcactagaaaatgctatggtttgcaggtgaacaaaaatacgatggaaaattatatttgtacatttaacatcgagtagaactgcctattagagtgatcctagttggcctagtttttgaaggtttatattctgctggatctgttgtcacgttgtgaatataaggcaacccgcagttcagacttttttcaatattcgtagtgttgggaatacaaggcaagccacagttcagacttctttcaatatccgtagtgcaaccaagtctacaacattagccttttgttggtctatttgttaaatatcttatgttaaaaagggcttcatgagtaacaagccagat

SEQ ID NO: 127759 - DNA, 603 bp, Zea Mays
ttgggggtctgcgatgagtccagaagcttcatgtgctggccagtggaacacccgtggccgtatagggaaggattgaccctgtggcggccgggattcgtcgtcgaacgctgggatccgccgctccccgtggatggcccggggcactcttggaatcacggtgagcaacctccccatcgtatcgcatcgttaccctttgcgtgatattgccttcggatcggagttcgattgctggagccgaatttgggagtgcgccggccatggctctgccgcgtcagggccatgcgccgccgtctcgggttaaggtgagagagaagagcgatggccgtcggatcgtgattgtgcgatcgtgaataggtgtaggatggcgtttcggccatggcccatcctggccgttgatcgatggatggtggggcgaggggtgttcctggcgttttaaaatccagagcattgatctcaaatcctagggctctggatgcatacctcttcattttctaatccgggcccttgatctttgatcaagcggtcagggcgcatccgagttatgcaaccttggcgtttttacaagtgggccctcggggaaaaagaaaaccaacctgccatcca

SEQ ID NO: 127760 - DNA, 589 bp, Zea Mays
gtttttacttgttcagctattaactctgtattatccttttctgtaccaaggcagttttaactaattggaaagggtggcactccaaccaatcattgaattatccattggttccaatattctgtaggggcattgagtacctatccatctacttgggacttaactttgtttggaatagtggttttctaactagggacattgaagaacaatatgatctcggtggcagcagcggtggcagatccttagctggtcgcctaaacccgaccattgatgtgttggtggcacatgttgtgtcatggctccaactctacgacaatggaagcttgggtggcaatcggacgtcactgggcatgagtcgtgggctggtgacaggcgcaacaaagactggcagcttgaggccaccatggaacaccgtctacaatagaaaggggaagcggattgctgccgatgattgtaagtattgtggcaaaatgggccattgagctcacgaatgtcgcaagaagaagaggtatgagcaggcccatgctgcccaggatggggcagtgtccactgaaggggtgctggtgttgggcattgcctccatcatggccca

SEQ ID NO: 127761 - DNA, 554 bp, Zea Mays
cttgggagatgtgaagaagatataggaatcaggtcctgtcgagctattgggtgcacttgcatgactgtctaaggtccttgggacaaggacatctataggtgggcctaatatcttgggtggttccgtgacagctggtattggtgcggtgcccattttctaggacattacttagtacttcaaaaggttttcaaactacttacctctgaatattctttcatccttgccttgatcctttcttatatcaacttgccttttaagaagtcgggtaaaagagtgcatattactaggttatatgtaggaagtatgggatcaataagttgttgattccatgatcgtaggatcatgcatgcatcattttcaaataatactatgtgttctccccttttataaagacatggcatgcacaaagaccacccttcataaagcaattggacctcagggtgtgccacatcatcagttggtcctcgtcatgaggggagcattagtgggagcaatgatcacataggagacttggagggtagagtcgagcatatgactgtggagctacaccatgg

SEQ ID NO: 127762 - DNA, 678 bp, Zea Mays
ttggctcaagctcaaaacagaatgaaacaaatggcagatcgaggtcgaactccaagggaattccaggtgggagaacttgtgcttctcaagttacaaccctatgcccagaagatagtggttaacaggccatacccaaagttatcttttaagttctttggtcctttcaatattgtggcaagaattggtgctgtggcttataaattggacctgccagaacatgctccaatacatcctattttcatgtgtcccagctgaaggcctttcatcccaagcataccctagtatttgctaagcttcccagggtggtagatttgtctggtccagggatttggcctgaagaaattgtggaagacgtttggtccagaaggggaatcatgaagtgccttaagtgctggtcaaatggtcgggtttgcttgtttcatcagcaacatgggaagatttctatgtggtcaagaacatgtttcctgttgccctcgccttgggacaagcaagttctgtaggagggagagatgtcatgaccagcgcagaggtcattgttgtgtagcagtagagctgagatctatgagaaacttctagaagtattaggcttaatccgggcctaagtatggcttaatctttgattgtaatccggtccatatgatggcttataaatacctgtactgatgaactagaaaggat

SEQ ID NO: 127763 - DNA, 405 bp, Zea Mays
gacacgatagagcttgggatggtcgtaccctcggtggaagccgacggttgagctgctggaattatttgcatctgtggagtggtcatctgttgaacagatatcgcactcaccaattgctgcatcaattctagaggaggattcgatagcatttcagacattaggcctttgaactctttcttggccttctccttaaaataattcgccatctcttccttttatcgatcacgtttcttatacagaccttctcattgtggtctgaatccttccttccatccttccttagatgagattcctcgtacacgaccaagatgctcagggttaccgagaccagccgttagaatgtctctctccctttgccacttaaatgttccttggctctgcttagctgcaattgcatatatgttt

SEQ ID NO: 127764 - DNA, 394 bp, Zea Mays
cgatcggtgtccttcggccgtctatagttgcagaaacggtgggtggtgggtggatgcttgtcgtagcggagaattggaagttgatgtccctccctcactcacacggttggaagtgacggggagaaaagaaaaaggaaatgctaaacaagtattacttcagttctcaaatatttgtcgctggtttgttcatttttaaactaaaacatgatacttaaaaaagaacgagcaaaagctgagagtttaagtaggacacacataccggtgattattgggggagcgagagccatcgctttcacacaggtatgaggtaggcttgccgcagcgtgcactgtgtataatggagttgatcaagcaggcagataggtacgtgcactctgcactgtgtataacggag

SEQ ID NO: 127765 - DNA, 349 bp, Zea Mays
gtggggatgaacaggagggttttagttggggttttaaaattgtggttgcagagaaataagataggtctgaaccaccgtgtgcccttgctgttttggacactttgagtaagtggatagacattggcatggagggtaaggaaagatctttatatccctgctgtgttccacttgcgcatcagtttgagatggagttggactgggcagcaaaaaaacttgagaaggccaagtctctgcagtaaatatccatgcattgggtcagttggtatctatccacggtgaaacgttatctgcttatccctagcagagggaatccgaccaagtgatgactagctgtgtttgtgctccggcg

SEQ ID NO: 127766 - DNA, 440 bp, Zea Mays
ggaaaatggtgttggatctatgtcagggacccaacacagatctaccatgagcatgcatactttatctaagatgaagtcgtgactaaactaggtgaaggtctcatgagcataaaggtccatgtggtggcctaaagaaaatgggcgaatttccacggaatccttaagcccaataaggaacatgcagatggaaggtgactcctctagcatgggtgccttgagttcctacagatgtaggatgtctctaaaacacaaggaatctatggacaaagtgccctacctggtgtgccaaatgtcatgtgtttttacctcaacaacaaatatcatgtataatagataggaaataagaaggatagcatatggcagtggcgaatctaaggggggctagtggggctccagcccccatgcgcttgagaaaacaatggaggaggaagggagaggga

SEQ ID NO: 127767 - DNA, 462 bp, Zea Mays
tggccgcccctgctgcgtagattgatctattgataaggaacgagaggaaatcttgaaggagatcgagtgagcttcgattcaggcagggttgttgtagatcgtgtcaattcctttctgtttacacgcgggagaggtaggtattcacgccaatcattgtgttcatcgtgaaggcaaagttggattctatgtttaacgaccacagaggtcagctcgctaacggtgacatgtttttggtcgttggctgggttggacagagcttgcattgtgccgccgagactcctcacaaccacatattagaggtggtcgtcattttctagtcgttgatatgcttttctcttgtagtgaatgggcattcttgaaagtcatctagggtggcggtgaataagcaaaatctgaaatttataactttaaacacaaacttcaaccccgattaggcgttagaacgagaataagaacaatcag

SEQ ID NO: 127768 - DNA, 426 bp, Zea Mays
agccgaacctcggtgcgcatcggtgaccaacatcgtcaactaccgcatccaggggagctctccatcgccgcgaagccttcgaccaccatggactgacctattcgtcttgtcaattgccggtgagaacatctcctccagttccaccatggtctagtagtgtgatagcacgggttcaattagtgaatgggagcgagaattgcagaaccgggcaacgctggcgatggcaccgccgcttggcaaccctgtgcgccgccgtggtccgatcggagttggggaaaggtttatggctgttggataatcaccaggtgtgctgggactcaatgggccacttcacagaaggactcaatgggccactacagtacgcactggttgctcacacgttcccatcattctagatgctgcttgataaagctctagctattgaac

SEQ ID NO: 127769 - DNA, 1217 bp, Zea Mays
tggtactggatcacacgatagtttcaaaatcgttttcttttggggaaaacataccatcgctttctctttgatcggcattggggaattcgtttaatccttgctagagtagtctaaattagatctcagttgcttagaaatgtgtgaggataattgttttccgcccttctcaacttcgaggaacgtttcattttttgtgtggtgaggttgtactttagttgtctcagttaccaatcaccattgatgttgcacttgcagcccttgatccacatccacttcgaatttattgtgtgctatggtatactaggaagtttggagacacttacctgctttgacagtgggcataaaaaatgatttcaccactggttgtaaccttcacgtttcattttttgacttttggaccagaaaaagagtgccaaaaattcacgtggcgttgctttaggttattggtggtcaaattttcatttttatatgcaaatatgccgtatgcttcacccccttaatttgttctatataagaccctaaaccaccggttagtttttgttaacaagctgtgtcaaatattcttttccaagcaaaagagtatattttgagagttcccaacgactggtactcaattatgtgaatgttttctatcaattcactttggcttcccatgttgggttccgctctccaaataattggtgctcctttctcttaatttttttttggtcttatagccaactgttttttgttgttgttgtttgtcctaaaggtgtgtatgattatgttaattagtgtgttgtgctcccttttctccaatggagcgatgctgctgatggttagaaatcagatgctatttaacagcagctattagaatactacatgaatgtgacatccatctgctttcttctttgttcgtattcagtgctcatgcaacactttgccgagacattgggccttttactgcttaaaaaaacttggagaggctttgttgtgagattttttttcaatcccgttccagagttttctggattgtgatacttggcttatagagtgacatacacatctatccaaatgtttgcaagataacaactacaagtgcatttctttaagcgtaataacaaatgcggtctgtgttaacttcttccttgtgctttgcacctggacagtattactttgatatacttaaatacatcgtcttcaattaagtgtgttatgacaattaagtaaactttttt

SEQ ID NO: 127770 - DNA, 716 bp, Zea Mays
ttggaaccttttgaccccacgcatcggggagaccttgaggtatacgaagtctccttcctcaaatttgagttctctccgtctgttgtctgcataacttttctggcgactctgagcttcaagtaacctcttgcggattagggcaaccttctcttcggcctctttaacaaagttgggtccttccagtgtcctttcctttacattggaccacattaggggggtctggcaatttcttccatacaatgcttcgaacggtgacatcttgatactggcctgatggctgttgttatatgagaattcggcatatggcaaactggactcccaatttctgtcgaacgtcaacacacaggctcttagtaaatcttcgaggaccttgttgaccctctccgtttgaccatttgactgagggtgataggcggtgctgaaatctaacttggtgcccatagcttgctgaaggctcttccaaaattttgaggtgaactgcgtccctctatctgacactatcttccgaggaataccatggagcctgactatatctttaagatatatccgggcaagggtggcccctccaaaagtggttttcactggaatgaagtgggccaccttggtgagacggtctattattacccagatagagtcatttcctttttgcgtccggggcagtccggttacaaaatccatgcctatttcctcccacttccattcaggcactgggaggg

SEQ ID NO: 127771 - DNA, 755 bp, Zea Mays
caaagaagagcacatctaaagtctggcaatatttcaccaagtattgggtgacagtggaggtggatggcaagcaagagagacagaggtgggcaaagtgcaatttcaaagggtgtcagaccaagactagcaagcatagagctaagggaaaatttggacaactggtttttggacacatctgaataattaccaccatgtaaagaaaggacaacagcagctcacaaccggtaaggatagtgagacaggaattgctatagttaaaccttacaagtatgatcaagaagctagcttgaaaaagttctatgaagctatgattgttcatgagtatcctttcaatatggttgagcatgaagtatttgtagaatgggtcaaatcgatgcgcccatattttcctttaaagtctcgtgtcactgttagaaaggatataatggactactatttagctgagaaggataagttgtatgcatacttcaaaaccatctgaagccgctttagtgcaactatggatatgtggacatccaaccaaaacaagggttacatgtgtgtcactcttcattggattgatgatgaatggaaaattcagaaaagaattatcaatttctttcatgttcaagggcgacatacaggtgagaggttgccttatacagtgagttcttgtctattgaaatggtatgttgagaaaaaaaatgttctctttgactttggataatgcctctgcaaatgaagtggctgttaaggatttaattgtagaactcaag

SEQ ID NO: 127772 - DNA, 468 bp, Zea Mays
taatgatcatcttcaaaatggttctagatcaaaagttacaaaggactaaaattgcctagttgctgctattatcaggaactccaaaactgaaactaagctgaacttttacaaattactccaaatttctccacacaacatggaaatctccaaataacgaaattgtgcaactttggaaatcctaccaccttggtattttgacctcttgcaaaatgtggctaaatctccaaatcaacttttgggctccagtttagagtttagagatactcaaccaccctaagtacttcaccacttgtaatccacatatcaaaatcaaacttctccatcctcctaaagcaaagttactccttaatctcaaattcaactttggcttatagaactcaggtccaaagtatccttgatttaggagttgtttgcttacactcaattccaatcaaggttttcaagccttaggattttgaagttaatcct

SEQ ID NO: 127773 - DNA, 346 bp, Zea Mays
agtcaccagactagggcttcccttttctttatatgatatatttgatgttgtgactttagatttcatacatcaactgcggcccttggtgttcacggttactcaacaagtttctatcatcttaaaacaaaatgaattcgatgcttgtattgtgtttgctgttataaggcgagtttttacctgtagacagagtggtggagcttctttaagaccaaggagggccatggcccccactagcccttaaacttgtttaagcaatagctcattttactacttaattgttgtgcgcaatgctaatctgcactctcattgcccccctctcaactcctttgggaactccgccattgct

SEQ ID NO: 127774 - DNA, 530 bp, Zea Mays
gttaaatgggtctgaagtctggctgtcagataatgcagaggctgaatattgtataacagtgaagttgggcaacctttgagctgggattcgactgtgatccagtaattgtttggctatggttggtatagcaaggttatagctggatcatagggctacaactttgacacagagagcaggtcgagtcactacatgaaattaggagcaaatctccctgcaagttactctgtcaggctgactgaatgaggatccaatggtacagtgcactgaaaatatcccaatccactgaacctcgccgccgacgagctgtgcgcccggatttgcaccagccgcggtgattcgtgcccagcgcagatggataacgaagaagggtagaaatatcacatcgtggatgaactccggccactattctactccggtcgtcgtacctgcctgagtcacggccgcttcggatagactcaccggagttagccacctcgcgaccttgcgccacgtgctttggtgctttaaccacgtcgcagtgagtcacctta

SEQ ID NO: 127775 - DNA, 546 bp, Zea Mays
gaacacagaaaaaattacaagagaaatactggcggatctgtctgaagactcgaacgacagtgatgagtatgatgcagaaagtggagacgaagattctgaagatcgaccgtggcgaccaagccataccatcttcggaaaatcgactatcaaacaaagtcatgttgatgctatgagaggaagatacttccgcgacatgactattgtgagggttggaggagatagcgctgctcctactcctgaagtaaatgaggtggttatttaccgaagccttttgaaagcagggcttcggttcccgttgagcagatccttggttgaagtactgaagacgtttcagatctttcttcatcaacttacccctgaagctataatcaggatgggtttgtttatttaggctgtgagaagccaaggattggaaccaagcgcaaggtgtttttgcaacatgcatgaacttttgtacgagactaaggctaccggcaaggagcaatatcacaacaacttcagttgttacggattcattgctctatccaatgcaagccatccagttcc

SEQ ID NO: 127776 - DNA, 692 bp, Zea Mays
gttttgggcaatttctccccctttaatgtacatggtaagccaaggcatgacatctaagataggttgcacttacttaggatcttgagctccaaatttggtgtacgttttcccaacttaagtcacatgtgatgatgggcttacttgtatagccttgagtgaaaaccctaagtaacacctggggtgttacaccacttaagctctgaaaacgatcaaacaaaaacgatgagacacagtgaaagggatcttggcaggtgaagtctaggtaagcagcacatacctcccacttgggtcctcgggccttgggccttggaccgctcggccttgaggtcctcggtgagggatccggcttggcaccgcagctcctcccgctcgtcgtacactttctagacgttctcctctagcaagtgaaccttctctgccaagggtgccacctcccaccgtgtgaccggggcctcgtccctaagctccaagcacaacgtcaggagatctgccgcctcgacgctttttcaggcaagctgcttgtttgaacgatcaagcaagcctatctggcgcaatagcgcatcctagaccccacgctcgcgacggaggaagaaatacttggccatggactttgccatgagaccctgagaagaaagtggacaccatcaagacacgccctatgaaaaggagtatgtcgccatacaagatgctcg

SEQ ID NO: 127777 - DNA, 594 bp, Zea Mays
tgtatctaactcagatggtcaataccaggaggggtggtggaattgatttgcctcctaaccgacacactcgaaggatatatagacaaccttagccatagcctgcagagatgaatcctccaccaggcggagttgacccactggttgctgctcagatggcggtgatgcagcaaatggcggacactatggctgatatgcgtgcccagatgcagcaagaacgccaggagatgcgtcaggaaagagaagatatacgtcaggagttacgccaagagcgagaggagatacgccaggaaaggagggcacaacaacagcagctgcaacaacaaatgcaacagcaacaacagcagcaaaagcagcaacaagtaccactgcctccaccaccaccaccagttccaccccgagacaagcatagagagttcatgagtcataagccacctacatttgcaagctcacctgatccgctggacgcggatgattggctaaagtccattgagaagatgctgaatattgcacagtgcacggaccgggagaaagttctttatgcctcaggtcgtctaacaagtcctgctgctgactggtgggattcttatactgctg

SEQ ID NO: 127778 - DNA, 447 bp, Zea Mays
gttcctctgtaccgccatctctcacgtcgccggcgatcgctacggccacgagcccacgatagatggtatcaaaggtcactttcctggtgcgtgttctcgttgttggactgcttattctgtcgatcacagccgtaagaggtctgggttgggagatcctatcgtttgccgtgcagaactggtgacggtggtcgattgttccataaatcccttaccactcagtgtgatttgcgggcagatccaacacgacgccgccaaaaccgtcagtccaaactctatttgtgtcgtcgagagcatcgatttgttgttcaccagagtgggtgatatccaatgggtttagaatcagatgtagatcaatcagaatttgggcgtgaaggcgatgtaccaggtactaaaggatcaaaccctacttgctcagcagatcgcggagacgggaaaagcagtggctcc

SEQ ID NO: 127779 - DNA, 695 bp, Zea Mays
ccaaacccgactcattgaagtcctcactagaagtctggagaatcagcgctcgaatggtggaagaccacaggacaggatgggagattttctaaggctcaagcctcccacattcgctggatccagcaatcccctcgatgctgatgattggctgcgcacgataaaaaggaagttagaagctatcggatgccctgagaatgagcgtgttcatttggctgctcatcaactttccaggatggccctatcctggtgggataccttcagcgctgccgtcagagatgctacctgggcagaatttgaaactgctttccgagaacatcatgtgccctaagggatcgttcatcttaaggaagatgactttcgggaactaactcaaggtggaagatctgtcagtgagtacgtgcacaaattcacaaaattggctcgctacgcgcctgacgacgtcagcacagaagccaagaagatggcccgctttttgaaagggctaagaccagaactcaagaccatcctcgccagccaagatttccttagcttctcgcacctctcaaacaaagccatacaagtggaaagggcaagggaagaagaaaaaggtcacctcaagaggaaattccaagtcctccgagctcagcagcaagaccggcaccagagaactcgatcctttgggttcccacccaagggaccaagcttcaatagaccag

SEQ ID NO: 127780 - DNA, 565 bp, Zea Mays
ggtagttgaggaagcatgaggggaattatccaactcatgatctggaattggccgctattgtttttgctcttaagtcgtggaggcattacctttatggcgagacttgtgacattttcaccgatcacaaaagtctcaagtatatttttactcagaaggagctgaatttgaggcagcgtcggtggctggaattgattaaagattatgatttgtccattcattatcacctagggaaggctaatgtggtggctgatgcccttagcaggtccggggttccgaaggtggccttgtcgttgatcgctgatctggaccgtgtggggatcgctttgtgttatgtcggcaccgctagcaaggagactcagatgcttattcaatcctctctcatggagagagtgcgtgcggctcagtagcaggatcgtctattgtaggaagctcgaaagagggtgggtgatggtaaaccgcgggagttcaccattgatgagaatgatttggttcgtttcaggggccgcctctgtgtgcctcagaaatcagaggtgaagatggatatcttgagagaagctcataaaac

SEQ ID NO: 127781 - DNA, 893 bp, Zea Mays
gttgttatttttcacgtcgaggcgtgtctaaaaaaaatacctaaactaaatgtctatacacaaacttcaagaaaaatgtgagctaaatatgagagaaatttgcatgtgaaaaatacttagagtgaccttcctaaaatgtatgctttcaaaagaggcatctttctatcttattttaacaaggacggcaatcttatttgtgggtatggtcatacctatgggtttcatatccgatggatgtaggcacgagcatgaaaactcccgagaggatacataagggtcatatacccacaaaaatgaggatatggtgtgaatatcaaattaatattcgacggatacctgtaatttaagaatataaatatgaatgcatgtcatgttgactagcttatttaatatataatttctatcatataattaccacgtagaagtataaaatatggtatttttatagatagatgaacaaagtgattgtgtgagtaattaacatgttaacgttactttagttcttgtataaaatgttttgtgttatcttgtaagagcatgaatgatcgaatcatgagtctatgacgtatcgtggtttgtgaattatatatagattaacctaatgaactctatgtaagtgagattgatatatttgtgtgtagtttaagtataagtttattatttcatgtcactatgattttattgctgaatccctattgaatatatttgtatagtactcataccagttagatatacgtcggccacagatataaaactttgactctgcgaatatattttaccgatacataaaacatagaatcacgggttagtttgggaggccgaatatttatgaggtatttggtttgatgaattaatctatccaaaatgaagtggtgcatcatgaatccattcct

SEQ ID NO: 127782 - DNA, 414 bp, Zea Mays
tctgaggtgaagaaggttgtggaccctgctcttgctgggttttacgaatctatggaaaaaacaaatatagagaagatcacaaaggaaataatggcagatttgtctgaagattctgacgatagtgatgactatgatgtggaaagtggggatgaagattctgaagaccggccctggcgaccaagccataccatcttcagaaagtcgaccattaaacaaagttagattgacgccatgaagggaaggtactttcgtgacatgtctattgtgagggttggaggggacagcaccgcccctgctcctgaagaaaatgaggttgttgtgtacagaagctttatgaaggcgggtcttcggttcccattgagcaaatttttggttgaagtgttgaagatatttcagatctttcttcatcaaatt

SEQ ID NO: 127783 - DNA, 402 bp, Zea Mays
ggacgatcggaggcgagggctggtgctctggcttcgtaacaacctagcgaagcagactggggcatcaatttatagaagatggtcgtgaggaggttgaatttggatggggaagcgcacgcggtgagaagggggaagagtcaccggaggtcgctaacgtggcgctcactggctaactctctacggcggtcactgctgagcccttgcagcttgcgacaacgtggtgaattgattacgacgtggcacaatcgcggtgaacggcgatctccacggcaaggaccatccggccacgttgtagcacaagtgggtacggcgactgggcataatagtgctccgacttcagccctgcgcaagatcttttcaccagcgaccgttatccgcacgccggatctcacgaatcgcagc

SEQ ID NO: 127784 - DNA, 871 bp, Zea Mays
agataacagaggcttgggcaataacaagatgttattcttttccatcatatagtctctctctctctcaccacacaccacactatttattttcctcttacgtggagtatggatgcctccagcccattcaggcgcgggtccaaacacatttgcattgcctcttctaggcatatatattcgactcacgcagcccaccatttcctgtagccccgatctagcactcttgttgttgtcatcaaacattagaaaaatcaacttaggaagaccaatgttctaaaatccattattaatcggctattaatcgctatcaatagacatccaatatgataaatagataatcgactaagtaatcggccaaccagattaatctgtcattgacccaattaattggtcgttgacccatcccaatcaaacaaagaatcccactagaagtctagcacaatggcctagcaagatatatagtagacacctctaattcttcttgtgaaagaatctagagcacctttgatatggtaactcactttgtcaactgtcgtgttgtcgttaaatagactaaaaatagccttgtctattctaaattgtttggctgatttgatttacaatgtaggtgaataccaagaaaagaaacaagcttagatgcacaatgcacaattgatcttgtcttcgttcaattcaatgcaaaatttgcttagcaaaaaagatagaagcaagacaaaatgttgatgtacttctatctaatgttgcttgtaatgctcaagactggctggttgaaggatgtgccaatattgatgaaggaaattaaaaaaatgaagctatgcaacttcgtagaagttcaagagttagagaacttcatgaagatgattttaagtctgat

SEQ ID NO: 127785 - DNA, 542 bp, Zea Mays
atttgaaatgagaatagcctaagaaattgtgccctaagtttcattgaatcgttttcatctaaaaagtgtatctaataattgtagcttctcttccctctatcaaataggtgatatgacatgcaatttaataaagagatataatagagtttcatggaaggtgagaaagtttcgctaagaccgaactctgaatacactgctttttagacaaatgtggctgaatattgatgtagcacatttagaaacagtgccattaaaccatccactgacaatggcttcacctaaaactcacccgcgttgtcataaaaaatggtccgttgtactcgtgaaaaaggacaaacttttaaatggcatctatcgcagtacattggcctacagtgtcacggtgagacccacggaggaacgaggaaacgacgacctactcccaacctcagcgaattcctaatggtctcgaccaacccacctagacgaaccactccaatcacgaacctaaaaccctagccgcgccaatgagcaacgtcgtgaccgctatcgtgtccccttcg

SEQ ID NO: 127786 - DNA, 660 bp, Zea Mays
gtagagtacatggcgaagccgagggggggctcaatttatagactccgagagcggtggctctcaatttgaccgcgacgagctggcggccggaggtaaagacgaaggtggcgcggtgaatgcgtggctacggccgtggcaagctcctagacgacgatgggacgacccaagagagtcacggtgacacggtagaaagctaggccacgcggcgtaatgccgggaagcggcggttctccggcgagcctatcgctccaccgcaaagcagagggggaggcacgggaggggtcaccggagtggagtccagctcacggcggtgaagattcttactggttgatgcttatctggtgtccacggcgcacgaatcacggcgaacggcaatcaacggcgacggccaccggcggcgagatcttttgggtgcgggcggtctgatctgtttcagtcatgacactgtaccatggtgaacgcttcaaaaagcaactgacagagcaagttcaagtcacaatttctctctattttccttagcaactcatccaaggctctgtatcaaagttgtagtgctacataccagctacaactcgactataagacttgaacacatttgggtactaaatcaaggttgaatttatgctcaaagtcgaccctgttacactgaaaagctgagtt

SEQ ID NO: 127787 - DNA, 669 bp, Zea Mays
ggttgttggggtcaattgggggaatgacaggcgcgacggtcccttgcttcttcttcttaggcgccatcataccttgcggacgagtggaatcaagcgcaattgagaaggtgaataggagtttctggaaggtgtttgcggcggaaaaagtagagttagggtttgctacgaggaaactaccagcgaggatgtatatgcgtgcactaagtcgggcgcatcgagacagacaaagtaacccggagcagacctcaaccgagtgaagtaagtcggatggacatgtcaatcggacctataagaccaagtcatcagcccaagttatgagttgggtctatcagcagaacttgggctcacacgaccaaatttttaagcaaagcataagtcgagcagaacaataaatgcaataccagacataataagaaaaaggtttcattcatcagaaagggttcattacaaagaaaagggtcgactcattatgaaccaaccctatcatccctcacccctaccaccaccactaccactacctacacatactaactactactaccactactacactatactaatgttcatgtcggtggcgccttgccaccgacacagccgtcgtcgcccttgccgccgctgctctcatcgccgtcgttgtagccgctgtcgtcaccaccgcccgcaccgccg

SEQ ID NO: 127788 - DNA, 347 bp, Zea Mays
gttgcacgggtcacatgattggtacaagcccttgtcgtgtttctcgacgtctttgggagattgactggcttcaccttctttctgccgcgcttgtcaatcttatcggttttgcttttgctgcttagtccatcacatcatttgctcagtggcaatcatcgactatgtcatctttgtggtccctgtctgtccactttgatttgtcgtggtcttttaggttcggttttaggtcatgagtctttagaatactgtcaaggttgtcgtttgggaaggcatattcagcttccttatcattctagtgagtcagtgtccatgcatcctttgatcttgtgcactcagatgtatgtggt

SEQ ID NO: 127789 - DNA, 442 bp, Zea Mays
acccgtgactgatagcaatttgggtcttagagtgcgaccctctgatgaagaagtcagtactttggttgcttcgctcggggagattcctgatgatgaacggcaggtttattttgaagtgcctctgaaccctagtgatgccgacataaatgacatgcttgatctgttagctgaggattcatccgatgctgctcctgatggtacgttggcagtggtgcccctcccggaggttgatacaactttggatgtcccgaaacctgtcagtactcgcccgaaacgtcctagccgaaccagtcagcctgagccttctgctgacgagcaaaagaaaaagagaagacgcctccggcgagtatccagttttgatgaggacgccagtaccttagctcctgctgctgaagaaatgactgcaactggccttgctgacattgaacccaatgggtgtgct

SEQ ID NO: 127790 - DNA, 366 bp, Zea Mays
tggatttattcttctttaattcatttacatcctcactaactgatgtgccgctaatgctaagtattcacaggttgagagaaatgggaggatcagtaaaccagtaatatactaatctccttttcagaaacttggggaaatagtgctatgtatttaactaaaatgacactatcaaaccataggtcataggtctacctgggttaggcttggctcttgagttatgtcatttataggttggaaaacacaaactctgtaaatggggaatgattcttatcattgtgaatggcagtaccaacatgttatggtcgtggttgggtgtcaaacaatccttactcccaggtgatcaacatacatgaatgtgtctccctg

SEQ ID NO: 127791 - DNA, 703 bp, Zea Mays
ttttactctaaatttttaaatatatgtatttgtcctatccttaaatgtcttatacatattttggttttgcttaatttgttgtctaaagtataaaaataaatagggaagaagagagagtctatatatagagagaacggaagaacatcctctatatttagtgagtgttttagagaacacaagtgaaacgcacaaagaaaggaatcttctctaaatataagttacatgacctttacacggtgtagttggagtcagcctaaaagggctatgaacttatctctaactcttaattgtcctttttcatttatatggtagtcaactatacaaccacatttgggagagctctactatgtaattcttcaacctaagtctttgatggagcgactctattggattcttacaatggagtctattggattcttacaatggagcagggtgaggaattaatagtctattggattcttacaatggagcagggtgaggaactaatgagaatagattctctattgaccctccatcacaacagaacaagaaacaagatggaacatatttagctctcagttcctagcgtaaagcgtaaatagagtgattctctcttgaactccacccgaatcaattgttatgttaaatgtttgactagttaatagcgattctcttcgaagaaaagaaactaaagctggagctctcccaaacgacatctacctaa

SEQ ID NO: 127792 - DNA, 338 bp, Zea Mays
tccagctcggagtgcgaacatctggctgtctccctgaccatgggggagagaattcccatgattctccacgatgaaccattccaggcgccatcccttgatgctgtccttgagtgggatgtcgagatagtcagtcttcctaccacagcgcatctccaaactcgcgccccccacaagctggtgctgccctccggccattccaggccgatagtggtacaaatgctttcaaaggccaaagtgaggcaaaacgccaatgaaggcttcgcataaatggacaaaaatagaaacttatagaatggaattgggattcaggtgggtcagattcaagcgatagaaatcaa

SEQ ID NO: 127793 - DNA, 609 bp, Zea Mays
tctattttccggacctcccgcgctgcttgcattagcattgtgtgggtgtcaattcggtgggtggcgcgaggacttggatcccaccggcagatgggatcttggagagtggagaggacccgtgcagttgaatttcatggccaaatgatcgatttttttcttcctccacgagtcacgtggtttcgtatgatgaagctccgtacctgttgtttgggtggtttggttccttttctagctggtctttgttagattcggatttggaattgggtttcctggacggaatgagacaccggagtggcgtcctggccgcattgggttttgtcgatttctatgggttgctgcttaaagttaatgctggtcctgtggcttaattagtgcttaatgctggtcctgtggggagggatttgcaattttacctctcggagagcgttgggcttcgttaatttgccattgggaccctaaatcataggtactagttgcaattatctatctctactgtattaatgcacgagtttcaatagcccgcgtcatctttttatagataatcccttgtatttcttcaaaattaaccctcgtcccatatcatatacagacttctagccatttaactgt

SEQ ID NO: 127794 - DNA, 303 bp, Zea Mays
agaggtgttgggtagacccacaatgaaatccatgctgatgtcatcccatttccatgaaggtattgataggggttgcaaggtacccgtcgcttgtaggcgacttgcttttatcctccgacatgtgtcacattccgacacatacttggctatttctcttttcatctttgtccaccaatacaggggttttagatcatggtacatcttggtgctccctgggtgcatggagaatttggagaggtgagcctcatccaaaattttcctcttgagatccccattttttggaactaccagtcgatcttcgaa

SEQ ID NO: 127795 - DNA, 366 bp, Zea Mays
cagatgcttccttaatgcatggaaggcatcttcgcacttctgactccaaataaacttggcttctttcttcagcagctcagttataggcttcgcaattcgagagaaatccggaataaatcttcggtaaaaaccagctaatcccagaaaactccgaatctgatggacaatcattggtggcttccagttcatcacctactgcaccttatcaggatcaacagctattcctgcctgagatatagtgtgacccaagaatttgatttcctttagccaaaaatcacacttggacaacttgccgtaaaggtggtgctctcgagacgttgaagcactacatgcaaatgcccggcatgttcttcttcgttcttagag

SEQ ID NO: 127796 - DNA, 866 bp, Zea Mays
ggccgctagggtggaatgtcttagacaacgtctgacccgcaatacatactagtgacagtcttaatcaagattggtggtatgtagatgtcagtgaccatggtgatcaagcctgtgacctggtgatcgtgaatgggaatgcgttggcacgaaggtgcaggtgggcaaggaacgacgccacaacaagcgcgcgaagaagcccagtatcgaatacaatggattcgagtgggtttagaagttgtgacaagtgtaatggcccaaaacccacgagtgtgagtggctaggtataaaacatgatcatatgctataagcaaggggaacatggcaacggtcgacgacgatcacgtcggtgttctcgatcccagtagaaatctacgtggcaatgagagcgacgctaacatttggtatcagagccatcctggagccagttcacgatcaccgcacaaggttacaaatgaagacaggagtcatggcgcccgtcgcgggtggaagatacgacaacacatttgttggcaaagatataagagggaaattgggagatgcatcgtcggatggagacgatgcaagcctcgaccgcaaacatggaaaccactgtgaagagcgtattgtctgatcaaggaaaaatccagaagtggtgacctgaagtggaggcaaaagtttggagttcgcagaggcactgaaggagattcaaagcaaggttgatcaagttgttcggaagaagatggtggttccgcctacccatgagttgacgactgatgatgtgtcggtctccactcacatgaggcaccctcatttgagatgacgcacgggttgatacaccaccgcgcttctaatccttaccggagcctggaggtcggggctgatgcagc

SEQ ID NO: 127797 - DNA, 1270 bp, Zea Mays
tacagcctgttattatgagcatgtattatacttgctcttattattaagagagaattaattagctagctactactatactagtattagcaatatcagcaccaatgggtcaaaaatgaccttattattagctgttgtaacagctacattttgacatggatatatatattatgtatgtaaaaactggtagcataactgtgtcaccaggtgatttgtttatttattactgacgttggcatatatattaggaatgaagctgcatgcgcaaggggcatacaacacatgcatgtgataataatgatataaacacatgagaaagatcgtcagaacagtcgacgccgaaaggaaccgtgctaattctcctccgatcgacgacgattgatctctccaccatgcagggcggcaggatccgcgtccaacccggccgcaccgtcgtgaagctagcagagaagatcgccaaggactggcggcggctccacacccgccccggcgagcagctgctcgtgctcgagggcgaggacctcgtccacgacggcgccgtcatcacctgagaggcgtcgatccatccatttctgtacgtatattctagctctatgctttcgtttgattttgtttggattaattcgagcatgatggattatgcatccatgctctccaccaccactcgtctgcacccacatgtcaagtatgtaaaccgacccgttcatcagtcctattctgactaatggattattacacgacatacgatggctacatgcatgttggtggctcatgttgaccacacgaattagccatataattaaggagacataatttgtttatacatttcaagattgtattgtactagctaaaagaaagcgagtaaaaatggaagaaggccaaagttgtgcattgttatgtgagaagattcatgaaaaatattctagttcaaatagaagacaacaatacagataaaattgataaaatgacttccatgaggtactcgataaaatgcataaatgcttaactaaggagagagatgactcgggataagtcgaacatacctttacataaggtgatgttttgtaaaaatggaatcatattgataatctccattgcattccatcagtggcgaatctagccgagaatatggttgaggtcagcagcatcagcttcgctatatgatataatttttttaaaactttaacaaagttttggtaaaggatttataaattttatcggtgttggctgaccctgacaagcacccctaaattcgctcctgcattcgataggt

SEQ ID NO: 127798 - DNA, 284 bp, Zea Mays
cttcacataaaaccattcttccatccaagttccggaccatcttttccgaaatgttggcactgggtggcttgcgttgggacgggcgataaatccataacaaccaaagttgttgtgatattgttctttacccatggccttcatctcatacagaagttcgtgcatgctgcagaaacacttcgcgcttggctctatcccttggcttcttactgcccatacgaagactcccatcctcaatatggcttcgggggtcaactgatgaaggaagatttgataggttttcagca

SEQ ID NO: 127799 - DNA, 291 bp, Zea Mays
cagggtgccatttggaagtttgccctaaatgataatatctaaacaagcagaagagtagaagcagcaggaagcagggtagcaaccatggcaccagttgtgccattgtgctcatggagtagattcttgtgtttgtggaaactgtcctcacgctgcatggccaggcaagagagtcgtaagcaattgaaggcttcacattaataatcagcaaggatctagatggtctaatcattttcctcatggattcatttactgtttctctccaagggagagatggggaggagcacataactg

SEQ ID NO: 127800 - DNA, 438 bp, Zea Mays
ggctcgccttagagcgaggtacgaagctgtaacaaccaaagttgttgtggtactgctcctttctagtagccttcgtctcataagacagttcatggatgttgcagaatcattttgcatctggttccggtccttggctcctcatggcccatataaaaatccccactttaatgatggctttaggagtaagttgatgaaggtaaatctcaaaggtttttagaacctcgaccaacaatttgtctaggggaaaccgaaacctggctttcatgaagcttctgtaaaccaccacttcgtcagcttcgggaagaggaacattatcttcccctccagccctcacaattgagatatcacgaaagtacctccccctcattgcatcaatctgcccttgtttaatagttgattttccgaagacaacatgactcggtctccatggccgatctt

SEQ ID NO: 127801 - DNA, 1218 bp, Zea Mays
ctgaaagacaaagcccatgaaacgtgtgacccacagatccaatacccaaccctaaaaacggcccaacgaaaatacagcccaaactcgccaaaatttaaatcatcccactcattacccatttaccctcgcgcggtcgcccctcatcatcttcaacgtctctccagctcgtcttcgccttctctccctcttgaatccctcaccggcggcgatttaggggtttcccaccggtaccgatccccagcgactccggccggccgcaggactcctcgctgcgcctatggagggactcttcctcatcgacgtctccaccgaggacgatcttctcttcaacctcgtctcaccggccccgcggcgtcccgatccgctccacgcaggtgaggtgttgcccccccatcgcgcgggattggtgcctgctattttggttgcgattttgtggatctgacgggcgacgattttccgttagagtctctagtgggagccgaggcaacctcctccggcgtttctccatcggcggtggttcgggctacggatccggactgtgtgatggaggagcgggaagatcccgagcggacggagtccccggagcagcgcaaggccaagaagggggtaaacctccgcaagagcttggcttgggacagcgaattttttaccagtgaaggttcatcttcgcttttgttttttcctggtccccacccatgtgaaactctatctgttttctggaattattgcctctcgttatacactctggtaaaccttaattatgcagattgatcgcaactcttaatctttcctggtctatgcaggggttctcgacactgaggaattagccattgtaaacagcacctatcgtaaggcccaaggttccaggctgcctggaatcattgaggaaacgaggagatcaggggagtcaacaacctcaactctggaaagtgaaacctgggcgatggaaagccttgagactgaactatttgataatgtccgtgcttcgatccagagatctcttggcaaacctgataaactttcaggtcggcccgttgctgcctcaaaccccccaaaggccacagcaaatgcacctcgtgttgcaggtaacaagcctcaaatgctgacacaacatgctagttaacatccaaaattttaactctagcgatctttgtctgctgttgataactgatgagcatattccattgttccttccagctagaaaaggtgttgatcgga

SEQ ID NO: 127802 - DNA, 577 bp, Zea Mays
ccgatacttaagaataacagcctatgtttacttgtgattgttagactgcatactgtgttagcctgttaattcctacacccaaccaatacaattgattatggttcctccaatatgtcctctccctagccagtggccaccggcctccccgtggcagccggcgcgccttctccctccttccctcctcttcctagccaatcgtgggctgaaattgttggagcagcacccattacttccctaggggcagccaccaccagccccaccaccggtcgaggcccctcgctctgctccgctgtcccctgataacccccttggtgatccccttggctcatcctcaaatttatatggaggatggagcctctacaagcgatacgatcacctgatcagtcccattctcgtccttccacaacgtccataacctcgtcctcgaggagaacacgaaggggcttagcctcgctccgacacagccattgtgttcttcaactccagctctagtggcagcctgcgcgtatgtttcccctccacgcccgctttgaggggtggggtttgtcctcttgcccgcctatctctctgacgtccg

SEQ ID NO: 127803 - DNA, 970 bp, Zea Mays
cggggatccccgatggggatttatccccgcgggtaacggggatggggaagaaatgtcccccgcaagcgttcgtggggatccccgcggggaagttttttcatcgcggggacggggatggggagccaaaacccgatggggaattccccgttgccatctctagaaaggagtgttccaactaaaatgcagctacctagcgcttgaaactcgagggtcctacatgcgcatccctcccagattcaaaacagcgagagctacttcgctatagctagtcatattcactccggatttgatgagtacacgacataattccagaagccgctgtcccgccaaaacgaaacctaaaaaccgcccgtcctagtgcaggaaacggccacagaaactccagatcttttcgaaaagacaaacggcagagcactgcagagctcccgattcgggcagttccaccaagtaaatcacacgaagctgaacgcctaccctttctccgattcgcggaggggaccagattcccagcgggcgcgtgcaagcgcgcggaatttcccgccgcatttccaggggaaaaaaccggcaagagaaatcccagcgccgcaactggccgagatccccgggaagcgaacacaagtactcgtgcgtcaaaacccgcggacgcggagcgggaacctccgcagcggagcaagtggggaggagcccgaacccgtcggaagctaccgaaacgcgacgagagcggggtggccggccgggtgggtgacgggaacgcaccgcttgtgctcgaaggcgatgaacgggaggctcttgggcttcatcctcctcctcgcgaccccggcgcggcggcgggattagctagagtacggcgtggcggtggcgctttgatctggtctcctccggctggactgggctgggcgtgcgctgcgcggggcgcagggggagggcggagtaggagagtgtccgtatctgcgttgtgtgggggacctgg

SEQ ID NO: 127804 - DNA, 404 bp, Zea Mays
tgagctcgtgcaaaccagttaaacaagttttgacatcgaccgaaccggttttacccagttcatttctagtttttgcttgcttattcacccctctctaggcaactttcaattggtatcaaagcctaatcctcgttctaacgcttaaccgcatgaggaaaagatcatgtcgggggactaagaaatgaaagtgcttctaagcttgaaaaagttgaggttgcctcgacttcatcttttggtgcagatgttgatcctagggtaatagaccttgccatgagaatccctgaaaggatgttcctcaaaatgaaggaagatgaggcaaagaaggagatcgaagaagaagaaaatgatcgatggagaccaaacgacgaatccacctcttcacaaggtttgtctttcaaatctac

SEQ ID NO: 127805 - DNA, 467 bp, Zea Mays
gattgcttgatccggcgaacgtgggaggcttgagtctcaggaaatcccccattctgtcttgcggtcttccaccattcggtcgttgattttccagacttcgagtgaggacctcgatgagtcgggtttgattggctagaacttggtctaggtctaagggtagttgcggaggtgcggggaggtgggtttcactttcctctctaatggcttccccttcagctctcaggggaaaccctgctccaatcccggaggcggtaggcgtggttttatctgaagccatctgccagggaagagagtcactattttgcacatacacattgttttcaaccaagttattttattcatcacaccaatacattacaagcattcgactactacaggttgtactacacgagagcgttccctgaggtactaccgaactctttctctaaagtatccccaaattccttgagaagatcatcaaggcttgc

SEQ ID NO: 127806 - DNA, 683 bp, Zea Mays
tgcaaccgatatacgcaagcataaaggtatgtggaaatgtgcataactcatgcataaatggaaaagtttctgccacgaatcacgggaacgaatatttgcatgtgcatgctggtttacgattgcataacgctgtgagacatgatagcgtaaaccatgcaacatttaaaatctccaaccggtttgagataaggaaagacgtgctcttcgtgcgcgtaaataaaggcacagttacgggaggaaacaaatacaaggttacagccgctcgtccacgttcgctcgtccacgtctttatctgaggtattggcggcggttagtggcggcggaagtgagaggtagggccggcggcgagaaaatgtccagcaccggagctggcgatgacatgccacctgtatcatctgtgcatacgccagcaggtacgtctatttcaaatggacatgcatcctgtagcgtctgcgatcgccccatacacagagggtgtctccgttactcccccgacagcattgagggcacctggaacatatcgatgagcacacaaaaacgacagatgtggtcggcgtagagaagcacatccccatgagacatattggcccgcatgaacaggacacacctcatattcttcagagccatgtaagttctcccaaatatgatactcttattttcttacatacttctttgtaatgttg

SEQ ID NO: 127807 - DNA, 371 bp, Zea Mays
aaaaaggatactatcaaagggtgaaccatgtcacattcactagacttgttgtacaaaccaaatggttgcacatcccactaacattggatataagggacgtagatcatcgaagtgctccacacacagatgtcatggtaataaactgcaacatagctgactatgagctacataagccctcatgataatggaagccaggtcaacaacattttctagcatgccttcaactgcatgggcatcaaccataaattattgcagcagccaacaatccactataaggatttatggggagggccacgctccacataggaaaataacctttccactgtcctttcgcgtcgctcccaatttgaggatatagtagattaccttcc

SEQ ID NO: 127808 - DNA, 663 bp, Zea Mays
attttttatccaagtcacagctttcaaaaaaaacaaaggaactcgttcgtgccctcgcatatggatgcatgcgttgatatgccaagtttccaagttgattattaaacgctcaagaaacaacgaagcacctgtcgtaagaaaactggaaaaaaaaaatcaaaatactaatccaacggcacggacggatctggtggcgtggatggatcccgtattgtgccttctcgtccaacggcgcagacggttctggcggctacggcttcttcgagcaaggcgacgacggtagtgttggtgcccagatcgcggacggtcttgcttgcgcgtcgcccagcaatcgcaggttctgctcaacgggcgactcctccaccgcacggacccggcggcggatcgtgtcccatgtcctcggcgatctccggcgtcgagttctgcccggttgtggcgccggccggtgttgccatctgttgcggtagcgaagaaggaagggaaaaggtgtatcgcctaccgagaggaaaaagaatgaaccccttttttttgtaattggtggtaatggttggtaattatctctcagttaaaaattagtgtttgtgaagcacccttttaccccacatcataaaaaaggtgaagttcacctcaacttcaccatttctttcgtcaagttgagcagcc

SEQ ID NO: 127809 - DNA, 337 bp, Zea Mays
agaaccttcacctttttcctctttggcgtgggctcgcttggagcagctgaagcaacatccttcccagaagttgcattctttctcttctgcccccgtggtgggtagcggtagtcagggtacataaatccaatagcatcaaaaactctatttagcctcttctttttctggctcccgaaggccgcagatagtgcgttatcttcagatttggagtagactccaagtagttcatcactggtgttttcaacacacttcagccagtcgccgtctggttcgataaattggtctctaaacctgaaagtatattttaattgaaccaaaccacctccgttagggttgc

SEQ ID NO: 127810 - DNA, 432 bp, Zea Mays
agcgcggtgtttcgtgcttgccggagacagaaaagggggaaatggggtcgcggtggctctgggcgaaattgggagatgagatcggggctatagggccataagaggttgtgctttcaccgtgcacaatcgatttgggaggagatggagaaggcagtgcgaattttgggttcttctcgcgcttgcggttgaggcagtgagtgcctcgccgtggttcatgccgctatataaagccacggcggaccgacaagcgatcagcggccgcagataaccttgctagcgcatgtataccacgtagaggagaagtacagtgaggtagaattgaggcgcgagtgacacggcggcggaaatgactggtgcggtggccgccggtgaatcactccggccgagctcaggagatggcgccacgtatgaatcaccctctccccggcgtta

SEQ ID NO: 127811 - DNA, 521 bp, Zea Mays
caagagctgacagagctggagaaggaatatcactcccccctcactacctctgtaatgtcggttgttcttacggatcagcgggacttcttccttttcttcttcatcatcttcatcaaatatacagacaacaacttgtgcatgatcacaacccttggcatcaacctcaggaaggacctctgctggcacttcatcacgaaccggagcagaaggactagcaccctggtccaagcatgacagtcgtcgaatccgcctctttttcttctttcctcaacaggtgcagtcgggtggctaactcggcgtggacgctttgggcagcaccttccatcttccgaatctccaccgctttgccaagctcttgtctagccgtgatagccatcggctcggcatgggtcgagtcagatgattccccagccaacatactaatcacaacatctatctatgcatcatctgtgctagctggcatctcaaagtgagtctgcctctcatcatctagaagactccgaagaggggcaatcagagcc

SEQ ID NO: 127812 - DNA, 472 bp, Zea Mays
ccagaattggtggaactcaagaagcagattgatgaattgttagagaaaggctacatcagaccaagtacctcgccttgggcagccccagtgttatttgtggagaagaaagatggtataaagatgatgtgcattgattacagatccctgaatgaagtcactattaagaacaagtaccccatgccccgaattgaggatctattcgatcagttgagaggagccagtgtgttctcaaagatagacctgagatcaggttaccatcagcttaggatccgaccatcggatataccgaagacaccatttatcaccaagtacggattatatgagttcatggtcatgtcattcggtttgatgaatgcaccagcttacttcatgtacttgatgaatagtgtattcatggactacctcgacaagtttgaagtggtgttcattgatgatatcctcatatattcccagaatgagcaagagcatgagg

SEQ ID NO: 127813 - DNA, 627 bp, Zea Mays
gaaaaatcagagtgatggattaagacacgaagaaaaaccggagtgtggaggatcgtcttcacccttgttctcgatgaccacaatcacgtctaacttaaacactttagaagtcgcacacgcaaccggattaaagtcgtagcaagccacagtgaacaagctaatgcgacccaagcgccttagccttgacccttcccttgctttgtccaccttcacctccatcttcaccatcgttgcactaatcttagcgtcacgttctcttcttatttagttaccacaggcatcgcccaactgatctctcccaccttctgacacgccgtctcgatcaccactgctcggtctgacattctccctagaaactctcttctaagtctgtagaccaagaaaaccctcaaaccctaacatcacaacctgcttcatctccaatggtggtaaccttttgtattctagcatgtgcattcagaagcatctctacatgcacgcacttggaaagaagcatttaaaatgcaactagtacaatgccctgtgatggcacataatcatatttgatgatcttgattagggtgggctagacctcaccaacagtgcaatgattgagcgacacacgagggccattaaaccccgtgaggt

SEQ ID NO: 127814 - DNA, 341 bp, Zea Mays
ggccgggctttgtgggctactggaccggcatccacagctggcatggtgcctgccagccgtacaacgcaacacgcatctgcatcctctcccttcccgtctctaaagtccaccctatcttcaaactgctcccgatcctcggatttcgttcttaagtacgtggcggacatgcggacgtccacttcacagaagcttcgtcggcggtgatccatccaggcgaccaggcctgctcagctcagctatgctgccgtgtgcgtggattttcaaacagtgaccaccacggcgacaacctaacggctccagatagcagctgcctcctctcgacgtcgtctcctcctcgctcc

SEQ ID NO: 127815 - DNA, 328 bp, Zea Mays
gagaaatatcgttaggtggtagattggttgagaggacaaaactgtgttaacaagagtcaatctacccgctttggagagcaattttcctttccatcttggaagccttgcacgaattttgtcaaccagaggctgcatctcaattcttctaagttttctagtgtgaaggggcagaccaagatatttttcagggaaagaggcaatctttccggggaagcagtgaagcagagcctcaacttcaccaggatgacaccgaatagggtacaactctgttttactcatattaaaattgaggccagaacattcactaaaggtctggatgatgcgcctt

SEQ ID NO: 127816 - DNA, 330 bp, Zea Mays
gcagcagtggaagcaacgaccctattggggagttggatgtcagagtggatcacctcagatcggaactatgccacgggtgcagagagcgtgcgtgcgatagtcgtcgctttgctgaactgacagccgaagttagtcgcatgcggtatgaaatttcagaacatgatacggccattgactaggccatcaactcgtgctctttcgcttgggactatgaaaccaaagctctagctcgagtagcagaacttagcgcatccctcgaaaacctgcaagcgtactgcaacaccttacatgacgaagtacatgtattatatgattggctgcacccggacg

SEQ ID NO: 127817 - DNA, 349 bp, Zea Mays
ccttgggtctgtgaagccgttgcttgatgtatagtctcgacaattagacgggtgcacggcggggtacggggttggcgaacatcggccatggctccgccgcgtggcgggagcgcgccgccactctccggtggatacaaaacgagttagggtattcaccgtgggatctgcaatcaacgtcccagattaggacttagatacccgttcagcgtggtccaatcgtgaccgtcagcttcggtttgtgcgcgcgggattagatccgcaacttacctcttcgcgccttgaatttgcaccgtacatcccagatcctatggcctggggtggatcgtgggtcctttgaatatcgggcgtc

SEQ ID NO: 127818 - DNA, 402 bp, Zea Mays
cagtcattgtttagtgtccagtgtttgggactcagttctctttctgcagataacatcaagaaatcatggatttggggttactggtcctcccctctgatgtatgcccagaatgccatagcggtgaatgagttccttggcaatagttggcaggtggtgatgcaaccaacgcaagcttgatgtctctgaagttcagattgacaactgaaatgggaaatgatataaacctttgtgcaggtcgatagggcagaaaacaatgacacgcttggtgtccaaatcctaaaggcacgcggcatttttgtaggcccaaagtggtactggattggtgttggagcattgcttggatacatcatgatcttcaatttactctttgtactgttccttgactggcttggccgtgagtac

SEQ ID NO: 127819 - DNA, 779 bp, Zea Mays
gccgaagcggcaattttcctcttttttccttttctcaaggggtagcagtagtcagaatatatgaagccaatcgcatcaaaaaccctgttcaatcttttcttgccccgacccccgaaggctgcgttcaaggcatcatcttcggccctagagtatgtcccaagcagctcgtcgctagtagcttcaatgcatttcaaccagtcatcatttggttcgtcgaacttctctctgtatctgaagatatatttcaatcgaactaggccacctccactggattcagtagtagtctccttcggcatttcccagctatccacaagtggccacaccctataggctataaccatcttaaatgtgggacatcttttgcgactccatcaaaattggacacttcataagcgtcttaataactgaaaattaaccgtctcatatagcatgatctgtagtagtgtcagtgacaagggagtgcaaatcatcaaagataatcttagttaggaagtggggaagtataagtgctttcgccaagataagaaggggatattgtggtttgaagacagattggtggttcctaaaaataaagacctcaagaagaaaatcttggatgaggctcatctctccaaattctccatgcatccgggaagcaccaagatgtaccatgatctgaagcccctatattggtggaccaggatgaagagggaaatagcccaatacatatcggaatgtgacacatgccagaggataaaggcaagctacataaaatcagttggtgccttgcagcccctatc

SEQ ID NO: 127820 - DNA, 893 bp, Zea Mays
ccgtgggcgacacacgaacttgaacgcacgaggaacgttacagactgaagaaaccggtctagagactaattaagccgatgctgattctattctttgatagactccagaacaccttccgggaagaagcacgtggaggttatcttaggatcggcaatgacacctagaacactgccaaatctccgcgagagacgtgacgaacaacaatatatagagggaaaatggataaaagggataatacacgtattttgaatcaattggatgttggttaactcaattattcgtgatactctcatatatatagaagggatggttcatcacaataggaaacaactccataacgtgttattcaagttttccatgttaaagaacgaaaattaatcggttcggatgaaaatccgctaggctggttttacaggggttgactactatagctagcctagcaataggaagccgaccaagctaggtttggggcggccagactgactttggagacccgacctggccgactttagaaacctggcctggctaggttcaggcgttcagcagccggctgccggcctagccgactctagcctatgttgcacaatttccatgctgaacattttagcgtgttaatgtatgcctctctgttttaggtgaatagtactcgaaccagaaaacacaaaagcactaaatagcgatgatgtctaactcattggctaacccaaatttacattaaggttgatataaatactcaaccattgtttggaaatcactttagtcttcttgcaaaatacttgaaaaatactttttgaagtaccttctgttgattgctttggggagactattaccttacatcgtatctagcatatatgaattttcaaatattgctttgatcactttataaggatcct

SEQ ID NO: 127821 - DNA, 361 bp, Zea Mays
aataacaattaacaagcaagcataggttgccccaactcctaatggctctcatgtcacaagcgagtgcagatcagacgagcctcgtcatcagctgatgactccattaggtcatgatgatacaagagttggtgtcgggatcgaccagcgccggcacgagatacttcctgccgttccggccgaccacgttgtacccagctccggtagccgtgtcaagcctgacagcgccggggtaccccgggtacgcgccgcggccgtagacgccggggcatgcagccgccacctccacgggtgcgccggggtcgccctggaagtatccgtgcccatatgggttggtgaccgcgcccgccagcagcgccgcgag

SEQ ID NO: 127822 - DNA, 390 bp, Zea Mays
caagaccacccagctccttgggacgggtaaccttaggccaagccaagaggcaatgaccaccacagaactctttcctgcccctctagaggaagcccttcctcagtttatcgattgctttgatggcccatacaggaaggtcaagtgctaaagctgcataaatcatctttgccgtcatgacgaactgcacatgaatagctctaccagccctggtcataagctcagctttccattctggcagaaggctggccactctatcaacaatggcctgaacctggtcccttgagagtttcttaggagacaaaggcaaatcgaggtacttacaaggaaaatctgaaatattacatggcagctgtaaacaattcaccttttcttccccacaatagattggga

SEQ ID NO: 127823 - DNA, 617 bp, Zea Mays
gtagtgccatgtatggagaacaagttttcttaagtaatcaaacactagtgttccacaaaaatgggagatacatgaggttaaaaaggcgctgtcagtcggcttgataggtgttcattcactgcatctaatcaggatcagggttcagtgttgtcgcgccaacttgagcgtcttggcctgattaatccgtggatattttcggcatggtcattaattcattataccaaaatgaaacaccattagtccaggtacaactttgatgcagactcatttgcaagtagtcacataaaatttgaagcaatagccagttgaattcggcctggcagtcgtactgttcaccggagttcagaaaaatctcgccggggataagattgccaccgcggctggggattacactgcggccgcggtaaaaatcttccgcgacgtggcgcataaactttgaggtggcgctgctcggttaatcggtgatcaccggacgctcgccgtggctctgcccacgcgggtgagctcgccagcgcacttgaagatccttgaatctcatccacctctggccatcttcctataaattgagcccgagcgctgcttcttcaccacatcacacacatgagtacttgcgcaat

SEQ ID NO: 127824 - DNA, 372 bp, Zea Mays
gtccacgatcacggcggacaccgagcatgggagcacacgttcccgcggattggggatggtctagttcgatcgggtgggttgatgagcatcacgaatgcatacaggtgctgaaacagaaccgcagagagcatgatcaaacctggaagtggctggccacggcgagggtgcttttacggcggcggaaaactgatttgggggaaaacggcgattctccggctaggggggctaatcggggacgggagtggttgctatggctttgcaattttgagacgaaggtcggagctcggttgatttgagcgaaaggagcgaggatgtggtgaatttatagccgcggtgagtcactgtcgcggccacggtgataaccattgccgg

SEQ ID NO: 127825 - DNA, 534 bp, Zea Mays
gtgaatcagagactaggcaaactagttagtccaaatggttgtgaaggtcatcaagcaccaaaatataagaaaatggttttaaggccatttccctttcatcatctttacccttgtcacctctatatcttaccttcatgcttatttatacatgccctttaaaatctctgctcttccatctcaatcttagagttgtattttacccattttcccttggtcgtacccccttcttcgtcacttgcaagtttttaactccattctttattgtgcttttgtttgttatttcctttatttttctcatccctcgattttaccttggtgattacattatgtttgttatctaaaatctccaatctctcgtctcagttcgagagtggtgttttacttctctcgcctttggtcataacctcatctttgccacgtgcaagtcttgtcttagctctattctttattgtactcatgcccttggttctcctgaacctttatctcttctcttgcactcctgcctattatcgcctttaacccttgtaatatcta

SEQ ID NO: 127826 - DNA, 426 bp, Zea Mays
gccttccaaatttagagaggccacagaaacccagatagacttaggcactcggtagattgttaaatactctctgcactagtctaaccataccacagaatcgccctccgagaactttggaattggtagtttgggtattgcttgattacctaaatcagcagactgacgaggatcacctctcatgcctcactgttggttcccacggtcctgaccaccacgagactgctgctgattccttagaacatctccaccatgttcctgagtagaggtcaatgtttcacccagctctcttcccatctgctccaacctcaattgagacacttctcatcctgtttcctccaatttctggtacagatcattcctctcaaaagcgacttatttagccaccactgccgccagctctgactgcatcaacaactgttgctggac

SEQ ID NO: 127827 - DNA, 541 bp, Zea Mays
catactcttatttttatatgcttaccttcataccccgatgactgttcaagacatttcagttaacatgcccttgaccacccttgcttgttaatgatccatgatcggtcattttattttgcacatccttgatgatctcgttaattctttgtaacttccttcggtaattttttactttaacccttctattggaaccttacctatcttacccttgattgttttctccactttgtcacttcgcgagtcttgccttaactctatccttggttatgcttttcactattttcatccttaccattgtcacatctatatcttgccctgatgcttatagtatacctgtgctctaaaaccttctctcttctatctcaattttaaagttgtattttacctattttccccttggttgtatactcttcctcatcgctcttgagttttcaacaccaccctttgttgtgctcatgtttagttttgcctttacctttcccatctctcgaccataccttggtgattacattatgtctgtgatctataatctccaatatcc

SEQ ID NO: 127828 - DNA, 453 bp, Zea Mays
gctgacagacatgttgccttgcttcaatgacagaaactccttcttgatcttcatcaatccagcaggaatgtggtagtttctgaactgagttgtgaattctgcccaagtaataatgtcagcagcatcatgggtagcaacataagaatcccaccagtcagcagcaggaccagtcagatgacctgaagcatatagaaccttctcccgttcagagcactgagcaatgtttagcattttctccactgacttcaaccagtcgtcggcgtgtagaggatcttgagaactggcgaaggtaggcagcttgtggctcataaattcccagtgcttgtctgggggtgaaagtggcgatggcggtggcagtggtggcaatgggacttgctgctattgtcccctcctctcctgacgcatctcctctctctcctggcgcatctcttggttcctacccatctgtgcgtg

SEQ ID NO: 127829 - DNA, 345 bp, Zea Mays
cggagaacaaggcaagaaaagattaaacagagttttcgatgtaattggctttgtatacctagactattgctatccctcacgaaagcagggaaagaaaagaaaagttgctgcttcggccatctctgctatgccgaagggtaaaaagatcaaggttttgacgcaccggcctagatacattgaaacggctagggtgccgaagcttgctgaggggacgtcttccgccgctgagccagaataccccactccggccggtaccaagggagaatcgactgaagtgtcgaaagtaatgggacaggagaaagccgagtcggccaaagcgccgaagcgtcctggtgaatccaagga

SEQ ID NO: 127830 - DNA, 436 bp, Zea Mays
actgaagccaccgaaaccgtgccgatttccgaagcaatgaggcgttctggactggtttcatcagaggacacgcctgctaccgaagcaacacaagctattgttgaagaagctggttccaaagatgagtacagctgtggggtgccaagtaaacctagtcatctggattttggaaagtccaccatctctgaagctgatctccctaaaatggtgaagctgggctacttcagtgaggccaagaaggaattaatttgttttggtggagaagaaactatcccaaagccaggaaaagatgaggtagtggtcttcaaaagttttcttaaagctggcttaagattccccttaaacaggatgattgctattgtactgaagaagtttggggtttacctacatcagctgacccctaatgctatcgttagattaagcgtttatatttggg

SEQ ID NO: 127831 - DNA, 325 bp, Zea Mays
atgagcgtcgcatggcgctggctgtaagcacacactccacggcgcgccctgcagcccgtggcgtgagtacgcatattaaatcagttgttggcaaccaacgccctcggttcaagcgtctttccaatgaagaattagcagcaaagcgggctagtggtgagtgctaccattgtactgaaaagtatactgccgatcacagatgtgcaaacaaaggggttttcttgttggaattagcagaagatgatgagggtggtgaaacattggatgatgttggcatctctctccatgctctcaccggttttgatattggcactaccatgaaactttc

SEQ ID NO: 127832 - DNA, 339 bp, Zea Mays
cagtgatatgggtggactagcgaagggttccatcggaaggtcacgtgtgcagtggttggcgtgttggagtctttgcaggacggcaatgccggtgggcggtggcagatcagtggaagaaaagactataaaaaacattgagacgagggcgtaggctgcgtagcactatagaaaaaccagggctaccacgcctagcttgtgacttgtgaacaggccgatgaacaaaaacgtttcgataatccttcaaaagtgagaataacaacaaattcaaaatataatttgaacactacgagatcaagtattatgaacaaacattcttttgagtgtcttcttttttataaa

SEQ ID NO: 127833 - DNA, 329 bp, Zea Mays
gtcgattgctccgtttgtagggcatagtggtcaccccgagttaagtaagaatgcaagtcaatcatgaataagctgagtatctttgaaatccctctttattgatgatatatttccactttacagaatacattgtcgccccggcagttttgaaatacagcctagggataaaactttctgaggtgctctatgttccaggagttcccaacttctgtgccatccatctgagtgaggcgatatgatccgggccgagtgacttctgccaccatgaaaggtccttcccataagggtgataatttgtgccgtccctctcccgttagaattcggcggag

SEQ ID NO: 127834 - DNA, 330 bp, Zea Mays
caggaatttaaccatagccgaagcttgacccttgcgctcaaacgaagcaccacctcagattctgcttcgtcacaagaagagcttcggaaaaaaggtcattaatttcaaaaaaacttctagaagttcataatcaaatggctagagtgcgttccactgccagggttgaacgtgagggagatgagaccgaagccactgaaaccattccaatctccgaagcaatgaggcggtttgggctagcaacatcaggggatacatctgccgccgaagcaaaacaagctgacgttgaagaagatgaatttgaagatgattacggtgcaatgccatctaaac

SEQ ID NO: 127835 - DNA, 410 bp, Zea Mays
gtgtgcgcgcgcgtgtgtctatacatagtatacatataattaaatctcgatgggaatatactcctctccgtatcgagtaggatcccctagtgtgcctggcctgtggacgtaggatgcctgctgcgcacgtacgcgtctcggacagctagcaacgggaggagaaaacaaaaggtttgacaaggacaaaggcgactcgcagggatattctgtccaacagcattcactactcattgttctggtgagcaaaggcccctgaaacttagcaaatgctcgataagcgataggtatgtgtgtgtgtgtgtataatggagatatggaaaatttgtattacaagctaaatggcctagctaggtcatgtttggttcatctactaataattacatcttcgatcggatataaacaggtataga

SEQ ID NO: 127836 - DNA, 590 bp, Zea Mays
gatttgcctattcaccccccaagataagtcagagatttgtgatatgttttaatcacaaaggcacccctctgcaaatattgtctccacctgtccactgctaggatcagagccaaaaactccttctcataaattgaaagatgtttgttcttctcacctaatgccttgctgatgaaggctattggtctgccttgttgcattagaacagcccccaatcctatatctgatgcatcagtttctactatgaaaggcaagtcaaaccttggtaaagccagaactggagtagaggccataacctgtttcaagttttcaaaagctacctgagcttcttcagaccatgcaaacccttgttgtttttgtaacagccttgtgagaggtttagccaacaacccatagttcttcacaaatcttctgtagtaacctgtgaggccaagaaatcccctaagctcagtgacattcctgagctggggccagttcaacattacttcagttttactagggtcagtagataccccttctcttgaaatcacatgccccagatacttcagttcagatttcataaatgaacatttcttccttttcagataaaactg

SEQ ID NO: 127837 - DNA, 635 bp, Zea Mays
gttggaggagggtgccttggaggcgggtgctgaaacattcttggggccattcactgagttggagtaggtaggtacggatgtcttcaactgaggacaatcattattgtagtgactagggtctccatagtgccaacaagcactgactggaggttggctgcttgcaacagatgggtgtggagagaactttgaccaggctggctgaaacatgatggagcgaaccctgttggcttgctgaagctccatcctttgggaggaaacccaaaagatcgaactctctcgtgcctgtcctgctgctgagctcggagaacttgaaacttcctcttgaggtgacctttttcttcttctcgagccctttccacctgaatggccttgtttgagaggtgcgagaaactgaggaaatcttggctggcgaggatggtcttgagttctggtctcagccccttcaagaaacatgccatcttcttggcttccgtgctgacatcatcaggcgcatagcgagccagttctgtgaatttctggacgtattcactaacagatctccctccttgagttaactctcgaaattcttcttcttttagcaggacgatccccaagggtacatgatgctcttggaaagcggcttcaaattcagccca

SEQ ID NO: 127838 - DNA, 1666 bp, Zea Mays
tgaatacatactttacacaaaatttgttatgttatgagcaaaaaatatataccatttgtcccacatgtgcaaaagccaatctatattaagccttattaatgaccgattatatcttcatgtcgagtatttcctagtataaggaggaggttttcgcatgtattcagtattcggccctatagcccttgtaatgagtaactgtgctactcataacaattgaaaggtccacgtagagaaattacaacagacttccagtagcatgagtaaaagaagattacctttaaacgtacaacagaatcagtgacagtttttagcacatggagcaaaagctgtgtgctccctccccaagtcaaatctacagaagagcaaatcttgcgagcaatctgcagatggggaaaaacagtatccaaattaaccaaacaatctaaggctcctatttgttaaggcccgtgattaaggcaatcaatttcataatggcacatactgctggcaaaagctcaatcatcccctcccccacacactcttgcatcgtgtaacgacagaatccatgcactagatcagtattgaaaagggaagactcagaaaccagaaaaagggtacaccggctcatggcattcataagcaacgggagatacttcctgctgacttcattagtaagaatactgcacacaaacataaattcctgataagcccactcagtatctctcttatttgatgaatactatcacaaaattggtaatctcaccgaagccatggttttagctgtttgaaaaggctgatgagtcgttcataaggggtaggttccttcaccttgcccttgctggaacaattagcaaggcaaacagtgagctcaaccgcaaggagggtgacttcaggatccgtgccagcctccccagcgctgccggggtccggaaggaggacgggatcaacgcctgcagcaccacgtcgcgacttggtgctcgtggtgggtggagagagcgcggagcggagggcgtcgagggtagcggcagcctccgcactggcgcgtgcgaagtgaccgcgcgactcgaggcaacagatgaagcggccgcgttggagcaacacggagtagggtttccccgcaaggcagggtgatatggcctctaggcagtccaagaggaggccgtagatctcaagcagttcgtcggcggcttcgccgcccttatcgcccgaaacaggacaagcgcggacgagcggcgggaggaggtggagcgcgcgaccgagaaacggcaggaatcgcttcgcaagggggcggagggtggccgcgtcgggaggcggcggctgcttgttctgcttcgtcgccctcttctgcggtggcttggtgttagggtttgagctgtgcaggtagggggtgaagggctgtaggtaggcggcgaagcgagagtagaggccagcgaatgaggatggggacgagagggcggcgatgaggtcggcagcggcggcctccattgccgtctaggtggatgaccgaagaagcccggttggggaaattttgcggtcgggctttggagatctcgggggtgggaatgggcgggaaaaagtgaccgatttcggagctgcgaggctgggaatgggatcgaccgttgcggactgttttcgatcatgcctcatgcagtcatgcctagcaagattgacttgatggattaaggcg

SEQ ID NO: 127839 - DNA, 663 bp, Zea Mays
cctaatagcacaggggttagtttgaaaaattcaggaccttgctgtaacggtctttgaccaggactctgtagattgatttcttaaatttacagagggtctttaacaaatttacggtgcagaaggggatacgcggaatctgcagccgttggatttaaaaacaaaggcgcatattagatcttaaccggtacgttccagcagccatcaaatcatcgatcagtggcccaaatgctgcccacgaccttccccaacactagatgtccaactgaagatctacggtcgtgattgtacaacgaaggggtatgtgacttctaatcgtaaccgctcgatctcaatcgaccctcaggattataaatcactgaggtctaatatcagtcgtggccttggatctagcggccaacacactttcttccccactcgacgacgccaggtggcgccgccgccctcctagcgcgacggcgccccaccaaagaagccccatggatctctagcgttcgaaaatcatctactattccggactacgccatgaaggagtcaaaacgaacaggttacgaagctcttatctacggtggtggcacgacgtgctctgaccacgggagaggggaatctgccgagcccaacgatccccgatgacaaattcccctggactcggatgtctctatgcct

SEQ ID NO: 127840 - DNA, 921 bp, Zea Mays
aaaataataggggaaacacaaaagaaatatgttcttgagaattttcaaagcacatagacaaatagctgaaagagatggatcccataccttcattatatactctgctacgaggcttgtctgcttaccctcaagagccaacgcctgaaaatttgagaacaatatttatgacacaataattaaatatttatataatcattctgcctaaatgtagtctaccttcatgaacacatctaggtcctcgtcaggttttatccccgcattcttttctctcctcaacagttcaacaagcatgtctgcaggttgattgatgtcaaagaccaaacaatcaaggaacagcaaaactttactaattcggtgcggtgacctaccatactttattccaacaccctgacagcgcccggcaaactccagcgtttctctgaccgtcatttctgaagcatgccagtcttgctgactgacataagcagatgttcgctgaggcacgaattcgttcaaatggtggccattgtaagtaatgttcccagacatctacaacaaatttgggtgcttcctgtcagtaacaagttgggggactcaagtcaaaggctaattttgctgatgacagtccattgtcaggtaatagaacatgccagtccggcattccggccttgtgatggacaaagaatggattgaattaacccagatacaaagagtcgcccatcatttttttatgaacacgcattcaaagaatgaaaagtgactgatgtgatgttacaaacctttagtccaggaccgagccgtccagcaagagcaagaagcaaggtggtcttcccggaacttggagggcccaaaagcagtgtcattctgcagcacgaaccaatgcatgtgcaagcttaatttggtgtcccataaaaaccaatgaggcgccatttggatcctttg

SEQ ID NO: 127841 - DNA, 533 bp, Zea Mays
caccaaggtgtgacgaggagagcacgacgaggctggtaatggggatccacccgttgccaagccgacagggagtccggcaggaggacacagttctgtcagcaggccgggggaacacccatccgtagcctcaccctggcccatacccgaaaacatgtccagcccaaccggcccatgctcagccacaccaactgggccaagatcaggggaccccgaagcaagcatcacaacaatagggtgctacatgggaacagacgtgccgcccccaatcaaagcattaggagcaacacatgcagatgccgccgccatctcttcagaagccgaaacagccgggcaacaattactaatcagggcacaaaccaaagcaccctcctaagctcccacgccccggaaggacgagcatgcgggcgcatcaaccaaagcgggaccacgttgaaccatcacaggaacgggagactccccggaacccgcgacctccgcctcgactccaccagacaacaacgccgagcacgccggcagggaagaggaaccagccc

SEQ ID NO: 127842 - DNA, 820 bp, Zea Mays
agaagaaggagggtaatcccaagtcaggagaagctgcgtcgtagctcgacgaaggaagatcaaccgaaagaatttgaagaacattgtcaggggttgactcagccccaccagcggatatcagaattcttgcatctggctcgctgacctccaaggcgactcgctcgctcgaagtcaaagaagcatgcatcgccatcaccccatcagattgtggtggagacgacccgacatggacatccatggaggtgtgggaaggagagctcacttggacaccctcgggggctgggttgtagctcgcgccacccaccagagccggatcattaccggcaacaccctcgggggctgtgttgtagctcgcgctacccaccagagccggatcactaccagcgacaccctcggggtctaggttttctgcaacagccacttctaaggctgaaggatcctcagccacctccatgggagtcgggcaatcctgaccaacttcttgacatcgaagactgccttccaaagtcgacgatgcgtgagacactgctcgagatacctctaatcccacgtctggaatttcagagaaaacatccatcatgtcgccagcagtcggctccgacagcatatcttcaggaacgacatcctcaagggcctgatcaaaatctgttatggacaattcttgaaggctgacaagagcagacagagctggagaaggaatatcactatcccccctactacctctgtaacaccggctattcttacgaattagcagaacttcttcttcctcttcttcgtcctcataaaaaatacggacaatagtcggtgcacggtcacaccc

SEQ ID NO: 127843 - DNA, 709 bp, Zea Mays
ctacttcctaatgcagactatatatgttctgggtttgtacgctgattatattcaatatctagcagttctggtgagcattattgtttagacaatctcttgttatgtaaaaatttaaagagatagatatgaccaagaaaatatctgaatagtaacatcctacacaatctaagattggctactaagatcgggaaattaaaaagaccagcgtacttcataaaactgaaatgcaattgcgcattttcaatggctcttgatgacacttaacttacttcatatatcctcgtgctgccagcctaaacatgacttgtgagatcagcgcttacttaccttttttctacctcgctccatcttttccttcttacctctacatcgtcttttataattactcttcttcctctccatccatctatggccggcaaaaacttatacaaaaactaggggctttatggccctggatccgcccccgtgtgagaatgtggcactgcaattctatgtgtgacacaacatgggcctagaggtcaactagagccaagaggatataatcttgggatgagaattccagtatggcgcatggcatgtcactaccggaatccggctctttatcgagtgtccactcggcaaaaaactcagttccggtagtgtgtatatatgatggtatcatttcactaaccatcaaagctgtgctagaatcaagcaaatgaagaagatt

SEQ ID NO: 127844 - DNA, 483 bp, Zea Mays
tgtcaatgaattgcagaaaaaaacattgatccaaatatagtgccaacagtaggggatgactttcaaggatgttgatgatgcatataaattctataaaaagtatgcatatgaagttggatttccattgaagaaatacagagagaagacattcagtaagtggataaattgttcacgtgaaggtaaaagtgcaccaaaaccaaatgatacacctaggatgaggaataggaattcggggcgtacgcaatgtaaggctggaatgaaatttaaaaatatatgatgatgaaaaaaatggttgtagctacaaaaattgaactggtgaatttggagcataaccatgagtacataactgacgaagcagagaaacaacatttacgttgcaacaaaagtagggatgctgagttcataaattttgttgatgcaatgcatgatagccgagtgccgcagcattgcatagttgattttatatcagacatgcatgatggc

SEQ ID NO: 127845 - DNA, 471 bp, Zea Mays
aaaacaactaaattatgtgaacggagagagtattcactaattaatgaccgaggccgacacgctgcgtataaataggatattattaccttttgacacgtacgatctgctgactactactagtaatcttacggtactgaggacggtgtgatcgcagtgttttctctacttttctcaacaatacaccgggcatgttttttgtgtgtgcatgcatcatttcacgcgcaaatacattctactctaaactcaaagtaggcagtgttcacaagaatacaccatgtaggatagaacgtatgttgcaatttattaagggccatgtttgttcatcagaatcgacttctagcagtcaaaggtacgtttcgtttttcagcttacttctgtaaaagtcgtttctacgaaaatcgttcaaatcaacatgaatataaagtctatcgagccatcacagcgggtggaatcaatccaccactcttaaac

SEQ ID NO: 127846 - DNA, 379 bp, Zea Mays
gctctcataaatcatgatttccatacaaacgtacatatgcatacgatgatatcatatatgaatactaagctcctcataaatcatgatttccacacaaatgtataaatgtacacatgcatatgctgataacggtgatgtgcagtttggctcaccataagcttgctagattatttaggtgtgaaatttgttattagataagagcaaaatgaaaaatatatgaatactaagctcatctaaaaatgcacaacacatactttcttgtttcctccatgatagtgaatggttggattcacaaatcacgggctattctataaaaacattacacatgcatggaacacctaattatattttaccattgtctattctctacttgtttatt

SEQ ID NO: 127847 - DNA, 519 bp, Zea Mays
ttcctgtgttccacccgagaggagagtgtagtgagattattagggataacctttaccgtttgttccctaattttgtgtttcgatggcaggcgacgacgaagaagcaaggatccctacatacttcgatgaatgtgttagccaccaagatcttgaggcaaacaacaagctcctgaaggaacaaatggaggagacagtccacaagtcagtgcatgatgccttcattgacatgaaccttggcaagacttacgagaggctagatcgacgattgtcccagatcgtcgacagacttgctgtgttggagacgcaacaacaagcaccaccgccaccaccacctcttcgtccacgtcttcccgatgatgccgtgtttgatgaagaaggtaattatgatgaagcggccaccagagacttgcacctacatcgccgtcttcatcaaaacacagaagttatgccacaccaacaccgccagcaaggtaataacaatcgtgctcctgacgacacttatgctaagattaaattttc

SEQ ID NO: 127848 - DNA, 534 bp, Zea Mays
tgcaggcccttcaacttgtttaggatcctcttcattaacatcgatcaaaccctaaacaaaattcccaaaatcaatagatcaaatcgaaccaagggtagagttctgtagatcgaaccaataaaaattcacatatcaaatcgaacctagggcagggttccgtagatcgaaccaatcaaatcgagggaggtggctgtaccgataggtgtcggggggaccaggcgggggcggcacgaggttggtgcagcgaccgcctccttctcttctctgaggcgcgcaacagcgacgacaagtcactcgggcttcggccacaaacgggaggaagcgaggagtcaaaggagggaacacggtggagaatgaaagtcgacgaggaggggaaggaacgccgcctcggcagtaggggcaggtgcctccctcggcatgacgacggaggccacaatggatgtgttgtttgaggatggggatggcgtcggcgtcatcgtggccggggcgggcgtatgcaacgcgctgcgtctgcagaggcgaggggcgaggggg

SEQ ID NO: 127849 - DNA, 703 bp, Zea Mays
ggagcatcgtggaggcccaaggcggacctccgtgcggcaatggttggggtcgacggtgcggcggctgcgtgtgagagaaggtgtagcgtgtgaggcgaggagatccaaacacgtgcgaggaccgaggaagggcaggggcgttgctggagagggagcggttgctgtgtgacgctcgtgcggaggagaggatgaggaggagcgaagcacgaacaggtctcgcggcggcaaaggcttttggttggggatacgaaacatctcagaattgcgacaacggctgtgcacggtgagctcgacgacgactccgtcttgcccgcctcatgctcgcgatggatgtgaaggcggaggtcgaagcgcctggggcagggcgtggtggagacgaacctcccgcatcacttcgtcaggttgggcacgtcgaggcccctggaaagcgacgaccaacggtccccgggggagcgggagggcggacaagcaggccgacgcggcgtgggataggtaagcatagtggaggaacgattgcttgacagggggagcgggacttgggatccaggctgcgggcgccgcgccgccgccgcttagggttttggatccgaataggggaggcaaaacaggaatcgcgagcaggtgtgcgtcggggaagagggcgcacacatcggacgacagagggactttatggcgtattggacggtccagatcgctggaaggc

SEQ ID NO: 127850 - DNA, 399 bp, Zea Mays
tcacttaagggtgtttcgctttgtgttgaactgtagaccgagaaagaagaatgaagagaagcgaagaagaatgaagaaaagcagatgagagagaaaagtttgggcaggtgcaagtgcaccgtacagaaagcatactaccagctaatcctttcaactatcattttagcatcaacctctatataccggaagcatgcgtgtatataaaatttatacccccaatacacacaagtctgtcatgtccattaatcactataaacatagtctttatgaaaaactaagttcacacagtttggcttatatatgcaaaggaataaatcagaacagctaaacagattatgaatactggtcatgtaaccgaaactgttcaaactataatagtagaacaagtcattcaaatat

SEQ ID NO: 127851 - DNA, 388 bp, Zea Mays
aaataaacaacaagcgaagggctcaacggcaccatcgcacaatagggcacatcacagtattcaccctcgcaactctattgcgaagagggggagggcaacgttttcactcaatatcacaacagagcagcgagggcaacaaaaatgtcacataggctcctccttcggaataagacccacctcccgaaaattgaacaacatcatcctcaactcttccccctcaaacaggtcccgcaagtccccctctccaatgcacatcccagacgtcgatgaaagtaactcgcgctgagcaccccgatccaatcgcagaccaccccgaagacgagacctttccatacccattcagcgacgtcttctcccacttcgtgacgactcaacgatgctctgtttc

SEQ ID NO: 127852 - DNA, 574 bp, Zea Mays
gaaaatatcacgaatggacaaggcacgattagttgtcttactcggatgtggtcgcacagcggtcggccacaccagcgttgtgcggccgtcgtcgatttgcctaggacgggtctgggggtcacctcaccttgggcctagttccctttcctggtacccaatgggggcctgtttgcaaatgtcggtgatacgtaagcccagacgttaaccgcttatcggggcctgtcttcgatccatgtgtgttggtgggtcgacctttcttgattcaggcgtgtctcttggttctagcttctcgttcgcccatcaaggtcctatgcaccccttcctcattctgttgctgctgccctccgtcgtcgctcctcacctgccgcgaaccccttcctccaccttccgtcctcgggattgattgtaatgcctcgaatttgagagttaaatttttctttctccagcactcaccaaattcgggcgttacccttccttttttcctttttcttctcgctatgccttgccccttttcaaaattctaaaggggggttaacgctatgtcatgtattaataaaccctagaggtggaattt

SEQ ID NO: 127853 - DNA, 312 bp, Zea Mays
aaccagcagctgtgatgacagagatgaatcactcaaaccaagcacgagaggcttgtttcagaccatacaatgcacgacgaagacgagaaacgtgtcctgagggagtatcaacccccggaggaggatgcatatacacttcttcatgtagatcaccattgagaaaagcattcttgacatccatctgggagatagtccaagaagatgaggctgcaactgcaatcgaggttcgaactgtagtcatatgtgcaacaggtgcaaaagtctcatcataatcaagtccttgagtctgttggaaaccacgagccacaagac

SEQ ID NO: 127854 - DNA, 377 bp, Zea Mays
gggtggtccagatctaccacgcctacatacactcatggctggttgctccctgctcaggtaaagaaccagtgctgctatgtgccttatggcgtgtgaaataagccgccaagaagaacctgacataagcctctgataggaggggggccacctgcttcaaggcaagcagagcgcatgactgttcacaccagtgataggtagcgtgtgccccacattgaatgtaggtggtttgtgcagcccgtaaggcctgcgctacatcagaagcccacacgttaccaaggcaacaccattgaatcaatgaactgcttgggcgcccctcattattacttatactgttcctcgcgcgtcatcgaggcgtgaagggacatgcagaggggaca

SEQ ID NO: 127855 - DNA, 388 bp, Zea Mays
tcgggcctgcagcagccgccagggcggtgggcagggcgagatcttcgagtaagaggaggcgatgccgatgtagatcaggtgcacaaggcagtagcaatggcacacgactgcgagattcatagctcaacaattgtcagcgtcggcaccggtgctgatggggaggcgtcgctggtatacaggtcctaaaaggggaacaatgtgagtggaatgcccctcttctccctcttcccctctgcgcttttcttcctcctcgatttccttggttgacagtgtggcatggatttctgcctccttgatgttgcaactcaaactaaactagcactaggttggctcatgtcgtagccagatgttgggattgccttgttgagcttatcaattttgtttggtc

SEQ ID NO: 127856 - DNA, 471 bp, Zea Mays
cggggaagggaagggacgatctgtaaagcctgaagcggcggtaccggcagggcaagcagcagcgaagacgcagctacccgttctcgtgctgtagtaggagtcaaactgggaggattcgttacgtgcgagcccaaccaggcgtcatttcgttgcagccaccgccccaccggaagcgagcgagcgagcgcgctccatctccattgagcggggcccgtcaaagttggacgagtggcgcccgagacctggttgaggagtgaggctgagcaccggccaggggggcggccaagagagacgtgtgacaggctgacagctgatggcaacaacaccgagaagtataccacccgccggggctgaagctgaaggcggaagggtctacgctggccgcccaatttgcgactgcgacgcccacggcccgcgggctattctgggacagcgaggccccgacgcaacaggccggcggcagcagcagca

SEQ ID NO: 127857 - DNA, 770 bp, Zea Mays
tacctggccgagcgaaagcgccgacgaggacccatacgccgcggcgctgttccggacgatcatcggcggcatgtgcctcgccgggatcatcatttctccctctcagaacctctcgaaccctaattcctgccgcctcagtagcttctttccatttgttcactggcacatgcgtagtatctatctcccgcctcacggacaaagaacaggcggcgccaatcctattcctatatggagatgtataccttgcctgccaagtaacaacacgaccaacaacagatctagcgatcgacaaggtagcccagacaaccttcgctgcgagctgacgactggcagtgagatctagcagaagagctacatatgttcgtgtgcctatgcaaaaatagaactccgatcgatctctggctgcatgcagctctcaaggcgtgcgtgcagcaaaaactttgcaagctcagaagggtagctagcaggaggtggcgagataagccgggaggagactagcttgagaagctataggcggccatggaaggggaggcgaggaggaggaggaagaggaggagaggaaaggggaacgggcggaggtggaagagaatgtggagaagggaggaaggagttattgcgaacgagttgaggtggtgcaatccacatttatgagagggcgtatcgtaattgctagccaggagagagagagagagagcgagcgagcgagcgagagagagcgagacgggtgcataatttccatttttttattatttctatttctacaacattgg

SEQ ID NO: 127858 - DNA, 502 bp, Zea Mays
ttgagttatgcaccaccaatttgtttgactaaaatttaagaataatatacattcaatacatccttcaaaatttaccaagtctgttaaaaaaactatgtaaaagtctgaaatgaatttgtggtatgtttgattatatttgtcagtgtagttaaagttactagaagatttgctcttcacatccttgattggctagtggtttatttaccagtttgtgacattcaaagattcgtttctgatcatgaaggttatttgtgcattaagaatcttctaaaacttaatacattgattggttgatgagtaactgattcgcaatgcagcgggcacaggacctctctcttagaaaagtaaacttatgctatcttatttgctcagaattgttcctccaaaatctcatggtttcatgctaatttcatctattatgtctttagaaagtttcccataccttgttgcttctgatagtcagagttaaagttttgctaccaacatctttttgcagccacct

SEQ ID NO: 127859 - DNA, 566 bp, Zea Mays
ggggtatgaactaatctgtgttgtccgatctggtttcaacggcacatattagaagttatctaaaccaaacggttatgtaatctgagccacccaatgagcaatcgacgacccagatttaaaattgcagatctaatcctacgcgcccgatctagatcggacgaccccgatcgcatcagtccactcgacacctggattcgatctcgatcgccaaacgcatatcctacggcggatgccatctctcaccccaaccactcgattagatcagacggtcggcaaccttcttccaaatccctcacccaccaccgtacccggacagcggcggcgatgtaggctccaacggtggcgccattatcggcgatgcgcgccctaatgcccggtcacccaatcatgcatacatgaagctcttcacaatactggtaccgaagcgaacgtacggagggaggactcaccgcagattgcatagcgtcatgtcctgcccatggcggtcggtagctccatggcgaggagattgatccagtgtgcaattccagcgtcatccaccattcatccacccagacacggccacg

SEQ ID NO: 127860 - DNA, 408 bp, Zea Mays
ttttggttctcctatagggtacaatggtattccaatgaaaattgaagcctatcttaggttgtccacttatccatgctagccatccaagtcttttcttgatctcgatgcatgtaaaagttaatgacatgtgaacaaccttttttagtgggggaagaacatgtggtctttggtgtgccatccacattagtagatgcttcgtacaaggtggttggttccatggttgcattccttcttctgccttcttgcttctctatgtagactcaagcttggtttccttgaggatcaaggactcatgatgacataacatttggatgtactatcgtattttgaaggcaaaacctaggagggtttcaatgaattgactccatgatcacgaggacatgtcatcttaacatttcttgactttga

SEQ ID NO: 127861 - DNA, 476 bp, Zea Mays
tgttcacatgcgggtgacacgcatcagccctcagggctgcgtgccgctgactcgtcggccatcatcgactgatcgacgacgacgacacaccggtggcggccggatcgacgggctactactacataaacacacgtacgcatcacctttgcgtgcgttgaagagagcaatgtcatcaccgtcaccctgcaaccaccccgctggaacggaaccgacccgtctctaaccatcagctaaagccgctcctcgtttcgtttccgtcaatccgccacgcacacgcagcatgcgttccagctcacgtgcactaacaaccctgatgctttgcattgcgttgcgtttgcgtttgcgtctcgtctcggcctctacatccatgagtgcatgacactaacagctgttggctgccaaactagctcgtggtgggctggctcttcgatcgatccaccgtcactccaagctaattaggaggccggaacactcca

SEQ ID NO: 127862 - DNA, 518 bp, Zea Mays
tcaacatcttggactagtacatctagttcaaattcaaagtttacagtcgaatttggattcaaatttaagaattcaaacatgaaaagaaaagaagaaaatagaaagaaaatgggaaaaaaccctaacctaattgggcctgcggcacccaatttggcccactgaagaaaaccaactgtgcggcccaggactacctgcacgcgcacaaccgccagacactgacaggtcgggcctgcgtgccagcggctgcaaacccgcgcgcccacgtactggagaccagcgccgacagtagggtccacggggcagtctctcgttcgcgtttcacgcgcgctcgtcgtctgtctccgctacgctgaccggtgggccggagatgtcaactccttcctcaactgaaatccgcgcatggcgggcggcgtagtctcccctccccttcttccggagctgctggtcgtggctccgaatccgtaggatcggggcgttaaatgccgtgcttgcccacgaatcctccaccctaaaaccac

SEQ ID NO: 127863 - DNA, 385 bp, Zea Mays
gttaatcacaggacgggacgcagcacgcacggagtagagctgtcttgcccgttgagaagtggacgagcctagaatagggaaacggatcgggttcgtacgtaatcagatccggacattatcaatttttagttcgttttcgaatgcgcataccactgtatgcgccatatgtcctgcaagccgatggcggacgcacacgtgaccattggacaagtgaggcagtgactgaaggtctgcaacgcaaacagccaacaccaccgagcccagtggtcgcgattactgttttaacacgtactggtcgaacaaacaaacactcctgagcgaaatcagaagcaacaacttgtttgctgtccaatatatgtacgtactctctggtctcttatggtct

SEQ ID NO: 127864 - DNA, 1135 bp, Zea Mays
gagaagaagcacagattgggctgtgagcaaagcaaagacacgaaataatcgtgatataccaaattaaaggaggttggcggtggtggtttaactctctggagacatgcattgtatgcctgtatgggtgtgtgcatgcatgccggggacacaggcaagcagtgatctttctgttgacacacacacaccatccgggctccgcctgcagcctccagatgtcttggcaatttcttgatgactccgtcacctagacatctcgatctggcattggcttctcttctagtgtctccatgacgacaccatctgtccttgagtactcacagtcacagcaaactcaacttgttgttggacagtacgtgcaaactttgtatgggaaggcagctcacactattgagatgcagtgatgctttttaaaactttatttaattataagacactgagagggacatccatatccatgcatacggatgtctagtgtttgggtgtgtggtgaaaagtcttaataggttggattcaaggaagaagggatgaaggttcacaatgatgggtaagtcagcgagtgatggctcacgttagtgcacattatcgggaatcatcactacgttgtacacactcctacaggagaggagactttatcaacgttgactgtaaagtaactctaaggtgggtgccacgacgctatcgcacgcccacgtggcacaaccaaccggtccgtatggctcgccatggtaccagcgtcggtcggctccctcacgcagtcgtcaaggctaccgaccagccacaagagcctgtactaaccgcgcgttgggaccacgttggtcgataccgacctagccattgttgccatgatcggtaatggctgcatcttgccacatgacacattctgattgtttcactccattttgatttttatttaaaaatggaacctagtatataaatagtggagtgtttgagctcattcacaaaacccacacttcaaatttctctacaccgcatactactctccattttgacacattctgattgtttcacgcctttgtatttgtttcactccattggaatcaagcgttgttgtgatgtcttcgtccagctcggacatcgacatggcctaaggagagttggtcgagttgttgcgtca

SEQ ID NO: 127865 - DNA, 563 bp, Zea Mays
ccaagagccaaggatgctagacagaatgaaaagaggaagccccaccaacactgcctccctccaggatagaaaacttgtcagacattgaagatatgtccctagctagccttgacaaccttctcagggaatttggggacaccttagagtttggaagcaccttagaaagggctcgcgtgtagtgtgatttgtggtaactgtgtgcttgtaatgaacttgtgtgatgaataaaataacgtgtttgaagaaaaaaaattggcatgtgcatagtagtaattctctccccctggcacatggcttcggataaaaccatgcctaccgcctctgggattggagcaaggtcccccctaggagctgaaggagaagtcagtggagaagggagtgagacccacctccccgcacctccgtagctaccattagacttagcccaagttctggccaaccaaacccgacccatcgaggtcctcaccaaaagtcttgagaaccagcgcccgaatggtggaaggcctcaggacaggatgggagattttctaaggctcaagcctcccacattcgctggatccagc

SEQ ID NO: 127866 - DNA, 425 bp, Zea Mays
ctgaattttttttgacaattttatcgagaccaaacatttttttggttggcctcagaatggcgtcaccaagctcctgtaaaaattttagattttttgaacaaccgagcgaaaagttatgcctggtttaaggaaggtacctcaagttatgtttttgggaggcacgactagaaggcggcgcggttagggcaaaacttccctatctgcaatctatctagggctggcgcggcggcggctagcgagggcaagttgattaatggggtggatcgacttgtgatctaggtaatggtggatggaatagcggtgaaggtgcagttgatctacgacgaagatacaccctaaaccagcaacacgactcgaccacggacacaaactgaacaaagccaaactgaaaacaaaattgcaaatgctaaacaagggttctagga

SEQ ID NO: 127867 - DNA, 470 bp, Zea Mays
tgatcccattctcgtcagtcaaagtggcaattgaatttttcctgtgtttaatggtggcatgagcatggaagaaacgagagcaaatgtcaccatcagttacccacttaatagccgcccgctgcttccaataaattttctgaatgtttagcagatcggccaccttttgctgcagaatatctctgaaattccattcctcaatagaaagatcccgatgttcttccatattgtctataagttcaattagcagcttgatgttttgcaccgttttatcaatttttggtaacgatctctgccaatccttcagaacctttcgaacacacttaaacttggcagtcaggtttttagccttgtcaggaaggcaagggagcccagcccacgtggtttgaaagaaattcaagaaaccgtccaattcgagccagaagttttcaatccgaaaaatcttaggtttagggatcttggacttaaaagat

SEQ ID NO: 127868 - DNA, 450 bp, Zea Mays
ctctgcctgtgccatacgctcagccgcccatcgtacatccctagccctacaacgtctggcatacttgagtccccacatggcagcatctctgtagacagtggcgcatctacacaaccggatagcggagctgacgtgaggcaatgtgggcacgaccacgacggcgcatctaggcatctgtacgagcacgattgaggcgatgcgcgagacaaaactattcaattgaactgacaaatgaaccgaagaaactaacaccgaattcgtcaattttgtgtttttttgcgtctaactgattggctcttgatttctagaaactgaagtttataaaaacaaacaaaccaaaccgaattcttggtttaaattgattgcccactccaaaattccacaccaccatctcttgagcagcacgtcgtcaacctaaccccaccctcctcccatcatctctgatggctc

SEQ ID NO: 127869 - DNA, 542 bp, Zea Mays
ctctggtgactgattctctcgggtctcagcctccgcctctccctcgtccgctcccctctgcttgacggctccgcctccaatccgaggcatacatcggcgagcctgtgtcggtcatcgacggatccgtcgatctggtgactggtactctaatcatcctctcctatccctccggcaaccctctcggtaaccctaatcctcaatctagtcactttggtcttcgtgtctcctctcctctcgttgccttgtcagtggatctggtgctccggcgtgcaggtatgaatctctaaaccctaatccttgatttcgtttgttgttcttcgattattcgtttctcactgagtccctctcctctctgcttgtgaggaaccggagtcgtcgatgaggtgacgagttgggctggccgattgacggctggtgcattgtggccttgttcctggtgcaatgccatccattggagatgtccaggagctggacccaatcgccgaggatgaggagaagaggctagaagacaagtacgaagccgatgatgccctccagttcct

SEQ ID NO: 127870 - DNA, 633 bp, Zea Mays
gccttgccaacctttgtacgggcaatgagcaagaccttcggggacctgatctgggataaggtggaaatttacgtcgacgacatcgtggtcaagactagggaagggtcggctatagtggaagacctggccctagttttcggcaagctgcgggcaacccgcaccaagctaaacccggagaaatgcatctttggtgtctccgcagggaagttgctggggttcctggtttcataccggggcattgaagctaacccggagaatatcaaggctattgaggtaatgaagcctcccgcccgtgttaaggacatctagaagcttaccgggtcgctagcagcccttagccgcttcattttgaggttggctgagagggcgctgcctttcttcaagcttctgcggaaatcaggcccgtttgcctggtccgaagaggcagaacaagccttcaaagaattgaagcagcacttagcctccctgccgatcctagttgctccagagccaggggaaccgctatacctgtacattacggcagctgcggaagcagtaagcatggtgttagtaattgagcggaaggcacaaggaggacaagaacctggaagtctaggggcagctatagagacccggactgtccagaagccggtc

SEQ ID NO: 127871 - DNA, 373 bp, Zea Mays
cctgaggtgttctatattccaggagttcccaacttctgtgccatccatctgagtgagacgatacgatccgggccgagtgacctctgatattatgaaaggcccttcccataagggcgacaacttgtgccgtccctcccccgttagaattcggcggaggacgagatcccctactgagaagaatcgttgccgcacagccttgtcatgatagcgtcttagagtctgctggtatcgtgctgattggatcactgcatttagccgttcctcctcgagtacatcaatatcctctaatctggtggcttcagcttctgctatactgtcgaaaatcaaccttggtgccccgaacttgagatcagcaggtagcactgcctccgac

SEQ ID NO: 127872 - DNA, 495 bp, Zea Mays
cacgttcagaaggaagacagaattccggtctggcagcgtttgactaggatggtgggggatgctcctctgaggaaggatggtcagggctcaaggtcaaggaagtcggtctggaaaaggatctccccactgcaggaggatgggaggtcggagtttgcatctgctgcatctgtcgaaggtgatagcggtggaggccatgaaggcttacgatgcaagcggaaccggaaccgttccaagcgttgacggggagagatgaagacggatgatcaccatcaacaagtatctccggttcctgttgttgaagcagtagtcccggagccatccctgttgagtgtcaacaattctaaggtttttgattccacactcaactccagctgtgttttggactactcggatgatttggcgagggaggaaattgctctccgacgagctctgtttgtctctgtggctggaacacgtccagtggtccttggttcagaaattgtggacgaagttgca

SEQ ID NO: 127873 - DNA, 2582 bp, Zea Mays
cctttggccatcctaggtctcgtgtacagtcgtcccctccgctcctcgcctcctctcccgagtcccgaacggccgatcccgacgccggctgcgtggctcgcctcagagccccagccgtatcctgccacccttgtccatgagcgcccgctatcagcgcagctagtccctccctccgcccgctatcttgagcggtggtgatggagtttactttcgaggatgcagcggaactgtgcgcgctcgtttcgaatcagcaatcccacgtcgacgagaagcggaggtcggtgtggtttcttctaccggcgcacctccgatcagaatgcatttctgtttttgcaccctgcatcacaaaagattcggggccctcttaatttgcaggtggctggagtcaatgatcctcagaccggatggctgcatcaggcgcgcgaagcgacccaagtttttgcatgaagtgtaagcgtgcgccaagttctgggatgcgagtagtgttctaattcaggctttttcttggtctctttaataagttgtccgaagtttagtgttttattgagtcaaccgggctgaattttttttccatatgacattggaattgatttttacagattcagtgctaaacccattttgggtggtaattttctcatgtgtgttattgtatctgatgaatcgttgtgtttcttaagcactcctcgcattctagatgccataacattcatatcaatgcttattcattctgaaaagctgataattgttttgataaggggtaccattatggcattatgtgtaatgacacccctcttcctctgaaatgtttccacatcgaactctgttttcctaatttatattctctctccctccctccctacccctctctctctctctccccaatccacctatccacaaaaaagaacaatcaggatgtatgtagtgagtagtgactatactaagtctaattgttagttctctgcttatgcaggtacttgcctgagtcatatatcaggagtgatgacgtaagtgttagtactttggaaagaactacatatagcttagtgtttattttgcattcttactaacatcagttcatggcttatgtactatgtgcacatatggtttctcccacttattcaaatccctccacctatgtgtttaggtctttaaggtattagcgaaatatgtgaagtaataaatactctattttcactgtataagttttattcaagaataagttaggtgtgtactcaaaggactttatttcaataatcagttaaatacataatgcttaaaacttatggaagacatgttctagcgccaagttaggaactattgcacatggtactctagtgctatgtctgatgttgttttgaacatggttcaatttaattgtatttcttcaaaaatggttttgtcatggctatataaattttccttaccctgcaatgatcttatgatcgttttggaaccatttatcagtttcctggcttatactagttaatataacagcaatttcggttgcattatgtcacttcaaaatataaaatgtgaatttagtggggaccattttttcagagatcttgtgataaagtgagaggtaacattaaaaggatttggagttcagagtgcaatggctatacccatcacttagttctggagggcctccagctttttgacttccagaagaaggaaaatgaaccacttggaccagaatatcttggtgtcatgcaggacacaatcagcaaattgacctatgaaacacttcagtcagtggcttgtgttgtcagtcatgacaaggttacttttgataagactaggtctgtaatggaaaaaattgtaaattctcaccttccaagttacttggccagcttggatcagaatgatattgcatgccagctattcaatatttttagaaatccatgcagctatcgatctggttctgtgaggcttgtcacacctgtgtcaccacaacttttgtcttctattaagcatgcgttggatgagcttgatggaatgccaatgcagggtcttgttgcaatgaataggaagattaaaggaaaatcatgtgccccaaaatttggattaactgctagcttttccaaaagaatgcatataatcaaaatgataagaaaaaggtgcaacaagattttaacagaacttgaggaaggtaattacctgccaaaggaattagcaaaggcaatgtcagtggtgaacttatatcagaagcagaagctgaaaaatgtgagtatttcacaatcagagtttttcccctttgcaaaagaaactatttctttgcagaatgatatcctgaatgccctttggtcacttccaaatctcaagcatgcgaagctgaaattgctgcacaccatactggatcatgattctaaatttgaaaggaagcacttagcaactttgaggaactacttgacagaatgtttgtttggatgtgatgatggtctaccagatgtggccctccaagccatagcctctataaatcagatttctagatgtcagcatgttgtgttaacggaagagagggaggatgctgaggtagatgctgtactgaacttgagcagtcatctcaaagctttagctca

SEQ ID NO: 127874 - DNA, 299 bp, Zea Mays
ttctcattttgcataagtacacaccctaagccttgccttgaagcatcacagaagacgacgaaatcctgatggatgtctggcaacgtcaaaacgggtgcggttgtgagcttcttctttatgatttggaagctttcttcacacttcggggtccacacaaacttattgtctttcttgaggagctcggtcattggtctggctatgctggagaatcctttgataaaacgtcggtaataccctgccattcccagaaagcttcgaacttcactaacgttggatggctgcttccatttggatactgc

SEQ ID NO: 127875 - DNA, 776 bp, Zea Mays
ccatttggtataacttgaaatcatggttagtagcataggcaattaatattctaattgactctaaccttgctaccggcgcatatgtttcaccaatatcaagtccctccacttgagtgtagccttgggcaaccaaccgtgctttgtttcttgtaacaacgccatgttcatcttgtttgttcctaaagacccattttgtcccaatcacattttgcttgggtctttgaaccaaggaccagacttcaccggaagttgtccaactcctcttgcatggcaattatccaatccggatcacccagcgcttcttcaaccttaagtggctcaagagaggagacaaacgagtaaaattcacaaaaattgctaaacgggatcgagttgttacccctctcctgatgctacctaggatgttgtccaccggatgatctctttgaatggtatgatggactcgaggatggggcagtgatggttgtctttgaatttgctcctcctcctcatccacttgatcaagaggcacttcaccatcaacacttttatgttcatcttctaccacggttggcatcctttggggttgatgaccttcatcaagacttggatgacttgaggttgatgggtttgcttgggtggaggatttatcacccaccacctttgcgcccacatcaaaaacctcattagtcatccataaagttcctaactcatcatccttttcttgaggtctcacttcacctattgcaagcttctttatggcctcacaaggtggttcttcatttcttgcaatgtca

SEQ ID NO: 127876 - DNA, 359 bp, Zea Mays
tttgtcccaaaagttgatgactaaattattggccacccaccttgcagagattcaatgagatggttctctaagccagagtgcattcataaaaggtcggttcattcagactccatgttggtccaacaagccacaaaattccttcatcaacaaaagcatgcacgattgcttctagagttgaatatcacaaaggcctttgactcattttcttagcctttcttactggaggtactccaaaaattggtttttgggtagatttggagagacattatatgtggtctgctagctacttcttccactaaagccttggtgaacggtcatccaggcgagatcatccaacatagaagagggttacgacaggg

SEQ ID NO: 127877 - DNA, 656 bp, Zea Mays
cagagagggagggggagagaatagatgcaaagaggttgtcaggcggggcccactggtcgggatatcatcaaccttggccgcgcacacgacgcgagcgccatggccggagccggcgacttcatgcaggcagaggagggcatggggtggtggcgattggtaggagagtcctgccatgatggcgcggtgccgttgccagtgatcacccgcggcttcccaacagagctaggaagacgggggagagagaaagggaacttcggcgggaaattcacctcgtgtgaatctcggacagtggaggagctccgttcggcggtggcggaccacggtcagggacagcggggtggccctgttgtggtgaatctgaggcgcaaaccacgcgacggcgagagagctccggcgagctcgggcgcgggcaggtgcagcttgggtgggtgcactgaagtgaaagaaaggaggcagggagggaagtgggcatgtgcagtgacttcaaagggggtcagggcggcagtttcgtgttgggaggcgatgtgggcgcggctgtctcggtgtgcatgcgtgtggctcgcacggacgaacggttggaggaaggggggctgccaagatgggcctgtagggcagtggcacagacgtgtgtgcgcgcaacgggcagaggcgctgat

SEQ ID NO: 127878 - DNA, 320 bp, Zea Mays
gatttcgaacttcagtcagcagagggtttattggcagaagctgaagctaaaattgcaaagttgaatacggagcttctctcaaagtcagaaagcttcgaacaagaaaagcagaagtttgatgcaaaatttaaggctgaggtcgaaaaaagttcaaatttgcaaaaatcattgacagagcttcaaaacaaatgcctggagttcagtagccgatgtgtgcaatggttgaaacagatcttcaattcggttggagccggctatgaaaaatttagtccttcgattgaagacctgccaggggccttcgaacatatcgagggtgaaat

SEQ ID NO: 127879 - DNA, 952 bp, Zea Mays
atcttgcagaactgaatgaaggaagaagatgcttacttatgccgccggtttgccatcaattgcttatacgatcaccttcacgtacgttagggagcgtatcagtaagctacgcacaacgatttgtaggtccaatccaaagtaatcgaatgaaccctaattaaagctgcgtgatagtcgccatcctatatatcctaggagcactcatcgatcggacgaccacactttcaaaaaaatacataggaggagtactcctaccgttagtcggaggaagccggccggccggcagcagcactatactatacagtacacacacacagccagcttccgagacaaacacccaattcctcaagagcaacacacacacacacacacctccattcatctctgatcaacctatccatccatcctagcctcctccgatccatggatccgccgggctccaacccagatggagtagtaaacatgacgagggcaatgcaggccctgtccccttggctgaaccacccaaggaggacgatcgcccaggtggaaggtctgatgctaacggccgctgcgctgctgctgatccagctcttcttgggcttctacaggcggcggtgtcgcaactccttcctcagtactgtcctgcgggcgtcttccaagatcatggaggctctcatcatctacactctcggtacgatgcagtcctccccgatcaagaactcgttgtatcccgtctgggctgcttttctcgtcatggcttcggcgggcaccaccgccgtacaggactatgatttctgtggcagcttctacaacaagtacatggagggtttcgtcgacttaattaagtacggcttctacgtgaccatgttccgtctgctcattgatccaaacccttataccttgaaggcagccctgggcctgaagtggcatctcaagaactccagggcaagcagttcacgctgtgtcgtcg

SEQ ID NO: 127880 - DNA, 679 bp, Zea Mays
acgctcatgcagtatctcacagccgtccgcagcctcgagagacaattcaagggtttcaccctgtagcatgtcgaccacgccaagaacgaagaggctgacgcattggccaaagcagcggccgaccttgccctccgacgtgttctaccacgtcatcggcacacgagctgtccgcaacccagaaggtctacaaataactcaggacaccgaaggccaccgcatcatcaacctcatcatggccgaagactggcaggccctctgtacctgcaaggccactaccatccaagcgatcacaatgaggccaaacgactaaagcacagaagccaggactttgcattagtcgaggatcagctgtacaagaaggggattagctagcccatgctgaagtgcataactgaaaccgaagacatacaaatcctccgcgaagtccacagcggaacttgcggctcccactcaggacctagggccctcgctgccaaggtgattcatcagggattttactggcccacaataatttgtactgccaatcgagtcacaaggtcatgcgaagcatgccaaaagttctccccttgctgaggcagcccttcgcaagtcaccaagctcatcgcccatacatggccacttcaacgctgggggctagacatcgttggaccactgcctacagctcaagggaacctcaagt

SEQ ID NO: 127881 - DNA, 360 bp, Zea Mays
ctccgcaacgaacgccggcgaagccgcgcaccgcccgaaagctccggagccgttcaatcgcccggtaccccgcttcgcctataagcatcgaccccacgaactcatccgctcgggcccctcttgtttttctgccaccgccactccacgccagctcttgcgccgccactacccacacggacaactcgccgccgccggtgaatcttatcacccttggttgtctgccctcggggttgggttgtggaggagcgtctacacccgtagtggtcgttcgtggcatctgtgagtggaatcgatcaccaggcaaccgagaattgctcgccgcacttcatcctccatcgcggaaccgtaccaccgcgtggg

SEQ ID NO: 127882 - DNA, 337 bp, Zea Mays
cttggtgagctacccatgcttctcttccccctctccctctgatattctctatgcagtgaggtgcttcacacccctttttgaaaatccttcaaatcctatgaaatccctgtgaatcaagtgcatgagtgtgtgtcttgtcctctattgagtcttcctgtaggtttccatctccctttgggagggtttaaaccctcaaatagccatttcacccacaattcaaaatactgcatgccacatgttcggtgaaatgcccaaaccagttaaaattgctcaaatcgacccccaacttttaataacacactcctgccacttccagtaacgctctcaccaatttcac

SEQ ID NO: 127883 - DNA, 439 bp, Zea Mays
cagcttgttggtttggtaggaaagcctgataaaaggaacgacatcagggagagcatggatctcgatggagttcggtcaggggcgaagctccgcaaatgaagcatgccatgacggtgcagcctcgcagggcccaagatatttggttaatggttgatcttgtgccagtatcatgcaaaagtgctgataaggctgcaccagtgttttgtcatgtggacctaacgtagtggtattattatacaaggttatcctaacttagtagcgtgtgtaaccagtggcagtgatggtgctatggttggacatgaataagaagtttctgcaacatgctatctacctctctttagctctgtttagtattgacaagcaatgcgtcctaggcacctggcattgccatctatattggtgaaatatactttatcatatgagtggaagcaggaatgca

SEQ ID NO: 127884 - DNA, 506 bp, Zea Mays
ggggcacacaagtacactgaaacgaaagagcagagggtatgagcggacctgggatgagctagccacgatgaggtttcttttacgctggcgcaaagcagatttgggggaaatttggaattggcgagctctggtaaacaattgagggcacgacttggtggcttggtgcttgacaaccctacggacccgtcggtgtgctcaatttatagtgtgcttgagcggtggagttcaatttggacgaattgcgctagcggttgagaggggaactgagtcactggcgtggtgattcgtggccttcaccgtggtagacccactagtgatgagccaggactacggggcggtttatgatgactcaccacgacgtggtaaagcgttgaggcacatagcctggccggataacgacgaacaccggtgatgccagcgcgactgaccacggcgggacacgacggccggtgagaacagtggccggactttatctccagcgcgatatttcttaccgaggagcgcta

SEQ ID NO: 127885 - DNA, 620 bp, Zea Mays
catggatgattccatgttccgcacagtattcaccgaattcattagaagatactcccctcctctatcagacctaacccatttaattttcttttctagttagttttctacctctgccttatagatcttaaaataattaagtgcctcatctttcgtcttaacaagatagagctggcaatatctagtagcatcatcaataaatgtgataaaatatttcttagctgctctcgtcaaaattccattcatttcacatagatctgagtgaatgagatctaaaggtgccagatatttatcttccacactcttaaaaggtttacgtggttgcttagcttgcacacaagcatgacacttagatctcctaacaacaggaattttcagaatcaaattaagcctcgacaattagataatgcgatcaaaactaatatgacaaagtcgcgggtgccaaacagcaacctcgcctacattcaattcagaatatgaaactgagtttgccacattattacaatcatcagccactgaaaggcagaataaaccaccactatcataacctttgccaataaacaaaccaaattttgagacaataaacttgttcgactcaaacactaacttaaagccatcacgac

SEQ ID NO: 127886 - DNA, 376 bp, Zea Mays
ctcaggaggggatacgatcctgttggtggggccagagtcttattggcggttggcctgctgctcctgcgcgcctgttgatgcagttgctgccggcccgcctatggtcacgccgacggccatgctcgttttcacggttgaccggcccgtgacccttgcacttagcgcgtactgctgggccatgcgcggggtgcctcgagtcaccgcactgattctgaaaaacttatcttttcagttttctgcgatggccccgaggagtcgtagcattggcgcgagtggcggtgcgacttttctgcacccagtgaccgacgcgccggttgcatgacatgtgggcctaggctcccatgtttgaccaccggttgcagcgaagctgaggggg

SEQ ID NO: 127887 - DNA, 360 bp, Zea Mays
tgatctagaggtgcattaccaccctggtaaggccaatgttgtggcagatgccttaagcagaaaagcccagtgtaattgtatgagcatggatgtgggagttaccaccctgtgtgatgaattgtgcaaactgaacctggaagttgtttcttcgagtaacctaagctatatctcggtggaacccacattgcaagagcaaatagttcaggcacagcttggggataagggagttcaggttatcaaggatatgatcaaacaaaaggcagagaaatacaagtgtttccgacaggacagtaagggaattctatggtttggagatcgattggttgttcccaaggaccctgagcttagaaagaagatact

SEQ ID NO: 127888 - DNA, 288 bp, Zea Mays
tttcatttactgatttggaggattgtatgttcctctctttcctttgacgcttagtacaagcattatcctgcttagcagtcctccccctcttcagttgagaatatggttgaatgatttttcttggtacctccactcgactgggcgcattaacaccaggattcaaggattttgtgacaccattatagtcagtaaaggcatcagtcagattattagcaaaacgttgcaattctataattttctgaacttgatgtttagattcctgggttcgaggatccgaggacaggatgg

SEQ ID NO: 127889 - DNA, 327 bp, Zea Mays
tgccttctcaggcatgggtggctgataaagcattacctctccttaggaagaaccccaacatgggtgctaaagctatgcaaatatatttgcaggatgagtataatgttactattggatatgacacagtgtggaggggaagagaacgagctttgcatgaattgtatggtgggtggaatgagagtttttctttgttgtttaactggaaggtagactttgaaaagagatcaccaggaagtgttgttgagattgacactaaaattgtggatgaaaaggtatacttccacaggttcttttgtgcattgaagccttgcattgatggatttttag

SEQ ID NO: 127890 - DNA, 685 bp, Zea Mays
cttaagagtggtggagtgttgtgctatatgggagcgctgtgactgcgtatgcatgaaagcatgaaagtgttccagcatgccttgggaaggccttgggctcctccttttataggcgcaaggagaaggcccagttgtacaaggggtgttgctaaacactgtcgtggacggcggaggcgtgtccgagccctgtagcagcatggccggcggtgcagcccttgagtccgagccctgtagcagcatggccggtggtgcagaggcgaggccgagccctgtagcggcgtggccggcgggatagccttggagtctgtgctgcgagacgtctgatccgtgcagcttatctttgaccacgcagagagccgagggtcggtcggcagtatgggctcatgtccgagctcttcattatccggggtgaagtagatttgacaccagtcttgtcgtcctgtagttatcttatgctcgacggggtttccggaagataaggcggcgccgtatttcctgccagaacagtcgtccgaggctggctcgggcgagacggatatttttttcgaggccgaggctggggtaactactgttgttagtcacacccgggtggttgacacagtggccggagtggagaaatagtgcactgtatccgcgctgggactgtcagtatgggctgtaaaagtatattggaccggggtcatgt

SEQ ID NO: 127891 - DNA, 578 bp, Zea Mays
ggcagaggtcgatgtagaggaagcaggaaggcgaagcgtgtagaggggcccggggctgtcacaccgagccagaagggtcctggtggtaagatccttcacagacagaccaaatgggtcaaattccatagaacaagagttgtcagtagtgaattgatgggcggaaagaaggttttgaatgatgttgggggcgacaaggacattggttaagcgaaaaggaccgggaaggacagcggcacctactgaggtgacggggagggcagagtcgtttccaacaacaatggaagagggaagggaggggttgggagagtggaagataggatgcctgcgtccggggtggtgtggtaggaggcaccggagtcagccttccagtcagagaccgaggtgggtggggccagcgtcatcgtggaaaaggagctggcaagagactgggcgtcccacccattggtccagggcccccacacaggctgagacggaggccccgggagtgggaggagtccctgctgaggccggagaggagccgagggcgcagccggcggggaagcggcgaagaagactgggtgggaggtggcagggcgagg

SEQ ID NO: 127892 - DNA, 481 bp, Zea Mays
agataagaagtaaaaacataaaaggaatgcaaaaaaatttgtggattttatgacagcttcggctccttgagccagcccctctagcctcagtatttatgatttgactttaagacagtgctatttaatgtacgagcttcaaggggatcccttatgtattgttgatgtaaatcctaaattggaatggagaatgatccataggtacttgctcatatggtggaggacctggaatgaatggtggagtagattcccgatgactagacgaagcgctagttgaaacaatagagcctaaaggttgtggctttgactcctgatgttggatatgctacagaatgtatggtgaataatatgatgatgtacgaaagacttcctttggttgactttgttgagcgaataaagtaagctctttttgcttttgtattattatctggcaagtcttcgtattatggaccttgctttctccacagaagaaataatacatctt

SEQ ID NO: 127893 - DNA, 366 bp, Zea Mays
gatcccacggggaaattttttcgttgcgggaacacgtatgaggagctattctccgacggagaattctccattaccatccctagtcatcagagaaggtaacttcagctttttgtgttggcgatgagggaggcctcgtcatgggtgaggagttggccctgatgttcactttctttgagccatcgggattgatttttgtagcataaaaggtgggcgccaaatgttaggggactcgacatatgggtccaagcactaaggagtaggcgggaacaacaatacgcgacaaaacagtaagctgggttgaaaaatgtcttgtcaagcgtgtcccgtcaccgtcaaactatagtatatgcatttataggtaacccg

SEQ ID NO: 127894 - DNA, 513 bp, Zea Mays
aaattgcttaatctttctgccagcaaccttcttctgccaatggaggcaatattctttggcaaagatttcaaccaagggctctccaccatacgtagtcactacccacataaactttgccagctccaccatggtgttcggcgtgagatggtgaatctgaactttgaagtgttgcagcacttcgaagacaaaccgatgcataggaaagcgaaggccagcagtgaagaacgcctaaaaaacaagcaactccccctccaactctaggacctatttggctcctggagtgtgcccctcaccattcccaaaataccccaagcgctgcatctcgtgcacatggcctaagtaaatccttgacatcccaaactccacattgttccctggtaacaactccactacggccgctgaatcgctaaccgtcttctacgacgaggaagagaacgacataacataccgtctacgatggtggcggtttgcttcacgcgggctagttcactggcggcaagaagtggaaagcgc

SEQ ID NO: 127895 - DNA, 425 bp, Zea Mays
agtctctgagacaccccttcgctactttccacccagcaacaaaaatactcctgcctagaggaaaagacttcaggccttgtcagggagatcctaatgaagatgaccctaccgtagtctacatggccagatatctccatacccttgacaaccactatgacgaccttttctcccactgcacccacctaaattcacgggtataaagcctagagcaacaaatcaaggaattaaaggaagaaaaggcgtcccttcaagacaatctcgagatggcggaggcgaagaagccaacactcgtgaagcataccagactctgaagatggactatgctaagaaattaaagaagctcgcccccgccaagaagatccaaaagcggttcaagagccaaggatgccagactgaccgaaaagaggaagccccgccaacactgc

SEQ ID NO: 127896 - DNA, 598 bp, Zea Mays
ctaagcgcattatgaacccgcgaacgacgtaaaccgtaggatcgcgatctaacgtacatgattcattggactgaaacgttatcccctggtttaatccggcccgatcatcagtcgatcaacggcccacagtgattctttccccagatctaatcgtgtgcgcccaatcgcagatcgacggccccaaacgctgtcttcttcctaccatccagagctaggccggcggcaccattgcatacgccgcagcagcggacatcgccggtgtgaagtgcccaggcgccacagtgcactaacctacggtacggatagcatatctcgaagctaacacgatggcggaacaggggacgagattcacaccaccggtgatggtgcagagggtcgacgacgaggtttagcaactccacgaggattcctagctctggcaagttctcgggactatgatcgcactacgaccgcacggatcagcgccaaacagacgccacacgcaccagacccgatctgagccatgggcgacgacacacccaaagactgacggtggcgcacaaactcaccggttctctcttctctctcctgtttctctcgagcgctcagcggattcgca

SEQ ID NO: 127897 - DNA, 632 bp, Zea Mays
tttgcggccaaggggaggttgtgtaaatgatgggttaagcatttatttaacagatctccacggttttaacatggtgattgaggtttgcgtgaaaatttcgtccgtttgatgtagtgctaattgatgatatatttttggttatgccttgcatgtttgttcggttggatgcaataatgggctggttactatgtcgaatctgattacttctgattgatgcatatcctttttggctgttggctagcgaatgctttcagaaaccacctcttctgtttagctattttgggcagtaagtctagcagtgctttgtattctgtaaataggcatttcaaatgtattaattgctgtcattgcattataatatttgttttgggtgaaaaattcagtcttatctttgtcagtagatttcaagttttgttcatctcttccaatgttgtatagcattgtgaaaccagatggtggcattgtggaagtatttggtaagagttggtattgaacttcacaaatgtaacattgcacattctgtattgaagtacaaacagatgggatgattatccttctttatgttaataaatctgtatagaaacaaaattggtcattcaataatcaatactattctcagaattacatttctg

SEQ ID NO: 127898 - DNA, 1180 bp, Zea Mays
ctgtccggtggttcaccggacagctactgtgcgttgtccggtgtgcaccggacaggcactgtagactgtccggtgcacccatatcgcgttttaaaaaaaggcctccaacccgagaccgagccagaggctctcttttccctctgtgctctctggctatctgccctctctggtgattccccgtctgctcactggcggtgatcgtcggcgacgtgctcctgtgactttctccagcgtgggcacctctgcctcctctcggtgagcagccttgccttccctctctctaatctctacttcgctggtcagtgagcttgccaccccttgattgctcaaattccaaattccttccgaattctgtgaatctctgtgcttgaatgagtccctagtgccacattatatccccctgcaggttcctagctccttagggagggcttcatattctcacatgagcttttctccaaaaccctaattccctgcacgccacgtgctcggtgaaatgtccaaaccactcaaaattgctccgattgaacccaaacttttcaggcaccttcataacactttcagtaacatattcgcgcaatttcacgccaatccgatataccaggcttcaatttcacacaattccccgtttcggcgatcggttccgagccgagtgccaaaatttcattttctttgcctaaattcaaaccaagcacacacttcactcatatttacccatataaacctattcatgaagtatcggctcaattccacgtaatttcatgcctcaattcgaattccaaacctcctatggcactatttctcgttcaaacgtcgttttcgcgtcgtttgacctctcgattgccatatctctcgttttctgtgccataattctctgtgtatgtatttattcacatttcatatacttatgactatgtgactaatatgtgttcacctcttctatcatttcagtgaccttgcctgcccgtgagccgtctcctgtcctacctggattttcacctctcgtgtgagctttccaggtagacatccactcttctgatattctatcggcagttatcgacttgtgcttagcttctctctctcatttgcagtcatcaggtcaggatgccgcgcacgaagaatgtgtcggcgccagggggaggagatgacgaggatcctcctcacccctttaggtaggtcaagg

SEQ ID NO: 127899 - DNA, 549 bp, Zea Mays
ccttcttgtcttttgtttccccaaccatgttgttcttgtcactagagatgcttagcttcctcctcattgtccaaatgtcattcagagagcttgaaaacctcccaaccttgatcatagctatccatgctattatgtgtgcatggcttagtggtgttcgcttccgctaaagagggtggttctatcttgatatgataagggttccatgtaagctagtgtattgtctttccttctgacgtggtggtgaggactaaaccttgtggagtgcctatcagtgggacttctttgtctcccttctctgttgcaagagtgtatgggatgagtcttgagactatcatttgatagatagaggcaatattttgatagatagagatggtattcttgaacctagtagtcagactaggcttggaccatagtagtacaatgacataaaagtcaactaaagaacttggttatattgaagttggactcaatttatgtgggttatttcatcatccagattggactgaaaataaaaaattgtcaaaaatttaaggtgatcttctagcgcat

SEQ ID NO: 127900 - DNA, 508 bp, Zea Mays
atttaaatttacatgggtgcagtcctacgcagggaggaggttggttgaggtcttcgtgccttagagttcgttgaagtggtttttgctgaggttgagagggacgagcctgcctccacgatcggtgccctcggagatcgaagacctcttgttggacggttcgtgatgcaatgcaggatgccttctagatccgcaatgcaagagagggatccaaagaagaaaaacctccctagtgttgaagatggtcagggtgctgaagatgatagccatggagtcatcgtgaatcaacatcgcaccccctacatggcgcaacaactatcagcgtttttgacccgactatgcaccgcggggttccccacgtgaagcttttgggcagggcaacatcgttgattgcagctcgatggtacgtgtggatgcacctcggatcacacacaaaggtttatacagcttcggggcgttagattgtgtaacaccctacttccagtctaggctaagtatttaagtatcactg

SEQ ID NO: 127901 - DNA, 809 bp, Zea Mays
cacaatgcgaaatccagtccagagattccttcaccgtccatccctctgcgagtgagtgagtgaatggctggctgctgttaaaagccacaggctttgagcacaccaccagcagcgctgcagcagaaccagatggatggaaatggaatggagcaaaccatttgcctgcagctaggtaacaaaccaaagaatcttctcagaggtgaggagaaaaaagcaagcgagcgggctgggctggccctgcttaaagtggccagccactgagaaaaggtttcgcctttctgtttctggtgttcaggactcaggaggagggagaaaaaaggaaaggcgaaggaaggagagagatttgctatcacaacaaactgcaaaaagggagcaaaagcctgggtgtactggcagcaacactttggtccgtgtgcatacgtccttagcgaataactaggtcatcatcatttagaatgattgtcgtctactggacatcaacacctcggctccaaatgacgaagggcaagttcagaaatactcctcagacccaagggcaatatggggcaggggtttgttcaagatggttgcaagacacagccattaagttggccgattgagcagaagagcattgggtttgctgctaacctgtttgcatatggctgcaggggcagacgccagagagagatcagcagatggtttgactggcaggtcaaagattggagtataaaaatgcatagagtaaacactgtaacagacaggcatcactgaacaaatcgacaaaggtatgggcctgtactgtattttattggtttgagaagatacaacag

SEQ ID NO: 127902 - DNA, 760 bp, Zea Mays
tgaatggtctgaaacatggatagcatccgctcgtacatctactgctaaattgctgcctgacaatcctacacagcggccaagtgagcctgttgctgggtcagtgactctagaatggctgctagggctagatcgatggtaggatgagcagcactggaaccaccgacctcgtgatgatgtcaacaagatggcacatgaggaggaggtggtggtggaatctcaaggtcctcatcatattgaagacatatcaactactatgccctggtcctcaaactggtggatcacctcatccttatctcaaagctcaggggccaaaggatccaagggagcactggcgggattcgtaccctcacgtgtcaggtggtagaaaccaaacatcagtctagtggagtcaagagctgcctggagttaagggggtcagattagctgcgtgcagatatggcagaggtagtgcgtgtagggcagctgaagccaagcatggagtccatccaatattgtgtcctcaatctcatagatcaagaaatcaaccacgtcgaacacagagtgagataccagagcacccaggagccatagctgaatatgagtggtagcctctctgtatcccatccacggtagcaaggtgtgcctcatcaactcatataaaaactttgtcgctgaggtgaaatccgcaggagagcaccatgagctgtttgtgaaaggaggcctaaagagagtggtgacgtgagctatactaggagcaactccgccgtgagagtgacgagga

SEQ ID NO: 127903 - DNA, 360 bp, Zea Mays
ttctggccggaatatccgaaaagaccagcgtgccgagagtacagggacatacaagagtcggtacaagagagtccacagccaccccatccggcgccctcatcctgttttgcttgcccgcatccccgtcagtcattttggtgaaaaccgaaaagcgcctcccctcctgctctgctcctgcctctctcgtcactcgtcattgcggccgggcactgggccactggcatcgtaacaactgccgatacgcccgagacagcgcgggcggagccagcgagagggaaggccatgaggtcgcagctcaacgcgtccttctcgccgccgccctcgctccggcgagctctcccctctgccacgccccgcgcc

SEQ ID NO: 127904 - DNA, 337 bp, Zea Mays
tcataagatgcttcacatgggcatcctgcaataattcaccatgaattcataaaaccttagagcagttctctcttttgcctctatctaggaaaagcaacctctaactttgcctctagttctataggtcaccctttgttcttttactcttcgatgttctcgtgatgcacggaccatgagcacatggcctccttttcattacttgccaagtacaatgctcacttataagaatgttgtggttcatcttgaaaatcaaccaactacaaacaccaacttctaatacctacccatcattcgtccatggtgcccctcagcacgcatgcatgtagaaaggttctag

SEQ ID NO: 127905 - DNA, 407 bp, Zea Mays
tcgaggagcttccatcttcatgatcgcttcaatcttatctggattagcctcaattccccgatggctgacgataaacccgagcaactttcctgctggtactccgaaaacacatttttcgggattaagcttccatctatatcgcctcaggctgttgaaaaccagttgtaagtcttcgatgaagttttccgaattttccgttttgattaccacatcgtccacgtatgcctccacacgcttgccccagtgatcggctaagcatgtttgaatagctctctgataagttgctccagcgtttttgaggccgaacggcatggaggtataacagaaagcaccaaacggagtgatgaacgatgttttttcctcatcttctttggccaaactaatctgatgatacccggaatagcaat

SEQ ID NO: 127906 - DNA, 622 bp, Zea Mays
cagggaatccaagtttaaggaagatgataaaagtttgagaaaacatcaatgtagtgatcctcaaggagaggcaaactggaacaggaataccagcttgctccaaccgaacaagggtatggtttcggatgaacatttgaccataagagagctacaagtggattgtcaagattacagactcgagatccttgtttttaagtttgagtgcatcttaggtccaataagggaattacctaaacatctatttgtatttgcacgagtttggccatgtagtaggaatcgataattcaaactcatgcatcttttgaagatttagagggactttgaagaaatgacaaaattatgaattagatctcatacaatttcacatgttgagatgatgaggacatgacttggtctaattgctagaactccaataatcttgtgaagaaaatgatcttcacacaagacgacacctaggataggttgtcaagaaattaatacacgattagatcaaggttcactaaacagggacatgacctagctttgggtttatgcaaacaaactacctgcattctactagcacacaagcacgaaaacaaaccaaagttgcactagcggtcaaactaaaaagaatcacaggcca

SEQ ID NO: 127907 - DNA, 327 bp, Zea Mays
gtgcccacggatgagtctgtcgtgtcgccccgatctcgcttgagccctttcctagtgccccagactctcgtcgtggccatgcgctcacctccggcgaaacttcgtcgcggagtcgggcggcgctgccacgaaccggtcagcaacccagcccgagctcaccatcagatctcaggtgtccatctaggatctaacaacctagcttttatttaacccgacccgacctcaatcgtccgattcagacccggctgctcggatctgccccctcccccgcaccctgtagctgggcccgaccagttagtcctgcctccggtcactgacgccccctgg

SEQ ID NO: 127908 - DNA, 398 bp, Zea Mays
ttacaagaccataggaacacccagaaatttaaagccgacaaggcacacaactatcagctacgaaggaccagaacctgaccgaaccaaactactagtagcagcacagatacaacacatagctgaccaaaacaaagttcgcacagatcaaacaagaacagcaagcaacgttctagcccatagttttcttgtagcctggcgctaccggggaggggaaatatagcgaacacattgttgatgaaccaaaatagccagataacaaacataatttttcattggattcgtctgtcaactggcttccaaccacgagttttgctgtagatctcacacgccatccttctgattttgaggcttccttgctccaccagttttcttgccttctttttttgacgaatagccca

SEQ ID NO: 127909 - DNA, 536 bp, Zea Mays
agttgaaggtggccttagtggtggcctggtgggtgtgtcatgaagggggcgtttgttggtttgctcgattgcattgtcttcaactgcgaggggcaagttgctgtctgcaaggggagcctttcctttcttggtatcaagagccatggggaggcctgtcttgctgatggttttcatgggagccatgggtgttggtcttcaaagcacaaatagtgggcggcaaatgttgggctccactgacatgtggacaggtgcgcccaaagactcggaagctgacaagactcggatgcacgacaaaacaataggtggggaactgtagtgtcttgtaatgtgtttcccatccgtgtacagaatggggatatttataggtaaccgggtgggtaggtggtcccaagtaccattatgccctcggttacctgctacattcccggattattctctgcaacggggtcattacagtttagtaaagaacactgatccaaccacacctagaagtctaccccaaaggggcttacaagtgggaccatgccccaacttgg

SEQ ID NO: 127910 - DNA, 976 bp, Zea Mays
cttttcgtttttagaccatcacaaatctcccctgcaacaggaaaatcggatgtggaatatactatacgtcaaagcagctactaaccttctttaggcttcgttaggcttctaacaaacgcgacgtgggagaaaaaaagtatcgtagaattgtaggcggctcgaatgagaaaacccgaaacacggaattttcttgtcactggcccagagtacccactgagcgactgaaatggaccaggagcccaaacaccacacgcacggagcggtggtggcgacgcctaggcccagtccgtccccgatggactgataagtgatcatctgaaaaggaggaaggagactgcgaccggagcaaagtggcaggcagtctggcagcggtggagtggccatacctgatgcagccagccagtgtgtgcagtgcggcaaagaggccctgaagaagttgcataccatgggctctgagccaacgcctggaaagcgagctgcatttgtctgccactctgtgaatttggcatttttgagcatccccagtcttggccccagacccagagctgtgcctgcaatcaaagttgttgcttggatcgtcaggattaaaaagaaatcatgctttcaccgactgttcaggctttcgtttgcccttgtaacgggtataagactgaatccagatgtcctcatgatatccagtcgtcaaatgcgtgctccgtaaatgatcgatggacaactcacgtttgctgtctgaatatttcggtgttcagcgctcacagaaaccactggacatttattcagaaatgtgagcgaaacaactgcatagacaaatatatgagcattttgaagcagatcgagggccggtatgtagaacaatgtcacatcacaaacttggtcggattatgaactttggttgcacactgcatacacagacgtaagctgtaaaacaatacagcacacgcagacacttcagagttctaagttgttcagttgggag

SEQ ID NO: 127911 - DNA, 545 bp, Zea Mays
atcctcttttgcaagcatcaaagcagacataaaatctttgaaatactggcatatcataaataggggtggatccaagccatttttatggtgtcatgtgacaccaatagattttagtaatctccattaaaatgtatatttgactatttgttagcacttaaatgagttgatgatactataacttaatagagatgacaccaatggttattttgtctagatccgctccttcataattagggtccaaacaaacagcaactgtgctcccaggattgctcctaagaatgtcagcctggcactcaaatatcttggcatattgtcctctgcacgagttatatattcttctcatgacaataccctttgctctcttgatcttcgaaattgacacatcagcacccatgtcaagcagcactgtctgctttatatacgaactttccaagatgggtttgctttgattatgctctcgtatctatcagctatccttgtccctgtcaccaacctgttgtctttccttctcggacaaatgtgcacatcattaaaagtcttcactt

SEQ ID NO: 127912 - DNA, 503 bp, Zea Mays
aaggttctcacacaccggccacactatattgaaccagccacggtgcctgagttcgccggtgagacctctacggccaccgaagccagagaaccaactccactgccaaaaatcgaagagctggccgaagtgccagtgacagaaaagaaaaaagaaccgagggctgaagaagtaaaaatatcagctgaagaagtaaaaatatcagaaattttgagtccttcaggagaaatcgaggtaacaaaaagtcaaaaggggccaatagtgactccgaaaagaaaaagaatggttaatgtgctgggtgttttggagacaattaaatcttcaagtataactccaaagaaaactattgaaactcctgaagtgcctagtgaaacccttgctgttgagacctcgcatcaacaacctgaaactgaagctgggccttcagaacctacgaagataaatcccctggaagccgaaaaaccaaaaaggacagagccaatttcggttgaagaaactgacactgc

SEQ ID NO: 127913 - DNA, 298 bp, Zea Mays
ctcaaaaagacttcgcagctccccctcacctacactcgcaacggccggcaaggacaacagctcctgcctgccagccccgcccacacgaagccgaccgccgtccgcctcactcactctacgcttcgcaaccgcccttcgccgcctacgcccagcacttggaccaggcacaacttcagcatccacagcacgcggcgaagcctccgctgccgccacatccaaggccgcaaagtaatccaagtcctcatccgacgactcttcagtccactcaaccgaactcccagagtcaccaaaatcagaa

SEQ ID NO: 127914 - DNA, 1934 bp, Zea Mays
gcaggtgttcccttcctgttttcggacgcttttgccttatcttcctaggattagctcgggcgagacggacggagcggtggcgacctcgagcgaggcggagttctacctgaggtgggagacttttggggagaggcctcagtataagagctacctcgcctgtttcccctcgggggttacgcctttacttctcctgagtgcgttcttcgggggaataattcgggtatccctaattatcacccctgacaactttgcacaaatcagctatatgagaacaaaacacagatgatttgactacaatatcatcaatgtaaacttttacagtgtttaccaaaaactcgtgaaagatcaaattcatagtgctctaataagtggcaccgatattttttaaatcgaatgtcatgacaacccattcagataaaccaatgaagcatgtatatataaaggacattttagacgcgtctttctcggccatgaagatttgattatatccggcattaccataaaaaagctaataactctatttcataatgcattattaattaatatgacggctatagccatagaatattcatctttaggtgttgatccatttaaattccggaaatcaatacaactctaagcttaccatactcctccaccagcacaatattagagacacactctacgtatctgcaaggtctaataaaattagcttataagagccgatgaatttcgttcttaatcctagagagtaagtctggacgaattgatattggtctcggcttgaagggcctgaaaccggacttaataggcaaccgatgctcctctagctctcagcttaaccctggcatctcggtgtaactcgaagcaaagcaatcagaatattcttttaataagccgatcatttcatctctaggattgtctttcaaggtcttgttcacaaaagtcggcttttgagttttaccatctcctatgtcaatctcctctaaaggatcgcccgatgtaaatcgttgtcctaacttgtcgagatccctaaattcctctattttggttactttagaggagttaaacgctctctgcgtgactatggactatccggcctcagaggttggagcgtccacgataccggaatcgcgctatggcactctctggtagcagccggactgtccggccttttagaggccgaaccatccaggaaagggccgaaccgtccagcctcaggccgtctgaccttgggggccggaccgtccacgacctaggtatgctctctttagatgaattcattgtttaacctttacatgggatttagccgattctccatcaactctagcattatttaacctttacatgggatttagcctatgggcgtatcgtccgtgggtcgaaccttccagtcctcagggctggaccatccagccgtgactagtgccacaaatggtgctcaatagtttgtttggtggccaaggaataggagaggattaagggcttgtttgggagatagggaaatgaaggggattagagagctaaatttcactcgctatttaaaattgaatagggggagattttagctctcaattccacttggtctcaaacatgaagttggaaatctcttcctattcaaaatattgaatagttgcgctaccaaaccagcccttagattccgccatcacatctctaataaaaattacggtttagaaaattgtaatgatgtggattcagtctgtacaattgcaggatttgaagcctgtcagtagtgcagcgcgggtgatcaataacagaggcatatcgcacacgttgacgcgtacaaattagaatacaagaagtattttcaatcaatttagcccaaaaggaaataacgacttttcgacctcgcttcccaaatctgacgctctttggtcggcccactaggcgtctaggcccaacccgccattccatgcggtcatccaatcctaaac

SEQ ID NO: 127915 - DNA, 525 bp, Zea Mays
ttgtcctcggggatggcgctcgacgggccatctccaaggaataatgtggaagggccacagtcttgttccaggcatgacaaccgccggagtcaccttttctttttcttcttctcaacaggtgcagctgggtggttcactcggcgtgaacgcttccggcgggaacctttaggtttctagatttcctcatctttgccaaactcttgcctagtcacaattgccatcggctcagtacgggtagagtcagatgattgcccggccagcaggctaagtatagcgtccatctcagcttcatcagtgctggatggcatctcgaagtgagtttgcttctcagcctcaggaagattttgaaggggagcaatcaaggcctcaatgtcctctggggagggccacactctatggcccgggctaccatctcgagcaggaggattggagacaaatcagagaagggactattcggaggcaggttccatgcagagtaagctaagggagcaccaacattcgagactctgccccttagtatcttat

SEQ ID NO: 127916 - DNA, 387 bp, Zea Mays
gtcggggttaatcttgcaaaattatccagacacaggattggttcgggtggacggcgggttgattcctaaattcttcggggactcattagcaaattgacatgactgaaagggtaccgcccgctctgagccatccgatcccacgcggacgacccagattttatttaacgcgatctaatctactccgttgaactccagatggatggcatggagcttagcttcaatgcgacgactggaagtctaatctccaccgtccaacacgtgatcaacggcacacgggcacacagccttccccctttccccacgacccctgtcacggcggcgcatcaccaaacacggcggcgccctcgctggcgcaaacgcgccgcccgattcaagacgtgatttcgc

SEQ ID NO: 127917 - DNA, 344 bp, Zea Mays
aaactaagcaatagaaaatattaagttatataaatgtgttatcagatacgcagaggtagtgtcccctaatttgtttgtcatgtcccctaatttgtttgtcagagctacttgaggatatcaatgaggtatggctccgctggttcatcagtattcagtaattacaaggcattatgagttagcatgctccctcctgctgagctagctaaatgtgttatcaggtctcaataagcatccatttttaaaagtataaattgttatagccatacatgcaagtctttattttggaaataaccaaaggttctgaacctgcattgtgctaactcgtcaatcattcctgaaatgcg

SEQ ID NO: 127918 - DNA, 1454 bp, Zea Mays
gacgaccagaggtcgaccaggaccgattaggtcgactaatcgtcgccctaatcgcgattagtcgcctggtcgcccctctcactcgaccagctggtcgcccgacttgtaaacattgtgtagaagcatgtttggatggtgggttagactactaaatcattcagattggacctttacatatggaaaatttaaaaattatctcctgagccctgactaaaaaaatcgacaattatcgggcacatctggttcatgaacacatttcctgcatgataacatcgcagttgtgaagtccgccagcactaggtcacttgctcacccgtaccagtaccatcatctgccaccattgccaccttctagcacattgatttgactcgcatcttcagcagtgtcttcctctttaacgtgacatgccttgattcatgccgtcgattctctcacatgtttcattcatagggcagaactagagcctctttcatttgtcattttgttaacagtgtagattctctcacatgttttgccaccttggccatgaatgaaatagctacgaaggatttccttgttgctgttgtactatatgcaatgctagatttgtgacgtgaacttatatgcgattaatgtcattccaaccttggccatggttccgttcaaattcaagcatggctttgctttgttgcaacttgcaagagttacttcccataattagtgaatgactagatggtctcttttgatgtttcttgttcctttaacttttgtacttaagttgtcttctgctattagtattaaccagtaggggcacaaacccttcctgtttcttcaaaaaaaaaacttatatgctattggcatgcacattgtttctagaagatgttttataaacaaacatgtgaaagctatttgagcttctatctttatgtctctagctgttctatttgctaattatttgaccatattaactgaagtaagaggcagttatccctgctttagtattggcttgcttcccattttaaatttctaaatagcttattttgctaagttgttgattggctagcactttcctagaatcttcttattcattgaagattcatagcatctctcaggtgaactttataactccaagatagcttagtacctcatactggtcatgaatatcaagcactagccatagtgatacatcaattatgggttctgacttgaccattggttctgccttaaagttcttccgtctcattacttcatctttagggcttgtttggctacactccaatccccccaatccatatgggctgggagggatttgaggtgggaaatgaactaattttcctatcaaacaagcccttatgtggtgtggaacatcatgtcctagcttattatgtgagcaagattgaattttccatcttatagccgtttaaatgaaaactattctgtcaaacctgtgtgagagcacctagaggggggggggg

SEQ ID NO: 127919 - DNA, 391 bp, Zea Mays
aattacccctacagccattattaggatgggggttttcatttgggccgtgagaagccaagggctagagccaagtgcaaaatggttctacaatatgcacgagctgttgtatgagacgaaggctactagtaaggagcagtatcacaacaactttggttgttatggcttcgtgcctcgccctgatgtaagctatccagttgcaacatttcggaaaaggtgaccaggagcatggatggaagaatggttttatgtgaagaataacttagttgagagggaagatataaaaggaattattcaacaccccatttggtctcgctttggcatcaggaggccagccaccgctcttgggaacgatatagaagcatgccagagaagcttcaacactgtgtgtact

SEQ ID NO: 127920 - DNA, 455 bp, Zea Mays
ctatattccatgagttccctatttccgtgccatccatttgagtaagacgaaatgatctaggccgagtgacttctgctactatgaatggtccttcccatagtggcgataatttatgccgcccctcccccgctagaattcggtggaggacaacatctcccactgcaaaggatcgatgccgtatagccttatcatgatagcgctttagagtttgctgatacctagctgactgaatcactgtattcaatcgttcttcttctagtatatcaacgtcctccagtctagtagcctcagcttcagatatgttttcaaagaccaatcttggtgccccaaacttgagatcagcaggtagcactgcctccgaaccataaaccatgaagaagggagtgtttccatgcaaagctcggctgggttgagttctcagactccagaccacatacgacaactctctgatccac

SEQ ID NO: 127921 - DNA, 642 bp, Zea Mays
tgggtaggcaatggcaggctctggagacttcggtggtggactcggcatggtcgaagaggcaccggaggcacctgaccacgggcggcagtggtgtagttgcaacggtggccacgggcaaagggctgggagcacaggagggagtgtgcgggcatggatcgatagtaggggctcgagcagcacatagaagagaaaggggaaagatcgagctccaaatcgcctcgcatccaaggaatcgtcactctggctgaccttccatccatggtgcgtgagaaaggaaagaaattcacctcggtaggaaaggaggagggcaccgaatcacacggaaaaggaaagggcagatcacctgcctgctccaattggtaatgaaacgatgggagcagccgtggtgagggcggcacagcgcgacgtcgatcgaagcacgcgcgatagggtggggaagaagcactgggcaactgacaggtggggctcggtcgtcaaaggggaaaaagaaagagcgggcgcggtctgatgggctacttgggccgaaatcggcaacaggcccgctgggggagcattcctttttcttcctttttcaaaatccttttctttttctcttttattttctttggagagataaacacatatcttgaaattctagaaaac

SEQ ID NO: 127922 - DNA, 413 bp, Zea Mays
tatctcacaggggcagggtagcagcagtgttcgtcctcgctatgttccgccacagggtacactgactcgatcaggaggaccacgcccagctcagtacgctccataggggtctccacggacacctcccactcgtcaggctactcccactggcacccagactaggtctacaggatagaagaccgaccctacatgcttcaagtgcagtcagattgggcactatgctaatgcttgtccgatggggaattctggtacactagctaagaacaagcaacagactcctggcaagggatattctatagccagggttaatcaagtcagcgttgatgctactcctgatggtgctgacatcgtacttggtatgttttacattaatgccattcctgcaaccatattatttgattctggtgctacac

SEQ ID NO: 127923 - DNA, 762 bp, Zea Mays
ggaatttggaggccgccgccgccgtggggctctgtcacgccgctgcagttgacctccgcgttgtgctgttgtacgtgcgagtaagggaggtgcttgagctgcagcatcgcgtggcgttgctacgcgcaacgttggccaacgaattacgacctcgtccgcgcggtattgctcgccggagcttggcatccgccgcttaccgtgggcggggctctctgcacttcgattccaggtaaggaaaccctagaccatttcgccttgatctcagtaccgtgtagcgcgtttcaacttgcgagttggggcactggttcgccgattggatgaccacggcggagcgccgccgtggggatcgcggcgccgcgggagtcctgtgtccagaggtgggggaaggatctggggtcgtcgatgcgtttatgctcggccaagatcagatcgggataggattgtcgtgcaccgtcggatccacggttgaccgctaggatttaaagctgcgtatcgttttgctcgggcagtctgagaccgtagatgtgagatcctgcggtagaaagcgattctgggttgcattaaacgcctaccgttagatcgggatcggagggggcctggtgacgtaccgattcataaggctcggttctaatcgtggccgttcatgcatgatctggcggccagattcagaccataccccttcgccatacacatttcatagaaaagaccccctgttactttagaataaacccgccatcctcattcactattcactgagtcttg

SEQ ID NO: 127924 - DNA, 792 bp, Zea Mays
gtccttctctaataaacaacgtgagcggtggcgcgactctctccaggcttgcacggcagcacgggcgacggtatggccctcttagcttcacacaaggcgacacccttgctcctcaaccatgatgagatctaggataactttgccgcataggagctctgtgaaagagcatgcatgcgtctgtgaagctggcgttgtagggctgaaactcccgtagtgtgtgcactgatatgatagctccggtggactcaaggagctagatagtggtacgacatcaatggtgcttcagcctgccaacgatgctatgcaggactagatagagggttacggtttagggtttagggccatagtatttgactatttgtgtgtcctgagagtacaggctagagtatcctaaaacagaattattatctaagtaacgagttcgttgtttcccctagttcccaacttcccatctccctgttcttcctctcccaaatctgattccctcttctatagcctacttccttcatatgtggtaacatctggtattcggaaacaatcgatctggattcatggatctcttttccacatcgaccgcgatctatagccatggagacatcagacaccacgacatgcaaggtactcgatgaattgcagatgatggaagcgcgtcttacagagaagattaatggctgttgtgacgacgtcgagcgccatgtggacgcgcgatgcgatgaactccacaaccacttcacggcacactgcgacaccatccgacagcaaatggatgtggtggctctatgtggcgaggag

SEQ ID NO: 127925 - DNA, 1359 bp, Zea Mays
gtttgatgtttcatccccatagctcgcacgaatttgacttgtcttatttgtacctttggctccttacctttagctacactgaaaattcacatggacaacagaccatgggatggtgaactgtttcgctggccctggaacttaactgaaccacctctctgttggtaaactggcaggtgcgtcatctgtctggcggaatacgaagagggagacgagctccgcgtgctgcctccctgcagccacaccttccacacgggctgtatcagcctgtggctggcgcagaactcgacgtgcccggtctgtagagtctcgctgctcgtgcctgatactagtactacccctgaaagcgaacactctgcaccccatcctcctcctcctcctcatcatcatcatcatctgtccagcatagtgataataagcccaccaagctcccccgaaccgtcgagatcggacccgtgccgatgcctgttcgccagcggtggtgggcactcgtcaagggcggcagaggctcctcctcctcctcctcctcccagacacgagcccgaccaggtcgtatctggtccaccaccggcagcagatggggctagcggctacagctcgccgttgcctgaagttattcaccccgctcctgctcctgaaaccaacgggcagacagtacggaagcaggcgggcagcagatctactaccccgctaggcccctgcaaatagcggccgctcactctgtgtgggtgggtggggtgaacaggtggtgcgtggtaaaagcgaagtagagagaaacaagcgacttgaagaggcctgggttcgttcgtgtacatacgatcgagaaatcgtttcaggtcattcattcatccattcattcatccatgggcacatactgtggtattacggagtattacggtgtacgtgtagtgtgccgcaggagagacgacgcgacggcagcagtgcgttttccatatgcgacgggacgggagcattcgaggagatgatggcaatggcatggttttgtgtactgtacggtaacatttgtcgctgggaattaataataaaaaacccgtggctggctgatgcagcagcagctgtcttattatccagccacgcatgtgaaaatttcttctcgggcagcagcagcgtgatcagtcgccaccttgtcagcttgtatccctctgctgtaggctgtagtaccatgtggtctgaatccaatgcgacgacgacgacgacgccgcccagtcggtctctgatgaacctgagattacctacctgatcttgctactgccagggcgcgcgatcaacattccatttgacactggtaactgttggcggtggtgcacagtgctgactgacggacctgcctgtcatccaggg

SEQ ID NO: 127926 - DNA, 375 bp, Zea Mays
gtgccgggaattagatctatgtagaactccacttctctttctggcagcattcctggcaattcttctgggaatacatccatgaattcttctaccacatatatgctttctgctactagtttaaacaccattgggtctttggcgggtggttgagcctgacatgaaactgactttccttggtggtcagtgagaagaacggtcttatttgcgcaacttatgatgcccttgtgtttggttaaccaatccattcctaagatcacatcaatcccttgggatggcaagacggttaagtcggccaagaacactaccccacttaaaagaattctgacttgggagcatttgagctggcatataaggtctgaccctagggttcaggtg

SEQ ID NO: 127927 - DNA, 583 bp, Zea Mays
gatttctcgcagtcgtgaagaacatcgagttgcaaattcaaagcaggtgtcccgaagtactcttaaagcttcagacaatttggaacttttttctgcttcggctttaatcttttgcttcaattctttggcttcatgctcaaaacggattacaatttctttaaaagttgaccttacttgatcaagttctttgctcaaccattccaactgtttgttttgatcagaaatctgtatggcttggcttgcccaactttcatgaagcttcggaataccaccacttcatttttctcagggagaggaacgttgttttcacctccaatcctcactatagacacatcgtgaaaatacttgctcttcatggcctcaacatgtcccttcttcatagttgattttccaaaaaccacatgacttggcctccatagtcgctcttcggcatcaactgcaccgctatcaacatcaaaatcctcgttgtcctccgaatcttcagatagcccagccaggatctcatcagttatcttatcttttcaatattggtcttctccatggcttcgtaaaatccagccaatgcggggtcttcgcttctctt

SEQ ID NO: 127928 - DNA, 300 bp, Zea Mays
ccattagataatgtctccatatcttcagagcacggactaccgctgctaactccagatcatgtgtgggataattttgctcatgaggcttaagtgctatggatgcgtaggcaataactctgttgtattgcatcaaaacacaacctagtccagtgcccgaagcatcgcaatacacatcaaatgatttggtgttgtcaaggtgtgctagcacgggtgctgttgtcagatgtcacctcaaggcgtgaaaggcatcttcacatttctgactccaatcaaatttcactcctttcttcaacaacttag

SEQ ID NO: 127929 - DNA, 419 bp, Zea Mays
ccgaggtctcatatgtaaaaagtcctcaacgaaggggtacgggtgaagattggccgctggatttgagatggaaggctcaggttaaatcgagcaccaccccgaaccggtatcccatgccagcggatggatctcgatccaatggtcatctattagcgtaccagcgccagagccatagccgatggatccaagatcaacgaaccaggatcgatccatcgaagggtatgcctatatctaatcctagccgatcacagtgggacggacggccagatgcctcccattatcctcccccacgccaacacctgagcagaggcggtgccgcccagcccatgcgacggcgccatcgccggggttgtgcgaaattgagctgcggtgactaattctctggtccaaatgaagctatgcatagtggggaccgaggg

SEQ ID NO: 127930 - DNA, 434 bp, Zea Mays
caaaacacacttcaatggtttctcctaaaccgtgaccaaaaagcgttaaactgcatctctgcatacttcaaatcacacttgctaggactcaatacaggggtaaaaactcttaaccacggaagtggatgcaacctataccctaatcattacaagggagacgaatggatccgtaacagctagatacgagagatatgcaaacgagggcgtcagcggaggagattgaagagaggggtgggatggaggagaggaagatggtacctgcgaagacgacgagatgcgatggtgggacgagtcgtagcttgacgatggttgtgggatttgtcggcagagttgcggatccgtagtcgaacccctagagaactgaaggatcacggagccatcgaaacgaccgccgcggcagaggagaaagaagagagggtcgacatggatgagag

SEQ ID NO: 127931 - DNA, 619 bp, Zea Mays
cttcgcgctgcatgtcagcaattttttgctctatctctttagctttttgctcctcatctaggatcatttgtctgactctagcctacacgttggtttgttgcctcttggctgcgagtatctccctttgtttttataggtgattgttttttatgcgaagtgctcgtaatttgagttgatcttcggatgagatgcctagtacttcgccatcttacgtgatgtcttcggcctctatggggtaaaacctggtggaacatcttgagggaggtcttcaaaactgcatgtgtgaacggtgcctttgagattgagagggttttctgtttgggggatgttttctatttattgctttgtcattgttctcaggtgtggcctaaggggtgtcatcggtgagggctgctttgcccttcttttcgacgagggtcgccttcacagcgtcgtccagtgatgagttggctctagttgttgctttcttgggggccatcgcgggtttgttctttcgtagcataagcggcgggcgccaaatgttggtaccttctgaaacgtggacatgtgggcccaacactcgagagacacgagagctcaggtgcacagcgagacagtaggcagtgaaagggaaatgtgc

SEQ ID NO: 127932 - DNA, 361 bp, Zea Mays
cccgccgatgccgaagctactaccacagccaaagccgagaatctcgcaaccaccctgttggaaatcgacatatttatatcgaatgtggttgtggagaaagatgtagctgcagtgacctctaataaggggaagaaaattgaagaaacttctttggaaagcatgagttttgacctacggcacctgggcggccaacaactttctgaagaagacatatcagaattaaaggaatttgttatatcctgcagctactagcctggatcaatgctctttgacggggttgatgaagaaattgtgggatgcattcatgaccgcgccagggcaaaaattataagcactctgtccaagagcattggattcccga

SEQ ID NO: 127933 - DNA, 327 bp, Zea Mays
gtagtccgcagtcgtgtttaaggccttttgtttcagcttttttaccttatggccaccagaagctgttgcagactgtcaaatgattagcttttcagcccgcttctacgagaataactttagttaaaactgtccaaaatcaatgtaaatacagaaccgaccgagtcgttgtaatagtaggaaatcatcactttctacctcctaaaccctatgaactctttatcttcctccgcatgtaatctctgtgatacttagattgtctccatggtcaaattctctctgcagccagattctgagaaaaaagttgaaccaaacaggcccttaatccgt

SEQ ID NO: 127934 - DNA, 703 bp, Zea Mays
ctgcatctcagtggtgcacagtgaaacccacagcctcgatattcgtgcatgagctgatattgaatggatgcgcgaccgtatgcacgatctgctagtaacggtatattttgtgcgacgctctccctcccacaaacgccacggaaccgcatccgcaatgttgatggaggcagccttagaagagcatgtatgtgggacattgtttttgtggctaactaccacaagaacgtgttgcccttcagtcatcagtagtcaagtatattactcagctgatttttatagctcattatctttgattaaataggtgtgatggatctgtattgccagagggtttaaggaattttcactgtatgggttatcgatgccttttttaaaactcgctagaacattgacatatcgtgtaaggctcgtatatgggcaactacactttaccatgtgctcaagcgcagctgagactgcctgagaattcatagaactcgtctactatggcacacgcaccctatacacacccacaccaacagtccctttgggaaattccccggtgcgatacccaccgttcgcctggactgggaatcgaacgtgggtggcaatcctggccactgccagcggtaaatcagtttctggcatcagatgaaaacaagttggtgataagtagatgcctttccttgctaactattttctattgtccttgaattcattaagttgt

SEQ ID NO: 127935 - DNA, 999 bp, Zea Mays
gccaagtgcagcatcacatcaaagaaaggaggaaatattttctcaagtttgcacaaaatgattgggatttcaactttcattctttgtaaaacatccaacttcaatgtcttagcacataactactgaaagaaaatacctaattcagcaagtgcttcatatatgtccttattcatgattcctctaatagcaacaggtaaaattctttgaagaaggatatgacaatcatgagttttcaatgcttggaggttgcatccataagtactaaaacatgttgctaagttagaaacatagccatcagggaatttcacacttctcaaaaagtcacaaaaagcaaccttttgtgttttattcattgtgtatggtgcatgcggaacactgtatgagtccccattatgctttaagtgtaaatgtttcccctattcccatgtcctccaaatcaagcctagcattaatggtgtcctttgtctttccaacaatgccaataaatataccaagaaagtactcacatatattttttttcaatgtgcattacatcaagattgtggtgcaacttcaaacttgaccaatatggcaaatcccatagacatgatcttcgcttccaacattgaccttctactttcctctttctctttttgcttttagtatgttttcctggtcttacatcttttaccatctccaattgttggagcaactcatctatgctaaattcctctgctagcttctcacgttgttcactatgaccatcaaaagttttatttctcctccaaagatgatcttttggaaggaaacgtcgatgataaacatagcatatcttgttccttattcttttggagcaaggatttttgtcacaatgcacacaagcgtaatagccttttgtgattcggcctaataatgtgcttagagctggatagtcgtgaatgcaccatataactgcagaatgtagttcaaaattgtttccactcaatgcatcccaagtagtgacacctttccaaagctcca

SEQ ID NO: 127936 - DNA, 333 bp, Zea Mays
caaagctccttcaggccaccagccccaagaggcagaggagggcaaagcttcggaggaagattcagctcttaaccaagaaggttgttttgcttgttctgtggagaagataaggggcatacaactaggacatgccaagtcacgatacagaagcaaaagaaaatagttgaggctgaggcacgacagaatcagtcgaagcaagtcctgcatactgtttcctgctattccccatacattcctgagtatgtgggcaatcaacaaccattttgacaacccacagtatcagtagcttcggcaagccactccccagctgcatgggccctgccaccaccacca

SEQ ID NO: 127937 - DNA, 537 bp, Zea Mays
gtgccttggaggtaggtgccgatggaatcttggggccattcaccgagttggagtaggttggtccgggtgccttcaactgagggcagttgttcttgaagtgactggggtctccgcagtgccaacaggcgtttgctggtggctggttgcttgcaacggagggtgcctgaagggagctctgactctgttgactatagcgtgatggagtgggtccagatggtttattgaagtttggtcccctgggtggaagcccaaagggtcgagctctctggtgacgttcttgctgttgcgctcggaggacttggaatttcctcttgatgtgccctttttcttcctcttttgccctttctacttggatagctttgttggagaggtgagagaagctgtggaagtcttggctggcgaggatggtcttaagctcgggtcttaatcctttcagaaaacgggccatttttctggcctcggtgctgacatcctcgggcgcgtagcgggccagctctgtgaacttgtgcacatactcactgactgtccttccgcctt

SEQ ID NO: 127938 - DNA, 506 bp, Zea Mays
gtcgctcgcaaggtattgagggccctgtgtcagatctataaagaagaagtggccgacacaccgcttagattctttccgccctttcagagaaactgtcctgtttggatggccaggatgcgtgcatttgtagggcaacaaggtcttgaggacgacccctcagtcacgtacctaactacatacctgctcacactggaggcacagtatgatttcttggctcagcaccaccgtcagatgattgcccaagcagaagatgcagagaagcacaaccgtcagctctatgtggatctcaccatagctcaagcccgtgtagctgccttggaaagtcgtgaagtcattgttgttgaagccctgaagcaagccaaggatgagcacatccaaaagttgatggaggcctacttggtaacccataaccaatgtagagccctgcggatccaagaacccgcttcatccaacccagttcaacccatgaaagctgaagatccccagattcttgaaggtcacccggg

SEQ ID NO: 127939 - DNA, 347 bp, Zea Mays
ctcacgtagcaggagtggcagactatggccccaagactgagaggaggtggctcatcatcatagggcccaagaggaggtggcacatcctggctgacgaaagatcaatatgcatagtttgctccatttgagatgtggtactatggtagggaagacaacacgtgacctaagcatcagcgacgctacatgtgggacaacgatgcgagatggaagcagacatgttcaaatgccaggtcgggtcaggtcgggtttgggttggtcatgggttgtttggcatgacccgtgcctaatgtgtagtcggttcgggttgggttggcacgtgcctctttgttggacgtgttggatcaggt

SEQ ID NO: 127940 - DNA, 422 bp, Zea Mays
ccgcaccatgggacccaccgcgcactactataaaggtgtcagcggcgaactagcaacagggggttcgtatgacgaacgagtgagacgatacgccataccaggagtacggctaagcacgaccctacggagaagacacacgacaacccggaggagtcgatctctctctcttgtagaaaacaaatctcctctgtaaggtccaacctttgagctataaaagggtagtctctctttcctctagggacacgagcgcacttgttgtaacacactcgaaagcaatacaacgatcaacattgcactggactagggtctcggccggaaccaatataacccatttgccttaattcaccgctcggatctaggtgatccaccatttagagtgagtccccgcttgtatcctccaccaaacacaaatttattgttcc

SEQ ID NO: 127941 - DNA, 513 bp, Zea Mays
gtggaccacagaggcacaagaggctctaaaggcactaaagaagttcctaactacgtcaccagtgctcaagccaccacgccgagccacggcgtgtcaatcgatagaagatctgttgctatatatatcgtgcacaactcccgtggtaagcacaacattagtagtcaagcaggtggaagaaggacacacatacctagtgcagcatccggtctacttcatcagcgaagttctcgggccctcaaaaataaggtatccccaagtccagaaactgctgtacgcggtgcttctaaccgctcgcaagctctgtcactactttgacgaccacaaagtcatagtagttaccgggtttctaattggggatatccttcacaacaaagaagccttcggaagaatagccaagtgggcctgcgagctgggagctcatgacatagagttttggcctcgcacagcagtaaagactcaagcgctagtggacttcatatccgagtggactgagcaacaagttcctgacaaccc

SEQ ID NO: 127942 - DNA, 382 bp, Zea Mays
tggatgtcttttgtggattgtggttgtgtcatgtccatgatagcctaaattttgctcagattggcttcaattcctctgtgcgttacgaggtaaccgagtattttgccttggcgtacaccaaagatgcatttttctggattcagccggagtcgggcttcacgcatgttggtgaatgtttctgcaaggtcttaaaggtggtcatctttgtttttgctcacagtgactatgtcgtcaacatatgtgaagacgttgcggcccatctggtcctcaagaattttttttggtgagtcgggagaaggttgagccggcgttcttgagcccttcaggcatccgcacgaaacagtacatgccgaagagtgtgatgaaacttgtgctagccttg

SEQ ID NO: 127943 - DNA, 871 bp, Zea Mays
atctgcaactgcaagtctcacctgccttccgcaccatcgtctccgacaattgccattcggaattggaggggcctctaaattcggaggggatttgagtttgtagactagtcataaagggaaataacgatgtgagacgactcctacacgaggctagtgaacatcctgatgctgatttgagcttgcgattaattcatctatggagccgcaatgaggagattggagcttctgtgacggtgctggttcgctttagtcacgaatctcatcgttcacctatgttttctcttcttcccttcgtggagcagaagttggggttccctgatccacgcttggaggagactctagacccttctctcaggttgttcaggctcctccgcagcccagcttgaatttggtgttccgaacaaagcagtgatttaacattgcatattacagcaaatattatatgccatcctttctcttgttagtgcaacattgtttgtttaatgaccacttgtgtagtgacattatgcccaaatgcttgcctcttgaaaaagtgtcttccacaaaaactgaatatattcttgtctagtgtacttgttaattcctatttaaatttaatctgcaaacttttttgaggaattgatttctctccagcattccaacagtttccatgtactaataagcataaagtcactggttgcatgcacctgctcttgatatgttgaatactattgtactaaggtataatcactggaagaggaagactgcatatctaggttgtaatgtattatttaagtacccaattttctagggcacctgttgaaaatcgcctgaccaaattctcactggatagttcgttcacagatatgttagagtatagcattcaagtact

SEQ ID NO: 127944 - DNA, 568 bp, Zea Mays
ttagaattaatagattcatcttacgagtttaatcatgacttatatatttatggacaacccctaatttaggttaggccaggtatgactatgttaggtgaggaattcgtttacgcaacaagggacgttcatatgatgagattatgcggcttgttgcataaactagagtatttggggggcggtcggtttccctggattcagggtgttgcaccgcacggcactaggtggtgggaggcaaattttaatcagacggaccttcagataacgtaatgtatgcctccgcacgtgcagtcgcttcacgttttttggtggaacccgtctactacgctgtagtacgtacgtacataagtacgagagcaaaagatacgtctgtgtagtctgctttaaagctgactcgtatagtatatctctcgtttgacttgtgatataggtggcttgaaagtgttcagtttcatatacaattgactaaaaaaatcaataagtctgagagagagaaaaaaatgaattcattttcttgtactgtattccaggatgcactggccttgttcctcgatcgttccatttgacctag

SEQ ID NO: 127945 - DNA, 571 bp, Zea Mays
taacttcttagtgaacagccctaagggcacttactttttagagtcaattgatgcattaagtgaagtacatgaatcatacatgcttgttgatttgctagagaaaaaagttgatgagattgggagagacaaggtggtacaagttgttactgataatggtgccaattacaaggttgtaggcaagcttctaatgaaatggattcctacattattttggagtctatgtgctgcacatttcttggatctaatgttggaggacatagaaaacttgaaggaattcaagaaaccaattgcacgtgcaaggcgtgtgacaactttcatgtatagacatgggagaatccttgctgccatgagaaaactggtggggctaatcttgtgaggcattatgccactcattttgctacttcctttctcacattgaatagcttgtacaagcacaaggatgctttgaagtctttatttggaagtactatttggactgataatagattggtaaagactagtgttggattgaatgtgtatatcattgtcttctccacacagttttggaattcagtagaagattgtcttagag

SEQ ID NO: 127946 - DNA, 307 bp, Zea Mays
gcgcggccgggcgcgcacctggccgagacagacgaggggtgctgcagggcgcccgcctcagcggctccagcgccggctagggtttaggccgccggacacgcgagccgacctcggcggcggcacagcgacagggcaccaacagcagctgctgcaccaccggcaccggcaacgccaccgcagccaaaagaatccgttggcctggttttgttatctcgcgatgggatttggtttggtgcgcgctgtcactctgtgtgggggagggaggaaagcgaagaggagggggaggcgccgaaggcccgaagcgccg

SEQ ID NO: 127947 - DNA, 592 bp, Zea Mays
gccgattttgttttcaagaacattcagccactaaaagatagagtgtatccagcttatctgtatcgaggccttgatgattcaacccgggttaccaacagaaggattcctgctgtggatttggtgagccggcttgagatgatactcagaggcaaggtgtctaatatcggtgctcctgttgcatactcagcctggaatctacctccttccaaggccttcatcagttttgtgtcaaatcctcctactggtgatagcggtttgggccttagagtgcaaccttctcccgaagaggttgaggcttttgttgcttcacttggcgaaatctttgacaacgagaggcaggttcatttcgaggtgcctttgaatccgagtgacgcagaaataagtgccatgctggacatgttggctgaagattcctctgatgcagcccctgctgaaacacttgttgtagcacccatccccgagtctggcaaagctttggatactcagaggtctgatagtattcgcccgaagcgtcctcgccgaaccaatcatccaacttctcctgctgaggggaagaaaaagaaaaagagatgtcttcgtcgagtgtcatgct

SEQ ID NO: 127948 - DNA, 428 bp, Zea Mays
gtcgaggagaccgagtgtcgggcggctgacggccagaattgtttctattttatgtttttagccccttttccataaaaaactatacatatgtttctgacataaaattgtttttgattttagatttggcgtcggggtctacgagatcgaggtaacacgtatcaacctatagattatcgcgctcaggatgatatgttactaaaatatgtgccgtccagtttttaattttcatgaatttttaacagagtaagagtagatttctctttgtattctgaaaaagctataaagtggttttcaagaaactcacacacattccattttttttccataaatcgatttctagacactgtggtgcttccaaatatgctattagtctagatcaccgagacgtattatcttgatccttatgtcattgtcgtgtgtcacgctcg

SEQ ID NO: 127949 - DNA, 332 bp, Zea Mays
tgcaattaaacacaaacattttctgtcaaaacaatagaacccacaagcaaaaagtcttggttcggccggaaatggccgataaagacatcgtcattggtgatcctcgcaagtcgaacatatcacaaggaggaattgctcagaaggcttcggataagaagactaacaagtccggaggcgccatggggtaggctcaattgagcagccgagcacggctccctgactcaagtatcgcggatgatccggcacctgcgtggaaggtccggtgctcaaacataccgtccgaccatacccaagggcgttagccaccacacaaataaaaagggaacacacgg

SEQ ID NO: 127950 - DNA, 582 bp, Zea Mays
tatgatggcaaggaccccagaactagctcaaccattgcgagcagttcttccgtgggcaatgtacgctcgccttggatcggatctggcttgcttcgtaccacctcgcagacctagcccggacatggtactatgccctggagcaagatgagggcatgtcattgtgggagtagttcaaggatctttgccatttgcggttcgacctagccattcccagtcattgtctcgccgaactcgcgaggctgcccatccacaccacgatccagggctgtcaggagcacttcaacacactagtgtgcacatgctgaatcttcttccaatctagaaggctgtcctcttcgccgggggtcttccaaagcacattttggttgatgttgagctctaggaaccccaggacctgtagacatacatgcatctggcgcgggcctaagagcgccacgtcgcagccaccataccaaccctagtgtagtgggtgtttcggcctccctagcgcttgctgttggtgctacctttcccgtcgtgtgcaactgttggtcgtgcctgtgttgctcgcaccacctctaatagcggcactacctgctccta

SEQ ID NO: 127951 - DNA, 368 bp, Zea Mays
tgaagattgaaataggaggtatgatagtaggtgggataggaagtctactggagatagcctaaggggtgtgcaaggacccctatttgcgtccataaggagtcccaacatgttacaaggcccaaaagggtccaaaagacggtgacaagagtacacgccctgcctgttgtcagcacccctgcctccagagcagcaacagagggaacggcttccgcttagtgcttgctagccaagttagataagttgggtaaggcaaaactgcaggcatggaattgcttaggagacagacaaggtccctacatctgctgcttccctaatgaaggaaatgagagattagagtggccacggctattccaagggagggcttggat

SEQ ID NO: 127952 - DNA, 578 bp, Zea Mays
cctaaacacacgctcttctaaagcatacaccaagacagggagacttgccacgcaggcccggcacttacaaagcacaaacactgctagctaaactaatgcaccctagctgcttggcctcggctagaacccagcaagcgagctcaaggaagtacctcaacaccttcacaatggaagtggactcatggaagatcatcctatgaagtcaaaggcaccatgctctaaggatgatagcattgttgaagcccttcttgtctttatggatccgattggtcactcctccccaccaccctgcaaaggcggtctccacgggactaggaataagatgtcctagattaaaaggggatagaatgtcatgccataactgacgtgcaaaaacacatgtagcaagcgtttctaggattgagccttaacttcttttttcacattataatccttgcgttctttcccttgccttgcattctcttgtttggttcgctgcctcatttgttatagtttgccacacctaaggttagacatttttgatcgagttagatatacatttggtttatagccacacttgtggcaatatttttttcccg

SEQ ID NO: 127953 - DNA, 312 bp, Zea Mays
acctccgacagaggagcgacgggtcaaaaaacacggacggtggtggttcaagaggttatcattgtgctctgctcccagcctcccaccatgatccaaactctcacctcgtccttgattttctaaagcaccgtaaagtttgcggccaagcattcaggtgcaaatcagaatttgctgtccagacggcgattttgatccatagtcgtttagtgaactgtaagtctctgaaaaggtgccggcctgattccacatgtagcctacatagtgggcagatccctttggtttgggcacgtctaggcttctaatatgtgaacg

SEQ ID NO: 127954 - DNA, 721 bp, Zea Mays
gagagttaaaaaaatgcgcttggaggttgaaccaaaacaaaacaactttagtactctgcgtcaacaattaaattgttgtagtgtgaaaagatgtgttcatgtgtcagctagcactagagtcatagttacagccatactagaatgtggtgctctttctcttctcaaggtccccagcatgatcactatctgaaaaacccagaagatcattttcaactcccttgacatacttacagccatactagaatgtgccagctacaaatctgataattcgtttgatagcactgcaatgttctgcatttggattctcagttttagccgtggtgatcgcgttctggcgccgcgccaccagttcatctgtttgctgtgagtgtttgcgagctcgtctgatcgctgtgagtgttcccagtttgggtgctggatactggagcgagcaaccacatgaccggaaccagatcgctgctaacacagcttgatcagggagttctgggttcattcagttttggtgatggctctcgggtgaaaatccaaggtatgggttctgtagtaagtttggcagctgctaacatagtaagtttgggacaattagaggaaaaaggttttacttatgaagggggcaatgggagactgtgtgtgtatgatcaagaacacaaactgcttatttctgctcctagaacaacgaataggttgtatattgcaaaatttggtatgtcttcacctgtca

SEQ ID NO: 127955 - DNA, 812 bp, Zea Mays
aaaccctggggactccgtcttagtcgctagggattgactgtgaatcgatagtgagggagggggaaaagggagtacgggcggagactcgtcgccgcgcggctgggcgaccagggaaattcgtgcatcgtcgactcatttcgcgccttggtgccccgactgctcgtcctcgcccgccaattcgcgaagcacattggtgcccgacgccgtcaacctacgcatccagggagttctccgttgccgcgcgggattcggccaccgcggaacaacccctccgccctgtcgattgccggtgagaatatgtcctacgtgtgcatttccatttcacaagtgtgtatcttccgctgcggttcgtgtacatccggtccgcggcccggagttggtcgtcggacacgggcttccgccgtgcgccgtaggccgggctctacactcgacatcggccgaaattggttgtagaagtgggttcggagagtcgtcaattgcgcgagggacgagtgaatcgggttatggtgtccgtatgggccgggttctcaatctccggccatggcgtcgccgtagcacaggggcgccaccgcgtttgggcgcgggttgggaagaaaggggtacgtgtcgtcgatcttgcaatctacggtggggattagaagccaggtgaacggctcggctaggactcggtgaccgttgatctggggcttaaatggataggattgaatttgggggtatttagatctgggccgccgatgggtgatccagcggctgcgatctagtacccgttcacgatggcgccgatctaatctgcgccacaggtataggatcgg

SEQ ID NO: 127956 - DNA, 1025 bp, Zea Mays
cagacaatggacactgttggatgcaggatcaacggcgcagattacacgggcttcataatgaaccgatacacgatatggaccaccagatccaaaatcagtggccacgattcaaaacctcccagatctaatcctacgcattcaccagacatcctacggtctggatcgactcacgcgaaggggtatgcctcgcttaatcctggccgttaaacagaagatcgacgatcaggggcatcccttcactctctcctctctcccctgttcactccggctggtggtgagcctacttgcggcagcgccattattggcggacattggccccgcattctattataccgcagctaacgcgacttcgttcaaatcaaagtggaggaggaggcgaacgcgtcagtggattccttaccggtagataagtgggcagatgtgttggtcacggcgtcccaaggttcgacggcaggaggctcctctagtgagcaattcaaacgacttcgaggattccctatcatgaacaaccgcaatcgcgtctagctgtgttggtctcccgcgaagaaaccccaagagttcccctagactgaacgccagcgagcaaaacccgaacggtggctaattctctgcccccctgcacacgatttcccccgacgcgttcagaacgagtagcagcggcgcgcccgtttttatatccctgggttaggtaggtcacaggtggttgcgatttgcccgggcgcgcggactctagcggggattggcacagtttgttgccgttattcgcgcggccatggactatctcgcccgagcgaggaagataatgctgacagcgcggccccattggtcggtggcaaaacgaaaggtacacgcgcgactagggacatacgatgggtggctgacatgtgggatccacacgtaagcgccgcgggcggtacgcgaagggaatacgggtggtggctgcagtggagctgacaggcgtcgatgggcctagggtttaggttagctgggctgcacggtggagaggaggaaaagaatgagatggg

SEQ ID NO: 127957 - DNA, 342 bp, Zea Mays
cagaaggggaggaggaatcgatctacctgccaacccccacaacaggaggattatcagacaacagcaaacataaatgaatcctccaaattctccaccgactgggactgatccagtggttgccgctcagatgcagacactacaacaaatggcaaacacaatgaacgaaatgcaaaatcagatgaggcaagaacgccagaagatgcatctggaacgattggagatgcgtcaagagatgagacaagaactgttggaaagacaacaataaccaccactacctccaccaccaccagcagctccacccagaaataagcaccgggagattatgagtcacaaaccatcgac

SEQ ID NO: 127958 - DNA, 528 bp, Zea Mays
gtactacagacagtgatagataatgcgatacaatcggtggattatgcgaaattaaagcataaatgggagggatggggatggggtgtggcgaacctgaaggcgactgtactatgcgaaataatgtagggaaatggaacaaagaaggagagggggaaacgaaccagggcggagaacggcagagggcaaataatgaagcacagcgattagggtgagtgggggaggtgggggcggtcgtcgatggagatcgtaggagcgggtgacggcgaggagcggatttttttagggtttcggtggggccacgacgagtgggttgattgtggttgggtgggtctcggatattgaccatattggctcggtcggctagcgggagcgacgcgggactgtggggacccgtagtgtgcgcatgatcagttggtcagtgtgtgtacgtcgtgttcatatgaagcataaagtgttgtccaaaggatcgtaaacagtttatacaagcattaatcccgaaccacagcccgcacgtggtataaattgttg

SEQ ID NO: 127959 - DNA, 1215 bp, Zea Mays
ccaagactcaggctatcactggactggaccgcgggttaattgcctaaaaacttaaggtctcttctgcaaaatgtgcaagccgaaggggtacggaaggatcgtggccgctagattagatttaaacagcccggattaaatcgcaactcatgtgaaccggtgtgcgatctcaaccactggatcccccatcaacggagtagattttaagtgactaaatccgctctaggtcacccgatcacggatcgacggctacgattcaactgaacgaaggggtatgatgtaatctaatcctagccgtccaagaaccgatcgacgacgtctggtccatcttctacccccagcgcgacagagcggtggcatggcatagaccgcggtggccatcaccggcgagcccgactaattcgcgcggacggatcccgacgaccatcccgaagacctctaaacacgacattggatcaacacgaatattacggtgcattattacctgtcggtgtgcagaggagagctccaatcgcggcgaggggcggagaggggaggtcgagaccgcgttggcgagaaattcgcagtgcactattgtactccgcaccaatctactcgcccagccacggcgcagagtgcaaaccgacccactagacaccagataggagcccaagcgaggaggtagaacaaggtcgacggtggcggcgaatctcccatggcggcagccctctcttcaatctgtggcctccgctggaactagcagcgaacgcgggatttcaggtcagctaaatcggggacgacaagggggagttcgtgatggcacaacctatatggtcatgggttagcgccgtgatttgagccacgaagcccgagtccgcggagcgattccgccattgtcgggcgaatcggttcagcgtctgacggcccggacccacgacgcagagaagcaagcgcgagggaggcaacgcgcgcgcatgggaggctgactaggcggtcccgccagcagcgacccggaatggtgcgttcgcgagaggctagcatctggccagtgggccccatctctcggcgcaaagaacagaagctaggccgcacaggtgtagaggaaaaaaatggatggaccgaacaagcgagatttgaacccagatgctgatatatcctttccctttttacttttctttttatttttctttttctttccttttagattttcaaattcaattttgaattcgattgtagctg

SEQ ID NO: 127960 - DNA, 455 bp, Zea Mays
gtttacaaactgggtattacaaatcctacccccttaaaaagaatctcgtccttgagattaagaggaactagggaagaggtgggaaaaatctactcgcagctcttcttctctttcccaagtagcctcatcttcaccatggttactccattgcactttacacattttgatcactttactcctcgtgacacgagtcaaggtatcaaggatcttgataggatactcagtataagtcaaatcattctgaacacgtagttcctccataggtagctgctcctcgggtaccctaagacacgtcttcaactgggatacatggaagacatcatgtacatccgcaagatggtcgggtaattccagttgataggcaacttcttccactctcttcaggatcaagaagggcccaataaagcgaggggacaactcccctttaactttaaacctcctcatacctcggatcg

SEQ ID NO: 127961 - DNA, 839 bp, Zea Mays
agatgaatgtcttcgagattgtgtatggtgatcgtgttcgctttggcacaaagctgctgatgggagaatctcagatttggtggaggggcgtgcaggcagctcactcctcttcaccaggagtcctgtcctgggatgtttttatcaggtagtttgagaggaggttctacccggtcaccttcctggagaaaataaagattgatttgcagtcctacaagcaagagaagaagtctgtcatagaatatgaagtgggcttcaacaagatggtctgttttgtccctcatgtggcttataatgagatggagaaggcgagccagttccgtcagggtctgaaaccttctatcaggcatgccctaggagcctttctgttggtggacttccgtactacagtggagcaggcactgggtgtggagatgcaacaccagtataccatggagtcgcagaagtcttcgggtgttgatcagcctcgtggccaggacgcgaggaggggcaacactggaggtccagcccacaagaggggcaagtctcagcatcagcgccaccatccctaccatggcaaatcttctgactcgggtactttgggaggaagtactcagaggtttcgggctgttcctaagcccgggctggggctggtgtgtttccgttgtggtgatgcgcatcgccgtgcagagtgccagtggaatggcaggtgttcaatctgcagtcaagaccacaaggatgtggtgtgtaggaggaatcccaatgggaagctcagatgggagccagtgacttcctcctcttctcagggcacagtcaacatgatgtcaagcgctgagcagcaatttttagttccacttcctccg

SEQ ID NO: 127962 - DNA, 306 bp, Zea Mays
ggtttacaagtataatgaactctaaaaccttgcaaaagacatgcctgactccatcaaagagacaatgaggcctgcagcttgctgaccaatttctttagttttggacttgagttgttggacgacgtaacaaagttttaatactataagacgtcattttcctacgcttcaagcgtagaaccagtgcagagcgtccaagccaggcaattgacatcccaggaaagcccaagctaatgtacaagcacaagcatccatgttctgtactatgaaataaacctcctctgtaaccagacgtcatttgcctctccg

SEQ ID NO: 127963 - DNA, 601 bp, Zea Mays
cagactccaaagtcgttgttggccaggtcgaaaaagaatattcagcaaaagaccccgcactcatgcagtatcttacggctgtttccagtcttgagagacaattcaagggtttcaccttgcagcatgtggaccgcgccaggaacaaagaggccgacgcattggccaaagcagcggccagaggcgaagccttgccctccgacgtgttctaccatgttattggcacaccagccgtccacaatccagagggtctacaaataaccaacgacgccgagggccatcgaatcatcaacctcatcatgactgaagattggcggaccccaataaccctgttcctgcaaggatattatcacccaagtgacgtcaacgaggccaagcgcctcaagcaccgaagccgggacttcacacttattgagggccagctatacaagaagggggtcagtcaacccatgcttaaatgcgtcaccgaaaccgaagacatccagatcctgcgcgaagtccacagcggaacttgcggctctcactcagggccaagggccctcgctgccaaggtgattcgtcaaggattttactggcccgctataatttgcgccacgaatcgagt

SEQ ID NO: 127964 - DNA, 379 bp, Zea Mays
tcaccaagtccgtagagggaattcttctgttagtgacccgagttgagtcggctaggcctcgatacagataagccgggtatgccctgtctttcaacggctgaatattcttgaaaacaaaatcagcaaccacagcttcagcagtcagacccccctctttcagcaatccaacttcaacaagcaaagcacctacctcagctacctcctgatctgtgggagactcggtccagcttggggtgcgaacatccggctgtcttcccgaccgggggggagagagtttccataattctcaactatgaaccactccaagcgccaccccttgatactgtctttgagagggatttcgagatactcagtcttcctcccgcggcgcatctccaag

SEQ ID NO: 127965 - DNA, 347 bp, Zea Mays
atttttctgtgtccatcctctctttcacctctttatatgctcgacaatctttggttgaatgactggagctttcgtgaaaaatgaggtaaggcttatactcacgaggtggtcctcgctctcacccccttccccttggggccctacctcctcttgctggttgataaccctggttgtaattgtggtggatgtcttcgggttgctacttctgctgaatttgttgatttgggtctgcgacagaggttgttgcgttcacacccacttttggaactccctgggtgcgaagggtcctttggcttgcgttgctcttcgactttgcaatagtggagatctccaaaccttgcatactt

SEQ ID NO: 127966 - DNA, 502 bp, Zea Mays
gcagccacctctaagtctgaaggaccttcaacaacttccatgagaacagagcaatccagatcagcctctcgactcttaagaccgcgctccaaggtcgacgaggcacaagatgctgctcgggataactctaacccagcatcaggcacgtcagcacaaacttccatcattccaccatctgccggctctgacaacagatcttctgggaccatgtcttcgagagtctgatcaaaatttgccagagacaattcttgcagaccaacgagagcagacaaagctggagaaggaacaccactactctccccgttggctatgtagcgccggctgttcttccgaatcaagggaatttcctcttcctcttcatcatcttcatcaataatacggacggtacacccattgggatcaactttggccggattacacccattgggatcaacatcatcaaggtcacacccattgggttcagaatcagtcgaggcacacccattgggctccaccaaatcga

SEQ ID NO: 127967 - DNA, 351 bp, Zea Mays
cccatcccctcaccgcacaggagagtttggcaccgccccatcctcgccgcttgaccgcgtccttgcccggtaccacccccaccgtgaggtctcgtcgtcgccgctgtgcggcattaatgccggcgctgtgcacctcaccggcgcccgccgagctccgccgctccccttccctcgggcgcctataaaaaggtcgccccgggcacctccttccccgcaccggcctcagccacccctctcctcccctcgcccgagctcaattcgtgaagtgccgccgtcttctccctctccggtgagcccttccctctcttccccctccccctctggattgcgtagcaagaaattagctaggcc

SEQ ID NO: 127968 - DNA, 395 bp, Zea Mays
acggcgaggtagccgcggctgagcgagacctcggataccagtcacctgagggggacctaaaggacgtcttcactagagactcccactccgatggcgactagacgaaccaccagcaggaccccatgaccctcaacctatggagctgaagcctgccttcctccagaaaccattctgggtcccccatgggcccagacttctggcaggtttatccatgagtgaccaaggccaacgatgggggctccttcgtcaaacacagatggaaacctggggtcgggacctaatcttatggaagtaccaaaccaaatcagggctccgcaacactccctagctgggaaggacccttcaaggtaacgggaatactccaacccgagggcgactgtctagctacgactgaa

SEQ ID NO: 127969 - DNA, 306 bp, Zea Mays
cgtggacgagttggacgctgggcttcctcttgtgcaggttgagtcggcacatctggcatgggagcagggctcacattccccatcccttgaagtcctgcttgaccccaagcaggtgcaccaggataacactgctggagcgcttccttgtcttcccaggtagctaaatcgcgaggcagaccggcccattccaccagtacctgttggacgaggcgagttcccttggtgatgccccgagtttgcaggatgttgacagggtaactgaattctggtagcaacgaaggcaaggaagtagaagcagtgcccttg

SEQ ID NO: 127970 - DNA, 671 bp, Zea Mays
tgggagcagggcaatccaagtcagcttcctgaccctcaagaccgcgctccaaggtcgatgaggcgcgggacgctgcccgagatgaccccaacccggcgtcgagcacatcaacacaaacatccatcgcgccaccatctaccagctctgataacagatcttctggaaccatgtcttcaagagtttgatcaaagttcgccagagataattcttgcagaccaatgagggcagacaaggcaggagaaggaacaccactactttccccactagctacgtaacgccggctgttcttctaaatcagagggatttcgtcctcttcttcatcatcctcatcaacaacacatacagcacacccattagggtcagcgtcagacgggtcacacccattgggatcagcgtcagtaaattcaggcacgggcacttcctcagcagcaggaggagaaggaccagcatcccgatccaagctagacactcgccgaagacgtctcttcttctttttctgcccatcagcaggagaagcaggcttattggctcggcaagggcgcttcgggcgaacattgtcaggcctctgaatatccaaggctttactagcttccgggagaggcgccaccaccgatgttctagcaggagcggcatcagaagaatcctcggctaacatatcaagcatggcactt

SEQ ID NO: 127971 - DNA, 399 bp, Zea Mays
gtcttctccatcctatgcaggtgtggattgccctgactacatcacatctaacctcgcccataactagacatgtggtgtgtacgagaaggtcccatgaaatcggttatcaagttcttaaaggaccatgcaagacttcttctctaagggaagcctcacttcgccactcgccatatgcacatcattcgtgaaaactcgcccaatgaagagtctcacttgtgtggactctcgaaccatcatacctgccatagtgacccttagaatgtatttagaacacctttctggcttgacgtagtatgaagactagccacactaccttgcatgatcgaaacctcactaagcgctaagatggacgctaatttatttcgcccgagtataacaataaaggtggcactaggtggc

SEQ ID NO: 127972 - DNA, 386 bp, Zea Mays
actccttcttcttcagcttcataattcccgagggaatatcttaagtttatgttttttatatgctcttatggccatcagaccattgcactcaaacaaaaatccaactcaaacatagcaaccaacaccatcacatggttgttattattataaagataacttaaaatgagtattaaacgtctgacgcgagagctaacttattacaacataaacttaaaatttctatagcagcctggtgacgaattcgggctccccatagcgaagcctcttgcggggaggagacaacgccatggcggggacctgggcttcaggcggatcccgtccttgaagttgggcttccagggctgcaatcctggcgtgggcatcctccagctccaagtgcaccctag

SEQ ID NO: 127973 - DNA, 566 bp, Zea Mays
gatgaccttcttccccgcgtgaaccggatcgcgctgaccggatcctccacgatcgcgcggctccgttgccagctgaagttgttacggcctccaccatttccgcactaacttcgccctgttatctagccgagacctcgcgacctcctctcttctcgtcctcgctcgcatatgctcagatttccccgcatcgccacacgccatgaccacccgcgcgcgggtcgggtgtgtggggactgtcctccgccgtaacccagcaccgctcctctctagttcatagccgtcccactgccgctgccgcggggctctgctggcggccatcgtcacctatacccgaccgccatgggaggaagctgtgtgtgagatgtccgccgtggggtgactctggctcaccgatggagatccctcgagggtgggccaggcggatgactatggccaccgggacgtcaatcatggcctcgcctggtgggattgtggacccgaggctacgcaatttctcaccggtgggacttcgatgccagcgttccgccacacaccgtgtccggcctcgtccccaccttcactcccgg

SEQ ID NO: 127974 - DNA, 2083 bp, Zea Mays
cgacaactgaaagcgagttatgtgatttcatttttccccccccttcatgtttctaatgctatttggatttcaataatttgacaggagctatcagcagagcttgtctcgttgcagggtcaggtggcggagcttcaaaagcgtgtcaggtgaataacatcagctcataacatattcagcataaggaactatattgataaatgctgtaggaatgcatatctcttttgaaatctttccacttagtgtcgctgtgattttcctttcatgacacatgatcctgttaaatgttctccacgttgtgaatctatggcattgattagcctgtcacagaaataatgggcaaaccaaaaaaaatttgagagaagtgtaacggcaaggcgatttgttttgttcttcagtgattggagcgatcctgagaaagttgacaatatcgacaatataagagcaatggagcaatctctcaaagaaactattaatcatatccaaatccataaggtacacatctgtaaccttatggttaactactttataatctcaatatctagttaacattattatctgaattttcaatatcaaatcagattagttctgacctttgcatctgtttgggtctctgcctctccaggggaacttcggaaagcaacatctaatcgggctacagtatgctgctacccaggtaactaactaactaacctaccacagcttcaggtgcatgtgacatgagacgttaattttgttcagattaagatgttgctttcctgtcatgccatgtttcagttccagaccgacatgcagttgcctctaggactgcccggcgagtcaggcccttcgtcgtggttccaaaacggcggcgctgatgggcaacaagccatgatgctaacggacgagtccggcctgctccatcagaggtgaattcaagctccgagttgtgcattgctctgacgaacaaactgcccttcgtcgttaactgacgacgagcaaactgatcttggcgcagagacattgcgcagggctatccaagctacttcagcacggtcaagcaggatcccgacaccggtggtagcagcagtgatcacgggcaggtggtgcttcaccatccgcagccgcccgacttcagccagaccgagtgcctgacgtcgctgcacctgccgtcgcagcagttcccgtacccacccttcgaccaccacggcctttacagcgaccgaattttcaggccagacgcagttgagctgcacgccggcggcgtcgccagtatggactttctcagcggtcagtacgacttgccgaggcctggcgatgatgccagcttccataactgggcgtcagctgcagcatgtagtgcaaccatgttcgaccagcaacagcaacagcagcatcagcatcaccagcaaccacaatcttcacctgcacaagtgagtgcataattacaaaaccaatctttcgactgttcgttctgccgcatgtgaacttgcttatctatctatttgctgtcacaagtttatagctccgctgaaacattttccgatacatatttttttttctcatctcacattagttgacccatttttatccatgtttattaagacttaattcaatccacagtccatatcaaactgatttaagttctgagcaattctatgggcgatgagagctttccaatcattgtttaaattcatttattaaaatttaaaatcatgcagaaagaatgtgcagttatgatttttttttttttttttgcctttggcattatatgttttactgatttcggtatctcttgtggaccatgactgaatctctaaccatcagcttcctgcagcaacaactctagcaactgcctcgttcgatcacgccgtttatcacagttcatctcagcaccaacaagtcatgatcggttgatcctatatatggtaaaaaaatcggagataatattgccctccaaaaggtgctaccctaaactaatcatcaatgcaaaatgtgtataggcaacactgtcgatgtaaaatatatatttattgtagctaattctttcttgtaagtatctatctgtctcctgtatactactggtatagctttcataaaaggattg

SEQ ID NO: 127975 - DNA, 504 bp, Zea Mays
aggggccctcgcgtttctgtctaactgcgaacgggttcattcactattctgatgtgtcgctgacggtttacagaaagccccttcggtttctatttcttcgcacgggcaagtccccgatggcgcacggcttggcagagctccggtgagcacctgcaccggccgattggggcaacgacaaggttctccgagcgactgacacgaaattggacctagcccgagcttttcccctaatctaatttcatcaacgactaattaataagctctggccacggcgaccgtgaaccacacggcaagacagtcgtgttcccggcgatgggtggtggcctaattcaattaggggggtcgaagagcttaaggaggatctaagaatgctagaacaagcagcagagggacttgagctcacctaaaccgagctggccatggtgaggtcttctttgcggtggcagaaagctgatttgggggaaaacggcgattctccggctaggggggctaatcgagggggag

SEQ ID NO: 127976 - DNA, 360 bp, Zea Mays
ctgctgctgccgcgtgcagtcacgaactcttcttttctctctctctttctctctttggtaacagtgacattagcttcaatacactagtttatttttcggttcatgcgtgttcaaagataacgatttggctggtatatcgccttgcccaggcatggccgcatgggcatgcataatagacaaagattaattagggcagtctctgttgatccggatcggaccacgaattttccttgggtttgccaaaggtttagttttgtgaaagattccagtggattccttggatcgccattcctattggaattcgttgcggcgctttataggtcttgtcctctacgcacaggaccagctgtattaaaaaaa

SEQ ID NO: 127977 - DNA, 501 bp, Zea Mays
cggaggagaaaaatccagtcgcggcattcattgctaacctgttcctcccgtgtcatttttctgagggagtcaaagagaaacgacggcgtggcgtggcgtggcgcgaggtcggagatccagcggtgaagtcgcactaaagtaaaaggcttggtcaaaggcgaggcggcagttctcgccggagctcggagctatcgtgtacggcagcacgagcactcagcttcaggtcacctcattcattcttgctcacctcgctggtgacttcttcttccctgccgtgttcgtgctcgtccccccctgcaagtgatgcccggtaccgcaatggaggcaccaaagcgtagctgctccccgtcggggcctcgtgggtgcgcgacgcccaccttcctcttctccatcgtcctgctgctggcactggcagtcgctgcttcggtgacggacaccatcctcccgggcgcgggcatctccgggaaccagacgctggtgtccaagaacggcgacttcgag

SEQ ID NO: 127978 - DNA, 549 bp, Zea Mays
agtgaagtgtgcgcttggtttgaatttaggcgaagaaagtggattttgggcactcggctcggaatcgatcgctagaaatggggatttgtggaaaactggtgcctgggatatctgattggtgtgaaatttggcaaatatgttacgtgaggtgtcatgagggtgctagaaaaatctgggatcgatttgagcaaatttgagtggttcgggcatttcatcgagtacctggcatgcggggttttgaattgagggggaaatggctatatgagtagatgaaacctcccaaagggagaagattacctgcaggggaactcaaaagggcactagggcacacatctaacaacttgattcacaggaattgcacaaatttgatttaaggaatcaaggggtggtggagggagagttcactggatagacagaagagagggagagggaaagaaagcagagaaatgccttaccagagaatggagagggagaggaactcgggcttggagaagatcgtcggtgcacagtggtggtcgccggcggcgaggaggtgaggtggggagcgca

SEQ ID NO: 127979 - DNA, 314 bp, Zea Mays
ctcccctatcatatcgtaaagggggaaccaaagctctgtcctaaagaagctcttaaacacgacaacctcatcctccttcggctttggaactacttcctctccagcaaagcgaatcagttcatcttcattttctccaaaataacctaacttcttcatcacaaccaggtcctcagcttttactgtggatcttccaaattcaatatgactaggtttggttgtgctcaaaatgctattgtcctcttcactttcgttgtcactcccaacctcactcttagtctgttcagcttcgacattgagggtaccttcgatagttg

SEQ ID NO: 127980 - DNA, 330 bp, Zea Mays
gacggattgctctctaaccatttctagcaaaaaaaaacttgtcttgtggttgttgaggttggttcgaaggcaatagagtgtttagagcaagctttgaaggtagagcaaactattgaaagcaaagagtgcaaactacaaatgtcatgccaacgcctacggacatcgttccttttatatgggagagttttaatttcaaacagttgcaatcactgagaaaccaaacccactaaccagaatggtccaaaaagtaacatttcataacgagcttcgggatggtgttttttggacctttggcacaaggcctcccaagtgtgttttttgcgatctaag

SEQ ID NO: 127981 - DNA, 360 bp, Zea Mays
tagacctgcaggtcatcgacaggtgagctaagttccttgattcgggcctgagcccttgcttccttagcacatgctaacaaacgggactgtactgcccagtcgagtgctaagtcccgatcagcaagctgatcccgcaggtgacagatgtcccttcttagttcatttattctatcttcgtccgcaacccatgcattggtcctgtgttgcaactccgattgaagtcgacttacacgggcttcaagatctcctattgggtcattactcccgctgctactgttctcatgtcgaggggccagttgatgccggggcacaccgattggtccagttgacttgcgcgtcgtttgccttgtgcgcggcggc

SEQ ID NO: 127982 - DNA, 369 bp, Zea Mays
gttgcgttttgccactgctctcggccatggtgttgagcaacatcatgtttcacgaataagaaacatggggataggagaggggatggaagaaagggcagcgtcttactggtgagaaggcgacggagacgtcggggttgcgctacgccgccatgtcgtcacttcgcgttgtcgcctctttgcctcctccgccgcaagcactacaccgttgtatcgtccccttgcgtcattgccaagattcgatccgtagggcagacgaccgagattcgtaccgggccatgaagaaaggagaaactccaaatcaggccacttgcgttttttattccggtagaaacgaacagctcgtggcgaaacagctgaattctaaaccaa

SEQ ID NO: 127983 - DNA, 629 bp, Zea Mays
ctgcgtggtgggacctgcacgtcggccatacctcccgactgctacgctcggcgcaacggcggcgcgaagatggcgggggcgcggagaccgaatcccatggcggccatccgtaatgtgaggactataatactgggtccttagggttcctccttgctgttccaacgccgtgacccagtaaaccaatcgtgtgcgtgtgctgcggagagccgggggacgaaggtgaatccagggaccgccgccgcgacaccactcgactccggcgcgtcggttacccgattggcggctgcagtaacccaaggggggggacctggggagcacgcgcgtggatctgccggcagcagggtcggctggcaactcaccggtatgagatcacttcgcaccttctcggcgttccgccattgtcgaagcttgcatcgccgccataggaaatcgtgtgctagctggtcgtagcggggcgaggcacaccatcgccccggagttgcttatagatcaatagcgaatgatgatcggggcacgtccgtcgccgtcggtgtctgcgttgctccgtggagcgcactggcgtaatattccatcgaggaagaagaggctttagcctttgatccggccctagacggttaggattagaagta

SEQ ID NO: 127984 - DNA, 892 bp, Zea Mays
aagataaaagttccgacgatttacatgaccggttggcatggcacatatgtgacaacatcttgatgtccgtaacgcgtcgttgcaccgagcttgatgtcaggactagtgatgtcaaccattcgcgctaggatctacaacgtcggatatgaacggtagactgtagttccacacgcctttttggcctaggcgctcataaacgaacaaggtctaagggaatagattgtggcatagattgttaatacagagctggattggtgtaaacgaacaagacctaggaggccgttcgtttctaacagtttggctagttctagtcctcgttcggggaggaacgaacaggcctggtttagaatttagtgtactccattatatatgttcgttttgatctaaactagaacaaaaactggctcgatttgaaatttttcttcacttcacagcccggcaccgatccctgcctcgttctctccggatcacatccggccacgacggagacactggcagagcaggacgcgagacactcatccaatggaaccgaacaagatttgtataataatgttcctgggctgtattgggctattagttcctcggctagattgattcttgggctggatcgagtggtgcactatttcctggtctggaaccgtttccagcctagaggccttcataggcagaagtcatagaaatattatgcccttggtggaaagataacttaatcctctttaaccatggagttgcaaatgccggccaatttgagtatttaaaagaaaggaactgacaaattcagaaaggtcctcctgcaaggcactcgtcgcactgagtttagtttaaagaatcaatccattttaaatagggtgatacattataagtctattccataagtttaatagaatcaacg

SEQ ID NO: 127985 - DNA, 304 bp, Zea Mays
ctggggtggtctcttttccggcaaatcggacaagtttgctttcagcttcccccaaagtagcctagcttcatcatcatgggcatgtcagcttcagacatagtagatttctcaaaatctagatggttgggttttgttgggatcaaaatactataatcttcctcatctccatcaatattttcttcttcagcaacggtctgttcagcttcggcaataggagtatctttgtcagtagttccatctgtcacaactagacctgattgtttcatgagttcagaaattggtgttgtctcagtgacctcggttt

SEQ ID NO: 127986 - DNA, 472 bp, Zea Mays
cggcatcgaggattctcggtgctcccgtcgtgtggcgagccctcccatcatgctcgccggcctcgccctcgtctctgcgatggtaagacacatcgccctagccgcagatgcgagctcctcggatgactgtatcggcagtgtgtggtagtggtcgctatgcgagctcgcgatggacagtaaggcgtcgtcgcggcaagcgcgcgccattggctcggtaggggtggcagaggtagacgaggtactgtggtcgttagatggccatcgtggggcttcaatcgtgcgaaggtaataccgattcggtgagtgacggttgaccgttgatctacgatcgaacagttgggtgctttgagtgggattcggaagttagtaaccgttagatcaacatcctggggctctggttgcagaccgatctattgcggcgatgatctaatcagagtcgttcgtttgtaatcatacgactctcggcgttgga

SEQ ID NO: 127987 - DNA, 579 bp, Zea Mays
gtgatttctcaaaccaaacatccctaaatgaagagtggcaaaattcataccactgtattttagtacaattacaattttgggagaagatgactggtctgccttatgcattttgtctaaaggtgtacctctaatccttgtggcaacactactttagggtcactccttaatacctgccttgatttcaaaatatggcatttttcattaaaaagggacaggcactgtaaactttgacgttcaattactcaagtggcatcaatagattcttatttcacatgttcttttattaagacagacattgattttgtagtaattgataacgtattatgttctctaaaaaaaagaaatgaagggtagcctatttgtagtagatgaaataaaagactctttgtggttaagggcgagcctgtttagtaagaacccagtggtgtgagtgggtggatcttctatgggttcttatcccattttcttcttaatgtaatggtacttagctcttatttgagaaaaagaaaataaaagcctcagtgaagtctgtataatgtggttggagttctagttatcataatcaatctactgttatat

SEQ ID NO: 127988 - DNA, 437 bp, Zea Mays
aaaacacgagcatactcgtaaagagtctcttggttgatagactcagtttctactgaactcacaagaccgagctcctttaggatcctcactttaccatttctagccatcaaggacgttggaagcttttccacaccaacactggctatccttatgcttccccacgataaagcaccaccaaaagataccctaggccgttgaatcctcctagttgggggacacaacataccactagtcttcttagaaatcttgttgataaaaacttccatggtagatgctgaacggggtggagaaaactgcgacagagagggctgttgcctagtcaaggttgcccctattttatggcaaaagtaagtgataggagatctaggccaaaccctagaccccgcaacaagatcaatccaggatcacccaggcttgactgactgagagcacatggc

SEQ ID NO: 127989 - DNA, 479 bp, Zea Mays
gcttgcgacatcttcgttcttctagctcgttggcgacgacttcatgtgcgagggaaagcaatgagatgatttcaaaccacggtggtggtttcggaggcctgataagattcctagagggtggggcacctcttcttgctaccttaacgacatttcctgaaacaagtccggagtggggagctgtgtagcgggtttggaggttcccgcgcacgagagagagaggcgtccaacggcggatgtggcgaggcccctgcatgttatgttgttcagacttggtgttttcattccgtcgggtggtcggctttggtgcaacatcactgcggcaatgggtcctgcgagtcgatggccttctcggtgtggtggtgtctgcccctcttctcctctatcggcgctggatcacttcagaggtttcaatgatcgcaagcgtgcggttgtgggtggaagctgcggttgtgctatgtctactctatggtcgttgtgag

SEQ ID NO: 127990 - DNA, 526 bp, Zea Mays
atcgacagatctcggccgcccgatcaaaagagaacgctacggattagaccctcatccttataaactatcgtgcgatcacagccatcggttacagacctacggttctgatttaaacccctacggtttgatcacaagcgctcaaccatagatcaacggccacggtgagtctcacccaatcggtacgtcaggttagatctgaaccgcacatcgcacatcgacggtcagaaaacctttccccttcgcggacagaggaacgcggcggcgcgcgtcgcccgcggcggaagacatcgccggaatccggttcatgccgatacggcgatccaaactcgatggggcttctgctacacaatgctatacgctagaggaacaggacggttggaatcttaccccgcaattcctcgtcaacagccacggcgacggcaactggcggttcaccgacgtcggtgaaggattactcggcgacgcagacacctttgcgcccgcggttgctttggtgtggccccacgagtgcccaagaaacgcccag

SEQ ID NO: 127991 - DNA, 963 bp, Zea Mays
taaattttgaatttccttaggcttctagactggggacacaattttaacaaagaccaggggctatttcgtatatttctccaagactcatacccaccccgcgcgtggatggcggtttgaataagaaaaacaacatgggctctttagaaattatccatcgccgaaggggtatcggccaatgagcaccgctagatgcaggatcaacggtgcggattacacaaacctccttatgaaccggtacgccgtgtgagccgttggatcccagatctctggtcacggtttaataaagccgtattcaattcccatccatcgatccacgcatcaacggtggtggatccacgaattgaaccggtacacccccgactaatcacagtcatctatcgtggatccaacggtgcgcgtgatttcttccccactgacccaagccgcggcgccgccaccatgcccacgcggcagacgccatagccagaccacccattcaccgctcccgggcccgaaattctaatctgaggtacgctacgcgcaaataagacgtaggggaacaggatgaaggttccataccggggttcgcaggcaacggaggaggcagtccatgatgattagcgggtccccggcagtggtggaagctcggtgagcgatttcgtccaccccgagcatcacatcaccaaattggggggggggcacttggtttcctcatacccctgcgagccaccccgacgctcatatcggcccgagcggtggcgcacgtgaattgcccctacaacaacactcttcttctcttgcggccatggtggcgctcggtgacggtggcggccaatcacaatcatcgacgcgcccgacgatggtgaccttggcccgctttatagtccgcacgaagtccgcagatcacgacgctagcaaccgagtccgggattcacgcggaattcgttgagatcgtaccagctgcgcgagagaggaaaacaggga

SEQ ID NO: 127992 - DNA, 455 bp, Zea Mays
gagagtttgtgggatcaccaacccattcggtgccatcatgtagtcaatcatctctacaaacgtatcaacgagttcaagttgtttttgtgcaattttctagtggctttgttcacgctatcacaatattggtcaatctttgttgtactgaattaaaatttcattgcctgcatgtacaaagcttccgatctacataaattgcattgaaagactatgtaaataattatcgacatatattagattgatacgcaaatgcatccaaaatattcaatatatgagatgacatgcaaatgcatactccctccatcctatagaaactattatttttagattggttaaatgcatatatcacagagtacgatggattaagatactcgtgttacaagccttaatggtctaactcatgtataaaaagtcaattgagtttgcatgaacttgtttgttttgcatcagtggtc

SEQ ID NO: 127993 - DNA, 572 bp, Zea Mays
cttggagtccacaccagagtcagaaggacatccactagagagcaattgatccttacgcgaatcagggggatcaaagcccttgtgcgggtgctccaatgaggattagggggagtcacgcctccttgataccttgacaaaaagatcaacttgtcatctcttcgtctttacattctaatcatttacattccacatgtactccttgatgatcgattggagatgcattggagccgggaagctacgacgctggtgcaatgcaggatgtctgcgccatgtcggcgaaagcaagcagcaatggcagtggcagggaaataaacacaagaaaaactctagttgctttcccaagtgttggtacagttaacttgtaaacataatcgcctcacagttttcactcactggtcgctatccacctgattggttacccgcaccattccatcctgaatcatcgcgtgcgttgactttggctaagcgtttgtttggttgcctgtacgcgaggaacgatgactgcatgagtggatgcaaaataagtcattctgaggctatttacgtgcatctacacatacgccagaaatggc

SEQ ID NO: 127994 - DNA, 651 bp, Zea Mays
gcccggagccgtccgattagacgacagtgccacaggaccgcgggtttatttctggtttagtaaaggtctcatatgaaaatgcgcacccgcaaaggggtatcctctattatcaaccgcaggatctggatcttacggctcgaattagattgtcgcggttaaaggacccgcgcgttatatgaaccccacgatccacgatcaacggatcacagcgccccattcccagatcaaatctgcgcccttagatcccagatctacgtttacgatttaatgaagcctgaaacacgcaccaatcgtccgatcctgatcggacgttgcccattcattttcctttcaccggtatccttgttcgatctagaccgttggtccacagatcaacaatccagcacgtctctaactagcccgagccgtgatcaaatccggccgttcattctgtcatctacggccatgagctcgtcctcatcctctgaccacacgccacggcggcgcaccttcaacctccgactctctctctctcttctttttttccacggccgaacgccaacaccgtttgcgcaccacgcggcgaatgcattccactccgagcgcctcccaccgcgcacgccgccggtgaggcctagaccctgcgcacgcgttctactctgtccctacggg

SEQ ID NO: 127995 - DNA, 617 bp, Zea Mays
caagagtaaaccacatcgacgctcaagaggctcagcaagcccctggagtagtgctcgatgagttcctagttgaatttactctcgtcgttgtactttttgattcaggagcatctcattcattcatagctactagttttgtagaaaagcatggcattcccactgcacatctagaaattcccttggtcacccgaaccccagggtcagaccttctatgccacctcaaatgctcccaagttaggattcttttaattggggtagtgttcttggcagacttagtcgtcttgccatcccacgaaattgatgtgatcttaggaatggattggttaaccaagcataatggcgtcataagttgcacagataagaccgttcttctcactgaccaccaaggaaagtcagtttcatgtaaggctcagccacccgcccaagatccaatggtgtttagtctagcaacagaaagcatatctgtagtagaagaattcatggatgtattcccagaagaattgccagggatgctgctagaaagagaagtagagttctacattgatctaattcccggcactgcaccaatcgtaaaaagaccataccgcatggctcccaccgaattggcagaactaaaa

SEQ ID NO: 127996 - DNA, 382 bp, Zea Mays
acctattaagctgtgtcacctcgttctgggaaatcttcaacttgtctctatgacgatcaagctctgacatggtaaaatggcgactcctctccaaagtggtgagggagatgctggcatcacggtacagtttatccagactgtctcgagaataaaaaagtttccgcatctcctcctatagacaagaagagtactaaatatccaaccaaaagcacaacataagatactattaacactcaaaagaggttacactgtgggctctttttctgaatcaagcaagcattcaaggaagaattcatggctcgggcaccatcaaggaatgtggaaccttgattcagatcagcttgatctgagtacaactctctacaacatcagaacaccgtcg

SEQ ID NO: 127997 - DNA, 492 bp, Zea Mays
ccccaccgacggcacacggcggacacgcagcgacgacgaatcggcggcgtccagatcgtcctcccaccgattcgacggcaagttagagtcccaccgcgacacacccgtgcgatcagtgtagacgccgagacaccgcgatacgcatccaaaaccggagcccgcggccctatctcactcgcctcatgaagtgagctcccagcaatggcagcccctggtgtcctattttctaggtgcgatggatcagtcgggaagggaacaagaggagcacagggagaagcaggtgcttaaatacccgagcgagcaggggagaagagatcggatcataccggccacccgcaaaacctgacgagtttgttacaagggaggagacgaaactggcaagtggggtccacgtggcagggagtatgcacaggtgaagctcagatggaaaggctggccacttgggcccacaaatcggcgaaacaaggcgcaacacagccgtgggatgagggg

SEQ ID NO: 127998 - DNA, 515 bp, Zea Mays
gaaagacagaaaaccacaatgtgcaactaacaagcgctggacctaaatatcgagattagaatatgcagaacaccagtatgcacatttgcataggtgaagagtgtgaacctgattgcagacatgcaaataagaaaaatttggattacaagtaataaggttcccaacaaccagatcaacgagatgaacaagcagaggtcaataggcgaactaacctggatacacgaaggtttcacagcatctaggtcacgaacgccatcagcggcaaagcgggagtcttgagaacggtgtccggcaagaacccaaaataaagaagagctggactgaggacgacgatagaggtaggtctctaaaatgtcaagaagggacgaggtgtagggggcacataataaactgaaggaaggtactaacccagtttctgtggagaggacaacagcgtcggccactatgtcgctgcagtgctgaagcgtacgcagccgtggggtgctgggttcaccgacgaggatcagacaaaggat

SEQ ID NO: 127999 - DNA, 493 bp, Zea Mays
gacgctgtctcgccgtgggtctgtgctactctcgtcgtcgctgaggttagtggccaggtgaggctccctcttctcctccctctatccctctcctctctatcccgtcgatgctccggcgagctgccgtggagccaccgcgctgctccgcttgtctgctcgccccgcagcgtcgagccactgtttgagggctcgttccctgtgctctagtgcgaccgcgcccgcgtgagcatgtccctgctccggcgagcgctcgatgccggtgccgccatgtccacctgcatgccccttcgttatcctgtaaccgcggctgtgcgtggtccatggaagaggagagagagaaacgaaacctgcatgcactttttccatgcatacgattcccacgggacgcacacagcaagaaaccgtctgtatgcatgcatgcggcatgcatctccaaattttggtcgcatacgacaatcatggcagttttccgcatgcagagttgtgacagatt

SEQ ID NO: 128000 - DNA, 676 bp, Zea Mays
gatcaagatccaacggtgcctattttaaacactagggattcaatcatggccgttggctcatgatccagcgatccacgcatgccttaatcgaaccgttgtcgcccatctaatctccaccctccatcccggatccaatggctcacaaggttctccttccccagccgagagacacacccggcggcgcacctagatcccgcggcggcgtgtcgtcggagcacagcgcgacaacacgatgatgtcccaaagagagaaagggtaggcgcaaaacgtagtagggacgacggcggaccatggagagggaaaattaccggtagacgggtccaccagaaccaaggcgacggaggatggcggcacgacggtggtgaagaagctccggtgaaaaatcaccgacgccaggtgccagtactggacccaaccgccttacaaactcccgtgttacacccgcgcgaacacccggaaccccgccctggctccggatcagccttggaatcacggaacgacggtgaggtcactccgcggtggaaggattccccgacacagcagcgcgagccaacggtgaatgcagagggcgatggagtttggacgaggcaataggttgcggcggattttatgctcaccctcgctggcggaatccacccatcatcagatcaacggctagtggccatcttccaccttc

SEQ ID NO: 128001 - DNA, 399 bp, Zea Mays
cgaaggggaaaagtccacagaaagtgggagcagtcgtcaagtatggcgagatagtacttataaccagatgcactaggtatcggcgaggtccacatatcacaatgaatgagatcaaagttggacagagcgcgtgactgggagaccgaaaaaggaaggtgaacatgacgaccgagttgacaggcgtgacaaatgtcggaggctataggccctttattacatgaaataatgtaacatgtaatatcagaatccgcaccatcgagtgcaaagagaacagggaaaagctcaaaagacgtccctaaggggatgcagggctgtaatcactccaaaggtgacgaagctacgaaagtcgttcctaagggagcgcagagtaagttccgaagctacaaaagtcgttcctaa

SEQ ID NO: 128002 - DNA, 686 bp, Zea Mays
ttgttgctttggccgcctcagctgagcctgtgccgaaggctgcggtcaaaaagatgaaggttcttacccaccggccacgttacattgaaccggctgtggtgcctgagtttggcggggaggcctcttcagctgctaaaacaagagaaactattcctcccgcgcaaaggactgaagagccgactataatgtcgaaggcaccttcggttgagctagttgaaacgaaggttgacaaagataaggctgaaaggtcaaaaactaaagaagtaacaaagatgtcagagattttaagcccttcaacagaagcaacagcgccgaagacacaaaagagttctgccacaactcctaagaggaggaggatgtcaaatgtgctagatgttgtattagaaacagcaaaaaccttgaatcctgctcctaccagaaaaattgccgaagcttctaaggcacaacctgaagctgaaacgaagcaggcagaagtcgaagctacaataattcaaactgaaaccgaagctgggccttcagagcccgctgagatagagcctgccgaaattgaagaaaaggcaacagaagaaaaggccacagagcaaatttcgtctgaaaaggttgcaactcctgctcccgaagctttaaaagagagcattgattacatcattcgccatgcttcgggaaagggactatctcaagaagaa

SEQ ID NO: 128003 - DNA, 605 bp, Zea Mays
caattgacatcacagttggagtttgtcattggaggaggtattgttgtctctagcaattaagatcagcaaatcatgcacattgaactaagtaggtagctcacaacacagaaatctatgctggtttaagtataggcccactaaatctatgtcaagtgaaaaatcattgcctaaatagccttgaggtctactaggatttatgttgagtttggttgagttgtggtttttgaaaaaaaatagttgtgagttgtgggctaagaaacagttgttgtaggatacatgtgagctgtgagaaagttgcaagtcgtgtcatggaacatatgtggcttttagataacacttatgagtggactccacatgtcattcatagtccatgctaaaaggaccaagacgactaaaggtgaattaagatcttctaaatttactttcacaaattaaaaacctatacttgaacccaactttacccccttatgagttctttaaaccctaagtttgaatcatatgctagcatggcaattttattaatacaaatgcttgaatagaattgctcaaatataaatgctcaaagtaataaagagaggattaggaatgtatcaatggtttgccaa

SEQ ID NO: 128004 - DNA, 554 bp, Zea Mays
acgactgcttcgacatgtttcgcatgcgacgtactgtttttagacgattgcatgatacgttggtggaaaattatggtctacttcctatccggggtgtcagtactatggaagctctaggcattttcttgtgggcatgcggggggtccacaatcatttaggcagataaggaataagtttggtcactccttggaaactattagtcgcaagtatagtgaagtacttaatgcactgtataagatgtcatctgacataatcaagcccaaagacccaaatttcatcgagattcatcatcgtttgcgagaggcgaggttttggccacacttcaaggattgcataggagcaattgatggtagtcactttccagcggcagtcccagcctcggagcaagccaaatatattggccggcacggttacgcatcgcagaatgtaatggtcgtttgtgacttcgatatgaggttcacatttgttgtcacaggatggccaggatccgtacatgacacaagagtattacaagatactttaataacttatgcggacaggttcccccatccacc

SEQ ID NO: 128005 - DNA, 477 bp, Zea Mays
catagcactgaacgaaagatcatcttcactgacaacctctcaaataaagaggaaagtgggaataaatggattacccaactaaataactgactttattaataactacaccaagttgcaggggatacccacaccttggtgacaatcattacaaagatccaacttcattacatatccatcataacaagcattccaatgtatgataagcaaactaactctaactaaaactgactagactaagacactgaattaagcattattacagactccgactctgtcgatctatgggtctaaatctatccgggtcctgcagtctggggtaccatagtcgaagcgaccacggggcggtgagcggtaagggtgctgaatcccgacaggggcaggagaaccaccatctagatagtagtgtgttgcgcactcagcacgcaattccgcaaccttcgcccgaaccttgcccaactcgtcaagggtgtggtccag

SEQ ID NO: 128006 - DNA, 403 bp, Zea Mays
gcccgtcgggtcagcccaagcacgacccatataaacaagttgcccatatagcccgtattaaattaacaacccccgaaatcctaaatcctactcgcctcttctcttcctcggtctctccgtctcgaccattgagccctgactggccgaccccaaatcgttgtggctcctatggcctcatcgagtccctccaccgcctccaccgcctcaaggctccagtgaccggtgattcggacaacggtgtgttgttcccctccctccgcaatggcatagcgatgattcccctcttggcctcccccatcccacagcggtacaattgctatccagacttcgacgtggtattctcctccctagctatcttccttcgctaccagtgtggttcctagcttcctacgctgcactttcg

SEQ ID NO: 128007 - DNA, 597 bp, Zea Mays
gtgtgggaaggagagctcaattggacaccctcgggggctgggttgcagctcgcgctacccaccagagccggatcactaccggcgacaccctcgggggctgggtaactgctagcaccaccctcgggggctgggtttctgcaatagccacctctaaggctgaaggatcctcagtcacctccatgggactcgggcaatcctgaccaacttcttgacatcgaagactgccttccaaagtcgacgatgcaggagacactgctcgggatacctctaatcccacgtctggaatttcatagcaaacatccatcatgtcgccaacagtcggctctgatagcatatcctcaggaacgacatcctcaagggcctgatcaaaatctgttatggacaattcttgaaggctgacaagagcagacagagctggagaaggaatatcactatcccccctactacctctgtaacgccggctattcttacgaatcagcggaacttcctcttcctcttctttgtcctcataaaaaatatggacaatagccggtgcacggtcacacccattgggatcagcttctgcacggtcacacccattggggtcagcttctgcac

SEQ ID NO: 128008 - DNA, 647 bp, Zea Mays
cgagggtgaagcaggcaaccagatcggctccgtgatctccagtgtttgttgcaatcacaccgcaacgagactaagcggggaaaacgcgatcaggcagggactgggctgaattagcactcgacaacggctgcttgatggaggctcagaggaaggtggcttgggttcccaggtgtacagcatccgtgatttcaatgaacggatcacgacgcggagaagggatttcgcccgccaggcgcgcgttctgttgagtttgttgcggtgctcgcggagaggatgagggcgagtccgtatgccagccatgcagtccgttaggatttgtttggctagccgatcaagattataagcggaatctgttcggagttctgcgatccaatcttaactgaatttagttgaaggtctcgagacagtggcccaccagcccgcattctctgccctatagcttggttgttgaggtcgtgtggttccatcggtagaatcccgagcgactgtttcatgtcgaagccaactgcgagctagagtagaaactgatggtgcgtgaattgttagtagtccgagcggccgactccaaggtattatttttaaatattcagcacatgccagctttgcgtcatcacggctcaagttcacaacaagaaaataaacaaatg

SEQ ID NO: 128009 - DNA, 320 bp, Zea Mays
agactatcaaggttgtgtcagaatttccagatgtgttcccggaagacttaccaggtatgccacctgagcggaaagttgagtttgccatagagcttcttcctggcaccgcccccatttctaaaagagcctacagggtatctggaccagagttggttgaactcaagaagcaaatcgatgagctgtcagagaaaggttacattaggccaagcacctcgccttgggccgcccctgtcctatttgtggagaagaaagatggcactaggaggtgtgcatcgattatagagctctgaatgaggtcacaatcaagaacaagtacccct

SEQ ID NO: 128010 - DNA, 321 bp, Zea Mays
ggttaagcaagtattgtgttgtcgttgggctgtcagtactctatgtggagtttttggcatttcttcgatgaactgtgccgcgcagaatgttattggcttcttgtcggttttattgctccattagttctgtagattttctcccttttggtggggtgcaaagaatgttagattacatgattaccttttcattatggcaagaacaaggtttaggaagattaggagttttgtttcaatagaactacttgtttcgtggtactgtgaggtgaggtgtttgatcttcttatacattcatctggtgtggatgtttcaccattgaattaa

SEQ ID NO: 128011 - DNA, 493 bp, Zea Mays
cccgggggtacccttgtggtgcttttgggtaggacggtgtcgtggatcgtaactcgatggtttgtgcttgggcatgagagagagagagtcgagcgagtttcagcaggttcgggccgctttgaggagcgtaataccctacttcctggggtggctttgtgggaagtgtttacaagtggtgtctaccgagttgtgaggtgctaaaaatgatatcacagtgaaggggatcccccttggccttatatacacgacagtagggtgcttcccgcgtacatgctgatgacacttttcctgcttatctcctagctaatagcgaacaaccttcgctgtcccgaggaaaacccggcgcctctgcttcgagttatctccaacgtttgaggatgtcaggcgcggaaaaaacgaacggccttaatgcgatcacgcccaagccgcgattaatccggtggtgggcccatcgctctcctagatcggcctgtttccattgtttccctctgcc

SEQ ID NO: 128012 - DNA, 335 bp, Zea Mays
atcctgtgaattccagtgaaaccaagtggtcatatgtgttcctctgtgtgccttgaacatccctgcaggttcctagctccttcgggagggttttccccacctcaaatagccatttccctaaaaccctaaattctcgcacaccacgtgttcggtgaaatgcccaaaccagccaaaaatgctccaattgaacccaaatttttcaggcactttcaccacacctccagtaacatattcgccaaatttcacgctcatcggatattccaggctttaatttcaccaaattccccgtttcgagcgatcgtttccgagccgagtgcccaaatctctttttcttc

SEQ ID NO: 128013 - DNA, 481 bp, Zea Mays
tgttggatgaaatccataccgggcagtgtgggtacatgctgcatcaaggactctggtcgggaaggctttcagatctggtttctcctggccaactacaaagagcgatgctgccgagttagtccagaagtgtgaagcgtgtcaattcttgtcgaagcaacaacacttgcccgcgcagcagctgtagaccattcctgtaacatagtcgtttgcatgctgggggctggacatgattggacctttcaagaaagctcagggaggctatactcatatactggttgccattgacaaattcacaaaatggatagagtacatgccaattgcctctttgacctcagccaaagcagtggagtttatccaggacataatattcaggtttgggataccgaatagcatcatcactaacctgggatccaacttcaccagctctgaattcttcaatttctgcaagcaaagaagtatccagatcaagtatgcatcagtg

SEQ ID NO: 128014 - DNA, 451 bp, Zea Mays
aaaagcacttgttctgacttaaaaggtataaaagaaacaattcttctagccacatacccttctttcctcatttcctggtatattgtgctaaacactgctgggcctcctgtggggatccataattgttgcttgtacgtcacctgaaaatgaactattgtgtcatatgctattttttttactcgaacgtgcaggaaagacggtccaacaatatgcagaacagagcaatttatatagatcgaatttttgcaggttgtatagagcaaaccgtttgaccatgccaagtatcatatcataccgtttgttgagcccaaaaacgggcaggccgacggtccggccctataggtcggaccatccgcggtgacggcgcgaccagtccgtgtgtgcaaagaattagttagggtttcgatattctagcggaatttgttggcaaaacatacgagattaacttgga

SEQ ID NO: 128015 - DNA, 672 bp, Zea Mays
cgcggggaagctttgcctggttcgtgcgcatcggggttgtggccggagcctgggtaatttctcgacggaatttcggcctccgtggtgtggccaccgagcaccgcagattggacacgtgatcgcataacagaaggtaaataaccaattgaatcacttccccatgtcctttcaatcgtatttacgcaaattggggcggaaaccaggcaacgggggcaccagtgcgtcgtgctccggcgggattccgccgtgcagactgggcggcgccgccgcgctctggcgtcgggcggggaagacgcctcgtcaccgtcagatcacttgtgggcggttgagattagatcgacccataccccttcactcgattaaatctgtgccgtcggttgcaggctttgcggtcgagattgggttacggcgtggatgcctcacgaccatcagatcttaatctagcggctgtcgttggatactgagttaggttttataaaaaaatctaatcgcaaccgtcagatagagatccaacggtccaagtagcccgataccccttcgccctggcctatttgctaaagagaccccgtaatctttacaaattaacccgccgtccgattcggatacaaactgagtcttaagacaattaatgagttagacctcgggttctctgttaatgtttgtgcagtccag

SEQ ID NO: 128016 - DNA, 489 bp, Zea Mays
ggatgaacggacctagaaaggactggccgcggcgagcagtttcttgcggtggcagaaacctgatttggggagaactccaaattcgcggattccagtgaatgactgtggctgattcgtggtggctggacagcttactagcctacggagctcggggaggggtcaatttatagggagggtaagcggcggtggcgaatttgaccgagcagtgctggcggtcggagctggagaagaacgtaggtgcggtgaacacgtatttatcgcggtggcaggctcatcgacgctgatgggactgcagtagggaatcgcggtgatgtaatggcgcggttaggacacgcggtggccaacggcgaaggcacgtcggtggtgagcagctttatccacgacggtgagcaaggggagaggtaccgcggctggccgggatggcgtccagctcaccggcggcggggatttttaccgagctacgtttatccgatggccacggcgcacgaa

SEQ ID NO: 128017 - DNA, 536 bp, Zea Mays
caagctgcctccttagctctgcaaaacggatccttccgagtggttttgtcagtatatgccagctgttcttcagaactcacatgactgatttccagtctcccatcgctaacacactccttactcctctcatgataaactggatttttactcagctattgagcagatctgttgtcaattcggaggttgaatttcttcacttcagtgcccaacagatcccctataagtctgcacagccacactccctgacagcctgtcgttgctgctgctatatattctgattcacaagaggacaatgatactaccctctgcttttgagatgaccaggtgataatgtttttgcctagaaagaaaacaacacatgtggtgctctttcacttctcaaggtccccagcatgatcactatctgaaaacctagaagttcaatttcagctcccttgacatacttacagccatactagaatgtgccagctacaaatctgataattcatttgagatagcactccaatgttctacatttggattctccataaacctgc

SEQ ID NO: 128018 - DNA, 450 bp, Zea Mays
cactttctttgtcttgtgatctttgttctttttggaggaatcttgttcatttgagatcaaggcatgattatctcttgtctttattggggcttcttcagactcatgaaatagaatcttagcaaatagttggtgaggtgtcatttcctcatagtcatcacggtcccttatcattcttgctagacttttatccttttctttgtatgctctcataaatagtctagtaaccttggagtcactccaatcttcacttccaagcactcttattttgttgaccaacaccattagtcggtcaaagagtgattgaagtgactcacccttagtccaatcatatcgggcaagctcactctccaaagcttcaattctgtgtctcttagctttggggtctccttcatgtaacattttgataatgttccaaatgtcacgagcatcctctcttccttggactttccg

SEQ ID NO: 128019 - DNA, 390 bp, Zea Mays
cagacacgtcgatcagactacgttattaatcgaccgagttatggcattggctgagcactggctgcgccctggcaacacgacgcaatatttgtgtcgttcgaacttggctgcgtcatgtgattgctatgtcgcgctctccattaattggattgctcccgttgagtcagaccgccatcgctgagtcgcgtattttttgcatgccctgtaggcactatctatctgccgcgagccaaaattgcgcctgttgcgcatgttgcgtggatttatcgtgtacccctattaccgagccataattgtgtctgttgcgcttattacgaaggcttgctatactgtcgtagccctgatggccgcacacgcgttgacgccagatacgctagagcttgtactcac

SEQ ID NO: 128020 - DNA, 458 bp, Zea Mays
ggcagcaggccctttgcaacccctttcccataccatcttggaaatgggaggacatttgcatggattttatcgtaggattgcccaatacctccaggcaccatcattccgtttgggttattgtggacaggttgaccaagaccgctcatttcttgccagtgcacaccacccacaagacagagaagtatgcagaaatttatgttgatcaaatagtgcgattacatggtattccaaagaccattatatctgacagaggagcactgtttgtggcacgcttttgggagaagatgcaagaatcacttaggacccaagtaatacgaagctcagcataccatccccaaacagatggccagacagaaagggtgaatcaggttttggaagacatgttgcgagcatgtgcactacactatgggaaggattgggataagtgtctttctttggcagagttttcctacaataac

SEQ ID NO: 128021 - DNA, 435 bp, Zea Mays
gcaggagtttatatatacaaaagggttgacatgctagagagggccatcgttggcacctctctctataaggttgcgggcacccaagacaccaccgttgtttctcttgttgcatgtgtgatgcgagcacactcacgtcacaacattttatttctgcacatgtggataccgtaaagacactgttgttgttgttgttacagtgtcaatcaacaactagcttgacgaacacggacgaatgtgttgttgctgttacatgagggcgtatgtcgacgcgctcttctttcgatgtgtcgtgcatcatatagtaatgattcatgaccctctactcatacagtatttttttggttgaacatgataaatatgctagtgcatagcgtatatatttcgctaccttttgtccatacctgatagcgtgatgctgttctgtacgctgaggaa

SEQ ID NO: 128022 - DNA, 516 bp, Zea Mays
cagccatcgaaaaggaaaaaggagatgaaaagaaggcgaagacctctttgcatggaagaggaggatggtgtgtaaagcaggaaggtggaagcagcaaggtaaggatccaaagcgcccactcgggtgaatttatagggacgggtggagtcaccgaggtgcgggtcgcaacggctagtcagcggttgtttcgaatcctgcgcgcacgcgcgccgcaaacggttggctgacaggtcgcacgccctcctccctctgcctctctttcctttttcatcccctcacagttaatggaaagaaggcgtattctacctctggcatcccctcttgggaagaaaaaaaggcaaggtggaatactgttcagaggtttgaaggtttggcccttgggagggatcagtaaaaccacctcaggacgtcagggctccgaggccattactgatcaggggttcgaaggttggctcctcggaaggacttcataaccgccctagaacacaaagtcagggatgattgtgggtacccccg

SEQ ID NO: 128023 - DNA, 426 bp, Zea Mays
gtgcttcgggactcggcaattgctcgccgtctttagcgttccgcctggatccgcgccacgccatggtcagtggtgttcgccctgctattgtcggtatgaaaccccctccgaagttcgccgtcgggccaattacatttttcgggtagtagaactagtggcggtgcaccgttggggcggattcgaccaacgccgatgagctgcgccgtcgcgggtgtagcttgccgccgcgtccgaggtcgggttggggaagacaggtctcggccgttcctcctggattccacgatctagattagtcgatgcgcatcggtctgggtggtcgtatctgggccgtcgattgtatggagggcgatgcagattacagctggagaatttaaatcttagccgttaggagccgatcggactgtcaaagatccctcataccccttc

SEQ ID NO: 128024 - DNA, 563 bp, Zea Mays
caagggtctgatgccgaagccgttgttgctaactttgtcttcaagaacatacaacctctgaaagatagaatgtactcggcttatctgtatactggggtcaaggattctaccagaattaccaatagacggattcctgatgtgggtctgctgagccgaattgacttgatgttaaggggcaaggtttcgaatgccggtgctcccctatcttattctgcctagaatctacctccatagagtcccttttctcaattcacttccaatcctcctgttcaagatggcaatctgggccatagagtgtgaccctcattggatgacatcgaggctttcatcgctccattccggaatcttcctgaagcagagaggcagtctcatttccagatgccgatcaatgctgatgaggccgaggtgaacgtcgttctcagcatgttggccggagaatcgtctgactctgcccatactgagtcgatggctgttgcgattggttagaactttggtgaggacaaagaagttcaaaatcctgaaggtgttcgtcgcaagcgatcgcgctgaacgaactacccaac

SEQ ID NO: 128025 - DNA, 636 bp, Zea Mays
aaacgaggccgtcacacgcgacaacccgcggtcgctcctttctcctaattttagaaccctgctttgctcctttctcctctctcgcggtcttgggcgactcggcttggcaatttttgtgccgccgcctgccgttagcgcttgctggcggctggcgccggtggagaagaactccagccgatggccgacgctgatcttcctcttcctctcccggtccgtcctatcctcttcctttctcgctccgcttgttcactgtaatggtgcaccctaaccctaaatggctaaaccttgatctgcgccaagctcgctcctctacctctacggctctatcgtctgccttgtggttggtggatctagtgctccggtgttgcaggtaaccctaaatctcgttccctcggtcctttcttcctttctcgctccgtcgccgtgagtcgtttgtgtgtgtcgtcttccttctcggtttctaggtctcgacgtatcatcttcctttctcgttctctcgctccaccgtcgtgagtcgtcttctttcttgttctctcgctctgccgccgtgagcacataaccctaaccctaagctcgatttgttcaggtgtgcgccgtgtgtgtgcgccacgcaccatgaggagccggagaacccga

SEQ ID NO: 128026 - DNA, 457 bp, Zea Mays
gctggcaagcaggaattgttgtcctcgccggccgttgcgagtgtaggtgagggggagttgtgaagtctttttgagggtgaggagctgaggataatgctatttaactatagggagatgggaatcattccgaaggttgaaccgatgtaaggtgtgatgccctcgctgtacataagtaactatagtttgtgtgatgaggctgtgcaccttcgcgcatccagctatgttcataaagacattgcgcacttggtctagtacgtttattatgtcggtccggcgcgcctgctgaattaatccggctgcacccttaggcaacttttgcgcggatagtctttttaggtagacttcgattttgcgcgtttgttgtgctagtccggctgcacccttaggcgacttttgcacggatagtcttttgaagaagacttcgattttgcgcacttgttgtgctagtccggctgca

SEQ ID NO: 128027 - DNA, 976 bp, Zea Mays
ttattttattagatcattttcttgctccctccattgcttacttgtcttattaagaaaatagcttacatggttgacattttaggcacggaaccaaactcgtccctagagatctttgttattctcccatatgatgctcgacaactctcatagttttatagtgttgctcttcaattaattgcccgacggtaatcgatacaactttaaatatctccctaatttttgtagatcggtactgatatacttctccactcatcaaacatcttgtttgaccaaagaatattgttgaataacttggctatccatactatagctatgtccctgaggctccatgcttctattgagataccattagacccatcgccttacacccctttcatcctcttcaatgcctctctctaatctcagatttttggatcgtgcacgaaacgcctattggtgtcatcatccaattgaaaggttgtgtttccattgaataatttgtcaaaatacccttgccatctctgttgatctcatccccttcatgaagagctgcaccattttatccttaacgcacttcacttgattgaagtttcttgtctttctttcatgaaccctagccatctatatatgtccttctctctttcctttgtactcaaacgttgataaaggatatccttgtatgccctacccttcgtcacatatacaacttgttttacggtcttctttgctaccttgtgcttctttatgtttttcatactcctgtcatggttcatatatctagagcattctttcttttccataacaaccctttatacttcctcgttccagcatcaagtatctttagcttcgtctccacctttggttgctccacacgtctctgaggttacctttcgagtgtaagttgccatcttctcccacatgttattcgtatcatcttctttcatgtgccatctttgatgatcctttctttaacaacccttgtaatctctgcttgttt

SEQ ID NO: 128028 - DNA, 816 bp, Zea Mays
acggtacgtgatcacgaccacaaatctacagatcgacggccgcgatcaacagcatcctaaatctaacccgatccccacgatcccgaacctacggctcagatcgaacgtgtccgaatcggtatccccaggtctaatcccgatcgctcgtgcgcgatccaacggcgcccggacactcacctctcctcctatctcgcgacggcggcgtatacctcccacacggcggcgccctcaccggcgatcgcgcaatccggcccaaacggacaccataacccgattcacacgacctacgcgtaattggcaactctccgaacccactgctaccactaatttcggccgacgtcgaatgtggagcccggcctacggtgcacggcggaaacccgtgcccgacgaccaattccgggcacgactttgggcaaccatgcattcggcttgacggaacatgtttaatggagggggaatggaatggagaacgtgaatctcaccggcaggggcgacgaatcgaggatagtccacggcgcgacgcggaaatacacccgccgttgacgcggcggcgagcaattcacgccccacaccgacccgcgacactgattgcaggcgcggacggatccccaggacgattacgaccccacacggccactcgtcgaggcaagaccacctgcaccgaaggagttcaccggcggcggcaatttcttccttcaactcgctcccgttcgaatttggcacgcggctccggcttggtctggcgaagtaggagggcaggagggttgcgggcggcgactatatacgagctggtagcccaattttgtaggaacggtc

SEQ ID NO: 128029 - DNA, 412 bp, Zea Mays
gaagattcggtgactggactcgtcgtcctctgcccgcccggccggcgttgggagtgactgactggtgaggctccgggtaggttcggtggtaggggaggtggaatatctgggatgccgacaactcggcttttcttgttcgtttgctgcccttcttttactttcttcgtcttcatatttctttcattagagccatcatcagtcgtattcgttatcctcctcgtctgtgcgatcaaacgtgcagaaaataccatcgatggaagtaaaaaataaacccagtgattattatacacatgccgctgctgttttacgccttttgagttccggagactacgccctcgcttagtcgtctggccatgcatttattacaccaccagttttcaaagtttgcctgttttcatctcgcagctccact

SEQ ID NO: 128030 - DNA, 635 bp, Zea Mays
cgcactccgacgagttttcaccagccgcaacaccaaaccattcacaccctaagtcggtctacaccaaattccacccatggagatcgtaatccatccctcaattgaactagttcagcccagagttattttgcccacgacggcggcgagacccaagggaaacctgaggtgttcccgacaactaggcgtggtatagcttaattggtggggtcgacgagcatcataaacacacgagagtgtcaaaacatgaaccagaagggtgagagcggacttggagatggctgaccttgatggggtgactcacggcggcgcagaaagtggatttgggggagattccaaattaggacgctacagtggacgatcggaggcgagggctggtgctctggcttcgtaacaacctagcggagctaacggcgcactcaatttatagcctccgggagaggtggctccgaatttgaggaaggaagctagcggccgaagagagggggtgagtcaccggcgagcgctatcgtggcattcacagtgctaggacttacggctgtcactagctatccctcaaggcttgcgacgacgtggtgaaacgaccgagagtgtggcataaccgagagaaacggcggcacgacagcgatggtcgcgcg

SEQ ID NO: 128031 - DNA, 935 bp, Zea Mays
gtcaattttattggtttcctttcttacatttgatctatcatatacatgattatgtattgcttaatttatgtgtttgttggatggttggacaattaatatcatcggacgaactacccgacaattatccggtacctacccgagtagtatccgttattcgtttcttacccgcccggattattacccggtcttgtcctgtatccgtcccgaatcttaactacccgtatccggtcccgtatacgagaaagatacattagggtaggatacaggatgaccttgtatccggctgtatccgtcccgttttcatccctaatgtgatgttaggaaccaaaccatatcgtcccattacatcttcttctgatacttcatatgttctacttaactacttaggtttgaagtttatcttaatttgacctcttctcataagattcagaacaagttcatactagtgaaaacattggcttcatattacattagcatagtttaggtgtcttcttggtctcattttagcacattaattaggataaaactcttctacatctttatcgccttgtgtgtgaccatagtctgcatccgaatacgcccatcgttccctgcttccatgcaacaatttctccacatcagtttctacacccacctttttgtgcacattctcgccctctagtccaaaagcagctctcatagttcgaagttgcttctcctgttctaggacttggtggctccgtgtccgtgaacctaagaggaatcaccatcttgtgggaaacaaatgcaacgacatgagcaacttcaaacagaacaacaatccaatgaaagatgtaaagtgcaatgtacgttgtgccacctaatcttagggctcctttggattgaaggattatttcctgaatcttgcgttttcctttttttgaactaattactataaaattcctgtgagattcatg

SEQ ID NO: 128032 - DNA, 578 bp, Zea Mays
tgtggtgcggcgtgtctctgtcgtagacacgggtagggttttggatccgtgggacatggtcggcaagatattaggggcctgattggttgtcttcccagagtagcatgtcccgtatctaggaaccaggatccagcaggccatgctatgtgcatgcaaaaagggtatgtttggatgcatggctgtcaccggcctggttgcaggagatgttgtttggtttaaagatgtagtacacctagacaacagcggccagttcctttttgcatgccgctggccaggctcaggagaaacgaaggaaaaggtcgcacgccgctggccaggccgaggggtgcctcgtgcatcaggagggccaggcccaatagactctccaggtaaccaatcagccataggttacatcccatgagcctggatgaggaatatacaggtaaccaatcaggccctaggtgtccgatggcctcgcgcgccggccggctgtccagcgcggagcagagcggagcggagcagagccgtcgagggaggcatcgttccgacgaagccatgtcgtacgtcctcttcttgcaggacatgcatgtatagtcgtt

SEQ ID NO: 128033 - DNA, 353 bp, Zea Mays
cacaaaacttgtaaggcatcaagaagtgaaaagaaatcaagggagggataggtaaagcaccactcctaaactaggatggaaaggagaaggctccaaaggttgggttcaaagtaagtgtcaatgtaaagataagatattacaagggttaaaggcgataccagacaagggtgtaagagaagaggtgacggtgcaggagaaccaagggtatgagtacaataaagaatgcagctaaggtcatgctggcacgtggcaaatataaggttgcgaccaaaggcgggataagtaaaacgccactcccgaaatgagatgggacattggagattttagataacagacataatgtcatcacccag

SEQ ID NO: 128034 - DNA, 605 bp, Zea Mays
taagtatgtagatggagttgggtataaactcctagtagttggttctatttattagcatataatgttgttatcttgcctcggttttatccaggagtattattaggagaagttgttagcctaagggcggcaccacaatataaggtgccttagtttgtattagagaatctaccaaggaataaaagtttatcttcccttcggcgggactcacctcggtcaacctggtcgacagtgaaattcctcaacctcactaccaatatgctctccattcccttccacactccttgctatagctacacggccccctgtgcacatctaggagaagacagagatcagccctacaacatcaattagtatcagattcatctggagcatcgccttcaatggctggctttggtgatcctatggcaatgacagcagccgagaagctcggctttctggtaacccaggttacgtccctgactgacctgggaacaaagctgtccgcccaatttgagacactcaagtactcaaccggcgcattgattcccaagacacgcgcctcgcgtgcatggaaacaacaaccgggatgctatagacattggagtcagcggggatgaacctcctcc

SEQ ID NO: 128035 - DNA, 351 bp, Zea Mays
tacgaagggcccaaatataaacgcttaatctaacgatagcattaggggtcagctgatgaaggtaaaccccaaacttcttcagtacagtagcaatcatcctgtttagggggaatcttaagccagctttaagaaaacttttgaagactactaccacatcttttcctggttttgggatagtttcttctccaccaaaacgaattaattccttcttggtctcactgaaatagcccagcttcaccattttaggaagatcagcttcagagatagtggactttccaaagtccagatgactaggtttacttggtaccccgcagctgtactcatcctcggaaccaacttcttcaacattag

SEQ ID NO: 128036 - DNA, 552 bp, Zea Mays
atcaagatatccaacaagaagtcaaatgatggattcaaaattcctcgaacaagctcgtgcaacggctgcaaccaaccaaaagaacattgaactcgaaacccaggtccatctattaaatgaagaacttgcaagtgaggttgcagaatgggaaagaatagtgcaagaaaaaaatgcaagcactgcaagaagaagaagaaagaaaaaggcaactatttagagaagaaatgaggaaggaaatggttgttgcccttactgcagcacaacaggtataaaatttgatatttgtatcttttaccaccattgctattggaaacttcttcaacataaattgtttgatcaattgtttaatgcaggccaactgagaaagcatcactccagtcgatcctcctttagtgatcccaactgaaactcctgaactcatcccagttgatcctcttgcaccaacaccaagaagtgaaaacaatgtttgtactccagacacaaacaacaagaaagacaatgtgccagcgaactatattagctcttacgctctaaggaatgttgtgacaagac

SEQ ID NO: 128037 - DNA, 331 bp, Zea Mays
ccccaatccacttcgatacatgtggatcgggatggatactagagcatccaaataaaacctaatcaagatcttgcacacagtgccgctaccttgtgtcatagtccgcaccagtagatgggtaggctatcggtaggatctttccttggcaccatgacgccatctacgctcactatctcactaggtctcactatgccgttgcaacgcggcaatggctgccgcttgctgccgctgccatgtaccgacgcatcatcgtcagccctcgctaaccctcgcatgttgtcacctcaccgtcaccgtttcgcgttggattcattgacatgtgacacgccac

SEQ ID NO: 128038 - DNA, 404 bp, Zea Mays
ctgggaagactgctgcttcggctgcttcaagcgagcccgcaccgaggaggaaaaagctgaaggtccttactcaccgaccatgctacattgaaccggccacagtgcctgaatttggcagtgagacttcttcagctattgaagccaaaggacctgctcctacgcagaggattgaagagccagttgcaatgccgaagactgacaaaattgaaggacctagaatcgaagggacgaaaacactagaagttctaagcccttcggcgggagtggaggtgtcgaaaacacaaaaaggtctaacagcgacccccaagagaaaaaggatggctagtgtactagatgtgctggagataataaaagctactctggggaaggttgccaaggcttcagaagcacagattgaaaccgag

SEQ ID NO: 128039 - DNA, 540 bp, Zea Mays
gttagattagggttccaaacctcgggtttgaaaattgggatgttacaaacctaccccacttaaaggaatctcgccctcgagattcagacggggctcgagaaaaggtaagggtattccctcctcagagagtcctcactttcccaggtagcttcctcttctccttctctgctccactgaaccttacagagtcttacttctgagttgcgggtctttcggactgctgagtcaagaatctttattggcttttcccggtactggagatctttttgaatctgaattgtctctgccttgatgtggttctctggtacttgcaggcacttacggagctgggacacatgaaacacattgtgaatatctgacatggattctggtagtgcaaggcggtatgctgcgggtcctactctgctaatgacgggataggggtcgatgaaatgcggtgctagctttcctttcatttggaaccttttgaccccacacatcggggagaccttgaggtatacgaagtctccttcctcaaatctgagttccctccgtctgttg

SEQ ID NO: 128040 - DNA, 641 bp, Zea Mays
ctgggcctcaattaaacaggaacacaggggctaactcgcaagatcgccaagactcagtgaatagggtccgtggaccgagggttaattttccctaaagagaggggctctttaacacttttgccagggccgaaagggtatcctttaatcagggccgtccgatcacaattacacggcccggattagatctgacgtcccagaactccgcaagtaaccctggccgtccgatccactctggacgcgcaagatcagatcggccataggatgaagcggtacgcacaactaaccttacgatccgagatctacggtccacatcggatggagcgaggggaatacccagaattaatcctgaccgttcgtacgctaatcaaagactcacgcgtctctccccaacccgagtgcgcccaggcggcggagctcggctcccacggcgactagctcgccgggaagggtaaaatctggccacccactcccccgagcccaaaattgactagtgctaaacgttgagaagaacatggcgaatgcactaggggggtaatttaccttgtttcatggtggcaaggtctctgttcacggcgcagggcggatccgagacgacgcggcagctctgacgagcgattcagacagaatcgcccacgatcccg

SEQ ID NO: 128041 - DNA, 482 bp, Zea Mays
gctctggggggcaggctcaatcgggaagccaagcaaagctccctgactcaagcatcacggacagtttgacacctgcgcgtggacggtccggtgctcaaacagatggtctggctgactcagccggacagttcgcccataactaggggtgtcgacctctacacaaacaaaaaaggggacataggggtaaagcacacataacgcacatggttggctggttaaagtcggtcctacttttgatcaatttctctccaaatatgctagcaagaaggtcgttctacgtgatcggccaacaaagaaacactggcacccgctaaaacaaaacggcacaaaaagcgaagcagcaagcatcacctagtcatccagtgatgccagaatgatttcacccggctattcatcattgatatattatcctattcaaatgtggaacggtacgacgttgaacccatggtacatgcatagttcctttgcctctttaggctagg

SEQ ID NO: 128042 - DNA, 292 bp, Zea Mays
ggtgatgcttggagctgcgaagctagaggacttcgctcgtcgagatagttgatcccctagaaagcggcagctggtggaatgaagggtatgcgctgtgattggaatgggtctcatgcttgagtgtgttgctagagaggcactagcggtgcgaggggtccacgttgcaggttgtataggccttcgccttgcatgagcgtgatctcttattctagctcccgagctctctgctcctcatcttgtatcatctgacgcactttggcttgcatggtgactcgttggcgcttggcttcga

SEQ ID NO: 128043 - DNA, 387 bp, Zea Mays
tgagcatgtcgcaccgtcttaagtcgttgccaacttaagctgattgctccgttggtagggtatagtggtcaccctaagttgggtaagcgtgagcatgtcgcatcgtcttaagtcgtcgccgacttaagccggttgctccgttagtagggtatagtggtcaccctaagtcgagtaagcgcgagcacgttgcaccgtcttaagtcgtcgctgacctaagccaattgctccgttagtagggtatagtggtcaccctaagtcgagtaagcgtgttgattacgagtccagtcgaatcgaagtcagttgatagtcagtagtttgaatgcctttgaaaatgaaaactttattgatgacgtatcctccaattacagagtacaatgttgctccaat

SEQ ID NO: 128044 - DNA, 1588 bp, Zea Mays
ttcatagctttagggtcctgggtataaccggtcacaacatcagacaaccattggggtgtgctcattgatatcgccgcaagagtaagatgatggggacgtctggacagagcgtctgccgcaccattgtctacgcctttcttgtatacaatctggtattgtagccccaaaagtttagtaaaaactttttgttgccacggggtcttcagacgttgttcagtgaggtgggacaagctccgttggtctgagtaaattacaaaaggtcgatgctgaagataggggcgccaatgatcgacggccaacagtatcgctaggtactccttttcataagcggataatcccatgttcttaatgctgagaggtttgcttatataggccaatgggtggtgatcctgaatgagcacagctccaatgccaccaccagaggcatccgtctcaatggcgaaaggcttggagaagttgggtattgccaagacaggagccgtggataacgctgtcttcagcagagcaaatgctatttgttgctcatctgtccaaacaaacactgcacctttcttaagcaactgagtgagtggcctggcgataaccccaaaattcttaacaaattttcgataatagcccgccaatccgaggaacccacgcagatctttgatgttgtggggcgggggccaggaagagatagctgcaatttttgcggggtcagtagcgacccccgccttgctgatgacgtgacccaggtaagcgatctcttgctgagcaaaggaacatttagttagcttcacttgccattggtccttacgaagcaactgtagaacctgctccaaatgcagtaagtgattgtcccatgtatcactgtaaaccaagatgtcatcaaaaaagactaacacacatttacgcaataatggttgcaaggtccgattcattgcgccttgaaaggtggccagggcccccgtgagaccaaaggccatcactcgaaactcgaagtgcccatggtgggtctggaatgctgttttatgctgatccgagggatccatacgaatctgatgaaatccggcacgaagatccaaggtagagaaccatgctgccccagaaagttcatctaaaagctcatcaatgataggaacaggaaacttggactttgttgtcaatgcgtttaaatgtcggtaatccacacaaaagcgataattgttatccttcttcttgaccaggatcacggaggatgcaaaaggactcttactgtgttggatcaatcctgaagccaacatctcagccacttgagcctctatctctgtcttaagagcaggagcgtaccgatatggtcgcatttgcaccggtcgagcaccgggaagcaacggaatctggtggtcgcaatcacgaacaggaggtaaacccttaggaatgtcaaagaccgatgaatactgatcaatgatatgctgtaattcagctggcagatccttaatgaccaattgatctttgtctgacaaatccaccagtcgacagagttggataaaagctccttgtgtggaagaggtctggactccatagagcttgacaaaagttcgaccatgtggaatagataaccacctatctg

SEQ ID NO: 128045 - DNA, 423 bp, Zea Mays
aatagggtgtcgatactgtatggtgatattattaatagctctacaatcaatacacatacgccatgttccatctttcttaggcactaaaataaccgaaacagcacacgcatgtaacctttgtcgagtagttcttgcacttgtcactgaatttcttttgtttcctccggatttgtcctatatggcgcacggtttggcaaagatgcaccaggaatatgatcaatttggtgctcaattcctcgtatgtggcagcccctctggtatctcacatggaaatatagcagaatacttgtaacaccccaggtgttaccttggcactagaagctgtgatcacaaggggtaaaggcttagggcaacacttgagaacttggagatcaagtgctaataaagttgccaatgacatgagaagcattactccaatccttg

SEQ ID NO: 128046 - DNA, 622 bp, Zea Mays
agaaaactcgccagcgtccttcctgggtgctcccgcctcgtgtagcttttgttctgctttcgtcggcatcgatcaaagcagtagattccgaaaggctcttagctagctggcccaacaaaaaaggcccagccgcatatgcgcgtgtaccacaaggggggcctgggccatcctgtgctcctttttctctttcttcgactccactccccgtaggtagcttttagagtgtgtttgattgagaaatgaaggagaatgtaaccgctctatttatattttttggatgtttggtttctaacgaaagaagagtggagcaatttctgaaatcttcatatgagaatttacccataaatagttgggaccctcccactccatcaaaacgatcggatgtgagcgttttcctccctctcctccacaccactcattattcttccaaccaaacaaaaaacggagcggctccactctattctactttctagccaaacaaaaaaaaaatgaagtgacttcattatgcttgccaaacacataatggaacaactccattatcagaaacgggaatgaggccgctccattctagttgactccccaaccaaaacacccttagggaattaggacacttgtgcggttg

SEQ ID NO: 128047 - DNA, 504 bp, Zea Mays
gaggtgaagaacggttttgattgaaaggtcggatcaccaacctttgtcgcttttcaggcccttggttggacctgtcacctccatagccctttgacttccccgagcctgcatacttagcttcaactaccagcgctgtgctgacagccctgttgtaggagaggtcaaggcaggtggccatctttcgttgcagccggtcattaaggcctctcataaaacagttcctctttttcaggttagtgttgacctggtcaatggcgtactgggacaaatgattgaacttgttgagatactgtgtaacagtatctccaccttgtttaagcttcatgaattcttcttgcttcatatggagcactccttctagaatgtagtgctcccgaaatgccaatttaaattcgtcccaggtgacttgatgttcggcaggctgaatggccacataatttccccaccaggtgctggcagggcctcttaactgctgagcagcaaacaagggcttctgggtctcca

SEQ ID NO: 128048 - DNA, 448 bp, Zea Mays
ctaacagttaagtcatcctatagtggagggatggcgggttagtttgtaataacacgaggggctccactgaaaaatagccacacgaaggggtactgatcggctctggccgttggatcttgcatcaagggccatgattagatcagggaaggttatgaaccggtatgcgttcactgtcctaggatcagagatcgatggcccaaaattgttcacgctacagatctagcaaggcactcagatcaatgatctacggctgacattaacccacgcggggagtacgcggtccactcatcctgaccgcacgtgagtcgatcaacggcccgcgtagcttcttccctgaccagagctaggccggcggcgccagagcatatgctgcagcggcggacatcgccggtgtgaagtgcccaggcaccacagtgcactaacctacggtctggataacacatctcga

SEQ ID NO: 128049 - DNA, 893 bp, Zea Mays
cttaaggtaagtgagagtgctagagacatcatcaagggcaagggcccctggggcaagttctggatgttgagtacggatgaatcagaggacgattcgtgtggggaggacgacacatcaagcgacgatggcgtctctacacgagcactttcagtctggtcatcgcaagcctcaaattctgttgcaccaggggagtcctcagtggaggcaccattgccggagaaggtagcttctttggaaagatcctcggttacgccggttggtaaatgtgtccggccatggaacggcccattgccaaagcctcgaaggtctcctaagctaacccttggggatgccttgttaatggccaaggcgggcaaattccatggcggccggaagagaaccacggcgacgagatctggtccatcggagaccatgaggcggcaccctccgttgagcagcccgagaatggagaatacgaggcgtgggagacgaacggaacgatccaacgcatcgtcttcttcatcgaaacaggctgctgcagcagcatgcataggtgggcctggcctgagagaaagtaatgcgtcggtgggccagagtggagacgtgctgtggcgttgtgcagtccagaacgaaccatacaagccgcccgtcggtcttgtggttctttttgacagaacacacgcgtcgcttcctctctaccaccgagcgccaaagacgaaacgtctggctttagggtcccaatcctacgcggactcaaccaaggtgccgccgacgctacccatggagaaccgcggggactcccagcaaggagtgcagggagggcgacctgtcgagcctggcgcagggagggctgcaccgaggcagggattccagtacaacggctcaggtcaattccgtccaggatacggtggcgg

SEQ ID NO: 128050 - DNA, 353 bp, Zea Mays
gctggaaataccaagaggctgttggcacattaacgatttctgatattgggccggttcacacggtgaagcctaacataagcccagcctgatgctggcccgtcgccgttccgggagtcttgatctcgggctctcggcccatctaacagcatcaagcgaataaaccggtcacaccgtgaccacgagatcggcatgtccacgaaatcgtggttcattttgaacttcccatcccaacctaatggctatgctatgtgagaatttttatttttgaaaaaagagtttcttcgagactctacgcgtgcatacttttagaccaagttttatcaagcataactatggtccagtaacgatttgtg

SEQ ID NO: 128051 - DNA, 321 bp, Zea Mays
cggacccttgttgagatggccaggacgatgcttgatgagcataggactcctaggcatttttgggccaaagcgatcaacactgcttgccatgtgtccaatcacatctttcttcaggcttttctgaacaaaacttcactgcgatttggaaggccacccaaggtcaatcatttcgaggtatttggctgcagatgctttgtgctaaaacagggtgatctggatgagtttgagtcccaatcttctgatggggtttttctgggttatgcattacattctcatgcttatcgtgttcttaacctagagactaaccgcattatggagact

SEQ ID NO: 128052 - DNA, 299 bp, Zea Mays
ggcatcgaatggtccaccgttcagcgagtgcaggcgacctggcggttcgccttcccccctgcagcactatataaaaaagccgggttggtgaggagttaccacaacattcattgccattgcactgttgtgtgttaaaaaatttaaccatagccgaagctttctgcattacactttcgagcgaacacttcatcgtttaaggttagcttcgtcaaacggtaaaaaaccgtcgaaatggccagagtgcgatcaactggaagggtgtctcgtgagggggactaaaccgaggccgctaaaacgac

SEQ ID NO: 128053 - DNA, 1110 bp, Zea Mays
ttcccctgtctagctacaaatctagccctcaaaccccgtatagcactatcattgtttgcagcattatctagagtgaaggaaacaatcttatcttctattttccatgcagtaacacattcataagcagcctgtcctatcacatatcctttgtgtggagggtctaactcaaaaaagttcagcacacgatattgcattttccaatctttatcaatgtaatgtgcaaccaaacacatataggacaatgtttgattagatgtccacaaatcagtggttaaggaaatgaaatccacacctttaaggacctttgctaatgattccttttcagactcataaatctttaaacattcagctcttatggtcttcctaccaacaaattcatacaatagattcatatacttcatgagaatattaaactatgtgtgctcaaccattctaaatgggtactcatgaactatgatcattttggtaattagtttttttactcgctcatgattataatctttaggtgatgagatagtagggagaccagatccagattcacctatcgttgaaggagcaaagttcaatagagactgatcaagcttttgttcgatatgcttttgatacttgtcacagttcttcatatgcctcgataatgtcgttgttgttgacccttgtgcataactataaagctttttacaatatttgcactttgcctttagtaatggattctccttatcaaccgggtttggcaaattcaccttatcaaaaacctcccaaaccttggatttgcctttgctgcccccctcaaccttaactggtttattcacccctttacgccttttcttgactctattcacatctcccccaccatcagattcatcaactctaacaacatcgacatctttcccacctagctccgtcatctcatcctcagacatttcatcattcttgtcaaaggagttgctctctgaatcagcctcatctctttcactcctccctttcccttccgcagttgaatggaatgttaaggattccatcacttaacaatctgcaaacaataccaagaaagtgaataacaaatgtgtcacttagcaatgacagtgaataacagtgaattacaaagtgtcg

SEQ ID NO: 128054 - DNA, 337 bp, Zea Mays
gtgagatgaagtggctcagggccgcaagacatcccatgacccactgaactcccttgacatcttttataggccccatgcctatgattgccgagaccttctctagattgggctcgatcccttgttctgagactatgaaccccagaagcatgcctcaggggaccctaaagacacacttcttggggttgagtctcacactcttagctcgaaggcaaccgaaggcagtttctagatcggtgatgaggttgtcgacctttctagtcttgaccactatatcatcaacataggcctcaaccgttgagcctatgtggtcgccaaacacatggttcatgtaatgttg

SEQ ID NO: 128055 - DNA, 507 bp, Zea Mays
aaaattacactcactgcttgagcagactacaagactgctttggaagagatccatggcctctgccgcgacacctcggcgtcccctgcgttgcggtaccagagcggcaggagggccacgtttgcagggaacttgtcgacccaggaacggagatccttcttcaaccacactgatgaccaagtggcggttccctgtgggttcttccgtgaatttcccgtcccagaacctggtgagctccttgacgacccaaaatcgcatttacacgtacgaaagaactggtgatttcgccgctcatgatttggccattcgagtggcgggtgtggccagccatctctcgtgatcgcgcgccatttatttcgccttcggatgcaagcacaaatgatacgcaacggcttttgctgtcgcgcgcggtgcagatcgcaaagaacgtcactaatgagtgcttttagcgttgacggcttccagacagactggccatggagaagtgcaggggcgtggtggtggcgtcgg

SEQ ID NO: 128056 - DNA, 1965 bp, Zea Mays
cctaactgtcctatatatttctggacatatgtatatacaagaaatattgcgatatgcgttatataagtctgaaagtctgaaattgaaactgagtaacagactgaaaggcaatataggcatatagcactacatcagaactgaaattgaaatattgaatacaaggctacaagcagtaatgcagtacctactacctagagcagatcatcatccaatcaaaaagcatcagcagcagcttctcctccaccagtagattcagattcatcagaactcagacgataggaaagataggaaagggagagaagaggggggagcagggggggggaccttgagatgagagctcatctcgtcgctagtgttttggagccaccactggtgttctggagccgcagcctgtgttctggactcagcagaggagaggaattgcctttatactaatgtagacgggccaaaaaaatagaagcccactagcccactagaaaaccctagtcgcctggacaatttctggtcgatttaccatctagtcggacgactaattgcccctaatcgacggctagtcggacgacctgatactctagtcgagtcgtccggctgatcaaccactaccaggcgacctgcctgactaatcgcgattaatcccgattagtgggacacttgaaaacagtggaaaatttatcaggggaagtggaagggttattttgaaaactgatgcacgatgggagggttgttttggaaaattatcatgactgcttgcacggtttggaccaagtggttggtttgcacctgatacattccctttacacaatatttactaatgatggattttgtagtgcagatgaagactggatgtgttgcacttgtattatgtttaaacataagtgttgatccacctgatgtaattaaaatttccccttgcgcaagattggagtgctggataggtaaacttttagttgactatatatttccaaatttcaaattagttgaaaaaatacagtaaatgaactgcttttcacggtgaaaccatgtctttcttttttatgaattgcgtttctgaatgccagatgagagcatattgttaatcagaagtacacaagtcttttaatcctaggcacattggggtaggctggagatgaaacccagcatgagcaccaaccagaagtaaaaagagaagggaaaaccttatacaaatatacacagcgcatcaacagtatagtaacattattaaagaatctaaatctagacttctagagtcttgttcatggttcattcttgtagatagctcatagctggttttcatgtgcttccatagttccatccaaggaaattctttgtgtgcattcggtccttccaagtaacttctcttttggcatattgctgatttaaagtaaatcacaagaaggaaactatctttcacctacttttttcaaaatacactgttaaaatctatattctgaaaatgagattgtttttctcaatagtttttagaggaatcttccatctgtttaaaatttgaagttgagaattgacatttaattgtaaaggaagtgaatttttctaatgtaagatactgcacctattggctgtggccatggatatataaacttatttattagtccttgggatggttataatgtcaagcaagtgttaccagactttaggcaatgatggtaatttatatttgttgataggtttgcacttcattactgttattaacttattacacttggtgcagttggtttgtgttatgttcatagacctattccttccttttcagaccctttctctatgacacctcttaaagctcttgaaagtattggaaaaacgttgcattcacagtatgagcgctggcaacctaaggtaaagaacatgcttgtctgtttaacttcaatgttattttggtgaggattatttgcatcttcatgtcctatttctagtggcacttgcaggctcgatacaagcttcagctgg

SEQ ID NO: 128057 - DNA, 282 bp, Zea Mays
gtcaagtaaagcacgaacattgcaaacaggacagtgaacgacaatggtaacgaacagttgctgaagctgaaacgccgaggcagagactattgcctcatcaaatagaaggttccactcgttgtcaccttcgagcaaaccacgtgcttcgcacgcctctctgaacgtatcgtacacaatatcctggaaggttcttacatcaacaaacctcgttgcaccggaaacaaacatcaagagcatgcgtagatagtataacttcccagctgttgggtgtatgtagtacat

SEQ ID NO: 128058 - DNA, 455 bp, Zea Mays
ggctacaacgtaggttgcgggttaggcgagcgtagcgagaatacggacgctgtcgtcctgtcccctccgcctattccctcacacctcgataacacatgaggaatagtagaggtcaaatgaagggtgtccaagcggtgcattgagtcaatggtcttgcctcggtaacgcgcagctttctgatgcggtggaggctttgcgggctacgcacgccacctccatttaatgtcgggtgtgcagcacctatcactggcgtgaagagcgatgcactctgctcgccttaaacgtaggtggccccctcctgcctgagcttatgtcaggttcttcccaacggcttatgtcacgcaccttaagacacattgcagcaccgggtcctcaccgagcagggagcgatcaacgaggagtatatgtaggtgtggtagatctagaccacccctagttggggtctggaaggtact

SEQ ID NO: 128059 - DNA, 1245 bp, Zea Mays
cataggtcagtacatctcacgtgcacacgaccaggggaaccaacgagtgaaataccaacaagaatacaagataaccagcgtacaacttagaaggaagataagatagttttcaacaacactagtggtcataataataagaccacaatataggaaaagcttataacaaggggagctggagtacaggggagggagcgacactaagcaggggaaagtacatgatatgtcagcagtcaagtgtgttgaacagttattagacaaacaaaagcaatagcaatatctaagatttactggatcagaaggacaacttgcctggaaggctccatgtctaacactgtaatgcatttcctcctctatacaatgaagaagaaaagctataacatttgattcttcctgctcatgtgatggtcctgaaaagcccatattgatacaaaatgtgatagcataatactttccatttgaataaggacagcttttcttgccttttaagaagataatacagtagacttgtgcagtatgtaaataatgaaaaatgagaaaactacgaaagaacattatttaaaattcaggaataagggctaaccagcacagcaatcctcagtgagaaccgcaaagacatccaaagtaggtggcacttttgaaaaagctgtctccaagcaacttagaacagtaacctgttgtgcactcatgtaaggaacagggcacccaagaccactggttcttcaatacaggaattatcaaaaaaactaaccagcacggcataatgttcagtcttattcgagtgtttgttcagtaatctactgcacaatactttaatgactgttggcaacaattcctttggcatccgagcgtacctgttcatctaacatattattaactatacaaaatcgattagagaaaataaaaaaacaggtgtgtcaagatcatacggtgtagcagatatcaaaagaatgagaactctgaataatgccgcaagcaaagtagcttgagtttcacgctgtatcaagtacagtgctcctgcaaatcagaggggggcaaaatgtaaaatgcaaaactgaacagatctcttacaaagtggagggatctagttaattaatcacagagaaatggctgaacaaaaatattcaagttccaccaaaataaagggacaaaatgctggattttaatgccagagatgaggctatggataactttagttaaataagttaatagtggtagtgatagtagcatgaaagatctgttctagag

SEQ ID NO: 128060 - DNA, 520 bp, Zea Mays
gatattcaaagtgcagacattcctcactgcgttgtgaactcactaataaactatgacctgtgaactcagtcatgtctgcctctaatgtgagctgtgaactcactagtatgagatgtgaacctctagtttggaaaaaaaatgtggctctcaatttgcaaagatggtcctgtgcaattttcacattacatcagcagtggtgctcaattttcaaaggttacgctgtcccatactactagtgatgtaactcccagaaaagcagcattgattgaacagcagatcacagaacatgtagggatcagatcggtggtggaaagagtgcctcaaaataatagcacagtccagttcaatatgatgattttctgagtttcattttttacatgggttaagtcagttaaacattttctttgccgctgtcaaattcttttgaattctcaagattatactccaaaattcttttcaatacaatgtcgcacaatactcattactttgccagcattgcattctcgagaatacactgtcg

SEQ ID NO: 128061 - DNA, 516 bp, Zea Mays
ggtaggtaaaactaaatagtctcaaaattgaatagcaaggtaactgtagctcctccaataccctccattccccttctcccaaacaagccctaagtgggtttatcgacccacccagtaggtccatcgcctcttagaagccaccatcattctactagcattatcacaagcaacacccgctcttagatcaaaagtgtgtttcctttcaatggctcacaactaaaacatgcagggagacaatgtcggagtgggctaggaagacattgacatcggggaggaccaaggagaaggcgaggatctggatgacagggaggtgacgttgacaccaagatctaccacttgggtgccttcgtcaacagcctcgacgccaagatctaacgcgccaagtcacccactatgtcggcactcgggcttggaatctcgacgcgaagactcatggtcatggcggcaagacatgtaactttgacgctatgagtcacgacaccgaacccgcagtcaaaaggaaatttaaatctcata

SEQ ID NO: 128062 - DNA, 419 bp, Zea Mays
cacggattaaaccatgagattccactgcgcttggagttaattctggccattgatcggtaatcctgtggtctagattgggtagtggtcaggtgcgatcctcggccgtccgatgcgatcgtgcgcgcaagaattggcctcggtatttaaaatcttggccgctggtctctgaatcaacggttattagcgcatgcgggtttgtgagatagatcttttaatccgggccgtctgtgttagatcgtatggctcgcgtggcaagataccccttcgccatggcagaatagcataagagcccctagacttttcataaatcaacccgccatccccatcctgtgctaaataatttaatctgtgccctagccatttatggaatagcccctgtgctctgaagaatttgtaccagcagtccttagcccttgttt

SEQ ID NO: 128063 - DNA, 900 bp, Zea Mays
cgatcacaagcacatgtgggtgctgaaacacgaactacaagggcgaggacggacctggaatcatctggccacgagcaggtgattcacggcggcgcagtcgaccgaattggggaaaaaatggcgttgcggtggctctgggtgaaattgggggcggggattgaggctacacggccgtaagaaactatgctttcaccgtgcgcaaacgatttgggcaaaggtggagaggtcagtgcgaatttgactcgatttggttcactggtatgtgtgtgatgaccgagcctcgccgcgaaccatgggctatttatagccgcggaggtccggcgatcacctcatggcacgaataccatcacaagcgcatgccaagcacgtagagaattggtacagtgaggaagaatcacggtgccgaggacaccgtggcggaaaggattgatgcgatggccgccggtgaatcactccggccgagcacaggagatggcgccacgtacgattcacccttttcccggcgttatccgtctataccgtgcacgaatccgggcggcgatcaacgacggcgagctgagctggcggtctgatccatcggggcactgtaccatggcacatcttcgtcagtcgcctgaaccgtcccccttccaccgactagctctcataattcttgtgaataaccaggcaaaattccttaacaaggtttgttcttgatttaacagtcttcaatccttatacaggacatttgggtcaaaactgaggggattcgaagatatggcgcatcaaacatgacctcacctcactggaaccttgttttaaccttaggttcagtttcagttttctgaaactgttctgacagagcaacttgtaacaggtttttctctaatttttgtgtcacaactcaagagaatatctgca

SEQ ID NO: 128064 - DNA, 355 bp, Zea Mays
aaagtcgtaagggttggggaaaataaactaggattgttcaactaaaccattggtggtgtaaatcattgttcaatgatttattcatatgacggggtacaacatggtatacctcaacacgggcggatctcgcccggtacacggggaatcgaagaaaaaaacgagtgctgttcgaaatgattcgtaaaataagtatggatttgacgaggttcaacaaggtattaccttaagaaggggagatctcggccgcaccacgccgaatcgaagcgtctctgtgtggatctgatggagccgtccaaggtcggatacggaaggcaacgaatcgaaagcggcgtacctcgtgcgacgcggatttgac

SEQ ID NO: 128065 - DNA, 319 bp, Zea Mays
gtggtgaggaagatgtcagagccattgcagcgcatcttgctcgaggataatgggcaagtacgctgtcatgacatccttcgttgctccggtgacccaagccacagtcgtgtagacagccaactagccacccggatcctgcttgggctcatacttgtcaacgttttagaatttgaagttaggtcaccattgaattgcccggagccgaggggaaagggccgagacaccgcatgtcccccgctcctaccagcgatattctcgagcatggtatcgatgacggtccctaggaggtgagtgacatcgtgcgtcatgtcgcctctcc

SEQ ID NO: 128066 - DNA, 688 bp, Zea Mays
ttgatactcaatccttttactagcactagcatcgggcttggtaccgtaaaggatcatctgctgatcatgttgcattctgcaagtcacacatgtatgtcagatattgaaaatttatacaggtcactaatagtaacacatatatgtggaagtatgagcgacacttacaatgcaaacaccatcagaagttgcacgtcgagtctctaaaggtccatcgttaaccacatgtcctcaaatgcaacaaaggccttttggtccaaaccaataaaagcatggtctgatatatgcacactcatggcatcgatgccaactgatgatgcccgcatgtaccagtcatgcaaacttttaataccagcaaggacctaccgtagtttctcaaaaggtagtagaggtctgttcgacacatatttttaggcacatttttttaatctgcctcagttggcatctttatctttgcggtcattgcctcaacctttttgtagactcctcgtgcttagccaaatcaacagtatgtgacgtgaggtctggcgcaatccctttaaaaaattgagttatgccagtagtagtaggtatactctttttttacacttctttttctcgaacgttgtaacgccccgaattttagagttgaattttttttctttctccatcactcaccaaattctggtgttacctttcctctttctttttc

SEQ ID NO: 128067 - DNA, 313 bp, Zea Mays
cttgcataatacaagccaaaactaactactttgctcattttcatcatttgtttttaattccctcatctgtagctcctctgggtgaccttgattggcctcatcttcgcgctaattattcagtcactatctgctaatcttggagtagtgacaggtactttataggcaactagtacatatgatgcgtaagagcccactctcttacgtcgattggaattgatggctgttcactgtctcagggcggcatcttgccgagctatgcaagacggaatatccagcatgggtgagaatctgcctatggctgctagcagagtta

SEQ ID NO: 128068 - DNA, 276 bp, Zea Mays
attgtggttttcatatgcttctgtacataaagcgatatgaggatcaaaactaccataacattagtgaggtcagtcctgccttttctgtagcaagttagaagatttggtgacttggcagctcttatcatatttctcttgtagattagattgctattgattatgctcattgttgataaaaatgcaggacgaagtcatcatgtgccgcatagagactgcgatgttgctccttaacaatgaagacaacaagtgcagggacaaatttacagagagccatgc

SEQ ID NO: 128069 - DNA, 739 bp, Zea Mays
aatttggaaagaaaaaaaggggaaatcacctggtcctaaacccttacctcgacccaccttggcccggtttcccttttccgtgcctccgccagttggccgttctgccagcccaacttggacaacaccaccctgtccacacgcacgcattgcttctcgccgactgacaggtgaggtccatccgtcggtgactcgtggacgcgtcagactttgtttccttatggcgtgggccaggactccagaagcatcttcctctcggatttctccgtgtctacgggatgtcgcaataacttgaccgcgaacctaggggttctttcaccagctcaggatctttgctggtatctctctccctgaccgttatctaaggagccctggaaccattagtgagagtagaccgagagggggagagcggagggagaaagcaaccaccgttggaggccaccattgtcgcccttcatccacgccgtcgctcagggtcgtacaggaggatagggagattcaccagaagccactaaagtcgtatgtcgcttgatagggtgtgggtggtagctgggtggcgtggaattgcttgccatagctcgagcgccgccgtcgagctgctgctctgcgctagggccccagtcgtcgtaatgcgtggtaagagttcccccgtgtgctttgtgatcttcttggcttcgactaacacctttaggatggggtgtggggcactggaacgctatatgatggctcaccggagaatcgc

SEQ ID NO: 128070 - DNA, 797 bp, Zea Mays
aactttgcgaattcgagtatcctagttccctgtgggtatgggtgatggtcaaatcggctgtcataaggtctccgatatggctaccccctcccccggggccatgcttactctgagcttatctcggaataccctggctatttcttcccttactatatcaatagcaaccggtgggagaccactagctctttgttctaccatgggtgagattgtttggatattagtttgttgtctttcccccattggtttgggttctgtggtgcattactatttgccctatatggttcataggactgacccttcctttccagccttctaggcggagccggaaagtactcacccccatgtgcttgggatgatgtattaatgggctggtgcattgtatagtgtgatgggaagtgttgctgggacaggtgaggatttaggtaacaatcctcctcaaacaaccatgtgtcggaccttccgtcgctgtatgcggatggtccgactgggtagtttagggcttgcatagcatgtggtggcttggacgcatatctcggtaactcattaaaaatgggaccggtcgttgctgacccgaacggtccacgctcacgtgcagacggtctggacatgcgcagatcggctaatttatcgctgatgtgtgtaggaggttgtggttgctcaaggtatgtatcaatcggcattccataaagggcttgtcactagtcgtgacaacctgtagccgatgaattacgcgtgtttccccccaatttaacctcgtgcgaaggaaaatttgcaacagtagatttatcaaacgcacg

SEQ ID NO: 128071 - DNA, 644 bp, Zea Mays
ctccttctgtttttttcctcgattttgtttttaagcgtgtagcatacagaagcacggccctcgtgcaagatccgccacctcatttggcaatactactgccccgggcctgcagcagtatccaaatggaccggcccatttatgtggcccctgtcctttttcatcaggcatcggttttgggctcacagaggagatgggcagttgcctaggcctccgaataattccatgtccataccttatctcggcaatgtggccatgcgcccatactaccccatcctgttggaactgagtaactgaccatgattcatatctgattcaccgattgccgactagcttcagtggtcccgtccagaagtaaccatacttttgcagctagcttgccaggtttcttcgtctaaaacacaggtctgggtgcgcgtagatcttagctactagtagtctgaaacaattcgagtggtcatctgaaagttggcggatttcattagcttagggaatgtttgaaactcgggtcagttacggttagagcctctaaacagctttcaaaaaatctctcgctgatacacccaggctattgttcgagcaagacaggagagatgcacgagtttccctattgctctgcttgttgacctcagcgtgctttctgcgac

SEQ ID NO: 128072 - DNA, 319 bp, Zea Mays
cggtgcctttgtgaagtaggagtagaagggtttcaatcaaatagtatttggacttggacgtgctgatcaaattggattatgcttcggtatttgggatgattgggattagttggagtggctgatttaaggctaacggaggtttggtggtttagttcaggtagtattgttgatttttggttatagaataattagtatttggactatatagcagaccttccccgatgagttggttaatagcatgggcaattagttgccctgtaattgcaaaataaggccttgatcgttttagtagtacatacttacggctacattatcatct

SEQ ID NO: 128073 - DNA, 283 bp, Zea Mays
gctgctttggacttgtacaccagaggagatcttggtggcggctgcaatgtggcgtcagatcgggacgcatgatatgatgcaatggtcggcctaactcgaaagtagatccgcggttagttgattggtgggggcaagagcactgatgaaggatatacaaaacaatgacgatgctgatgttaaaccgccaaacagtgagcatgtttagccgtcgctttcctcatcctaacaactgtagtatattaatactgatttcctcatcctaacaactatagttattaatcaa

SEQ ID NO: 128074 - DNA, 456 bp, Zea Mays
gaaatactcctgcaacactacaaatagagcaagtgttcagaatcctcagcgttagggcacccagcgacgatttgcctttgttcgtcgagccctatgggcatggaggttgagctgcagccaggaaacaacggccatgtggctgagagaagcgtggatctgcaggacgaactacggcgacaaggagaccaagtgccaagcggcgctgacgaggcagagctggtgtggaagctgcggaagtacttgatgctgctagcaatcctttctgcaaccatcacctaccaggcagggcttgctccaccgggcggcctctggctagacaataacgacgaccagcagcacggccatcttgccagcgacatcgtcctgcaatccacctatccgaagcggtacaaggtattcttctactgcaactcgacagcgttcatggcgtccctgatcgtcctgatgctgctcctg

SEQ ID NO: 128075 - DNA, 523 bp, Zea Mays
ctcttaatacaacaatagcaaatattagaatccattctcccttgatacatgtttgttaaaaccaacaaaagagagagcaaacaactactgaacttctactttaaaacactgatacctgttttctaactgcaatagaaaggggagaggacataactactgatttactgaacttctaatttaaagtagcaacatgatttgacaattgttatccacttaatgacatgatgatgagtcgcatgcagatcaacataacaaggatggcctaccatcgccacctaaaaagtatgtactaagaaaaagggacccgaatagcgaatagctttccttttaaaggcctatgaatcataattcactccgatgtcgcaaagcacatatagaatcaagactaaccaccttcacaaacttcagtcaagttctacagaccctagaaaacatgaccggtagatcgttattttcatgaaggtacgacgccatctattctccttcattgctacaaagcttgttaccagtatagtttgcatat

SEQ ID NO: 128076 - DNA, 278 bp, Zea Mays
ggaggtgcacctttttgctctgggttcgtttcttccctctcttcgtgatgcttcttatgttccctagagcttgtgcccatctcgctgatcttggctaccctttgataattcaatccgcaagttgggcatcgagaaagaggaggcatgggttagattagcgtatagctagaactaagattgatcttgacataggtgcactttagagagcatcatgatatgttccataaaatgttccagtggagtgttcatctcaagaagcttgcaaaggtactgagaag

SEQ ID NO: 128077 - DNA, 283 bp, Zea Mays
ccggcatgaataccatagtgacacttgctttgaaaacggagtatggggtttctgagaaattcaaatgaggtgacatcatgtagtatgtcaagctcaacttatcactgggtctaaacgccagtgcatttaggatccaaattggggctgtttgggaaggggagattcattgcaactaaatcgctaggaggatccctggggcaatctcttcttttcgtgtaccaggtgttcagataatggcgcagaatgcagacaatatatcttaagatattttggtgtctggcct

SEQ ID NO: 128078 - DNA, 427 bp, Zea Mays
ctaggaatccacaacctttgtagcagatacctgcaccgaggtgcatgttgcggttttgtgcttactatgtttgttccatacagatgtgatggttccttgttattggataaaatactttgttttgtttgcttaagaattgcctgaaacacgagagggggcggcaagtatagcgcccgatagggcgctaccttttctagtagtgtttaattgtggatgaagttgaacctagctctgattaccatgaagaatggacaacagcgcacacatctattacatttcactgaagcctttataggccaatgtttacagtaggacgatgactgagctactaaccgcgatgccttgcatgcagccttaagaatcggtcatcgcataagaatcggtcagctacagttacaagaagatatactccaatactccagcgagt

SEQ ID NO: 128079 - DNA, 347 bp, Zea Mays
ctgttttataatcagtctggactgcgcgctaaatcccagaatgtgcaggggctaactcagaagattcaccagacccaggtaacagtagaacaaggactgtgggttatttcttttatttgccaggggctctttagcaaatgggcacggcgaaggggtatctgcgcttcagagccatcggatccaagtcctgcggccatgattagatcctaccgttgaggaatctgtatgtgccagggatcgttggatccaagatctacgggtaaggttctatcagacaaaggggtatccttgattcaatctcagccgcacactatccatcccacggccgaacggcttcttcatcctcc

SEQ ID NO: 128080 - DNA, 336 bp, Zea Mays
cactcatcttctttcatattgtagcctcacactctttattttatcatgcatcctaggtggatctctaactttcaaaccttcaccgacttgcttaatgatcaatcttcacaacttcctgacatccctgtcctgtgggggaggtcttcttcaacaaccttacgtgcataatgatcggaaggatgtttcttctattcatccccgccccctcactccacaacatctgtttccatgcccatatcctactccttcatatccctaccaaccttctatggatgcttcacctcccaatgatgatcctatcatcaacactctcctccgactaaagctcctcccatt

SEQ ID NO: 128081 - DNA, 724 bp, Zea Mays
ctgcaaaatccaagggcctaattattaagtcttcctatagtggagggatggcgggttagtttgtaataacccgaggggctccactataaaatagccacaacgaaggggtactgatcagttctggccgttggatcttacatcaagggccataattagatcggggaaggttatgaaccggtatgcgttcactgccctaggatcaaagatcgatcgcccgaaatcgtccacacattgttgtcacccgaaccacacgtcaggcaatcaacaacacagattctatgcatcgaaggtgtatcgctatcttctgatccgggccgtcaacacagagatctagggttgagcgaccgtcttccttctctagcgtgctcgacggcggcgcaacacatcaccgtggcagcgcaaccactgacaacctggccaatcaacccaattgccctaacctaaatgctaatcggtgcaaacggaagacacggagatgcggaaccaaatggagaccatcctacctgaaacagtggtgatagccgtgctgcccacggcacgagccagattcatggcgacgaaaaatgctctgatgaggaattctccatccacagttggtcatttcccacacgggcgccacgagtgtattcccagggatcgagcgaagctctcgggcccgacagggagtccccagtgatgacatcatcgcattcacgacagcaacccgatccccatatgcggcggc

SEQ ID NO: 128082 - DNA, 644 bp, Zea Mays
tgggagatgccgaaagaaaccatcagtaactcccacgaaggtggtttggttcgactaaaatataccttcaggtttggagacccagtttatcgagccagacgacgattggctgaaatgcgtcgaagctacaagtgatgaactgcttgggccgtactccaaagcggaagataatgcgttatctgcgaccttcggaagctggaaaaagaagagactaaatagagtttttgatgccatcggattcatgtatcctgactaccgctacccgtcacgggggcaaaaaagaaaaagtgcaacttccgagaaagatgatgcttcagctgctccaagcgagcctgcgccgaagaggaaaaaggtgaaggtccttactcaccgaccgcgcttcattgaaccggccacagtgcccgaatttggtggtgagacctctttggctattgaagccaaagaacctgctcttacccagaagaatgaagagccgactgtgatgccgaaggccggtaatattgaagagatagaggccgagagaacaaagacattagaagttataagcccttcggcaggaatgacagtgccgaaggcacaaaaagatctcacggcaactcccaagagaaaaaggatggtcaatgtactagatgtgctggagacaa

SEQ ID NO: 128083 - DNA, 1255 bp, Zea Mays
ttggggtggtgtgttcagagtagaattggtactattttaggtttagtgtgcctgtgccatattgcttcaattccagagacgacaaacaaccacgtgaccggggcccatatttccctaataaataacaatcttgggaagagaagacatactctttctcccgctgaccaaacactaaagtattgatgatgttcttgaatgaagcatagcattctctgatagcaaaggaaaagtatggatctgattttatcctcttcgtcagatcacggtcttttccgccactgtctgctgccatatccagtgctattgggatctacaatccagcagataaacaataaactgctgaatccacaaatatagtaagtagaaaaaatacagaaagagcaagatgagcaaccttgctagcaagtaagaaaggtggccattgaaatatatcgagctcacggtctttacagtatggaaccagtagcagatccatctccctattgtctatgaggtcttcttcacggaaacttgtaataatgacattccacatttgagcaaaccttgcagctcttttctctttctgtctttcgtcaccagaagcctaaaaaactgtgtcagatcaaatagatagatactcaattgaactgccattgatctactcataacgcccaaccttacaatataaacaaataccttgggtctacttgaaaaggcagcacgaagacctttactcttatttgcatcagaaggaatcaagcgttcattgaaggcctcgggcaaagattcaaagcgagatctcaacattcctaatgtccgtatctgatattatggaaccacaaaaggagtctaatgtgagtcccatcgatcatgataaattatgctccacaacactaggaaaatatataataaagtaaagaggcgacataaaacaggcagaattgggtaaataaaatggtataaaaaataaaaacacttttattgatgctaccattatggaaaaaactataaacagttgcttcaaaatgggaagggtgaaacacaatcctaggactaattttctgattgctactagacacaatgcaatttattggacaaggaaactgtttcaaaggctaaagaaagacgcattaaaaatacacaagatactatttttttaccaacctcaccaagacgacgataagccccatagataccaccaattaatgtcgagaacagtgcataccaaatttgggtgtccatgaaatatacctgtattttaactaattaaacttgt

SEQ ID NO: 128084 - DNA, 455 bp, Zea Mays
gtccttggaggttggttcgtctacgtcggggacggctgaagcgcttgtccgtggtgacccatgttttatttcctgcggggtcatggcctctgatccatatagcaggcgaaagggagtgaatccagacgcccggcactcggtcgtgttcagcgcctagactgcttcaggtagcaggtcggcccatttacccttcttatcatcgagaagcattttcttgatggccatgaaaattttgtcgttggcgcactccatgacaccgttagattgtgggtgatatactgaggcgaaggcaagcttggtgccaatggagaagcagaagtccctgaagtcctggctgtcaaactgtttgccgttgtcaactgtgagcttgaacgggactccgaatcggcaaacaatgttttgctagaagaatttctgggtagtcttcgatgttattgtggatactgcccttgcct

SEQ ID NO: 128085 - DNA, 381 bp, Zea Mays
gagagacctgtcaaacagcctgtaggccaccctagccagacattaagcctggccaagaacgatcatctgcagctccagacaatgcaccaaggcaaagagtcctggccgttaatcacgctctggcccacaggtcaaattctcatcaaccaggtttaagtacttgccttcttattaatcaaagatgcaacagtacgatcctatagaacagatcctgttcaagtaaggtcgtgctgtgagttaccaaagctaaatttttaagctggcttctacgcatgtgagcaaccgagatggcactaaccggtgggactggccaacatactgcgtcctgggtcggcccattctggtatcctacatgtgggcttcgggtccagccaatcgagg

SEQ ID NO: 128086 - DNA, 1319 bp, Zea Mays
gtgcgcgcgcgcgtgcgtgtgcgtgtgtgtcttccctagggacatttgtccatcaatatctgcttcgggaacctgcaagcccaccattccgtcttcgaaaggctccttggatacaggtgttgcttcaacacgcagagaagagagcgcatctcgctcaggatctgatgtctcccctcccgaggcctttgatggtacgggatgcgtagcccaaggcgcaagtgtggcagactcgcgtcctgactgtagctacgggcccaagcgaatatgaaccggtctccgctgaatctgggagccgctcgagcgtcgagaccggggatcctggtcctcaccgttgtcgtcatcactaggtcgcctgctgaacgctggaggtgggggcggtagaggctccatggtcgtatcatgtaggtgcgccggggtagcgctcacactgatcttgaaagtgaggcatctcttctcaattgtgtgcaaacctggctcgatgatgtggaggtccataacacggtgtagtcttccaggatcaaaacaccaagcactgacatgaaaggatgagaaatctttctcttgcaaagtgtcggggtgcacttccgaaatccagcattagtctctcaagatgttttctgccatagaacgaaaccaagcgtgctctggaatccctctaatctcaacctccaccataccagacatgatcgttgaagatgcatgagtaaacctcgaccagcgcttgaacatcagactaaaatgaggcccctgtatgccttgccatcattgagcacccttgaagcagttgcttcattaggtagaatcaagaggaaatcctctggcaggacttgatgaatccacatggcttcaatattgacatcaaaattatgagcaacttctaacacctcaacgccaagcacctccggcctagtcccatcaactgttatgaacagggcacgatggagagttagctcttcacgcgccatcttggtggtgaattccaaaacacaagaaggctttgtcttctcgatcatctccatctgtcctacagacctatgcgtaggcatctggaccttccgggaggcttcaacatcatcagatgaaaccgacaccaagcatcatcgatccattgccccgtttggaacgtcttgttttcttcttgttgtgtaggcatctttgagagtcgcctatagcaaccatccttgcggtgtcttccttcatcgcgggttccaaaggagtgttgatcctcctccacaccagccttcttctatgggagtctgcagcagagtcaggcggggatatctgctgcactgccaaacgttgccacaccgaaactctct

SEQ ID NO: 128087 - DNA, 309 bp, Zea Mays
tcccagatacttgccaaaatgttgcccgaaaagccctccgacaactatgccagaactacagcagagtaatctttgaaaccccccttcgctactttccacccagcaacaagaatacccctgcctagaggaaaagacttcaggccctgtcagggagagaccctattgaggatgaccccaccatcgtctacatggctagatacctccacactctcgataaccaatatgatgaccttgcctcccactgtactcacctaaactcccgggtggaaagcctggagcatcaagtcagggaacttacaagggaaaagg

SEQ ID NO: 128088 - DNA, 454 bp, Zea Mays
aagtaagtgcatggtggttgcgagttggagattagtggtttacggttcgtatgatttggtcgaagtgcgaatatacgcataaatacgtatgtttataaaaaatgttgtagtgtatgttgtgtctcggattgcgataataatgggctagctgacgtgtatgttatttagcgggctatgtcgttgctctagttagccaaattgttagacggctttggttaaactcatgatcatgatgattggcttgttgtagtctaaatgtgcatggttatggtcacagatgaaaggtagtagtgttcatgtgatgtctaagttaaaatgcaaattagtgtgtgaagggcgcatcgataaacatatatgtaccgggtaagattattgtggtagatgcgttgttaattgtgaatggaaattctaggcacgaaataacttggataaaaagttagtaagtctacttgtg

SEQ ID NO: 128089 - DNA, 795 bp, Zea Mays
ttcaggtgctaggcttgtgaaaagcacaactcctaaacgatcaggtttatggctgtcaaattttagtacaagtaagataataaggttatctacaactcttctatatgatttttctatagaaaataagtattagttcatcaaacatacagcacgacaaaaacagcgcgtgcagcccaaaacaacaattaataaatttcagctcctatacaattcaagaattgccgcgttctagaaacttcaattattctaacgctttaccatttgttagagttaaattaataaaattaggaccaacaagtcgacttactactttttatccaagtcatttcgtgcctagaatttccatactcaattaacaacacattctccacgaaaatcaatatcgaagcgcttttcacccaataatttgcattttaacttagacatcacatgagcactaatacttttcatccgcgtcataaccatacgcatttagacgacaacaagcaattcatcgtgactactagaattcgcgagcacaaccatatactatacgcaaagcataatttacgaacacataatgcgcatcgactcgactcgacttataaatatggagaagcgatgactactttggcattgccaccacctctctatttaagccaatccaattattaactattatgactaaacattcatgtcgagcacaccttattttcctccgtctcgcatacaaccatattgtggcgtgcactcgagacatttcgatcaacgtagcgtaacctactagtatataaactccgacactcatgtcttagc

SEQ ID NO: 128090 - DNA, 477 bp, Zea Mays
gactctaggcaactccactattaggattaggtttgatgattatttggtctcttctctctttgcttctctgggcgcgggctatagggcgccatagggagcggggcagcgggccacctctgtgtggccataaagcgggcggcggcgggtagcaagggaggcaaggagggaggtgtgcgtcgctgacgtgggcccacctgaaagtggagggaggctggaggggagatcgtgactggtgaggggaaaggtcaagcggaggagagagaaagagaggagcgagcggttttagactcgcagacagggttcacgtggctccgtataagagatatatgtactatcttctgctagtggagcgagcgagtttctgtatagccacgtgtcagataagcaaaggctgcgtggcccggatgtacggacagagctcgaaatcgcttgaggttttaatataagagatggtctcttttgaaatatatatatctt

SEQ ID NO: 128091 - DNA, 561 bp, Zea Mays
ccagaatgatctcaaacttcacatatagtttgcgcggggtagaagacggttactagtgaacaaaccaaaaatcaaagcttagatcagaaaatccgagagagatggggttttctcaaaacgagcctaaatgagaatcaactcgggtcatgaccaagaactgcactgtgagggtgtacgcagtaatccaaagagtctatatccacccaaatcaatccccaacaatactcatgtcgcaaaaactcgaaggttctccacaaatccacaagagaagaggaaaggataaaacaaaacttcagaatttagcaattatcaaaaattgagattgagaagtgaacaaaacatgtgggtcgtaccggcgacccttcctcgaattatacatgaagaacaaaaaccaagtcgacggttacaaaattgacgcggatcccttggttaaactggtgactaccgagacagaaaactaggagtactaaaataagaagcctaaagaaatggcagccataagatgcttgactaacaagcctgtccctctatttatagagggttatttgtattttgtaaact

SEQ ID NO: 128092 - DNA, 477 bp, Zea Mays
tagaacactaatacactaagtaaagtgttctttgttgcaatacatttatatgctaactaatcttgttttttaggctagagattatatatctggattaggccgaccaacatctgaatcctgatcatcattttctcccattgttggacctctgcacctgtagactgcggctgctctcctctccagcagctcggggcgcttgattgacaatcccgacccttatctctgcggtggagccttgaagctctgctcatggacgtcgaaaaatcataggaccctcatgatgccagtggcaactagctaggaatagtgctattagtgtcgtgctgtatgtgtcaaggttattgcatttctcgtgcgactacaaaggatgacagaagaaattaactaaatgaaaagtattgttctttagttcaggagaaaatgacgatagtttaatttattcatattactataatatgcaggtcctgaataccagcg

SEQ ID NO: 128093 - DNA, 303 bp, Zea Mays
ggtcattgtcagtcgtgatgttacttttgatgaaagtacattttcttcctctagaggtgtttctgatagtggttcctcatccacatctctacctgaatctactgatgagaatcttgatgtagatgtacctgttagtattgattctgttactcctatcacacagtcattttcagcttctgtacctccagttagtaacaatcactctattgctcaagatagacctagaaggaatattgttttgccacatcgatatcgtgacactgatagtatggctcattatgctctcattgctgctcaataaac

SEQ ID NO: 128094 - DNA, 385 bp, Zea Mays
accggaaatcttggagcggagatcactggttccgatggccgacgcgtgaagcccctgctcgatggcgagcaattacggtgaggtacctggggccaaaaaactcgtggtcaccaccgggacgacgccacaaccacaccagatcaggtaccgaggcacgcacactggtgaatctgccggtcaacgacgacggactccacttcgagcttgcggcagcggtggtggcaatatggctcagcagacgtgggtgcgagtgggcgagaagaggggaaacagtcgtgggagctacgagtttataatgccagggggaagaaatcgattccggggcaccagcaaccacccctggaatccctggcggagatccgagcttatcggagtcgtgcgctca

SEQ ID NO: 128095 - DNA, 347 bp, Zea Mays
caaaccgacgtttgcgctcactgagttctgccttcctattcctctcagtggtgataaccctgttaaccatgttattaaagtcactatgggtggtgacttcaaccagggttctgatttctgggttaagacccccaagaaaagcttcttgcttcttatcgtcgtcattgatgtcctcaggtgcataacgtgacaactccgtgaacttatgcagatactcagttacggtcatgccaccctggcgaagcttcctgaactcatccttcttcagcttcatcacactgctggggatgtgctgctctctaaagatcctgacaaattcagcccataccatctcattggcattccca

SEQ ID NO: 128096 - DNA, 438 bp, Zea Mays
cgggagtaagttgatgaagaaagatctgaaatatctttagcacttcaaccaaaaatctgcttaatgcgaaccgaagacccaccttcaaaaagcttttgtaaacaaccacctcattttcttcaggagcaggggcggtgctgtctcctcctaccctcacaatagacatgtcacaaaagtatcttcccttcatggcgtcaacatgactttgcttaatagtcgactttccgaagatggtatggcttggtcgccagggccggtcctcagaatcttcatccccactttccacatcatagtcatcactatcgtcggaatcctcagataaatctgccattatttccttcgtgatcttttctgtatttgtctttgccatagattcgtaaaacccagcaagaagaagatctgcaactttcttctcctcatacagcttctcctcctcgg

SEQ ID NO: 128097 - DNA, 398 bp, Zea Mays
cgtcactaggatccaaaggtacctcaaagtggacttgtcgttcatcatcaggaatttccccgagcgaggcaaccaaggcgttaacttcttcagcagagggtcgcactctaaggcccaaactgccatcagcaacaggtggattcgaagcaaaatgagtgaaggcttgggaaggaggcaggttccaggccgagtatgccactggggcaccaacgtttgataccttgcctctaagaatcatctcaagtcggttcaccaagtctacagagggaattcttctgttggtaacccgagttgagtcagctaggcctcggtacagataagccgggtaagccctgtccttcaacggctgaatgttcttgaaaacaaaatcagcaaccacagcctctgcagtcagaccc

SEQ ID NO: 128098 - DNA, 316 bp, Zea Mays
gggactacttcgaccctggccaaaaagttgaaattgcacgaagctaaaaataagaagctcatcaactatgttgatgtcctatggtgccgaggagcaccggcgagtgggcagcacggtgtgtcccgattgcatgtgaaggattaccggctcttgcgagctcgagagctaggcgaaggtagattgaagtttcacacacccggagattgaatccacgtgccctttacggttaggttgttcacgaaagataagatcggatcgctttatctggggattctgatatttggacggctaaacagcttggacttgtaatgataca

SEQ ID NO: 128099 - DNA, 446 bp, Zea Mays
ggcttcgcgtatcaagtccataatggaccggtcagacctagttctgagatcatattgatatctcgcgcctattctaccctgcctaacgctgccagagctttattattaccaaaggaatacagaataggtgattatacataataacaacatcgagctcgacagtttatgataataggaggtatcggcggcatgctcaccagttttgtagggcacgatctttatccagatggtcccagaccaaacggctcgcaggtggtcacgaactgggttgtaaacgaagcagccggtagggtccgtttttatcaggctttcatgctattcggctggacttgcagaggaaggaacacacggctcaccctttcctatccacgtaacgtacagctaactacagtgaggggaaatcagaagagtgcgctgagattttgacagagaagcacgatttcagc

SEQ ID NO: 128100 - DNA, 361 bp, Zea Mays
ggagagacggcacaagttgtcacctctatgggaaggaccattcatagtagcagaagtcactcggtcgggatcatatcgcctcactcagatggacggcacggaaattgggaactcatggaacatagaacacctcaggaagttttacccctagctgtatttcaaaagctattgggatggcaatgtactctgtaaactaggaaatatatcatcaatagaaaggcttcaacagcgctcaaattattcattgtcgacctgcattcttacttaactcagggtgaccactataccctactaacggagcaatcagcttaagtcggcaatgacttaagacggtgcaacatgctcgcgcgtacttaactca

SEQ ID NO: 128101 - DNA, 273 bp, Zea Mays
tggggatcttgtttgccagatttcccctttttggtcgagtgttcagtgctgatttttcacattcttctggcccttctcgatgtttgttggcaggatctttctcttctctttggaagtggcataggaggctaggtcacttgagcttcgatcttttgtgtttgagctcacttgacctcatccaaggattgcccaaattaaaatttgagaaagatcttgtctgtcacccttgtcgtcatggcaaaatggttgccgcttaccattcccctgtcacca

SEQ ID NO: 128102 - DNA, 744 bp, Zea Mays
gagacgagtgactgtgctgtgctgctgcgcactgattgattgtgcaggggatatcgacggaccgtgtgctggacgtgcggaggctgctggggtcgaacgtggaaacgtgccacctgacaaactattcactctcccatgtggtaataatgctcgcctctcgcactctcgttccctcaactgcctacagtactagcagcaggcacggctaattctctggctgcgcggtatggtcgtgttgcaattgcattgcaggcgcgcgggcaccggctggaggacggcgtggaggtcgtggcgctcaagccctgcgctctccggatcgtcgaaggtgagtgggtgtgggtgggtggtggtgaattggtagcacaatcgagttgggtatcgtagagccaggtccctcccacccagtacacgagaggacgtacgtacctggctgccgtcgtccaggcaagtacacgtacagcgcgccctctgttggtctgttactctgttatgctgcgttcgtagtacagtacagtacaggccacgcaaggcagttggccccagtagtggtacagcggtagcacgttcgaccgcgtaatggtagaacatggtttgctaccggccgatcagagcagatggcccaccaccaccgtacgtaccctatgcacggcgccattgatcgcccggaggccggagggagggactagggagggtgggaggcggatgcgacgcgcatggcgttccaaacccagcgccagcggtcca

SEQ ID NO: 128103 - DNA, 334 bp, Zea Mays
ctgacactatcttccttgggatgtcgtggagtctgactatctctttgaggtaaatccgggcaagggtggctcccccaaaggtagttttcactggaatgaaatgggctaccttggtgaggcggtctattattacccagatggaatcattccctttttgcgtccggggtagtccggttacgaaatccatgcctatttcttcccacttccattcaggtatcgggaggggttgtaataggccagtaggtttttggtgttcggcttttgttcgttggcagatgtcacatcgggccacatactgagctatttctttcttcatccccttccaccagtatct

SEQ ID NO: 128104 - DNA, 524 bp, Zea Mays
gagacattaaaacatggcataaaactccataagacttacactggctactgaaagacctaaagcacccatgtgcacatgttaccagactgttcttcaattttagcaaggattgactcatgaacgctactcgcctccaataattattgggctgcgataacgctcatataagacctctagtcgatcaacaagacatttatttatccaaaggaaatggaatgcaattatttgacaaggcaaggcatcgacccgccatacaacagaaagcatgacgacaccgacagatgctatcaactaatcgttttaaaaatattaaacttacttctcgctttatcactacaccaccctttagccacatgaccatcgggagcatccttcacacgattatacaatagcaacctaaatgtcgggtcacacaatacatacatctatcctcgtcgcgagaataaccatattacggcatatactcgcacacctcaatcaattatcttacgccaccactattataatacaccacgacacacaca

SEQ ID NO: 128105 - DNA, 436 bp, Zea Mays
cgggggcggagctctgcctcgccgtcgtgcgcagactgccggtggtgagggaggaaagccgggaccattgactcctcgatctacggtggagattggtctggggtaccgcttctggttgcggtgatctttaccgttgatcgaccgatggagggatcagggccgatcgtggtatggcttatcgtgggccatgggatcttgggtgtgtggccaagattgggagtgggcaatgtagatcgtggctgttggatcgcttatgtgcggtgcagatgagatcctagtgtaaccctgcatctcttctaatcggcgccatcggatccgtatcatgcggtcctgattagaagccacgtagtgtgtcctcctctgttgatctcggccatagatctagcatcgggtggctgatacggaataccggttcatttaaaggccaaacagatcc

SEQ ID NO: 128106 - DNA, 353 bp, Zea Mays
acaatcttcgaaccgagcggagccaggaaacgtccgccgagatctccgctgcatttgtttttctgctgcgttggcttcggggtgagcgtaagagggaaggtgtggattctgttatagggctatcgctgccatctcggccccgcatggaagtggcaggagcacaagagcgcagagtggctggtcgtggtgactgaggggagaagctagcgccaatggcccacctgtaagcgccataacaaaagaaaaggagaggagaaggagatgggctgcacggtgagggttaatgggctagccagttagaagcaacccaattagggttttgtttcctttattctttttcctgctttcttatt

SEQ ID NO: 128107 - DNA, 381 bp, Zea Mays
ctgggttgaaacaccatgcccttaacatgaaggacgagaggtcagacttctcaaccgtcgccgggtgcagttcagaaatgaggcatgagccatgcagcagatgttccgccgtagagcgtgcccaagcatgaggcggtataccccggattttcacgtccaccagggccgggagggttgctgtcgacgcatgagcacatctcgtccatctcttgaaatgcagattgaaacgcggacctctgaaaagcctgcctcccccgtagaccctcgatactgtgtcctcatcggggagaaacaggaggaagtcttctggcatggcctgatgaatcgccattgcagccacatcgatgccgaaactgagagcaacttcctccagcacctcaa

SEQ ID NO: 128108 - DNA, 546 bp, Zea Mays
cgtgattattgtgttgagctgcaaaatgtggcttagtatttttgtcgagcctaggtgtgcatgcttagtcccctagatcttcctctcaatttgtctctagaagcactcactagcttactattgaagttgagaaccttcttagtgagggtatcatatggtattaatcctactcatactaaggctctggttggcatggatctaactctaaactttagggtggagttgagtagagccagtcaaacaccctaaatctacctttgtttggagcagtccaattccatggagttggcagagctctagttcatttcaagcctgaagttagaagcacctctttttcagttccaaaccactccaaaataaatcgtagacatgaagttcaatgatatttacccaccaataccactgattacacagaaaacgattcgttctgattttctcgtaacccaatccatcgcatttcttcccccacagttcctcttcgctactagcgccgtcagtttctgtacgcgtgcatcgccgccgtccaccgctctccggctgtgcccc

SEQ ID NO: 128109 - DNA, 630 bp, Zea Mays
tttttttatagcaaatgacgagtagggctatagggcatcccggatataacatctctccgatttggtactggtctctttggcggtttactcgatatgaatatactagctagtcctacataagatgcatgcttctatatcgttgctctggatagatttggattccgtgtccaggctgtgctcatcaccaagtttttttggtcagcgcagcagctttgtttcgttgcgtcgtgggtttggacctgtccgtgctctgaactggaactggccggggtttaaacaaaaccggatgcggtcagagggagtccattggttcgtggccagcttggccgggttttgcattgcggagctgtgcccgcttgttggcttgtgccgtgcgcgcaaacggaggtcaaagtgttaagctacgttggaccattgtgctcgttgaccccccagcggcagatgcgggaggcagggcccttgtatatgcgagcccaatgccagatgcgtacaaccgctcattttgctgttttaggtctttaaaaataatacttcatgtagctactctcacaaataagtgaaagctgctaatccagagatcgttctaaggaaaatataggtatttctttggagagagagggggattcaaac

SEQ ID NO: 128110 - DNA, 865 bp, Zea Mays
gtgaagccttaggaaatagatgggtagctaggtggctatttatataggccataaaggctattactactattagaagggatgctgtaggagcacccgaaaatttagttaggtctgagaagacgactagaatgagcatgcatcatgattgtcgcattttaaatgtctcttgtgctccaacatgcttctctcacctttattccaataataagaatttttgaataatgtgttgtattgctatgttatgaaatataagaattgccttatctcttgcctaattagtaagtcttgctaggttgtgttatgtgattctcttgccttgctatttaggtggtattgtaattgttcaaccctttttgcaaaaaaaatgttgtttgtttcctcataaaaagaccccacccaaacaaccttgagtttagcaattgaaacctcaaaaaaatatttatgcttgtgttagtgttttctaacccttgtgtgttttaccctgaagttgcacctacacaacttgtagacccccattgcttaaccgctagccaaatcgaaactcccttgtgcacgtggttatgtcaaaaaaaattgttgtttggtgtctagttgcgcaaaccctatcaaggccatgtttctttccatagatcctgtcccgaaacattataacatttctattgatcatcctagccgatcctgtttgcctacctctcctttcgcatggatctggtgatctctttccttgtgaatcatgttgtggctttatcatccgaatccctggatcctttaatgattctgcctcgttatctggttatctgctatgacccgttctcaagtatcgaatgttgatcttgcctaaatctctcatttctggtcattctca

SEQ ID NO: 128111 - DNA, 403 bp, Zea Mays
gaaaaaagtcttggaaggtggcagattccaggcagaatatgcaacaggagcaccaatattcgacattttgcctctaaggatcatctccagccggcttaccaaatccacagcaggaatcctcttgttggtaacctgggttgagccagtgacaccactatacaaataagccgggtacgctctgtccttcagtggctgaatgttcttaaaaacaaagtctgcaactacagcttcagcagtcagacctctctccttcaaaaaaccaacttcggcaagcagaaccctggcctcggctatctccaagtctatgggggatttagtccaacttggagcacgaacatccggctgtctccctgaccgaggggggagggacttgccatgattctctactataaaccactccaag

SEQ ID NO: 128112 - DNA, 520 bp, Zea Mays
catttataaattattttctctggttttataatgttctggactgggcctcaaaatctgagaagagcaggggtctcagggtaaatatttctagacacagagaacagtccagtggaccgcgggttgattcccaacgtccagaggggctctttaacaaaagtgccagcgcgaaagggtatggcatgatcgtgtccgtccgattagatttgaagggcgcagattagatctaacttaactgaagcggtacacgatactagccaccggatccgagatccacgcccacggtttaatgagaccctatctaatctgagtcgtccagagagcgatcaacggcacaggctgtttccttcaatcctacaccggcgccatcaatctgaaccgttggatgtggtttcaacggttagcgtctttcccccaacaccccgagctccagcgcggcggcgcgctccctccgcggtggcgcaggcaccggcgtaactcaattcctcccctacggtgcaccgcccctacttctgatacccgc

SEQ ID NO: 128113 - DNA, 353 bp, Zea Mays
aaagaaagaaaattacatggttgttacacatagtatcttcgaagctcatcagtattccaggatcttggaatatcattctcacccatgtctcttagcttgtacgatccaggtcttgacgaagatactaccaagaaggggccctcccacttgagttatagtttccctactgtttctgggttggctattcttcgaagcaccaaatgtcctgactttaaattctttagtctcactttcctgtcccaccactttactgtttcggcttggtatttattgatatgatctattgcttgaagtctgactccttctatggtgtcttttgatactttgcaagtgtcttcgtcctctgccgaagc

SEQ ID NO: 128114 - DNA, 549 bp, Zea Mays
cttcgatgtgactttctggtgcttgcaggcatttgcggagttgggacacgtgaaacacattgtggatatcagacatggattctggtaattcaagatggtacgctgcgggtctcactctgccaatgatggggtaggggccgacgaatcgcggtgctagcttccctttcacttggaatcttctgacaccatacatcggggagaccttgaggtagacgaagtctccttcctcaaatctgagttctctccgcctgttgtccgcatagctcttctaccgactttgagcttcaagtaatcttctgcggatcagggcaactttctcctcagcctctttaacaaaggcaggtccttccagtgccttttcccctacgttagaccacatgagaggggtttggcattttcgtccatacaatgcttcgaacggtgacatcttgatgctggcctgatggctgttgttatatgagaactccgcataaggcaaactggattcccagcttctatcgaatgttaacacacaggctctcaataaatatttgaggaccttgttggccc

SEQ ID NO: 128115 - DNA, 603 bp, Zea Mays
ctagttgtaattagggatgaagtgagtagattggaggtataggttttactcgataagaagttcggtcggtgtggttaaattttttggcatatgtagtgaagtggtgacatgcctaagtagtcattgcttcctctatgtcatgagtcgggtcaatgctggcgttcattgaatttcacatcacatataatgtacggttgtattcatgacttctaatagatgttttcgagtggacaagtagtttgtaatgcaattatgtgtaacgtgtttataatgacattttatcttaaaaagtgttacgttctgcgcataaataagaagtatgtatgttttatgtagtaaggattgattgtgagtgagtatgtcgcaagaaatgaattagtgcacatataggagatgaatgggtgtgatgaaatggtgacatgccttcgtagtcatcatgtcgtctgtttggtgacttagctgaaagtcgtaaagaaatgtcgcttacctatgtgtattattattgttactctgcgactctatataaatttccatgtgaagtatgattgaattagtctatgtttgtgatatgtggtgtagcggtgatacaaaaaatagtttaga

SEQ ID NO: 128116 - DNA, 542 bp, Zea Mays
aagctcacaaccgcaccagttttgacactgccagacatccatcaagaattcgtcgtcttctgtgatgcttcaaggcaaggtttagggtgtgtacttttgcaaaatgagaaagtcattacctatgcatcacgcctactcaagccgcatgagaagaattatcccacacatgatttggaattggcagccatagtgcatgccctaaaaatatggagacactacctcattggaaacaaatgtcacatcctcacatatcacaagagcctaaagtacatttttcactcagccagacctcaatctccgtcaacgaagatggctagaattgatcaaaggctatgaccttgagatccactaccaccccgggaaggccaacgtggtagcagacgccctcagccgaaaacctttcgggaagaaagaaaccaacttcttggaagactggaagaaagaatcaactcaactgaacacatgtctgggagacaatggcagcctagaagtcaagccaatgctagaagacctcatacgcaaggctcaacgcctggacactg

SEQ ID NO: 128117 - DNA, 1146 bp, Zea Mays
taacaatatgccgagttatagtcaaaacagttagctacaattatttatggcattttgcagccagtggttgccggctaatccggccggtcacaaacaaccaagtagagttgcctcgtacttcatctcgcctggctatttttagtagcatggtactgaccgctgaagcaggcagatctggatctgtcctggctggccgctaaagaaaggttgtttacaaggcagcagaggcgatggctctttgtctttgtgcaatggtgactggtgcgaggtgtctggtttggttgcgcacaagaaccacaccaacagaagttgcctgcactgcatgcacaccatgacaccaatggcctctcatgactttttgatggaccctccattgtctctgcaaggaagttggagtgcgacctgggccttttgtctagatgcaagaagggctcgtgatagctcatttcgttctaggctttggctcatggcgcctgctattccaaggatgccatacatggaccgctagctagatttgaggttaaagaactctggtgttgttctagcctgtagacatcatcgctgatcaaagatcttacagtttgtttcggagtgaagttgtgagtaaaaagtggcgcaatatataaaatgccctgttgattgggggtgaccaattcatgccaatgctaatggagagttggagactaatatccaacatctcctcttacagataactttgagacaaatggaagctaaccgacaaatcgactaagtaaagtaattattatgcccttctgatccacagtggtgttctgaaatttattttctgcaagcaccaccagcatgcagactcttgcttgaagcagatcagcctgggtctgcactatgcagaatcaaagccagacttctcgccgattggctctgctctgctatatagtggagtaactgtggtcaaaatgaggccatgacccaatctttcgcgccataaagaaaagagacgccttgcttgacctatgggttgccagcgtcgagagttccacccaataggatagataggatggggaagaagtcgtggtcccatccatccgattggcgcccataaaaagaggtgcttgtgcttggagatttccatcgcacctgcttctcggggacccgtaaccatcgagc

SEQ ID NO: 128118 - DNA, 389 bp, Zea Mays
gcacaacacagtcatggttcgctctgccaaataccaacaagacctgcgaggttaccatgaccgacgagtacgcgatagaccgtttagcgtcgtgaccaatttgaagggcaatggccaccaaggataaacataagctcttgctgttgtgggaggggccatacatcatcgcctagatcctgcgctcgggagctcacaaactcaaggacagcgatagcaaccttttgagccacgcccctatggtgacatattatatccccttcaccttcacactaaagaaagcgaaacacgccgatcaactcaccacgtcccgctcgggggctagaggataggtatctaggttcatggtccaccccaagatgtactttcatcctaaagggtcatgactgcgg

SEQ ID NO: 128119 - DNA, 282 bp, Zea Mays
tggcagtatgccggcccctgccatgttgtcggggcagtcggatgccccgaaggagatggtggtgctcctccatcgttgatgtggggcagccttcgggacccttggagtcgccgacaggacctcacgtcgcagggacttaacgtttctgcgggaggtgagttcctagctcccgtcgtacatgacgtacaacttcttgtggcggtcgctgtcatccccggagtcggaatccccagtgaagacatccttgaggtcccctcgggtggttgatacccgagttcttgc

SEQ ID NO: 128120 - DNA, 752 bp, Zea Mays
gagttctggcctgagtcccttcaggaaacgggccatcttcttgccctcggtaatgacgtcatctggcgcgtagcgggctaactctgtgaacttgtgcacatattcgctgacagatcttccgtcttgagtcagttctcggaactcgtcctccttaagctgaacgagcccttggggcacatggtgctcccggaaagctgcttcaaactccgcccaggtagcatctctgatggtgacgttgaaggtatcccaccaagctaaggccatcccgaaaagttggtgggcagccagttgaacacgctgattttctggacattcgatggcttctagctttcttttaatcgtgcgcatccaatcgtctgcatcgagggggttgctagacccggcaaacgtgggaggcttgagtctcaggaaatcccccattctgtcttgcggtcttccaccatttggtcgttgattttccagacttcgagtgagaacctcgatgagtcgggtttgattggctagaacttggctaggtctaagggtagttgcggaggtgcggggaggtgggtttcactttcctctctaatggcttccccttcagctcttaggggaaaccctgctccaatcccggaggcggtaggcgtggttttatccgaagccatctgccagggaagagagtcactattatgcacatgcaaattgttttcaaccaagttattttattcattacaccaatacattacaagcatatgactactacaggctgaact

SEQ ID NO: 128121 - DNA, 841 bp, Zea Mays
cactggaaacttagttttgactgtcagggcattcaagtggcgataatcaacacaaaagcgatacgtgttgtctttctttttaactagaatgactgaagaagcaaattcactctgacttggctgaataatccctgtcttcaacatatcagtgacttgttgttcaatctcagtcttgagggcaggagcatatcggtatggtcacatctggacaggtcgagcccctggaagcaagggtactttgtgatcacaatcccgaacaggtggcattccctgaggcacttcaaatactgtcgaatactgatgcagaagctgctgaatatcatcagggagtccttgaagaattgactgctccttatccgacaggtcttggatactgcagacttgtatcagggcagtctgcatgaccgaagcttgaattcctcgcaacatcacagtagaatttcgaagaggaatgcacaaccatttatgtgcccaatggatccacatgggactatgagcttctagccaatccataccaataatgatatcataagttggcaagggcaacaccttcaatgtggatgaaaaggaaacaccactaatagaccaacatgcatccaccacctgttgtgtacactgtaattgagatccattcgccacttggacttggaaaggcttactgattgtggtcacatgtggcaaggactgagctacagtattgctgatgaaagaatgagagctccctgagtccaacagaaataaaacatctaagccagatatatgtcccacaaatttcatcgtacgaggaacctccaaaccagtgactgctgcctgcgacaggtgcaaaacattaagttcggtt

SEQ ID NO: 128122 - DNA, 640 bp, Zea Mays
agtggcaggccatagtgcacctgggcaagagcgcaaggtggcagaccaccttgcacttgagcaggagcgtgaggcgataggctcaagtggacctatgctagagcaggaccacaatgcacttaacttgagcaagagcacgaggcggcagaccacaatgcacctaggcaggaggacgagctggcaggccaaggttcaccgatgcgtgatgatgacgactatggggaggactacgatggagaggccgatggagaggccgatgacgaggttgttacaacacaggcaacgaacttcgggtatttttattttaacgatgagttctattttttgttggattgatattattaccagtgcacaatttacaattttgtagatttcggcgatcccttagagttccaccaacacaacccttggaccaacgtagggtataaaccctgcaggagagaggagctgggtggaggtggcatggagtggcaaaggtcaccggacaccagttaacacagtgttgggatctatagctcgttttcactatctaggggtggtacaattcaacggggcagagataggggcatatcactgggctcactgggccctcaaaccatatggacccgaccgtactcaccaagacgcagtgtggtcatcg

SEQ ID NO: 128123 - DNA, 560 bp, Zea Mays
gtgttggattggcacgagttttgccgcttgctgctggaacgttttggcaaggatgaacatgaggcgttaattcgcaaattattccgtattcggcagactgcttcagtggccgagtatgtggatcagttctcgcagctgatggataatttggtggcgtacgacaagccaatggatccattatattttgtgcaacgatttgtggatggattgcgttcagatattcgtgctattgtgcttttgcaacgcccatcttccgtcgatactgcttgtgttctcgcattgttgcaggaagaggtggcgatgccggagaaacggatggaatttcgtcgtccttcagtaccagtattgaattcaagtttgggaaagcaacctctgcctctaccgttaccaccaaggggtgacaggaatgtttctctggctgatgatgtcaaccacactgaaccaagcagaattcgtgcttctgatgacaagatggctggtctccatgcctatcgtcgagctcgaggattatgtcaacggtgtgctgagaagtggtcgagggaccaccagtgtcctccgac

SEQ ID NO: 128124 - DNA, 458 bp, Zea Mays
caggtcagtcagtgcatccatcccaggtatggtgctctctatcgcgttcgttaggttcttcggtccctttttcgcctagtcgtatcccacatcgacggccagaacccagaacatggcgtgctccggcgagccttctgccgtggtccgctcgggctccgccgctggcgtgttccagggaggaagaaagcgcctgggacatcagatcctatgtggacggctgagatcataacacacataccctttcgcttagtgttgcctcgaccgtcgatcttgcagtgagcgaatcagattaaaagaaacatatcccttcctgtattgaacttagaccgtggatgggagattatgtggtggggattgaatccgacttgattgaatatgggccgtcgatcacggatccggtggtccctagtgcgtaccgcttggataaggatgcgatctaatctgcaccgtgcgaagac

SEQ ID NO: 128125 - DNA, 418 bp, Zea Mays
ccttgatgcgggcaaatagtactattcttgaggcattgaaaggtgtcccttataaggatttaaatccttgagtaaatttgggatactcttctaaacttgaatcatcgtgtcaaataaatttgtcttcgattgagtccctagtccactctagtagctcatagactcggctcgatacttaggactcgatccattattgctccaacactccaaactttataatcccacatcactttagcttcatgaggctccacatctataaaaggaaaccccctgcaggccatcaacctttatactccaccttcaagcgctcctctacggtcactccatctttatcccatctttttcgtcctagggtttgctccatcaccattaaccttcgatcagctcctatttctccacatccttgactcctctcaac

SEQ ID NO: 128126 - DNA, 972 bp, Zea Mays
agagttatacacatgacctttcgaagatctattgagaccatcagtagatacttcagggaagtattgtatgctgttggtgaactgagaaatgaaacgatcttaccaccttcaactgctacaccaaccaaaattagagatagccacagatggtacccctatttcaaggtcagccctccaaacacacaactactgatcccttccttttcatgttgggtttgtagtaacaaatgtttgccctaatgtgtaggactgtattggtgccattgatggcactcatgtgctagcaagagtttctagaaatcagagagctgccttccttggtaggaaacacaccacaacacagaacatcttagctgctgtagactttgatctaaggtttacatatgttcttgctggctgggagggatcagcacatgatgcccttatccttgctgatgcccttgagagagaagatggtctaaaagtgccccaaggtaaaaaaatagtattggtctacccaatgcacactttccttggtattccctaatatatgatctattatgttaggtaaattttaccttgtggatgctggttatgctgtcagacctgggtttttacccccttaccgtgccacaaggtaccacttgagtgaatatggggggaggaatccacagaacccaaaagagctcttcaaccttagacattcatcactaagggtgacaatagagagggccttcggtgctttgaagaacagattcaaaatattatacaacaaacctttccatccatacaagacacaagtaaagctagtcctagcctgttgtatccttcacaattggattcttcatcatgggaatgatgaacatgttccactagaagaaacatgggctgcaaatgaagttcatgaggaagctccccttgaccttgtcatggacaatgctgcctggtctgctaccagagacaattgggctcaacaaatgtggcagaataggg

SEQ ID NO: 128127 - DNA, 485 bp, Zea Mays
tgcctgcctctcactgtcacacacagcactggcctggcctccatagcatgcgttgcattgtgtggggagaagagtagaatgatgagccttgaaccgagcgatgaatcgaaactgcgcggatttgctttcccatcgtcaccccgtccatgctggtgcgtttggttgcatgcatcagcatatgcttgcatcgcgggagagccaaccaatccggaaccaaccaacggtcttggctcacacagccaggctttccacagagccaaccaaacaggctgctaatgaaagcgagcatgattgcgaagccctagggaattggtaagcaaaattggcggagatgaatgcgaatgaatgaaatgaaatgttaaacctctctgtcctcgactcctcgtcgtgcatcggcaatctcaatctgtccatccgcgggcgggtcaatcaaaacagcacagcaccggaaaagcgtgccactgacgagtcatccgtatcagcga

SEQ ID NO: 128128 - DNA, 324 bp, Zea Mays
catgagctagaggggagatcatggagggagtgggcagtttggagggagatcgtgggggattcctttgcgcgggcgtctgggagtgagtgggtgctcctgagatggctgggatcgacgatgaacaagagagcacgggacggagacggcgctagcaggaagagctagagggcgagggctcgctgggcagagaaagcaagggagactgaccctaaagccaaactgggtcagggtaagaagtgtgtggcctcctggcagctacttgggccgcaccaaagaaacacagcccacgcgacctatgtcgtcgtcacggcttacagattttta

SEQ ID NO: 128129 - DNA, 680 bp, Zea Mays
cgccatgcgcggcatgcggcaagacgcacaggcacgaagtgcacgagcgggggcatggttgtgcaagagtctatactattaacttaatagatagtagagattgtagttaatattcttttattacatgtgtgttgcacgtgcatttccactagttctagtaatttcctatatattaaagtggggcgcaaaggtcccatctggtgcgtccacgtcatttgtgttttctcggccctacaatcgtccttcaacgtctttgatttaagtgtgtctccatgggaacctttcggatgaagctcacacctttttcagccactccctcgaaacgcgagcgtcgctacgcgcctcgcagccctcctcatcggtgactccggcccccacgagggcggcttgccgtttctcgccgcgcgcaccattgccgaggttcgtgacgctgtgtcccaatggtatatttgcttggcgcgccacgcggccatcgatgcgctccatgacagcctcctcgccatcggctgcgtggaactcaccgaggatgctggttgcttgctgctagggatggacagatttgggcacgagagagagtctaggctgaagcttgaaggaggagggcgagcatggcagtggcggctgtggcgctgtggagtactatcagttcaaaggctcctttctccttttgccccctaagc

SEQ ID NO: 128130 - DNA, 321 bp, Zea Mays
gccagccccagtccacacctcgcggcacgcccgatgcgagtgccgtttggcgcgcctcatcatcgctcaccgtttgggggcctgcctctgcctttctgttcttcaaacgatgtctcatgtctgcgctggacaactttcttgttgccgcctgtcgcttgcgctgtgctgactggacgcagctccggaggtttggttgtgcttggttttcgtagagaactcgccacttgccgcccgcacgttcttggtgtttcctcctccccgctgtgttctgcgcacgggctttttctgagagacccatgtttcccttttacttttataaac

SEQ ID NO: 128131 - DNA, 300 bp, Zea Mays
gagcgctgagctctcgtgcttgtgtgataaggatacatgctaagttcacttgcctttttactggaggccccatccctttatatagtcgagggcacgggaggtcgttattaaatgaatattttgatggggtgaatcatcactagccatgttttccgaaggattgtcatagctagtgcgcctgctcccaaggccatatcattccagagctgaccgaatcatgcagacaaatggattttgcaggtgtccggagccttatcgtgaggtacatctctaggagttgtatgggtgtttgcctcaaag

SEQ ID NO: 128132 - DNA, 640 bp, Zea Mays
gttggaacgattcacccaccatcatccaaaggacatagatttattttagccgccacggactatttctccaaatgggcagaagttgtgacattaaaagaggtaaaagctgaaaatgtagaaaacttcataagaactaatctcatatatcgatttggtctgccgagtagaatgatatctgataatgggtcaaattttaggaccaaacaaatcgagaggatgtgtgccaaatttaaaatcaagcacaacttctctactggatataacctgtccgctaatggtcaagcggaagcatttaataaagtgttatgcaaattgcttaaaaagatggtctcacataataagaggcactggcatgaaaagctactagagtccttgtgggcgtatagagttacgacgcgaacagcaacagggatgacccctcactcccttgtatatgggggagaagcagtcttgccattagaaatacaaattgcctctttacgagttgtcattcaagaaaaactcacagaagacgaagcgacaaaattgcgcttaaaagaattagataacttagaggaaaagcgacttcatacattgcaaaacttggaggcataccaagctaggatgtctagagctttcgataagcgattaaaaagaagat

SEQ ID NO: 128133 - DNA, 936 bp, Zea Mays
gttcaaaaaggatttaaaatggaatttctaggaattaaacaaattctgaaattattttacattaaaaatcattaattcccttggttttcatactgctatggtccacgcacattaatactcaggagtttgggggctaattcataattgttccaagactcagagctaacccacagccatgctcatcggaccgcgggttcatttcgcggttcaccagggactcatgtgctaattgccagggccgaagaggtacggggcaatcacagccgttggattgagaacgtgagcaccagattagatcggtctcccccaaagcggtacactccatcggccacacgattaggatccaacagctaggatttgcgtaaaccggagcccttggatcgttgatcggcgcacacgatttaattcatcgaagagttacgatcggtctaatcgcgactgttggtcaaagatccaacggttcccatgccacgggggcatcagcggcctagatccaatcccagccatacatctccgtttcaacggcccacgtcctttcccccaaactctcctctccctgtcaacaaagcggcggcgccactcacgagcacggcggaggccctcgccggccacagcattccccgcatccccgttctaaactccgatccgaggtgttcactacgcagcagatacatgggcgaactggatggggaatttcttaccgcgaattgccgcgacgactgacccagtcacggtacgatgtgggccgcacggcggtggcgccctccggtgaggaattctgccatgccaaccgcccgtcctgcccgaacaagcagcggatacccatcggtgaccccgcgcgagcccccggagtccccaagcacgcttcgaacggccacatcgacgagccctccacttcacgaggtgcggcaacacagcggcagcacgccattggtg

SEQ ID NO: 128134 - DNA, 610 bp, Zea Mays
cacacacatatttacctattcaaatacggaccaatttctctcacaagctgaggaactacaggttagatttagaattattgaagccaatatcatcagattaggtgtgtttgtgccatggtttagccaccactttgctgcataaacaagttaataattacataattgtgacagaggcaagaaacaaattgaattctaaaaccatgtattcaaaatagaatcacctggattaaagttcttgtttctcctttgccttatggcaatttcatgtccaaatgtcccttgttgatcttggtacatgtagagttcttcaattattttgtcttgtgtttcttcatcaccaatcatctttgtaatgcaattaatcactccagctctaaaggatccatcatgctcaattttagacatctttggataataaaagtaaggattcaagtagtacccaactaagtgaagtggagttttgagcttgctatcccaccgcttatcaataatatcccaagcaactttgtagcggctctcatcattgtcaaacctctcagaaatttctttctttgcctcaagcattaatccatgaaagaatcccattgctggtacatcactgtccagtctc

SEQ ID NO: 128135 - DNA, 507 bp, Zea Mays
cttgtagaaagctgggaaatgccgaaggagaccaccaccgattctagcgaaggtggtctggtccgactgaagtataccttcagattcagggagaagtttgatgagccaaacgacgactggctgaagtgtatcaaagctaccagtgatgaactgcttggagcttattccaaggccaaagataatgctctatccacagccttcggaggtcgggggaagaaaagactgaacagggtttttgatgcaatcagctttgtataccccgattaccgctacccgctgcgaggacaggagaaaaagaggaagattgctgctttggtcaccccaattgagcatgtgccgaagagcaaaaaggtgaaggttctgacccaccggccacattacattgaaccggtcgtggtgcctgaatttggcgcagggtccactctagcagccgaagcaacacagtctgcttcgattacacagagcgccgaagagccgaccgtaatgccgaagacgcatacagtcaag

SEQ ID NO: 128136 - DNA, 353 bp, Zea Mays
ctgaggtagaacaacctgctcctgccatccccagggaagaactagctgaattgctgaaggctcctacagctggaccggtcgggacactaaaacatggtgccaaagccgaagaaaatgtggccatagagccgaagctaggggaaatagtagggctaccaaaaatcttgagcccgccagcggagccagaattgccgaagatatcaaaagctcctgcaataacccccaagaggaggaggatggcaagcgtgttggacactgtcatggagtcgacaagggcattaactcctgcccctacaaagaaaattgccgaagctactacagctcgcgctgaaaccgaagctaggccctcagtg

SEQ ID NO: 128137 - DNA, 591 bp, Zea Mays
gcgactctcaggtgagccacgcgcccacttgcacgtgccatgtcatctttcaattcagtacccaaccgacaaaccaaatgcccaaccaagttaaccagccataccaccaaaccgtttcgagtttgtaatccactaacaggcaatggacatgtaatgactaacgagtccacaaggcgtgcacattgcattggctctatggacccatgattcccccgtgagccacgtgcgccatgtcatctttctgtacccaaccagctatacgcccaaccaagtgaatcagctagcccaccaaatcgtttcggattcgtaatccattaatgggtcgtggacacagtaatgagtccacaaagcgtatgcactgccttggctctgtggacccacgactcccccccgcgaaccaggtgcgtccacccacacgtcacgtcatctttctgtacccaaccaaccagccaaacacccaaccaagtgaaccagccagcccacaaaaccgtttcggggctgtaatccactaacgggttgtggacacagtaacgagtccacaagacttgcacactgcattggctccgtggactcgcgaccgcctgcgagccg

SEQ ID NO: 128138 - DNA, 525 bp, Zea Mays
caacgcacgggcattcacctagtagtgtataaaacatctcactgcaaggtctatactggttatttttttacattccacaacacaatatttatatttctaaaaaaactttttacaacaatatactcaataatttatctaattatatagctaactttgtaccataagtattaatattctgttatatatattttattaaaacttagaatttttgagagcgaggatggtattttttttataggaccaaaaatacctagcatttattatcccacgctgatggatgaaaaaagcgacgcacaccggccagcgggcagctcttcctctcaggccaagtctactctcacctcccccgtctctcagatccacgctgcctagttgttcggacttcagaccccgccgtgcgctgcccatggccgcgggtcgcggcgacgcggcgagcatggtggcggtgggtctggtgtggggcgccaccaacgcgctgatgcggcggggcgcgctcgtctgggaccgccgcgcccgtgcctgccc

SEQ ID NO: 128139 - DNA, 674 bp, Zea Mays
ctatccgtgcaaaagtcgcctaagggtgcagccggactagcacaacaagtgcgcaaaatcgaggtcttcctcagaagactatccgtgcaaaagtcgcctaagggcgcagccggactagcacaataagcgcgcaaaatcgacgtctctctcaaaatactatccgtgcaaagaccaactacaggtgcagccggaccgacataaaaaacgcgctagacctagtgcacaagtcccctacgggcacgatcggatcagcgaaggcacacagcctcatcatacaaattatagttacatacgtacagcgagggcatcacacctcacattgcttcaaccttcgggacgatacccatctccctatagttaaacagcattatcctcagctcctcaccctcaaaaagacttcgcaactccccctcacctacactcgcaccaactggcgaggacaacaattcccgcttgccagccctgtccacacgaagacgaccaccctccacctcactcactctacgcttcgccaccgcccttcgtcacctacgcccagcactcggaccgggaataacttcagtatccatcagacgcggagaagcctccgcctcagccacatccaacgccgcgaaataatacaaatcctcatccgaagactcctccgtccacaccaccgaactcccagaaccatc

SEQ ID NO: 128140 - DNA, 574 bp, Zea Mays
cgcactttctgcgcgaaatagcgggcaaccaatttcaacaacacggaggaagacctccccctcaaggaccacgagatactacctacctagagttctctgaaactcgaccatcgctcttcatcaaggcagaggaacccttagaagctgacgaatgggtgcgagtaatggaacagaagtttgggctaatccgatgcacggagacgcaaaagcccatgtttgccgctcagcagttaagagggcctgccagtacctggtgggcgaatttttccgtgatccagcctgttgggcatcaagtcacttgggaagaatttaagctgatatttcgggaacattatgttttggagggggtgttgcaaatgaaactagaagaatttatccgactgaagcaagggggagataccgtgatgcagtatctcaataaatttaacaatctctcccagtacactattgaccaggtggatacagacctgaaaaagaaaaaatgctttgtgagaggactgaatgacaagctccagcgtaaaatggcaacatgtctggacctcacatacagcagggttgtcagtacaacactgac

SEQ ID NO: 128141 - DNA, 529 bp, Zea Mays
gaatggggcgcaagcttgtgaggggcagtggcagaaagattaggatagcaggcacacctgaacacacgaaggtgatcgtaagagggagagatgccaaagagagcaaagtaggggtggggtaaggcactgccttgttggggaggcggttgagcagcagcggccaacccctcagcccaatagtgggcgggaagggaggtctggaagagcaaggaagacatgacgttgttcgcgatgcggatcatgtgttctgcctgatcgttttgagaagaagtataggggcacgacatcctcagctgagtgccatggaagaggaagaaggaacgatacgtggagttgtcaaactccctctcgttgtcacattggacagcccagacgttgcgtccaaactgagtggaaacccaagcgaagaagtgagaaagggtggggaacatatcagacttcaagcacaagggaaaagtccataagtaatgtgactagtcatccagaatgagcagacaatatttattgccagaaacgctgagtacagggg

SEQ ID NO: 128142 - DNA, 403 bp, Zea Mays
gtctatcattttctattatacttacatgcggtatgagattaattatttgaagctttcttatatatccgtgtgttcaacacttgcagttggcatcacatcatggaactttcagcagaaaaattaagtcctggcaaatctatcccaatgcaagatccattgaccttcaagccgcgtctcggtgacaccgccaattcaagatgagcgatgcaggttttgggcagatccaaggagataagttggaggttgggaagcaggggcgtggcttgtccgggagcaagggcgcctccacttgtttaatcacgcccctgcatcattaacaaagcaagtggagatcacggagcatatatatgagggaatcgagcacatgatgatggggattaattagtgtcgcctagctcctgac

SEQ ID NO: 128143 - DNA, 578 bp, Zea Mays
gtggcgggtggtgtctggctgtagaaattgagggtgggggcgaatatgtcgtgcgctgcacgaggttttggagccaggcggatcgcgattggggctaggcacaggattctggcgagagctcgccgttgtcggcaatggcgccaccgcggctgaggagtttgagtcgccgccagcctcacctgggatagggtggtcgttggcccttgatctcgtgagggacgatctcgattagaacacggataccggttcggcttgggttcatcctcgccgtccgctgcgaatcaaatgggtggcaagcaatctgggtacttaaaaatatgcaccattgatgcgagatctaggggactgcattgcgcagggatttcggatgatgtttggtctaatccgggccgtccaggatggatccaatggcccaagattcgcgataccccttcgcgggtacactttacaaaagagaccttaggtttttaggatttagaaccgccgtcccttgctatagccctccgagtcttggggatctttttagtttagcccctgcgttttctgataattgaggcctagtctagagacgtttaaaa

SEQ ID NO: 128144 - DNA, 547 bp, Zea Mays
gaaattcagcattagaggacacctcagtgactcatgcactttactggtgagcaacagactgtaaaaatcaacctgcgatcaagtgtctattagtcttgaagtcgaggctaagatcaaaatgccaggaaggtaatttcgaatttacataagatgaactaattcaatggtgtagtagtcataaacaaaggcacgctgcagcagggcaaagaaggatctaattcaccgtcggtccatggcaattatgacaaggaattgttgaggcatgggtaaacacagggatctaaacaatctgaggctccatttcactagatctccaagacagcgaaacatgaacattatatcattacctattgccgatttgacaactgttcgaagaattggaccgagcacgaacagttcagaaattgccaagaggacatgtctgatctggtgacttacacggcgcaacggaagcatcgctaaaatggacaggcaaaatctatgagcagagacacgcagaagcgaccgcatttgaggggcgaaccccaagcgttagactaaagactaa

SEQ ID NO: 128145 - DNA, 492 bp, Zea Mays
aatattcggtaggatattagaatgtgttcttggcgctgaaaactataacgttttgtttctgttgttagaattcaacagttgtcatgaatgattgtagaagtaagtgatgtgtgccggttttggaatcttttcctaacttatgctaattgatcagctggtaaggcatagagatcgccctaagatgagtaaacgcgagcatgttacactaagtcgagtaagtgtgagcatgttgcaccgtcttaagtcattgttgacttaagatgattgctccgttagtagggtatagtggtcaccctaagtcgagtaagcgtgagcatgttgcaccgtcttaagtcactgccgacttaagtcgattgctccgttagtagggtatagtggtcaccctaagtcgagtaagcgtgagcatgttgcaccgtcttaagtcactgccgacttaagccggttgctccattagtagggtatagtggtcaccctaagtcgagtaagcgtgag

SEQ ID NO: 128146 - DNA, 466 bp, Zea Mays
tcagcggtaatgggcggtggaggcgggagtggaatttcttggccatcgttctcgataccactgtcgctagctccactggcaccaatagcggtgtggcgagtatccaccatctgcatgtttcagcaacaagtaattatcaggtgatgttgcaaggattgcaaacgaatgtaatcatccccgaataaattgacagggggagtaactgtggtaatttaaaacagaggcataataatccattcacgacaacatcactaattatattacttcatggtgtccaagcattctcgcacacacgcaagttgccagcatacatacactggacttttaaagtatggtcaacacaacatgatcccaagttctacatccaacaagtcttaaaaccgacggacaaactgacaagcttgacgacaaaagaacgcaaaagacagtctaatgtctagcgatacatctactagactacttctcg

SEQ ID NO: 128147 - DNA, 394 bp, Zea Mays
gcattttgcatctaaatgcttttgagttctaacaaaatgcagtttcttgcctcaacagaagttgtagactgtactttgttgaacaagtcgcactaggaacttactacattcttgctctatagaaactgtcaggcttgtgagagttctgttatgtaccgcttcttttctaaagaaaaatagtagagttttagaaaacataatgaatacagcttcttttattgaactcttagaagtactccagccattgtagtttaatttatctgcatacagttggttgtattgaacactgggacaccctgaggtctttgttgttcaattatgattatatttctgtatactttatttttaatggttaatcaaaatgctagcttatataatgctccctcaaatgcag

SEQ ID NO: 128148 - DNA, 491 bp, Zea Mays
aagaagaagcctacgttgatgatcgcgagcagtttgccccgcctccctaccatggggatctgggtcaatcatcctctcaccctccgcctccctactcgggtcagggacccactcccggtgaccctaggccgtccggctctggtcactatcctcctccctacccgggtccgggacccattcctggtgacccgcggccatccggctctggttaccatcatcaccctccacctcctcctcatcatcgtacatctttggcatctggtttttctgcgggtgatgagccccctagggactcctcactcgaggaagacgtgatgaggaccttcttccctgactacacatcataccctccatcataacctccgtcctatcctcctcctggaggatattgattcatgtatccttgtctctctctctctcttcgtttttggtacttgttgccaaaaagggggagaaaatccaaaatttctagtcattctgtttgtggttct

SEQ ID NO: 128149 - DNA, 293 bp, Zea Mays
gcagtggctctatgaaggtcaaacaaacacagacccacaacaagtggttgaagctcagtctcatcacgctctctgaaataggtgggaggaactggtggagtggccgaggaagtgggagcagtggaagcaggtgtggtggaggctgtaggtgttgcgagggtggtggtaggcattggagtggcggaaggtggcgtggtagtagtggctagagcagaggggtctaatttggctagagtggagcgtgcccgagacgagaggcgacaaacatgaaaggttatctagtttgagccaat

SEQ ID NO: 128150 - DNA, 385 bp, Zea Mays
cccaaaccttggaggtaggctttttgtttgttttttcctcttctcaccacgtcctaatttcttggtgccattggactcatctcgagcttcttcagtattaacaacattttcgacacttccaccttttataaccatagcaccgacaagttgttgtgttctaggtgcagactgattagtgccaatgggtgatatagcagcaggagatgctcctgtgcttgcacatacactcccacttccagaccttagcactaatggattgacagccattgtcagtttgacagcctctcaatctcggaccaaataatgaacaaacactactccaaagtccaaacaggcaaacaatgaacgagcaccagtccagcaagcaacagacgtgatcctaaac

SEQ ID NO: 128151 - DNA, 443 bp, Zea Mays
ggggaaatcatctagaatgatcaaatagtacttataaccagaaataccgataacaggtgaggtccatacatcacagtgtatcagttaaaaaatgtttgtcgctctagaagagaaggtagggaaggggagcctaacatgtcgacctagctgacatgcatcacagagatgcccaaaagagcctcgactacaagacaaagtagagctgctagacattttggacatcatatcatgcccggggtggccaagccgacggtgccaagtgacgaatgaaccaacaatagcgagggcatgtgaagcagggtcgcagaagaggtagcatgtagacgaagggtatagacgggctcgaagctgtcacatctagcgagaagggtcctggtagctagatcctacatggacaaaccaaacgggccaacctccatagaacaagaattgtcagtagtgaa

SEQ ID NO: 128152 - DNA, 511 bp, Zea Mays
ctcttctctctcacatggtgaaatcctagatccaaactatgactaaaattgagcaagtttgaacaaaaaatggtaagagaaacataaaccgacctttcttagtaaccttcttccaaagaatgaagatcaaaatcccccccccccttgtattttgtgaaatctagacctccaaaatcacatttaatggaagttggctgcaagctacagttcctgtcgggaagaggtaaagaggtatttatacaacaaagtttacaggcggttggataagacaaccgccagtggaaaccaatttccacttacggttttcttaaagaaacaacatatttcaactagcagttggtgtaaggcaatcgccattggaaactggtgcctaattgggtccaccagtttattatcactggtgctcgataaccgaaactgccaataaaaagaactcgtcgcatgcttagagctcttttctactagtgagttctggtattaactttcataaattgagactggccttaaaaat

SEQ ID NO: 128153 - DNA, 553 bp, Zea Mays
aaggcggcttcaaattctgcccaggtagcatcacggacggcagcgctgaaggtatcccaccaggatagggccatcctggagagttgatgagcagcgagatgaacacgctggttttcagggcatccgatggcctctaacttcctttttattgtgcgcatccagtcatcaacgtcgagcggattgctggatccagtgaatgtgggaggcttgagccttagaaaatctcccattctgtcctgaggtcttccaccatttgggcgctggttctcaaggcttctggtgaggacctcaatgagtcgggtttggttggccagaacttgggctaaatctaatggcagctctggaggtgcggggaggtgggtttcactcccttctccaccgacttctccttcagcacctaggggagaccttgctccaatccctgaggcggtaggcgtggttttatctgaagccatctgccaggggaaaggattactactatgcacatgccatattttttttcaaacacgttattttattcatcacacaagttcattacaagcatacagttgcc

SEQ ID NO: 128154 - DNA, 765 bp, Zea Mays
aagaccattgcactcaagcaaaaatcgaactcaaacatttcaaataacaccatcacatggttgttattattataagcataatattataaagatgttcatcgtctaacgcgaaatataacttattacaatataaatgaaaatttatagcagcctggtgatagatcctggttctccatagcggatcctcttgcggggaggggataacgtcatggtagagacttgaactttagggggattccttccatcaagctgagcttccagggctgtgatccttgcgtgtgcatcctccagctccaagtgtaccctagagaggtccagggtagcactatccaggtcggtgttaagacctgccaccacaccagctagggtgttgaggcgatcttctccagctccacctggaacaatgttggtttggctttttccacgaatacacagagaaatatgcctgtacttcgtgttgtgcagctgctgccagtaggtgtggctgagggaccacagagttcgcctagcagcatcgttgtccgaagcagcgtaggtggatagcggtgtcagagactcatgaactgatagagtcctgaagtctctatcacctgcatccatcaccctgacatgaatgcgagtgatgtagtagcaagcctgaggaggatcgtacactcgccttgtctcatacaggggtcggacgtaggttcccaacgcatgcagaacatcctgcaacaggttaggaagtgccctgtctcgaacatcgatgtataatgttcagtgaca

SEQ ID NO: 128155 - DNA, 402 bp, Zea Mays
attccctacttccgtgccatccatttgagtaagccgatatgatcctggccgagtgacctccgacactatgaatggcccctcccatatcggtgataatttgtgccgtccttctcccgttagaattccgcgaaggaccaaatctcccactatgaaggatcgatgttgtatagtcttatcatgatagtgcctcagggtctgctgatatctagctgactgaattactgtattcaaccgctcttcttccagtatgtcaatatcttctagcctagtagcctccgcttcagctatgttttcgaagaccagccttggtgccccaaacctgaggtcgacaggtagcactgcctctgaaccatagaccatgaagaagggggtgtttccatgcagagctcgactgggttgagt

SEQ ID NO: 128156 - DNA, 479 bp, Zea Mays
gtggttgatgcccttttggtcgaaggcgtgcatgaaaatgatgtcggcttggcttccgttgtcaacaaggaccttgtgcagctcccatcctgccacattgcaactgatgacaagtgcgtctgtgtggggcgcgctgcgaaggttgatgtctcttgcatcgaaggttaatggtacgtgagaccactttgtctgaacgacgggtcctatgaccacgacatgattgaccctttggtagtgatcccttttttgtcatttgttctcaaagtgtgagctggaccctccggtgatcatgtgaatcactcccctgaagggtggatctgcgaagtcttcttgctttggtggtggcgggtggtaggtgttggtttggatgctgaggcagtggaggtggcaacactagcatttcttggtgttgaaagtgttgttgctggtgaaagaggttggggttttgctgctcggggtaataggggtgttcgttttga

SEQ ID NO: 128157 - DNA, 597 bp, Zea Mays
taggaggtaaagtggcgtaccacgcaaacgcagttcctgttaaagataatgaaaataaacgtatgcgaaatgcctctgtgtcggccaactctcctaattgtgctaaaaattggactatgtgttcacgtgtgttctttccttgatcacccgaaaattttgcgaattcgggtatcctggttccctgtgggtatggatggtgatcaaatcggctgtcataaggtttccgatatgattgccccccagggaccatgcttactccgagcttatctcggaacgccccggcaatttcttcccttactatatcaatggcagtcggtgcgagaccaccggctctctggtcaaacataggtggggttggttggatattagcatattgtcttttcccccattggtttgaactacgtggtgcattgccacttgccctatatggttcatatgtttgatcgttcctttccggccttctcggtggggccggaaagttttcctgggctctagatctcgaattaatgggttgatgcattgtatagtgagatgggaagtgctgctcggacgagtgaggattcaggtaacaatcctcctcaaaaaggtcatgtgcgg

SEQ ID NO: 128158 - DNA, 286 bp, Zea Mays
gttggggtgaagttgggctcttgcttaggttttaattattgttgatttttagaaaagcccaattcaccccctcttgggcatcgtgatcctttcacatgtcacctacataaatcttagtcgtcggatattctatgtgcggcttcatcgcttagcaacgctcagctatagtttggaactctcccacgtaccacaccagatgacaagtcgtgatgcttcgagagcttcttccccctccactccttaaaccatgtcatcgtgcaggtgctacctatcgcttggagcatct

SEQ ID NO: 128159 - DNA, 623 bp, Zea Mays
ccgacttatcctcgtttagttccaacgtctgagggtgctgcacgggagaatcggatcaatgctgtggatatcgtttaaatccagtgagccatctgggctcgagttgatcttgtgtcgatccattctaccagtgactcctcccctggcccacgaaggggtggccttgcaaaataatgggcccaaagtctttcgcgaggccttctagtggacccgggggatatctgtcccccatagcggcgacgctctagtgtcgcacggcggagggcccatcggcgatagccgtgccggtgcgcagatgccctgatcccgctcctaagggttctacgtgaagcgcataacatagggaatagggaggggtggttctcaccgacaacagtggtccggtcgatgctgtccatggaggatggtgggcccgcgacggcgtagagactccgacgagcaattacagcgtgtaccgaagctcttcgagctgattggccttcaaaaacctcctcggcgacgaaccctgaccaccagcacaggcgagagcagaagcacactcatgaatctacggcggtgggcaacggtgcctcttgcggcgcggttctcgcagtgaaggaggggaacggctggtccgaggacgg

SEQ ID NO: 128160 - DNA, 560 bp, Zea Mays
gcaattcgggggctctggtgagtaattggaggcacgagcaggtgtgttgggtgcacaattacatagcggagccgagggtgtgctcaatttatagtgcccttgagcggtggcccgcgaatttgagatggcgcggtggtggccggagagaaaagggtgcactggcgcaagcaattggtggctttcaccgtggcgagctcaccgacgatgatcgggtgggctaaggtgactcactgcagtgtggttaaagcaccaaggcacgtggcgcaaggtcgcgaggtggctaactccggtgagtctatccgaagcggccgtgactcaggcgggtacggtggccggagtagaatagtggccggagttcatccacggtgcgatatttcttacccttagccattatccatctgcactgggcacgaatcacaacggcgggcgcgaatccggccgcatggtcgccggcggtgagtcatctaaaactggcgttctgattcggacactgtaccattgaaaacctgattcagggcgcctgacagacagatttgtagtgtccagatcttggattttcg

SEQ ID NO: 128161 - DNA, 288 bp, Zea Mays
cagtagaatgggcaaagacaggggatggcccctcatgaactctgcattggtggcatctgaacttgcatctgaggttgaggtgcgggttgttgctgctgcacctgctgcattgctactaaagtatggccaattgcttggactgcttgggtttgcatcatgaacatctgctcaatagtcatcgggggtggcggtggcaactgctgctgagctgcttcctcttggggtgcatgttgctcctgctgagcacgccttccacctctgcgccaattctcagacatctgtagaaag

SEQ ID NO: 128162 - DNA, 335 bp, Zea Mays
gccacgttttctgaaaagtacaggggcgcctaggtaaaaatcccgagtcacagagaacagtatagggtagactgcgggttgaatagttattaacctagggtctctttagaaattatgccgcgcgaaggggtatcttctaatctgagccctccgatcaggaatctagggttcaaaatagatcaagtgtcatgaaccggtattgaacccgagccgcaggatcttgatccaaccgtccagattcaataatgcttgacctaacctaaaccgtaggatccccgatcgaacggtccagcacactttccaccctaccagcgcacgggatctaatctaagccg

SEQ ID NO: 128163 - DNA, 582 bp, Zea Mays
cgctgcgcaaccccgaccgtgtggggagctattcgggagtaagcgggtcgacgacgtagggacgttgtggacgtcgacttcagccgtacctacagactccgcgtgtggccgtggagcgtcgccgtcaatcagggaaggcgcgagcaccatctgcggctggagttctgactgaattctcggacgaattccttgtcggagtgcgttaccgccgtgggatccacatcgccgtaggcaccgcttccgaagtcgcatccgcctccggtaagctgttgatcgtgtccgcccaactcctataatcatgtatcctcgttcggttaggggattagagtaatggtttgcggaatctgctgtcaccggcggggtttcgtcgccgcggcaccatcgttcactctgctggcgggctatcggaggaagaagggtccgaggccatggatttcacgatcaccggccacgattagatgaagtgttgcgcgtgtggtagccgtgggatcgtagatgggcggtaaagatttaatcgcgcgtacccccctaggcgattcaatctggaccgtagagttgatcggacggtttgtggtaagtagg

SEQ ID NO: 128164 - DNA, 551 bp, Zea Mays
ctaaaattcagaattctgaatttcagccttcacctagaacttgagcgcgttaaccttaatccctagctcaaatccttaagcccccattgacaaatttattctaaacccctctgcaacgtgtgtgaagatggcatcgagatgcgtgccctagacacgtcaaacctaggattttctcttggagttcagcagtgagacaaacccaagttcatccctccatatctcttgatccagtcagcgaaacccataagcctcctcacacaaatgacaaaggaatgtcaggggaagagatctctcaacgggatcatggccataatcgcgaagatttggagccaatccgggcttgaacatgacctctctctctacgctgtctcgtgctcgagccatgcccaggcgccagagcgcgctggcgctcacccacgcacaccccgagcgcatgtcagagccacccctcgaccgtgcaggcccacgtctttaagaccacccccggacgtgcctcacctcactctgcactcaccctcgctggccagacgtcacccttagctccagcgagc

SEQ ID NO: 128165 - DNA, 402 bp, Zea Mays
gtgctgatctagttattgtttgagcaattttgatatgaacttttcgcctagttattcctgaacaggtagttttagctgctctaacagaaataaacgcgcgctaccttaatgctggtgaagactatctatgtcctgtactcctgtgttgtgctaatataaactagatgaacatcgtctgcataacagattttaccgtcaacaatgaatttaagggtagcaaccgtagtctactagtctatatgcatatttaattatatgcagatcagttggagtaggtgaagaaaatattctgcaatggtagataagttacattacatatgtagatcatttaacatacagtatatgtccctagtaccatacatgtatacatttttagtcgtgcatttaactatggagattggt

SEQ ID NO: 128166 - DNA, 533 bp, Zea Mays
gtgcaccaacatgcttctctcacctttattccaatagtaagaaattgtgaataatgtgctgtattgctatgaactacaaaaaaatgtcttatcctttgtgtcatgatagtcttgactaggttgtgttatgtgcttctcttgtcttgccatctaggtagtattgtaattgttcaaccctttttgctaataaaaattgttgcctgttttgccaaaaaaaggaccccctccaaacaacctcaagtttagcaagtaaaatcttcaaaaaatttatcacatgcttgtgttagtgtttttcgaacccttgcatgttttacgcttgaagttacacctacacagcttgtagatctctttagcttgaccactagatcgactaaagcctccttgtgcacttgtttctgtcataaaaaaaaacttttggttggtgtatgttgcacaaaacaatatccagcctcaaattctttttggaaaccttgtccagaagcctctttaaattctcctctgctcaacctcgaagccatttgggttgatgatct

SEQ ID NO: 128167 - DNA, 754 bp, Zea Mays
gtcagatcaacgtccttggaaggggcggttgccgacacctaggatttctcctcggctgacccttggcgacgccattggtagagcattgatctcctcgcatcgatcgcagatcagtgctgtcctgccatggcgttcggcacgacaggatgtaaggctttcctgttctgcagtccgtggtgaccttcaaaaaatttcaaatgtgcgcaatgatcgggcttccatctgtcagggtcttgggccgcttggtgataccaggcatcggactctgaaaattgggccacatatgccatacaagcctgcgtcgggtttagtggctctgtttgccaggactggaactggtgtgggtcttgctagggctcctcacattcgttctgctcaacctgtgtctcgttgctttcgcgccgccacatacgcagacattctgcttggctccatggaggggggaggacaacgtgcaggaggtgcttctggccgtgatggagctcagggcggtcgtgggggccgttcaaacagccagggagacctggtaggtcgcgggggttatcgccggccgtacctcgggcaaggtgggcacaggggtcgatctgtacgtggccgtcatgggagctatggcctgggtgctggcgtcgctggtgggcaccgaggcaactttgggtatgcaggttctaatcctggaagtcgagatcagttcagaggaggcttccaggggaacagaggctctcgtactccggttaacctgtcagcggcggctgtg

SEQ ID NO: 128168 - DNA, 548 bp, Zea Mays
ttgcaatgtgaagtagtaggctctctatgtgatgctagatgtctaggtagactttcgtgaattgtggtgctcggaccgtcgagatgaaggttaagtcggtcgatgccgattaagtagttaaaatgattaatagaataatcatggggttaaaactagaaactagtgttctcgcacccgtttgggatgttgtagcccaattgtgcatggttatgatcgcgggtaaaaattagtagtgctcatgtggtgtctaagctaaaatgcgaactagtgggtgaaaagcaccttgatatacatatatgtcggatttgatgattgtggtgaatgcattgatttattgtggatggtagtcctaacgcacgtaataatttgtataaaaatttgtaagtcgacttgtagatcctaatttgattgttttaactcgaacaaatagtaaagcgttagagtaattcaagtctctcgaacgcagcgattcatgaattatatatgagctgaaatttattgattgctgttttggactgcatgcactatttttgttgtgctatttgttt

SEQ ID NO: 128169 - DNA, 544 bp, Zea Mays
cgggaatttaacttcaactcgagcgacaatactatacttccgttgtagcccataaaaatcttcatcgctatagtcgtcgaacaacctgaagctatattaaacatgcgactaaataacgttcataaatgtgatagctattgtgttaactattgtttataatataacttacataggcatcctttttttcttgtccaatgcaactctttcacggttcaatacggctggctccatcaaaaccttttatcatttgaaaatatttaaaactaaattgtaaaatggtccagtgcattgatatagcacgacgtaggagcagtgtgggttggttggttgagcacttattttggactataggtgtgactgtgattaaggcttgtagttcatgagtctgcagctcatggagaggtggatggcatgcatgattgcgtctgaaggatttgtatagccctgttggtgcacaagtacggcgtctaccggactcttttaagttgcaagtttttttcctaggcacccaggactttctttttatgagaattcgacaattttt

SEQ ID NO: 128170 - DNA, 303 bp, Zea Mays
ttgcactaacataaagttatcctaaataaatctcttcttggtaaaggctgtttgattaggagagaccatcatttgcagcttaccggccaacctattggccaaaattttcgtaatgagcttagcaaagctatgcacaaggctaataggttgaaagtcctgaacatgtcgggcatcaacctttttaggcaacaacgagatgaaggcggaattcaaaagctccatattcctgaatttctgagcccacatacaagagatagcagccatgacactctccttaataatcgccatcggccagtaagattt

SEQ ID NO: 128171 - DNA, 397 bp, Zea Mays
caagctttcacttagtgtcatttttcaccctcagaccgatggtcagtcggagcgaatgatccaaaccttggaagatatgttgcatgcttttgttctgtcatagaagggtagccgggaggatcatcttgcattggcaaagtttgcttataacaacatctaccaggctagcatcaagatggcaccatttgaggctttatatggcaggcgttgtatctcccctctatgctgggagactttgggagagagctccctggttggtcctgattgggtttagcagacttctgagaaggttcaggaaattcgtcagaatattttggccgctcagagccgtcagaagagttatgctgatgtgaggaggcgggatttggaatttgcagtgggtgaccaagtccttctc

SEQ ID NO: 128172 - DNA, 367 bp, Zea Mays
tgaacaatggtcatccattaatgtgtagccaacaattctacctagatcattgcccatagcatgaaattcctctcattctctcataagttcatttgatcatcaatcaatttgacccaaggtttgatctatcttcaataattgatccacttcaaagcttcgcatgaccttaatggtttatcgatcgcatcctcgtctgctcttcatcgttgtctcggtccatctacgctaagcgccctctacttgttcttcaccgccttggttatcaatcgcactcgaactcctaacttgtcatttacactttcaacctgggtttaaatagtctaatctcgtatcttgatcttctccacacaggcacatgacattatgg

SEQ ID NO: 128173 - DNA, 322 bp, Zea Mays
ctctataagaacctaacgtagaccgcggtgcacggttctgccttctcacggcgcatacgacccacatgttagtgtctcccttcttccccgtgcgcgccctctctccctctacccctgcatccgcatggtatcgccgcaatcccctcaccgattaatgcctcagccatggaaggaaaaatcatgtcactaccacagaagtaaacacatccccttgccgctatccacgcctcgcagcaatccaacacgtaggaatcccattgccggtgacgcgcaggaccacccattgcctattcattctttccatgcaccgtggatgccccgc

SEQ ID NO: 128174 - DNA, 623 bp, Zea Mays
gtatccggatatgccgatcagactaaattattaatcggatgagttttaacattggctaagcattggctgcgccctggcaacacgacgtagtatttgtgtcgtacgaacttggttgcgtcatgtgattactatgtcgcgctctccattaatcggatcgcttccgttgagtcaggccgccatcgctgagtcgcgtattttttgcatgccctgtaggcactgtctgtctgccgcgagccacgattgtgcctgttgcgcacgttgcgtggatttatcgtgtaccccaattaccgagccataattgtgcctgttgcatttattacgaaggcttgctatattgtcgtagccctgatggccgcacacgtgttgacgctagatacgctagagcttgtactcgcgtgaattgtggtgggttgttcaagcccctaaagtcacattatgcgcaaccttcgtaaacaattttgtttagctctatattttatttgattgtgttgtgtggcattatatatttatatatcgccaagtggccataacaactatatcaagctctatagtgcttgaataatctgggaaattaaattgaaatacaacagaacatggataagttaattctctcctctctcctc

SEQ ID NO: 128175 - DNA, 461 bp, Zea Mays
agccttcgtttcaactagcttaaccgaaggtaccttcggcactgtagccgactcttcagtcctctgcacgggaggaatggtttcctttgtcttggcagctgaggaggtcttcgccaaattcaggtatcgcagccggttcgatgtaatgtggccgatgagttaggaccttcaatttttttcctttcggcacaggctcgtctggggtggccgaagtagcagctttcctctttttcccttgtcctcgcagcggatagcggtagtcggggtaaacgaagccaatggcatcaaaaactctattcaatctcttctttccccgacctccgaaggctatggatagtgcattatcttctgccttggaatatgttccaagcagttcatcacttgtagcttcgatacattttagccagtcgtcgttcggttcatcgaactgatccccaaacctgaatatatattttagccgg

SEQ ID NO: 128176 - DNA, 455 bp, Zea Mays
ggaatttccatcagatcaagctggctaattgactcattaaatttcaacatcaggctaaggccccccagcgatattcctgttttcgggcctacgagtaagattaaattccccaacaatcagccaaagtttttccgagggcatatttatattggagaaccaatttaggaattcaattttcccatgcggagaacagggcgcgtaaatattcgtgacaatccaggattcattcgacgaattagcagaaaattcaaccgaaagagcataatcattctggtaaataacactgcccaccaacttcgagctattccaaacaataatgaaaccacccgaatttcccaccaaggggacaaaagcgagtgagtcaaaggagttgggacaaaactttctgagatcagccctgtcgaaaaattccttcttggtttcctgcaagcagataatatcacatctggattccc

SEQ ID NO: 128177 - DNA, 345 bp, Zea Mays
tccacaaacgagagaataaaggtgaaaggacccctcggattcacaacggtaaagcctgcggcaccctgctccttacagcccactcaccactctcgctccaactccgagtttgagtgcagcagaaggcagagcaggaaaggaatttcggaagggacgggtacagcccgcagcgccaccacaagggagcacctggaccaggagcctccaagcgcaagcaaccaagcgcagcgcagagcacaacccgacgcccagcacaaccagcagccagggcagcataaagcaatgcagccgggaggcgcggcttccagtaccgccaccggtggacggaggcgcgtgtcggtgcag

SEQ ID NO: 128178 - DNA, 577 bp, Zea Mays
aattgatctacctgccaatccatataaccgaagggtgcttagacaacaacaacaagcagagatgaatcccccaaatcctccaccagtcggtgctgatctagttatttcagcccagatgcaaataatgcagcaaatggtggacactatggcagacatgcatgcacagatgcgaaaggagtgtcaagagatgggccaagaaagagaggatatacgtcgggagatgcgccaagagcgggaggagatacgtcaagagagaagggcgcaacagcaacaagcaccactgcctccacctccaccaccagctccacccagagataagcaccgggaattcatgagccacaaaccaccaaccttctccaaccccgcggattcgctgcaagcagatgactggctaaagtctatagagaagatgctcaacatagctcagtgctcggacggagagaaagtgctctacgcatcaggtcgtcttactggtcccgctgcagattggtgggatgcgtactgcgctgctcatgctgctgtcgacccaattacctgggcagaattctccactcaattcaggaattaccatattctt

SEQ ID NO: 128179 - DNA, 417 bp, Zea Mays
ggggggtgtggggaccttccattgccatcgaaccgcgccgcgagaaaacactaccaccggtgctcggagcccatcaacctgccacgggtgtttgccttgtcgcaccgtgcgtggtaggcgtgctttcgagcggatttggcaactgaagctcggtggatttcttgccggacttcgtgggttcgcggcagaccgcgcgtggtattcgttgtctccgtcgcatcgctgtcacggtagccctatgtgttgccgttgaccggcttcgggcagggaagaaacaccccagaccaccagatcgcgggtgtgtggctatgattagatcctggcataccccttcgtgcaaacgatcctaaccattgatcgactgatgagtggctcagaatagatcatggcgtaagaggaatagatgtcgtatatttt

SEQ ID NO: 128180 - DNA, 452 bp, Zea Mays
gcatgctgtagtggcctcgatatagatagcttgcttgaagagatggctatatactagaaacacatatttagttgagttccgccagggattgcaacttaagatgtcatgataacacatgaggatatttggttcaccaatgtgtagcacagtagcactgcaacaaacaacatatgttccaaagtttactatctatcgatgttcattttgtagcactagatataatccgttcataaggaaaatggattgctccgatcgctttcagttgttagactgtctctaacaagactctgtaaaaggtcctctccgctaaatgtagcaaacaaagttgtccggtacgcctccaacaagaacctatacaacgcccgttaaattgtagggtgcattcatcatccgccaaatgtagcggacacatgaaagctctctatccactgttcgctcccacatcgtctccg

SEQ ID NO: 128181 - DNA, 929 bp, Zea Mays
gcacttcctcagcagcaggagccgaaggaccagcatcccgatccaagctagacactcggcgaagacgtctcttcttctttttctgcccatcagcaggagaagcaggctgattggcttggcaagggcgtttcgggcgaacactgacaggcctctgaatatccaaggctttactagcttctgggagaggcgccaccgccaatgttctagcaggagcgaaatcagaagaatcctaggctaacatatcaatcatagcacttatctctgcatcactgggatccaaaggcacctcaaagtgaacctgccgttcatcatcaggaatttcttcaagcaaagcaaccaaagcactaacttcttcggcagagggttgcactctaaggcccaaaccgccatcaccagcaggaggatttgacacgaaatgggtaaaggccttggaaggaggcaagttccaggccgagtaggcaacaggggcaccaacatttgataccttgcctctaagtatcattttgagccggctcaccaagtccacaacaggaattcttctattggtgacccgaatggagtcagctaggcctcggtacagataggccgggtatgccctgtccttcaatggctaaatattcttgaagacaaagtcagcaaccacagcctctgcagtcagacccctctccttcaacactccaacttcagctagcagaactcctgcctcagccacatcctggtctgtgggggattcggtccagctaggagcgcgaacatccggctatctccctgaccgtgcagggagagaatttccatgattctcaacgataaaccactccaagcgccatcctttaatgttgtccttgagggggatgtcgagataaccagtcttcctttcgcggcgcatctccaagctcgcgcccccaccagctgatgctgtcctccggcca

SEQ ID NO: 128182 - DNA, 544 bp, Zea Mays
ctgctctccggcgtctcctcaataacgttgtctttgattataagcccacaaataatcatagttgtgcatcctgtcgcattggcaaacatgttcgtcttccgttttctgaatcaaacacagtctctccctttcctttctgtcttgtgcattgtgatgtgtggacgtcgcctgtgctgagtaattcaggttatcagtactacctcgtgcttctggatgactactctcactatacgtggacatttcccctgcgccgaaagtctgatgtgcttcacacactcgtgtcgtttcatgctttcgcccaggttcagttcggacgctcggtccttgcgttccagactgataatggcaaggagttcgacaaccatgccattcgatccttcctcgcagcacacggcttcgttctgcgtctcacctgcccctacacttcccagcaaaatggtcgtgccgagcacatcctccgaacgctcaacgactgcgtccgcaccatgcttcttcacgctcacatgcctctgcgcttctggccggatgcactgcagaccaccac

SEQ ID NO: 128183 - DNA, 418 bp, Zea Mays
taaatccacaacaggaattcttctgttggttacccgagttgagtcagccaagccccagtacagataagccggatatgctatgtctttcagtggctgaatgttcttgaaaacaaagtcagcgaccacaacttctgcagtcagacccctttctttcagcaatccaacttctgctaacaaaacccctgcttcagccacttcctggtccgtgggggactcggtccagctcggagtgcgaacatccggctgtctccctgactgtggggggagggaattcccatgattctccacgatgaaccattccaggcgccatcccttgatgttgtccttgagggggatgtcgaggtaatcagtcttccttccgcggcgcatctccaagctcgcgccccccaccagctggtgctgccccccagccatccca

SEQ ID NO: 128184 - DNA, 1255 bp, Zea Mays
gggacgtggatcgcctgacttagcgtttttactgcaccggcttgcagtacagctacatccaccgttccttgcatccaacgctcctgcttgcctaaccaaattttatggacttcaatgggctgaaataatggaaaacaggaacacagcccagaatatgtcaatgcacgcagaattagttttggagggaaaccggacactgctactctgttttgccgccataactaataaataagctatttgtctcttgcctttctctttctcggacgttccttcttctcatatctggccaaagaaaacaaagcatcaaattagaagacacaaccacgaaaagagtcaatgagttgaaggttgttctatccgagccatcaagttctgcccacaagatggacaaggcaaatggagagcagaatggttccaaaacgtaagtgatgatacctccagaatttttttcacgtcaatctgagtccacatagttaaaagtaaactagctacaaatttcaaaggttaaagtagtagtgttgtcgccaaacatttctttccacttattaaatgtctctccatatcatttcagagaaaatggcgtgcttaatttggaaccgtgtgttgggatgaaatttagagatgaggttcaggcttggaaattatgggtagagtatggaggctatatgggattctcagtcagaaaaaggtacaacaataaaaggaaggttgatggcaaaattacatcatgtcgttatgtttgttccaatgaaggtcatcgagcacgagacaaaagagatcatctagtaaaatgtcctagagctgaaactagaactgattgtgaagtccgcatgtgtcttaaaatggagggagagggttatgtagtatatgagctatttctggagcataaccatcaccttcacttggcagagacctcacatttaatggtatcgcaaaggaaaatctcagaagtacaagcttttgaaattgagaccgccgatgattctggaattgggccaagagccgcacacgagttagctagtcgtcaagttggtggatcatttaatctgagctatacacgtcttgatcataaaaactatttgcggaccaaacgtgagcgtgagatggcatatggagaagctgggagtatgttaaagtattttcaagataaaattaccgagaaccattcatttcaatacactttgctaatggattgtgaagaaaaaattacaaatgtgttttgggctgatgctaaaatgttggttgattatgcaca

SEQ ID NO: 128185 - DNA, 318 bp, Zea Mays
gagccgatagtgtatgcttgaatgtaagtgtggaaataagggggatagagtttcccgctaacctcatagtgatgggtactcagggaatagatgttcctagggataaattggctacataagtaccaagcagttatccgatgtgataagaggacaatgaagttggtgtgcccactaggagaagaagtggtgactgagctagtctcaaccgagctaaggaaaggaggttgtcaccagatggctattgatagcaaagaggctaatccactcgaggctatcaaggttatgtcagaatttcctgacgtgttccctaaagatcta

SEQ ID NO: 128186 - DNA, 418 bp, Zea Mays
ctggccacgacacaacagtagacaccttggacggatcagtagataccccagcttggctgataacatgtcccaaataagcaatttcctgttgaccaaaggtgcatttggacaacttgacctgccaagaatccttgagcaacaactgtaacacctgctcaatatgttggagatgaacctcccacgtagggctataaaccaagatatcatcaaaaaataccaaggcacatttgcgaagcaaaggctgcaaggtcttattcatggccccttgaaacgtcgcaggtgcccccgtaagcccaaacgacattactcgaaactcataatgtccatgatgagtttggaaggctgtcttatgctggtcttgaggagccattcgaatttggtgaaacccagctcgtaaatccagagttgaaaaccaagc

SEQ ID NO: 128187 - DNA, 786 bp, Zea Mays
cctcagcccctttgtcaagtctctcataatctggatattcaaagttcagtgcatccattactcgatttagccttcgtttcggtcgggtgctgaaggcagcagtcattagttgatcctctttcttcgtgtaattgcctagaatcttgttgcacatagtttcgatcatctctagccattcagtgtgtggtttcttgaatttcttctcaaatttaaaacgataggggagccgaacaagctcatatttcttttccccttctttcttcttcggcatcccccagccgctagaggttggagaagtcttgtttgccaagtactcttgtactaaatccctggtgctgatttcggcagccaccactctgaattcaacctcggccagctagcacgaggagccaagttgcatatggcacaacgaccttgtcattccgaagcttaatcacataagactcataaccatggtcatcattttctcccttttcttctcgtcagccatcacgtagaaccactcatttgtccaccccggttgaccacttggtgcggtagccgattatcggggctctagcgtccgttcggtatgcgaagttataagatccaaagtttttgtgaaggccattcgccctagccttcgtctaatagtgcaactcgtgcactcggcagaaaccttcggtattggcactcatgccttggcttcagagagcccatatgtaaacaattagcctaacaatggcatttggcgttagctgattaatgtatatttcaaacttcttcaaaacctctcctattatatcg

SEQ ID NO: 128188 - DNA, 355 bp, Zea Mays
gcgagggaggtagtagatggggcgcgcggtgggatttcacggcggcagtgagcgtgcgacagcagagtgcaggcggcggcggtcacacaatttctctgcgctggcgaattgggaccgaggtttgggaacaggagcgcagagtccgcgctatatacccatggcccggacccgaacggtcttcccgatccccgcggagggcggccgcgcgcttccgttgcacgatctggtcgtagtgtggtccgagcttcacgggggagatggacctgacgcctgggccccgcaatgcagaggtggtaaacacgcgcgagaggaatggatggctgacacaagggactgccaaatcggcccacatcac

SEQ ID NO: 128189 - DNA, 455 bp, Zea Mays
ctatactttgggcctcagttggaacgtcaaccaaatccgatgatgaaagattaaagttcggcttgttgacagctctcgcgtgattgcacccggccttcatgaatgctacagctgtgccgtgtgaagccactagagcacataaatctccatgcccagttataacttcatcaagggcctcaacttcattctcgatatgatcgaaggccctggggatatcttcggaagaaggggtgatttctttagaagtggctccgactgagttaaatatccccttcaatcgattaatacatcgagtgtcaaagctggagcatgtatcccaaaggttcttaacagtttcgcttagcttcgcattcttttcagcttcggcttcgacctttgttttcagttccttcatttcatggttgaagcgctctgatctctcgttcaaggttgctcgagctttgtctagctctcgg

SEQ ID NO: 128190 - DNA, 312 bp, Zea Mays
tgcaaatattgtcatgaagcgaagagcggtggcggtgctactcgtttgaaggagcgaggcaagcatatctagaattgttccttcctcttgaaataaagacattctttgttggtgagttagacaagacaaagcaaaagaagagggaaaggttcaacagaggcaacaaatagatgaagcaacaagaacaaattatggtgaagaacaagatgattatggtgttgaacttcaggctattctacatcaatctcgagaggagcacgaattcagataaagagctggtgcacgatatgataggggtggtggaactgggtc

SEQ ID NO: 128191 - DNA, 526 bp, Zea Mays
attcaatagctcgcgggtcattttccatggcaaatttttgcttgcgtgtggaatttagaaggatgatggttgttgagactgtaatttggtctaactgcttggtatctttccggtgtcccctatcatgtgttcgttagtagtaaaactctgttgggtgatggaatatgacatgaagaataaactattagtataacacgcaattgttgtgaaggtaaaggggtgagttggaaccttggggtttgaaaaggaggtgacttgggcgatcgatgttttcttttattcatgaggcatcacatgttttggtcgtctccattgttggtatgccctactgatagggaatttgaccctcagctgtttcttatctgttgtcatactcaataggaaaattagatgctaaatgacaagcacacatcagcaggtaattttgatgagatatctggatgtttgcagaaaatgaatagcgcacatcagcaggtaattttgatggcaccctatttatacgttgcctaactctgcagtagccagt

SEQ ID NO: 128192 - DNA, 278 bp, Zea Mays
atatggcagaaaatgcatgactcctctatattgggatgagactggagaaagatagttctttgggcctgaacttattcaagaggtagaagagcaagtgcgaatgataagggagaatttgagaattgcacaatcaagacagaagagctatgctgatacccggagaagactactggagtttaaggagggtgatcacgtgtatctaaaggtgtcaccaatccaggaaggaaagttgtcccatcgcttcattggacctttcttgatcttaaagcgagtgggag

SEQ ID NO: 128193 - DNA, 783 bp, Zea Mays
gctaaatttacataactattggagatgctctaatccagttgtcgtgcaccttgttctttccctgctccacctctccaatcctctagcgaccattgcaaggagggatacacagggaggttgggaatagtcgaccgtcaccaccgacgtcgtgtccgtacgccgccgccacgtctggcggaggagcttcgcttagtcttggcgggtgtgcgcgcaccgaattggtgaagggcgggtgtaatccacgcgacaatttctcactagacggggacgaccaccgcggggttcctcgtgccgcggctagcttgggtcgttgctccaaaccagtggtaagcacgtatattctcttcaaaaccttcccatcttcgcgtaggaccgtccagggagggaatggaatctgaccggtagacgcaatttctcattggaggaattcccgccgccgtgtggatacaccctgtcacgacccggcgacgaacaccggctcggacgagaaggaagaggagaatagaaggaatcagaagataagagttcgaggaagagcaggtatgtattctattattccataattccttctggaatacacaggctggctttatatatcagctgccgaccaacacagtacaggcccaaaagaattcaacaacctggcccactggcccagacttcactgcacaccacaacaacaattatcgctccgtctctacagggcctccggtgatacctgtcaacctccggcgatctgggttgtgacaataccaccctctgaagtaccatctggcccctaga

SEQ ID NO: 128194 - DNA, 405 bp, Zea Mays
ccctatctctgtactacactatcaccatttccatttcattgaccccggcggcacgcggcaccggcaccgctcgtggttttccaaagctggcgcccccgccggcccactcccacccccacggccccactccgctctatttatccttggccatcagatcagatcatcacagcaacacagcccacttgtgagctgtctcctagcgaatccttgcgggggaaaggaatgggcgtcagcgctcgagctcaccatccgaagcaccggtgccaccaggagacgtgcgtgcccgacggcgcgtcgctcgcggcgatgtacctctacggcgacgtgctcgagtccgtggtggagcgggtgccggtggccgacctcgccgccgcggcgcgggtctcgcgggagtggctccgcgcg

SEQ ID NO: 128195 - DNA, 459 bp, Zea Mays
aaccaaacccaactcattgaggtcctcactagaagtctggagaatcaacgcccgaatggtggaagaccacaagacaggatgggagattttctgaggctcaagcctcacacattcgctggatctagcaatcccctcgatgctgatgactggctgcgcacgattaaaaggaagttagaagccatcggatgtccggagaatcagcatgttcaattggctgctcatcaactttccgggatggccctagcttggtgggataccttcaacgccgccatcagagatgctacctggacaaagtttgaaactgctttccgagagcaccatgtgccccaagggatcgttcagctcaaggaagatgaattccgggaactaactcaaggtggaagatctgtcagtgagtacgcgcacaaattcacagaattggcccgctacgctcctgatgacatcaacacagaagtcaag

SEQ ID NO: 128196 - DNA, 286 bp, Zea Mays
ccggcgacaccctcgggagctgggtaactgccagcaccaccctcgggggttgggttttctgcaacagccacctctaaggctgaaggatcctcagtcacctccatgggagtcgggcgatcctgaccaacttcttgacatcgaagactgccttccaaagtcgacgatgcgcgagacactgctcgggatacctctaatcccacgtcttgaatttcagagcaaatatccatcatatcgccaacagtcggctccgacagcaaatcttcaggaacgacatcctcaagggccc

SEQ ID NO: 128197 - DNA, 393 bp, Zea Mays
ttcctagctaaggctgtgtgcaggtccgggtcccagtcgagattacctcctgggggccatgtcaccaattccttcttaagaatactggcatccagcctcgacacgtcgagcccacatcccagggggccaagtaccagggaagaagctggtaatgactcacacagcaaaggaaaagtagcatgcagataagttgtaatattgcttgataagtagtacttaaaagtatcttacaaaatcaaaatatattacaagccgcttcccagcgggacccttgctttctccctgcagacctagctactcatcatcagcgggatcccgctggaagcgctcggccaccgcatccacaacatcttgtacgccctcccgggcggtgtctttggtgtcggccaccgg

SEQ ID NO: 128198 - DNA, 716 bp, Zea Mays
ttaaaatttcttcttttacataacgaaaacactttaatatatgggttaattagttgtgtgccattataatttttctggttttgaaatatgccattgaactttttaggctggtaaccttgccattaaacttctttctagatttgaaatatgctattttatactgttttaatcacctccacctgtagatatgcatatttttgtattgttcatcctacctctcaattgtgttttgccgtctgttcgcttcccaccaccagccataagtggccgtctgtttgaaatatgcattttgatctgatcaacatcaaccgattattcttcaatctcacatgattgaataattacagtcagattatcagcaagcacatagaagctgctacaggaaaaaaattgcttggatgctaaaagaaaaaaaaatattcactgcatcccaaaatatagttctttctagcccactcactcacaactgcaaagtgcaaactactgaaagcagaactcacttaaacatagttagatcaacctccataaaacacataacaccatttccctgctccacatgttatcagtctgaatagaattagagttggctcttaaccatgtttctcatttgttctagaaacaaatatatgtttttaaataaaaatgatttgagatactacgacattttttgcacttgcacgtactggacctgattcaacaaaaacggtataaaatgg

SEQ ID NO: 128199 - DNA, 327 bp, Zea Mays
ttcgtacgaattgggggttcgtcaagcatcacagagcgtcaagagtgctcgaacaagtgagagtgagggatgaactgaccggtaaagggctggccgcggcgaacggatcttcatggtggcggagaaaggatttgggggaaacaaggaattcgggcacactggtgatcgattgctagcaattcttggtggctgggtagctgatgaccttgcggagctaggcactggctcaatttatagggaaaacgggcggtggcactcaattcggccgagccgtgctggcggccggagatgaagaagcttggtgcagtgatttcgtgtccaccgtcg

SEQ ID NO: 128200 - DNA, 500 bp, Zea Mays
attttcctgttccacatcttacttatggtggtcttcgtgggcattttttcgtcggctcatcaagaggtgggcaaaatgtcacgagtacaaggcggggaaagaagactgctcaagaggaagcgcagcgagctgaagagagcgagtgcgtgggtgacgcaggctcttcaaatgaaggtccagtgattggcgtgataggctggctgcacgagatggcctatattatcttggcccagtttgcgtcgcctcatggtgtggtgtatgggtgtaattagatcggatacggacgtatatcattaaaaccatatttgtttttatatttttgttcggtttcaaatttgaatatgcaaaaaatacggatagctttgatacgaatacaaatacagatgttttcggatacaaatagggatagtcgtgtatcgaatatagaacttgtcggatatggatagcatcgataacaatatttttgtcggcaccgtgtaagacatcatttcacacatatg

SEQ ID NO: 128201 - DNA, 433 bp, Zea Mays
aatttttgtagtatacaagtaaaaaagtctacctgtgtagtactccctgtggtcgacacacaaatggagctggtctatcggtgtgagtgagtaggtaagcacaggaaatgctggaggaacctcaacaacctcctccaattttgtccagtttgtaaaggtaatcatgttctcattgaaaacaggcttgtacaaattgttcgaggctctaacccagaagtatgtgatgttgtagacgactccttttatcagaggcttgaacttttgtatgactggtgggaatattgcagcatggataccggttccctgcacaaagcagcgatggaggaaacaacaacataataacaattaatctcataccaatgccagcttccctttaccaaatagataatcgtgcagatgttgtacctcttcgtcaagcagcaccatatcacaa

SEQ ID NO: 128202 - DNA, 666 bp, Zea Mays
gctaggggtaaaactttctgagatgctctacattccatgaattccctatttccgtgccatccatttgagtaagtcgatatgatcctggccaagtgacttcttctaccatgaatggcccttcccatagtggcgataatttgtgtcgtccttcccccgttagaattcagcgaaggaccaagtctcccactgcgaaggatcgatgtcgtatggccttatcatgatagcgcctcagggtttgctggtacgtagctgactgaattactgtatttaatcgttcttcctctagtatatcaatatcctccagtctagtagcttctgcctcagctatgttttcaaagatcagccttggtgcccaaacctgagatcagcaggtagtactgcctccgaaccatagaccatgaagaagggagtatttccatgcaaagctcggctaggttgagttcttaagctccaaaccacatatgacaactctctgatccacttccctgtgaacttttcattcttgtcgaatactttcttcctgagtgcttccaatatcattccattagccctttctacctgaccgttggctcttggttgtgctactgatgcatatttgatatggatgcttctttgttcgcagaaatcaaagaattccgagctagtgaaattggatcccaggtcagt

SEQ ID NO: 128203 - DNA, 818 bp, Zea Mays
cgttcgatcctgccttcaaacaaggtacgtattcgggagaattctcgtcccggccgaggtcccctctccctagaactgtcgtctccgccttgcctgagctcatctcgggcaaggaatacaacactgaggcaacctataagcatttaatgcgcatacctaccccgtgcagcttcgcaggtgaacaggagcgacaagaccacggtcccatcgtactccactaactataatgatccatgcggtcactgttctctcacgttgtctgccaactcctgatgggacatacatacgacaaaagtgcgagctgaccctcgggcgcaagctccgtctcgtccgtagccggcctcaacctcgagacaaactctgcctcgcccgagcccggcctcggctacctggtccccgcgaatcccacaggaggccactccttcaactgtgtggcgcgtgtctacaaatcctagagcaggctcggtcatgtcctctggcagacttccgcctcgcccaagcccggcttcatcattgatattatcaatgaaaagcacccgacgtcatcagaaacagtagagctgacgtattacccaagggcttttcgccatattcagcattgtaccaactactacgacatggacaacctcactgtgagataggctcgggtacatgaccgagccctcggccctgatcttggctctctacatgaaccagacgtctccactggacataagtcaacaataagtacaagccccataccacatgctataccatctacaggggctcggcttcgcctcctcaccgtacgcggctaaccccgacactcctagcagccc

SEQ ID NO: 128204 - DNA, 659 bp, Zea Mays
ctcgattatatatatgtgtgttcctttcgtcgaactcgttctatgatttgtgtcattttcgcgaggtcgtcaaaccgcatttcctcctcgtgaacgtttgctgctcgcacacctgtcacccctttatttcttctaccatcgcctacctttgcctaactcggtcttcgtcgtttactgtatcatgcaactcatcgcgcgatcgtcactttggctcggccaggacgcaacctgcgacaaattttacaaccgccttccacattctctcttttctataaataccgctctagtcgtcgcaaaacctcctatctttccccagatccagatcgtttccccagatcgcaggcgtaaagggcagcgcttaccaggtacgcagacatccctcctcttgtttccaatcgccaaaccgcctccgatttcccgagacccagatcacacgagcatgccccttcggttaccagcgacgcaggtaagccttctcttctcccttttccttctggcggcgtgtagcagccctctcccccaacgaagccctcccacggacgcctgtctcgaagcccattgccgggggatccgtctagccatggcggcccctggtgccgagctctggcgcccagagcccccgctcgtccctcgtccgagcccctgcgaagctgcgcacg

SEQ ID NO: 128205 - DNA, 705 bp, Zea Mays
ggaccacttcgtctgcacgactgggccggtgatggcgacgtggttgatgctgcggtagtggtcccgcttttgccgctttgtgtcgaagtcagtgctggaccccctagtgatcatatgaatgactccgcgatacggctggtcggcgaagtcttcttgttttggggcgtgggggtgggggatgttctgatgttgctggtgtggaggtgggggtggaggaggtacgatttgtacttcctggtgttgttggtatgcgtggtgcggtggatgcggggcgggggcgtggatgtatggtggagggggttgctgataagtgtgcgcgacaactctggggttgtcggctggctgcgcccgtgccatcctgtctttggtggccttcgtttctgggcagtctttggtttggtgggcgcagtctttgccatgaaaaagacagtagaatcggcgtggcggctgtgcacgcccccgacccctaccgcgggttccgtttccgtggccctggaggggatactcctggcggcgaggggcgtcagcagcggggtgctggctggcgatgttgtgcacttgctgctggttgcggccgtctcgaccggagtctggttgcggagtcctcgtccacgtgcggctggactgtggagtgtctttgggtttccgctgagactcaacattgcgctggtggagctcttcagacttggcatatttttcaaagag

SEQ ID NO: 128206 - DNA, 593 bp, Zea Mays
aagagcatgaacggacctgtagcacgccggccacggcgagcttacttcgcgcggtgttttggactgatttgggggaaatcccaaattggggttctctggtgaacgatttgggacacgagtgggtgcgctgagtgcttgaataccttgcagggctaagggtacgctcaatttataggattcatgagcggtggcccgtgaatttgagatgtcgtggtggcggtcggagagaaggggggacactggtgcaagcaattggtggctttcatcgtggcgagctcaccggcgatcaccggatatgtgttacccgagctatttgcgacgtggtaagacaccaaggcacgtggcgcacgatcattgagcggctagcacctacgaggatgatcccgaccagctacggttcaagtgggtacggcgggcgcaaaggtgagcgagtccgagctaatccgagcgccaagatttttacccttcaccgttgtccatctgcgctgggcacgaatcaccgcggcgggcgcgaatccgggcgcacgatcgctggcggtgaggcatctgaacctagcgttctgatccggacactgtaccatcacactacctat

SEQ ID NO: 128207 - DNA, 488 bp, Zea Mays
ggagaggaagggttggactgaccggaaagggggctggcctcggcgaggttagttcgcggtgttcttgaaccgaattggggagaatgtgcaattcgggctcactagtgttcggctgggagcaattcttggtgtgggggtgtgcaatgatgttgcgaagcttgctgcggggtcaatttatagcgcacaacggcggtgaccgtgaattttgggcgctgacgcgcggcggtcggaagtgaagaagaacacaggtgcagtgaatacgtgttccacgacgtggcagtaactccggtgatcaacgggaagctagagggagtcacggcgatgcggtggcgaggttgggacacgcggcgcaaggccggacgacggctatcaccggcgttcttatcggcttctaccgtggtgacaccgtacggtggccggagttctttaatggttggagcttatccacggcggcgtacaccggtgttacccacttaccccgagaacaa

SEQ ID NO: 128208 - DNA, 329 bp, Zea Mays
cctgattacagcaattaatcaattcatcgaataacaacctcaaattacccacaatccttcttctgaaagtaagagactcaaaattcgatgtgaaaacctcattaacagaaacatctttgtcataggtcaagtcaaaaagaataggaaactggtaagacagaggttgattacccatccaattgcttttccaaaaactcatcttcaaaccattgccaacttctgttttacaatatttgtaaaagttgtctcgtaaactcaggatttttttccagaaatgagagtcattttgtttttgcttaactaaaataatgggttttcccttaatgtac

SEQ ID NO: 128209 - DNA, 427 bp, Zea Mays
cgcccttacgggcgccctaccaagactcactctgcgactccgccctcccatcgcatggcgtcgcggcggtcgacgtggcgatactgtagattgcaatgtttaaaaagtgaagtttgaaatgagatatgatggataaaacgctgaagaccaccttagaataaatatcaaatgtcattgacacatttgatcatgacaacatgaaatagttaagtactgaatctaccctgtgctacagtgaaataaaagtgtgcagtgacaaagtgtgttttatatctaagaatgtcgctgtcttagaaacagaggcaaaaatctttattaaggacactcaacaacaaagccaacttggtgattcgtataaactgacactcatctagttttctctaaaaaaggcagcatttcctagacagcagcatttccttgatcctct

SEQ ID NO: 128210 - DNA, 1163 bp, Zea Mays
tactactctcacctaaaggtacatcatgactgctgctactaggtcctacttcatcaaagtctctatcgtgtagagcactctctctaatgaagttatgcaatgtcatacaagcaataattatcttggattgtttggtaagcgaaaaagaagggagactaaatagaactctccacttcattttaagcaccccaaacgatcgctctataacattgcgtagcgaagagtgtgcatagttgaatacttctttgctaccaataggttgcctcgcattttgccattcagaaatgtggtacttctgacccttataaggtgcaaggtagctctttctatttggataacctgaatcgacaagatagtatttacctgcagaaacatgaaatacataagttcaatacgtaagccagtaattaatagcatatgtcataaaaacaagatatataattgtataccttctggtggctgggggaacctgtccgcataagttatcaaagtatcttgtactactctagtgtcatgtacggatctaggccatcctgtgacaacaaatgtgaacctcatatcgaagtcacaaacggccattacattctgcgatgtgtaaccgtgccgtccaatatatttggcttgctctgaggccgggactgccgctggaaagtgactaccatcaattgctcttatgcagtccttgaagtgtggccaaaatctcgcctctcgcaaacgcggatgaatctcggtgaaatatgggtctttgggcttaatgatgtcagatgacatcttaaacagtgcatcaaggacttcactatacttgcgactaattgtttccaaggagtgaccaaacttattttgtatttgcctaaaggactgtggacccccacatgcccacaagaaaatgccaagtgcttccatagtactgacaccccggcttggaatcagaccataattgtccaccaatgtgtcatgcaatcgtctaaacacagttcgtcgcatgtgaaacatatcgaagcagtcgttactattctccaacgttctctccacccattgaataccagtttcaaccaatgttcttctaggaacctgactgatattcctgccccaaacatctacagcacatatagcaaccaccaattctgcatctctgtcatccatttcattatcaaatgtgtgtg

SEQ ID NO: 128211 - DNA, 400 bp, Zea Mays
gatggcggtggcttttccacggattgagctcggacgagggaggagaggaatggccgaggccggtgcggggaaggaggggctcgaggcggcccttttataggcgcgcgagggaaaggggagcggtggagcttcacggcgccggtgagcttgcacagcgccgcccataaatgtcgcacagcgccgccgatgagacaccacagcggggcggtaccggcgaggacgctagtcaagggggggaggacggagcggtgccaaacttccctgtgcggcgagaagacgggggagggaacggaggcgatggccggaggtgaccgcgatgaagggacggcggggaagacgacgagcggctgacaagcggggccacactgccagtgggagtgatcgcgagcgaggcgaggaa

SEQ ID NO: 128212 - DNA, 479 bp, Zea Mays
gcgttcaaggaacactatattccagagggggttttacagatgaaacttgaggagtttatacgtttaaagcaaggaggagactcggtgatgcaatatctcgccaaattcaatcatctctcccagtatgctatagagcaagtggacatgaatctaaagaaaagaattgcttcatgagaggtctcaatgatcgactacagcgaaagatggctacttgcctggacctcacttatagtagagctgtgagcacaacgcttttggtggaagccaagaatgtgggacaatgaaaaacaaagagatatgagagtgaaggatcttttcaaggatccgagaagcgatcgaggttggcgattcgtcctgttatcccaaatcgctcttttcctcgtccacccgcctatcctttcaagcaaccagtttttatccgtcccactcctgcccccacccaaaataatcagtcgagtgcccctagtacttgtttcccc

SEQ ID NO: 128213 - DNA, 420 bp, Zea Mays
atcagacccgaacggtccagattaggtacgtgcacttaagtgatcagtctgcaacgcgagcccttggatcgggatcctacggcttagattagttcctaacgcgcagcgcacttctacccttggatccaaatcgagcggtccacacgtgcgatcgatctgggccgtgagttcgaaaatcagcggctgctgatcgtcttcttcctctagctgaccgagcgacggaaacaggcacgcccacggcggcacgcacgccggagcaaggtgatcgacccgcctgaccacccacaaccccgactaccaggttctatacacggcaggaggtaatagtggaccagaggggaggccttttaccttgattcgtcgtggtgacgacccgtaccgcagcgcagggtagcacggacaccgacaggaactccggtg

SEQ ID NO: 128214 - DNA, 1082 bp, Zea Mays
attaaacttggggtgtatggccagtaaattcattcccctctgcacagattcaatgggcttgtccatttgcctggcccagtcttgcatgtgctcttgggctcttggcagcttaatatcagatctgatattaaacctgtactgacgcctgattgataagatatgaattcactgattttagttacactgactgaacaaggaaggttgtagccccacccccaccccccttaatatgttctagttctgtgttcttagttgttgtttgtgagcataatgactgtaatatacatctacagctgtaagtgctaatgttaaaatatttatttgtttgtgtcttaatgctagctgtattgctttggatctgcaaaaggagacatagaaacaagtgaagtcagagtcatagaagtcaactaaaacgttcagtcaatggaggaacagtgtaactatggcctgaaagggttctgattttgagccatggcgatgtctatcgagatgcaatgctgcttgcttatccatctacgcttgcagtcaagtttgatcactttcatggtttgggtaagcgctgtggttacttcgtattgaaacttagtgcttggttacagcaagctccatggttataaagtatttacatcgacttatctgccctgtaacttgtaaaagcaagtgtgtctctatcgtgcttgctggtacaaaccttactgactcttgattataatagaagttcgttatggcgtgtaaacaggtcataacggtggaagcactgagttctggtcactagcattgtggagcaactttgcaagtggatggagccatgcatgctaaaagggcatcctctgtcacagttcgcctagcaaatgatttcctttcagttgtgttgacatcaaatcacaggggatgcacgcactcccatccaggttagtgccttgagcttatttggcgttgaaaacttgcatgcttccttatcgtggagagccatgctgctaaaataaatcgaggttgcttttgctgtgcggttggtaagttggtttgtgggtgctcttctagagcccctacctgttggcttggccatatatgtgttacggggg

SEQ ID NO: 128215 - DNA, 528 bp, Zea Mays
gtaggatcctgatggtactttggaagtttaccaaaaccaaccattctctggacaatatatatacatgtccacatgaggattagatgtagatactgtatattaatacattaatgattggaaacaaacttacccagaaacgcatgtccatataatgctttctattattcatgatttctcctttcggcccacgtgactctttattggcaagcaaccgaacagccatgtcaaaacatcttagagtcatatggagtggtagcatcacgttttctgtgtgcgcgtgcgtgaaagtagtcgtcgtagcagcacgcaaacacacgtacacatggtaatgggagtcggtgcactgatccccattagcttggtaaagctccgccgaacagcctcgcgggttcctctccacgcatatacaggtagcctggttcgaggtcgtttccaagtccacgcaattcagtaatccaccatacatttctatatgttcaattgtactgctattgccactccacatgtaatcaccagcctaaaagctcg

SEQ ID NO: 128216 - DNA, 672 bp, Zea Mays
gtccttatgatcgtcctccaccaaaagaagcactggattgctgtttgcgccatggaacaacattataatgacttgcataagattttccacgtgactcttgctgaatttttctctctgtacgcattgcttgatcaactagatcttgcatggtatggtatgggaacatctagacaaatccaaaaatctcttcattgagtccgcctagaaatcttgccatggttaacttgagatcttctctgattccagtccgcactaacatcacctccatctccttaaaatattcatcaactgatctctttccttgcttcaataattgcaatcgatttcgaagatcacgctgatagctggaaggaacaaatcgcctcttcatcactcgcttcatctcttcccatatattaatatgtattagtcccagtctaatttgatgttactgcacttgattccaccaagtaagagcataactagagaactcgactgaagccaagttcactcggtgttgatctgaaagattgtgaactctgaaaatttgatcacactgcttagcccaattaatatattcatctgcactttctttcccagtaaatttaggaatatccaacttgacttgggcaatattgtccgggtcatttctatgacaacacccatgataatggtctctatcttcgaagttag

SEQ ID NO: 128217 - DNA, 438 bp, Zea Mays
aatgcattcgaaagggctcttgattgatttcgacctggtgttttctagtattcaggtaaataatgttcgatttccccctttaactccgcttagtttgcacaaataagaactagatcaaacaggtgcatattttttctagaacacatagtaaagttgcatgtcactatattaagaaaaaaagaggccagaactcttacaacacacacccttgtttctgagaaaccttctgctcctagtccttgctatttaattatcctggtcattctttaggctgacatggatcctttgtgtcctatactattgcacatgatcaaataggctcctaaaatcagtgatgagttaggacattatactagtgatgagcaacgacgctgaacatttttgtttacaaacttctagactgtttaagtgtttataagcacgttgccaatgagctgc

SEQ ID NO: 128218 - DNA, 352 bp, Zea Mays
gatgcccttctggctgctgatcatgactcggggcaggcgccagtggtgggggtggtggtaattgagcccaggaaggttgagagtgacttgctgaagcagcagaagccgtcggctgttgattacctacgtattcggggatatatggagagtagcacgaagcagtatgcaggacctgctttggctgattctgctgtgcctcagcttcaacaaattccttttgcttttggatcgtgacctggcacgtcctcgttgtgtgtaccttgtcctcgccatagaaaaggcaaaacaatttcctgggctgattaccgtacctttctccaccgaagcttctccctcctctgcctctcggagc

SEQ ID NO: 128219 - DNA, 559 bp, Zea Mays
caataaactttcaggggtcagtctacactgaacaagctaaaagttcacccaaattttcagaagccatatcccttaaatttggaaaaaactagaagctagtcccgccacatggatccgcacatgcatcacacccaatccatttacaaataaaattgcagctgaagaaagacacagtccatcacaatatattcattttgaacaacaagccaccaattcatggacagtgaagttttattcttattggcaatcctcactaataaatatagaaagtagtctagtactagtgccacttatcagcctgagacaaacttggcgataatttttatttaagaacaacaagaagtctagcacactagaaaacaaacactgcaattcagttcatttcactcaacaaaactgaaattgacgacaaactgaaatttattcttcacatacatgaatgttgatcaacgaatcatatgggcagtcttttgtttgggctaaatcaatttgttaaatgtgatgtagtatattattcctacgaaacataatttaaatttcttttgtttagcccaaaata

SEQ ID NO: 128220 - DNA, 467 bp, Zea Mays
gccgatggatatggatgactcgggggcaaacgatgatgatgagtttcaggatcaaaacaaggaaggcagtttgggcgaaaaagggagtaggggatcggtgctgctagatcagtcaaatggttctactggtgctgttgacatggcatcatccgcacagcaaaacaacaaggttgggactaaatctgggagagatgggggtccggttgccactcactgtcttgcttaggtggatttggcgtagccacaggagaccgggtttgatgttggcattgtcagcgttgaagctctaggtggtatccaggaagtgacaggaattgtgcatgatctctgtcgcagtaagcgtcgcgccgactcgatgagcgaacactcgcttgatcgggcagaaaaacttaaggcgggaaacaatctggacgatctgccttccaaaggtaacaatgatacttttgttgatttcccagataatatta

SEQ ID NO: 128221 - DNA, 613 bp, Zea Mays
agaacacccccgctcgtggatctgcgcaggacaaaatgccgcagaaccagaatagaggaaggattaatcacatgacagcggaatcagttcctgaggatgccgacgtggtgtatggtatgtttcttattaactccatacctacttcagttttatttgactctggagcatctcattcatttataactgagtcattcgtggaaaaacataacataccaaagtaccctcttaagaagatgttacatattagttcaccaagaggtgatatgaaggccacacactcatgcctccatgtcaatctcaagattcaaggaatagattttctagtcaacctagtggtcctaggatccaatggtattgatgtgattcttggatgtgactggttgaaaatttctgatggagtgatacaatgtgcgaaaggaacaattatgttgacaagtccacaaggcgaaagaatccaagttagcacaaacatgtcaacagatgcagaaggagagacaatggtaaatcacttggaagaaaagcccctggaaaatatcaaggtagtgtgtgaatacccagacgtatttctgaaggaattactaggcatgccacctgaccgtgatatagagttttc

SEQ ID NO: 128222 - DNA, 550 bp, Zea Mays
ggaagagttttttgtttctatctacattcaatttggtgcattaccagatattttccttgtaatcccctcctccaactataaaatgagggacaaagcatcccaagaggccaagatcataagaaatagccgcgacatactagacgtagggtattatctcaagccgagagcccaaaccagtctaaatcctcatgtacttgtgcatttatgtttggttctttgatctcgtaaacacccccatacaaattcacagccaaaaaatcatcgacaattggtgcgccaagtaggggtatgcgttgattatagtagatctgacaacgaaaacttttacactagggcaggagatcaccttcggcaaccttaggttcattggtgatgcgccgggagccctcaggcacgtgttggacatcacaacaaacatcatcatctgacctggctcggtctgcttcactagcgatgtgtttgggcaacttaggctaatgtctaacaccttagtgacaccaacatttgagatcttggatcaatcagattcgatttacaaggtggcacaacc

SEQ ID NO: 128223 - DNA, 598 bp, Zea Mays
ggcaggcccaaccggatcgaccagagctgtcgcagtggccgacgacacgcttgggctaggggccaccatcctagcactagagttgtcccaaggatccacatgaaggagcatcataggggaacagtgcacggaggcaagattacatgccccctaaccgagcgacacggggtcaggagcgtggacaagcttggggcaatggaagtgccaagggcggtgggagccaaaggagcagtcatgacacaagcaccagtggagccaattactgcataaacacgagacgaacaataggatccaatggggagcggcatggcaatcacattaaactttgaaagaaaatcaaagtcggatggtggaagggggttagatttctcaacaaaaggacaacaagacacatcaaacatgacacgacgtgaaaaaacaagacgattggaggcaaggtataagcagcgatatcccttgtgattttctgagtagccaataaaaacacagagggaagaacgcggagctaggttgtgggcagccgtagcggatgaatttgggtagcacttgcacccaaacagatagagatggtcataggagggtggggagccgtgaagag

SEQ ID NO: 128224 - DNA, 940 bp, Zea Mays
gcaggtcttgtctaatgttcatgtcttgtaaatctagacgagatttgagattatcttttgtctttccatctaaattgaacagtgtaccatgtagattatcaaaaacattcttctcaatatgcatcacatcaagattgtatctaagaatattatgatcccaatatggcaatgtgaataggctacttactgacttgtaagttttagaattcttaaaatcccttagtgaaattatgttaggcaaaatcgaacgatcataataggtcatatgagctgatcttagctctgttgttccatcaaatgaatctgcatcaaaacgataaggatggtcttcatcaagccattgacggtgtcccataaaagatgacttacgaccgtgctttagacgtttggtccatgcattgtcaccacatggcgggcaagcaaattcgccatgaaccatatgtgatgagagcattcctaaacctggaaagtcacttgtcgtcattaaaacagcccctcgcaaattaattagttcatctctcgatgcgtcatatgtggacatgccattctgaaatatatctttcaggtcctccaatagtggttccaagaacacatgaattttgtctccaggacttttaggaccaggaatcaataaggacaacataagattttgatctttcatgcataaccacggaggtaggttatatactgttaaaactactggccaacaactatgagtactgctcaacatcccaaatggattaaacccatctgtagccaacccaaaacgaatattgcgagagtctgatgcaaaaaatgggaacttttcatcgaacctggtccatacgggtgcatctgctggatgacataatgcaccatcctttatgcgctcttcatcatgccaccttatgagaggtgctatatccttgcacataaacaatctttttagcctatctttaat

SEQ ID NO: 128225 - DNA, 463 bp, Zea Mays
ccccagactgacactgtccaagctagcagcccagggtctgcaacctagggcggcggcgatagcaggcggaacaggggccatggtagatacaggcagcccattggcactccgatcgccacggcaacatccggtggctaggaagcgtggggaaagcacccgcgaggtagtgacaacagctcgtgccctgttcaccccacaaccaagcataaagctgccgagttcacaacacatccaatctctgcaaatataatgggataaataaatttgcaaagacaagataaatacaatgtacaagccaaagcaacatgtcccttttctcactcacttgcactcagacgaccaataagattccccaacatatgtttctcgactctagccacctccatttcccttgcatcctatgctctcttttcatttgtcgccttcaatctcctctgctcaacacacatcatgctatcataac

SEQ ID NO: 128226 - DNA, 468 bp, Zea Mays
gtggattcacgcaacgaccggtgctcccgagcggctatcaccgaattgaaccttccccgagtgtttctcgcaacttaatttgaagattggtaacctaatttgccctggccacggcgaccgaagaccatgcggacaaaggaacgtgttcccggcgataggtgatggtccagttcaattgaaggggtcgaagagcttaaggaggacctagggatgctagaacaagccacggagagacttgaactgacctgagctgagctggccacggcgaggtcgttttcatggtggctgaaaactaaattgggggaaatccagaattggtgctctgcagtgaacgattgctagtgattcttggtggctggatgcttaactatcctacggagctcgtcgtggcttcaatttataggagggaagagcggtggcactcaatttggccgagcaatgctggcggccggagaatgagaagagcac

SEQ ID NO: 128227 - DNA, 444 bp, Zea Mays
cgcggtactcgctgactgacatgcttccctgcttcagcgataggaattccttcttcttaatcttcatcagtccagctggtatatgatggttcctgaactgcgtagaaaactctgcccatgtgatagtgttagcagcatcgtgggcagcagtgtatgaatcccaccaatcagcagcaggacctgtcagacgaccagaagcatatagaaccttctcctggtcagagcattgtgcaataatcaacatcttttccacagatttcatccaatcatcagcgtctagtggatcaggagagctagcaaatgttggtggcttatggctcataaactcccggtgcttatctcagggtggaactggtggtggagatggaggcaatggtgcttgctgatgttgttgttgttgttgcagttgctgttgcgcccttctctcctggcgtatctcctctc

SEQ ID NO: 128228 - DNA, 618 bp, Zea Mays
agaagacttcctccgagtacttcgagtcctcgaagggaggactcagggggcgtttgcgcttcccatcggtggggcggtgccctttcttgcctttcttccctccagccatggctcgctcgaaaggaggggaagcagggaagaagaagacgagtgaacgagaacgagtggggaaagcggccagggcgagcgggctatttaaataggatgggagacgactgttatattcctacccgctcaccgaacagtcacaagagttcaatagcaattcaaaccacctggaatgagtcaggtgtctggcgccgctttgtgtaacatggcaccggatggaatcaatcaaccgctcaggcagagtattacacctctccgtcgtatcaagttactatttcaggactacacgatggacgtcttttactgggtacacacccattgggtgtaccgcccggattctctaagattttctgaagcagtgagacctgcaacatatacacaatgaatatgccatgacaaaggggaagatcaactgaaatgggaggaagtccaaatgcgatcaccaagcacaagtctaatctgcagaagcattgaagttcacgaccgagtggcgtccagccaggacctctc

SEQ ID NO: 128229 - DNA, 431 bp, Zea Mays
gcaagatatgttactttgattgccatagatgttttctacccttcaatcaccccttcagaaggcagagaaaggagtttaggaagggcaccatcgtcatgaagggaccgcccaagcgacgtagtgggatagaaattatagaagagcataggaaacttgtcctagacgagagtgggaaaaggtatcaaggttttggtgaggagcataactagactcacatatgtggcttgtgggagattccatatgctaagtcattgattttgatgcacaacatcgacgtcatgcatcaagagagtaacttttgccaagcgctcataaatacatgcatggatttccgtgataaaacgaaagacaatgacaaggcacgcatggacttagccgtgatttgtgatcgtccaacccaagtccttagagaaaacggaggcaaaccaaaa

SEQ ID NO: 128230 - DNA, 382 bp, Zea Mays
cattgtcaagtgaattctctggtcagctacagtgctacagttagttgaggtggttggcgaagacttcatgtttctgtccaaaggcctgttcgacattcatcccaacaatacccctcgagggaccgattcatcctgatgggccaatcctaaagtattttcctaaaaaagggacgaatgtcacaattgtacatctagtgaaccgccttaacggggccactggatgtgactgttggaaaatcgaggctacaatgcttgtgtggtagagtggataaattgctgctagcaacaacacttttctttgctgcacgcctttttcaatgtagtcgttgctcctccaccgtcgttgctcgatcgccaccatcctattgatgcgctaccgacg

SEQ ID NO: 128231 - DNA, 654 bp, Zea Mays
ctaacctagatctgatctaatctaaagtgacttatcaaacatgttagataatactgatgagactctactcctatagaacgggtcttaacttagttcaccctgcactaaattaagaatgacagaagacttggccaaatgcaactaccttaaccatccaatagttgcataaccccacaattttaacctagcaagagattctaacctacctacaccatacaatccatcctactcacatatatcttaaccatatgtcctcaactcggatggcaactccaagaagaaagaccaaagaagaccaaccacgtcaaagaaggataagcatcaactcaagccttcaaagatcaagctagatcatcagatgaatcaagatccacaaatcttggatggagtctttccttaccctactctttttacccaaacctatatatactttaaagacatcttattatcctacataataaagtggatatacatacccatgctttcataaccactatctaaataacatgaaacttcttaattcttaaactaattagaagttaaaggctaaattataaatagagctttttacatccctgtccttacaaatctcgaggacgagatttctgttaaggggggtaggatttgtaaagcccaaaattggtataagaaaaa

SEQ ID NO: 128232 - DNA, 516 bp, Zea Mays
gagattgcgtaagggctaagtgacgcctttcgacggcgagctttttttgggggggctgcagttgtgttgagagcaacgtcagacagacagagagtaacggatggcgataacgaactcctcggaacagtgtagtgtagcggcagggatggtttttggaaagctgggtttttattttattttcttctggaaacaaattaaggccggcatgctatgctactactgagtgctggccaggccatcagtgacggatgcacaggaggagcacctagtcctacgcaggaggacagatcgagccccggccggctggttgcacgtacttattactactagtgatataaaagcgaggagggacaggatctaacatctaattgcctgtacgtactgaatatatgtcttggtcgtcctggtgtggagttgaccagaggccggcgacatcatgtgacgcaattgtccagcctgaaaaggccaacattatcaacaccgtataccttttctgccgttggtaacaaacaaaag

SEQ ID NO: 128233 - DNA, 326 bp, Zea Mays
aaaaatcatgtatgcagtacacaaagttaggtatagccgcaacacttcagattgaaatttcttcctagatgccaagaaccaaaatagacaagcagtcaacctggcagtgttcatcatgtgctgacagtgagactttgttttttaatctcagcatcaaagatgaactttattgaattcttgaggctacacttaaggtgtacttgcacacatgttttttgtgatgattgttgaaacattgcaatacggtattttagaatgtgggcgccaatttccctgggcgccatatgatttccaatggaaaattgtcatatgttatttacttgcgg

SEQ ID NO: 128234 - DNA, 1113 bp, Zea Mays
ccataaccacatttttaatctcatcctcattgaacaagaaatccagatctgataagtcaaatggactatagcctaggttaccccaccgaacggccctctgtctctcaccccttctaccaatagcttcagtgaaatgatggtgggcctcatgcagtttatcttcctgactggtgagtaacctgtcgtcacgaaccagcgatctgatgaaatttttccttcttctattatttgccatcaggtgaaaaaaatttgtgtttgcatctcccagacgcatccatacaagtctggaatgttgtctagctcttgccttttggactgtcactagcccaaggattttcatttttagacttctcctgaactctagctcgtccccggagagttgcctggattcctgtgctctctcaagaagggtaaggacggtctgaatgattgctaattgaactttaaaattgcctactgtctttcgtctccagatcaatagagctttagctgtgcggatcatcttcacatgcagcctaagaatggcatcggaagaacgaacactagatgtccaagcttgctgaaccacctcattgaacccatcaatttttgtccaaaaagcttcaaatctaaaccccctatagaaactaaaggtagataaaccttgcataactaaggggcaatgatctgaggtcatggacccaatggcctgcagatcagcctgggggaagatatcatgccactccgtagtcgccaagaatctgtcaatcctagacatcgtagggtcatcctgttcatttgaccatgtgtataatttaccattgagatcaagttctaaaagctgaaggtaatcgattgtgtggttgaactgtctcatcactcttctattaattaatcctttgtttttctcccttgctctccttatcatgttaaaatcacctaaaaccagccattctggcttcatcagactacgaatatgacgcaactctgccagaaaattcattttctcactttcaggttgagggccataaactccagtgaggtcccaccccacgtcgctcagacgagagctgatactgacgaataacgaatatactgatggatagggaataacagttatgtcaaaaaagtctg

SEQ ID NO: 128235 - DNA, 606 bp, Zea Mays
cttctcagatctactactttgaaccctgtggatcaactagaacatctcatttccaaagttaactgggtggatttcgagatcaattcagttttatatctcattctttagttgagctcgtgcaaaccggttgaaccggttttgacaccggttgaaccggttttacccagttcgtttctagtttttgttgaaaaagtttccacttgcctattcacccccctctaggaaactttcaaatagcttgtcaagttgcagcaacactaatactagtggcgaggccaggtaggacttgatgttgtcaaatgctatttggtgctcggtggaggagagtcctagggtagggtcttcaacatggatgactattggggacttctcggaggccttctacctcttccttttcttggatgcgattggggcttttggcctgagttgttgggggaggacctatagggtccctctcagccaactactcaaggaagtggctagatcctgattctttgcagttttgggggatctattctggttcttgtggtggccaattatgcactagcatctatctcataatttggagggtcccaaagttgggtaatgcaaatgacaatattcaac

SEQ ID NO: 128236 - DNA, 306 bp, Zea Mays
ggcctctcttactagtcaaggtcatcggatgtctgtgaacaaaatatcgcaaaactacatgcagctaggaatgacaatgaaaaattctccatggggaaatggctcctatccttgtctccatcccatatatctattttagattggagagagcataagccgagcctgtttggttgtagtcgtcccatatatatagcactcaccactcagcctagacagcaaccttagcctcatgcctctaatattcatgttttgcctgagcttaaaaccaaacatgcctttacatatcccaagcttctgcgtatagac

SEQ ID NO: 128237 - DNA, 430 bp, Zea Mays
cgggcgacgcgcgccgccacgttcctctgtccgcggaggggaaaggttttccgatcgtcgatttcctcgtccacggcgcagattagatcaaaacagtaccaatccctgtgtgtgccctggccgtcggatttcgatcccacgaacacgaatggatatagaataattgaatccaagccattgccctctgatcctgcggcccatatcgcgtaccggttcggcacgtgcgtggattaatccgaaccctccacctcagatctcacggcccaaatttaagtgtaccccttcggctctggatatttgcttaagagaccttcaagttaaaagaaatcaacccgcagtcctggcagtggaagtctgagtcttaggacatttttcgtgggagcccctgcgctttcctgtaattgacgcctagtccagaaggttagaaaat

SEQ ID NO: 128238 - DNA, 994 bp, Zea Mays
attttggaagcgatttccatacctactatagaggcaggacatgttatgtcatgtctacggacattggggcctattctgtttagtatgatatagttggtagctggtgtatccttttgtattttattatacttcatggtacactttgtgagcgcacacgtggatttagggttgatgaacttaccatatggtcgccttgagtgccctacaaccgaagtcatgacaacaactcatttgtcgagcttgtaatgtcgcctttaatgcgtcttagcgacaccagggggtatgaccttctctaacactgatagtagtgttgcatgtcactctttcattcaatagcctaagcatatatttatccatcgggcctttcatttcattttcttttctttgacacgaatctaaaccttgggggtggggcaacagaagcttaactatgcaacaatctttgttcttgtgagtcaaaccaagatctccttgcatcatccccattgatgtagccttctagatgggctcctggagggtagatccgatctaagctggtcaagttgcatggttattcatggatatcttttcaatgattggttgaaggattacaagcactgcgacaaaatcgacctaccggacatatataacgttgtgtctcgtcgaataggctctgatgaccatataaaacaaaaagagacaatgatatgtgcatggtgcactgtgcgagattgcttgttatttaaataggtaaagacaagagagattgcattgtatatacaaccatggttttaaaggcatcgcctgtgtgttcaggcgccaaatgttttaggcgtcagcctcgccttggcttggacaactagggtgtccgccttggcattataggcgtcgtcgagacaccataggtgtcgagtttggccgcccgacatgcgccttaatctccaaaaaaactaggcatcgggctaccatgtttcgtgcttatttccttagatgcgtaggaagaataaggaaggga

SEQ ID NO: 128239 - DNA, 670 bp, Zea Mays
caccgttaggcgacttttgctcggagtgtctttttaataaaaaacttcaattaacgcacttgttgtgctattccggctgcacccttaggtgacttttgctcggagtgcctttttaataaaagacttcgattaacgcacttgttgtgctattccggttgcacccttaggcaacttttgctcggagtgtctttttaataaaagacttcgattaacgcacttgttgtgctattccggctgcacccttaggcgacttttgcgtggattgtcacacgcgagggtagtctatgctacctgtcgcggtgacttcgaagtggtcgaatgtcgaagactgtcgaaacggtctttttcgacatgttgcgtctgagtttttgtttttgcgggggcttttgctggtatattacatggctccgcctcgttaaaaacctcacccccgggaggaaaagagtgcgggctagaataacattgtttgctagattacaagggcgtgtgggccctgatggttaaacaaaaaaattgcggagattgtcaatgttccaggagtgctctaggtcttcgccgaaaagtgttactagcctgtacacgctgggggatgccttcgacttgatgatgaatggaccctcccatttcggctccagcttgccccgtgattctgtccgggtggtccagacga

SEQ ID NO: 128240 - DNA, 568 bp, Zea Mays
tccggctgcacctgcttttgagggagacttcgattttgagcacttgtgctagtccggctgcatccttagacgacttttgcacagatagtcttttggagaagtcctggtattgcgcacttgttgtgctaatctggctgcacccttaggcgacttttgcacggatagtcttttggggaagaccttggttttgcgcacttgtgctaatccggctgcacccttaggcgacttttgcacggatagtcttttggggtagactttgattttgcacacttgttgtgctagtccggctgcacccttgggcgacttttgctcggatttatgaggaagacctcggttttgcgcactcgttgtgctagtccggctgcaccctaaggcgacttttgcacggatagtcttttggggtagacttcgattttgcgcacttgttgtgctagtccggctgcacccttgggcgacttttgctcggattgtcgcacgcgagggtagccagcgctgcccctcgcggtgacttcgttgtggtcgaatgccgaagaccgtcgatgcggtctttttcgacgtaatttttgcg

SEQ ID NO: 128241 - DNA, 1093 bp, Zea Mays
cagaattcacaaaatgagcaacaacactaatatagtcctctttagctttaccagaccatatatcagatgtcaaagcaacatatgaaacatgtttaaggacttcaataagtacttcaacatgatcattaaacaatcgaatcaagtctctagcagcagtttgcctagaagatttaataaaccttggattatgggcacgagttatatactcctgaaaagcactagattcaccaaaacaaagtggcaggtctagcctagctattaagcgacaaagctcagttctagcaacaaaaggagaatactcctaatgattaacagatccatctgaattatatttaagcaaagattaagatttcccagatctatccttctctttcttagcagggcaaagatccaagtgtctgatcaaatggccagttccagatgaagatttagtagacatgctattcttgcagtgaagacaaatggcagatactcttacctccttaccattttgcatcacagttacctcctcaaagtgcagccataccttagaggttagagctctcctcctagaacgtttatcaggcacaaggacagaggtgctcgcgtcggccgttgggcttgtggagcccgtgtatgttcgggtcgtttgggccccggcgccgtccagatcgatggtagcgacaccaaggaggaggcaccgagcatcctctgcctcattatgtgcttcaagccaccgctcctcgaccacgacatcgatattgagctcatcgtcaaccgagtccgtggacatggccaccgccttagtcgacttctccagctcctcacggtgcgcggcgcacacacacggcgcacacctgaacatatcgagcttacggttagggttatgtgctcacggcggcgagcgagagaacgagaaagaagacggctcacacggcgacggagcgagagaacgagaaaggaagacggcacctagagaccaaaaaaggaagacgatacacacacaaacgactcacggcgacggagcgagaaatgaagaaccgagagaacgagatttagggttacctgcaacaccggagcaccggatccaccaacgacaaggcagacggcagag

SEQ ID NO: 128242 - DNA, 650 bp, Zea Mays
cgcttctagtgagggtgtggcctcacatgattcccatcgatgaccaagttatccattggctcagtgttaaggtggcacacaaggagtgttccccctaataatagtagccctctagggtttagagaggtttgggtcgctaggagagtaacatcctacttcctctttcttgtcaagtgtttatgagtaaaagtagtgacaagattacaagcctcaagtgaggagatcagggagagatcctcccaagagagtatgaagctaagtcaagctaatagtaccttttttgagtggatttgtgtggcatgtcttactactaggatgtgcttcatgtaatcataacattttacccttacacaataatgcttatagtaccttttttgagcatcatccctcatattgtcttgtctttgtgaggtggatcctcccaatattcccacatgagagggttcatgccctcctaccatgatatattctagtttttcttatgtgtggcagccttatgcatgtcgcacatatgtcagggagttgcatgtttgtatctccacatttaatacgctattgttggggtcatgccttggtaagacaatgcaaaatgcatgtcacaagaatttaatttccatgccatgaacctctatgccatagccacgctgccg

SEQ ID NO: 128243 - DNA, 541 bp, Zea Mays
tcggcatttcccattcattgacaaggggccacactctgagaggtatatgatcttggactaaatctctagtggaaatgtaactgcacacaacattaaatgctaccaaacaggcttggacctcttctgtctccacaatagctggccttttatgccaaagtgagatatgataggccacttaattatacccttgatgttctccctcttgtccaagtcatttttatgtaaaaccattacttcatccacgagtctggccacttttgtcaaaatgtttgaacagggcaccttgcatctgaccggtatacaaaagtatagcaaccaaaatttttatggtactgctcttttccagtagcctacgtctcataaagaagctcgtggatgttgcaaaaacagtcagcatttggctctaaaccgtgactcctcaccgcctagataaagatccctaccttgatcaaagctttggagtaagctgataaaggtatattttgaacctttttaaaacctcgaccaacatcttgtgaagaggaaaacacaacctagcctt

SEQ ID NO: 128244 - DNA, 319 bp, Zea Mays
gtacctagatacagtccagaaaatggaaggctattttgaaggcttttctacaaagaacatcccgagaggagaaaatgaacatgcagaactattagccaaatcagcagccgaggggctgtcgcttcctcgtggagtattctttgaagtcctaaaagtacctttgatagatcatatggaaaaagttgtcttgacaatatcaccaacgcatagtgaggactagaggacaaaaatcatatccttttctttaaagaaatcaccccatacacgaagaagtctatatcaaaatgatgtaggctagaacatggccatataaaataat

SEQ ID NO: 128245 - DNA, 284 bp, Zea Mays
ggagaggacgaaacgagcagttgtgccgcttgcggactcccccaaaatgtgattgtcttcactcgagcaggtgaactctcggacgacactcgtttcagagtcttactctctcaatacttgtgcgcgtaaggattcaaatgaggagaacttggccaacaacagaactgaagaaaatgaatgatgataggatgaaacttttatcttcgagccagaagaaccgagtgggcgtgggagaaccgagcgggcgcaggagatcaagagacgggaaattacttctgtcatca

SEQ ID NO: 128246 - DNA, 773 bp, Zea Mays
cgaaggtcacatgctctaatcttacattgggttttgtgccgatggagagggggagctctatcttgctaagtggaaatgtaccctttcctccgaaaccatagagtgggttgtcggcatgctggagtaggttgtagttgatgcccatttggtcgaaggcatgcaggaagatgatgtcagcttggctcctgttgtcaacgaggactttgtgcagctcctagccagccacattgcaacagatgacgagtgcgtccatgtggggcgcgctatgaaggtcgacatctcttgcgttgaaggttaatggtacatgagaccactttgtctaaatgacggatctagtgactgtgacatgattgaccctttgatagtgatccccttttgccatttgttcttgaagtcagagctggaccctccgatgatcatgtgaatactcccctgaagggtgggtccgcgaagtcttctttctttggtggtggtgggtggtaggtgttgatttggatgctgtggcggtggaggtggaagagctaacctttcttggtgttgaaggcgttgttgctatggaaagaaattggggttttgttgctgggggtagtatgggtgttcgttttgatattgatgttggttgtactgttggggttgatatgtatgagcgatgactctttggttgtctgtcgaggcggccctagccaattggtcttttgttgctttggtctcgaggcgatctctggttgggtgtgctgaatcttcgccatggaaaagacaatagaatcttctcg

SEQ ID NO: 128247 - DNA, 728 bp, Zea Mays
ttcttcaccaagctcgacctccgctttgggtaccatcaagactgcatgcatgtgggcgatgtggagaagacggcgttccacactcaccacgaacacttcgagttcttggtgatgtcgttcgggttgacgaatgcgccgacgatgttccaaagtctaatgaacaacgtcatgcgccccttcctgcgcaggtttgtgcttgtctttttcgatgatattctcatctatagcccgtcctggtaagagcatctccagcacgtcaaaggtggtcctcacccctttgtgcggcaactccctcttcgtcaagcgctccatgtgctccttcaatgccccctacatcgcctaccttggccatatcatctcggccaacgacgttgccatggacaacgacaaggtgacggcagtggtctcatggccacagccgcgctcagcgcgtggtctgcacggttttctcggcctcgccagatactaccgcaaatatatcaaggatttcaggagcatcgcagcacccctcaccggactgctgaaaaaggacgcctaccagtgggggccgaacgcggacgaggccctccaagccctcaaatacgctctatccaccgcactggtactacagctgccggcgttcgacgtccccttcatcgtcgactgtgacgtgtcaaggactggcttcggcgcggtgctgcatcagggcgccgacgtcatagccttcttcagtcgcccctttgccccgc

SEQ ID NO: 128248 - DNA, 506 bp, Zea Mays
gagctagagcctgaaggggattgcctcaatgattgttggaggagggtggcggttgaatgcgatggtggctattggagtcggatcatggaacttgcatgacttgcgagagccgagtgagaggagcacgagggtagggttggataggggatcagtcggggcacgacacatgccgatcaaccgaggcatggcacatgcctcccttgttatatactctaactagtacaaagcctgtgcgttgtgatgacacaccaatcatatttgatggtataatggtgcaacgactgtacgacacacaagggcccaatgttgagatgacgcacactagttcctcacgaccgacaaagaaattgagaaatatatcgatacttaaaagataataaatggatcaaaattgagacttaaaagacaatcaacaaaacaaaatcaagaggttaggattacctgtgtcgagtagggtatggcagttggtcagtagtagagccggagcaccagttctgtttgcgtgg

SEQ ID NO: 128249 - DNA, 380 bp, Zea Mays
cgaagactaaatggattgtgctacgcatgtggtgaaaagtttgagccgggacatattactaaatgcactaaacgagggcctgcccaactcaatgttgttattactgagaatgtggagatggttttaacagatgagttgttgcaacagcttgagcaggaggatgttcaacaggggttgtgctaccaggtttcaacacatgctttatctggtactattgggttgcaaaatatgagaattcgagcagtagtgcagaagcaaatcatggtaatgttggttgattctggtagttccactaccttcattagtgaacatatggttcagaagttggcattacctacacattcgtgttcaccagtaactgtgaaggtggcaaatggagc

SEQ ID NO: 128250 - DNA, 320 bp, Zea Mays
ctgaattatttgccacgttccctttgccttgatttgagctccccgagttctgctgattgttggacttattctgcctcagatatggacagtctttgataaaatgaccagacttcccacagttgaagcagctagttgaggaactagggagggcagggaaacgagcaccaggggcactcggctgatttgtagaagtgggggcagtggcagggcgaatgaaaacaggctgtttgaatggataggagggtggacgaggcgaagaacgattctgattgaaaggtcggattaccaaccttgttcgcttctcaggtccctgattggac

SEQ ID NO: 128251 - DNA, 537 bp, Zea Mays
ggtgctccacgggtacattttgtgtggatgaacatagtatttgtgttgaaagaacaagaagttgtttgtgtatgtgtgagtgagcttattatctatctatgtgtaacaaccatgttgttgtttctgtgatgtaagaacaagaagtttttgtgaagaacgagccatttgtgtgaattgagaacgggaagtttgtgtatatgtattgagttgccctagtttctgcaaagtaagaaaattgtgggttgttctcctatagtagtctgttttcttatagttatctatcatcggttatttttgtggtgtcatatgcaaactggtaaggctaaatcatgtcctgaatctgtgtctgctttcttattgctatacctgaatcatgtcctaagaaaaatgttagatcttgcccattgactgccatcgaatcatgtgagatcatgtgcatctttccatttagtaacaaaaagttccatatgcttatttatttgcttcggccacaataagttatttagtttaggatgttgcaatgtccttcagtttttt

SEQ ID NO: 128252 - DNA, 755 bp, Zea Mays
cctaattcaattggacgggttggggagcatcaccagcatacagagacacgagaacaacgcacgaattggatggtgccttaccagaacggactggccacggtggagttgtgctttgcggtggcggagaccaatttgggggaaaaggggaattctccggctatggtgggcaattgaggggaagaacgggtgtgtcggcttcgtgatgacctagcgcagcagtcccggccttcaatttatagggatagcgagcggtggtgatcaattcggctgagccgtgctggcggccggagatgaagaagaacactagcgcagcaaatacatgttcaacgtcgtggcagctattccggtgagcaacagggagctaaagtgaatcgtggcggtgcggtggcaaggctcggacacgcggcgcaaggccgagcgacggcggttcaccggcgagcttatctgcgcaagccacaaggcacatggggtacggcggtgagtcaccggaattatcctccggcgaagggttactatctggcaagcttatctgatcactagtagtgtaaatctcaacggtggtggtgcgaatcacggcggggatcggtcgtcggcggtgagagtcctgcgctggtgatgtaacctgatcctggtactgtaccatgggatatgttcagtcagatgaacttgacagccaaacttggagctaaactttctctcaattctcaatgacaactcataccaagctctgcagcaaaattgtagagctacaaacc

SEQ ID NO: 128253 - DNA, 533 bp, Zea Mays
gtgttcgagtagcaaacgaaatttgtctaaattcaactaaatcaaacgtcaactaaaatatcgaatctgatctcgtctaatttaatccgtctacatctcgctcctgtgaatgcgacttcgaaaaaatagctcgggtttggtgtcgtattcatctccataatttaaacaattaaaaaggtttcatgaaacttttggattatcaagtctcgttcgctggcgaatttggatatgttcggatcatgcgcgtaagtgaatatgaatttggagccccgcgctgtccgaaaagaacgatgcgtcagctcattaattgaattgtttatctcaacatgttattcttggcgtcagatcaaatgatcgatagctggtgagactcgtaaaaattagactggattaaatacagtctaacataccgaagtcgatctcgtttggtctggcccatgtatttttagctctgatctaaattttcaaatataaatagcgggtaaaaattcatctgatttcgaagtattcaccaaattaaatccggtccaaat

SEQ ID NO: 128254 - DNA, 709 bp, Zea Mays
aacaggtcttggttgagaccctcatactagatcaatcagtgcaccagatgagtgctgggctaagcaaaatgaagtaagtagccttttgtttttttgtagtttaggaatactgatcggcatctgaaagtaggaaattccattttactgcaggcaatgtcagggtgtattatgttcaaaactgccccacttgaaaatgaggacaacttaaagataatgtttggacccattgtgtgcaccaacgagacaacccttgttcatggagttgaggatgctaattcatcatctgatggtcacgaagaagacattttttggtgcgggtgaaagcagcacacctaaccccagctctacagttaagggaaagcgtaaggttttgcatgactctcctaaacctaagaagaaataggatacgagggatgaatacatgaaacagattgtcgatgctttcgagtccaggggctcttacaagtccataacctcatttgaaaacgaccccgtgcgtaaagaggttgcttcccaattgcagcaagtgatcaaagatggtgcagaggaaggaagcgacttacatttctttgcgactcatattttaatggagaaacattatagagatgtatttgctaccctcaagaccaaagaaggaaggaacgcaaggctgcgccgtgcttacaagaagaatgagaagtcaaattaggtgttggtagccctgttatgc

SEQ ID NO: 128255 - DNA, 332 bp, Zea Mays
cttaggaaccccccggtctcgaaacgccgacaactcctttagtaggtgataccctaagaaggacttggtcacccactgcaaattccaaatcccgcctcattatatcagcataactcttctgatggctctgagtggccaaaatattctgacgaatttctcgaaccttctcagaagtctgctgaacccaatcaggaccaaccagagatctctctcccaaagtctcccagcacagaggggagatacaccgcctgccatataaagcctcaaatggtgacatcttgatgctagcctggtagctgttgttaaaagcaaactctgccaatgcaagatga

SEQ ID NO: 128256 - DNA, 487 bp, Zea Mays
gcggaatctcaactatgaaacgttcacagatttggtcaatgattgatctccattacgttctgagacccatactcttgtggggcaagtcttccttgacggtcattcttccgtccaccatcggcaagaggaagttccttctcgttcccatggcctaactcctcacccactcttttcttattcatatgctactcctccatatccataccggccaagtgtcaacactcctcctcctattgagcctccaacaaccgacacccctcctcctaacatagatgaagcccattccaccgatatttgtcctccacaacctttcacttatttgtatcctccttcatatccatatcgatatccatatgctcattcatatggctcgtatggtgctcttcctccatatgctcctcctgtgttccctcccaactatggcgctcttcctccatatgctcctgctctttcccgccctctctcggacacagtagtgccatcaagc

SEQ ID NO: 128257 - DNA, 595 bp, Zea Mays
agtcctgttacgaaatccatgcctatttcttcccacttccattcgggtattgggaggggttgaagtaggcctgcaggcttctgatgttcggcctttgttcgttgacaggtgtcacattgggccacatactgtgctatttccctcttcatccctttccaccaatatctggccttgaggtctaggtacatcttggtggtccctgggtggatagagtaagctgagttgtgggcttcatcgagcagggtttctcgtgcctctcccactggcacgcacaggcggtccttgaaccagaggactccttgcttatctgtcctaaggtccggaagttgctccttgcgtgttctttccataagtttggttgtttctgcgtccaggcgttgggccttgcatatgagatcttctaggtttggcttgacttccaggccaccgttgcctcccaaacatgtatttagctgagctgattctttcttccaatcttccagaaagtttgttcctttaaccccgaaaggttttcggctgagggtgtctgctactacgttggcctttccggggtggtagtggatttcgaggtcgtaatccttgatcaattcaagcc

SEQ ID NO: 128258 - DNA, 355 bp, Zea Mays
tggcgactggtttacattccatatgtccaaagtgagtgaggaccttttccacataatgggattgtgacaaagtaatctcatcctcaccctttatcagcttgatgttcaatattacaccagcttcacccaagtccttcatatcaaagttcttggagaggaatacttttgtctccatgattgcttccaaatcggtcccaaatatcaatatgtcatcatcgtataaacacaagatgacacatttgcccccagagaagcgataatacacacacttgtcggcttcgtttacacaaaacccgcagtggtcagagtgttattaaacttctcatgccattgtttgggagcttgcttaagaccg

SEQ ID NO: 128259 - DNA, 360 bp, Zea Mays
atttttattatagcccgatctattatcactcctccgatcttatatcgatggctcggattcgccagggtcttgatctaatctccaccgtaggcgccaggatcaacggcaagcactgcttcttcctaccccatccatgaccagcgacggcacagggcccccgcggcggcgcacacaccggcggaaatcccaaatggcggcttcggatactaaaacccctgctactcagtgctacccgtaccagagattaaggcggattagatgggtgtattattaccgtgagttgtgtcgcgacagctactgcccacggtacgcgcgacagcatggctgagttcccactctggcgaggcattccggtggtcc

SEQ ID NO: 128260 - DNA, 439 bp, Zea Mays
cgagcgcttcaagcgcgaccctactgatgacctgtagagtagtagagacaaagcaagggttttgctgggaagcgggtgtaataacttttgattttgtgtaatatactttaagaaccatttaatggagttgaaactggaacttatctatatgttatttgcctttatgatgtgtagcactgtcaacttctctctggtacttggaccccctggtaggtaggctcgacgtgtcgaggctggataccagtataccaaagagaaaactggtggtccggcccctaggagatagtctctacactttgagaatacctactactgggctgggacctggacctgcacacagcttaggctttgaagttttagtagcacacccataggacccatcgtttggtatctgccatcctttgattcatgcaacaggacctgcagtattagcctggga

SEQ ID NO: 128261 - DNA, 438 bp, Zea Mays
cttgcaggcaagcggggattagcgcagtcgcgaaggcgagcaaggattttaggaactagatcacaacggaaaaagcagagttagggttctctgccaggaaaccgccaacgaggatgtataggcgcgcgctaagtcgggcacatcgagatggacaaagtaacatggaccagaccctcaacagagcaaagttagtcaggcttatcagagaaagacgttaactgaagatttcaatcgagattatcagaatgggctcacatgacagaagttgtcaagcaacgcataagtcgaacagaagagtgaatacatcgatataaagcagcaatgaaaggtttttcattcattggagacaattcattacaaaggaagagggttgtccctttatgaactgaccctatcatccttcacccctactactactactaccaccactacctacac

SEQ ID NO: 128262 - DNA, 349 bp, Zea Mays
ggcctgtgtcatcgtatggcagagagtcgtctgttgaggtctttctgaataattattgcttgcattgggagaagagaaagataggtggtttgattgcgcaatttgggtgctgcacgttcacaccaaagactgggaagactttggccgaagtgatcgaaattgttccttgtgcaaaaaataagtgggggcaattggtgggacttttggttttacgtggcaccgggggatgtcgaagggttgcctgccttgcccccgaccattttgtgctcgcattgctatgtggccttcccataatttaaagtgaagaagggggatcagaatgaggaggcccttcgctacgcggcccagc

SEQ ID NO: 128263 - DNA, 494 bp, Zea Mays
agaaagcaagtgatcgaaacgatggcggtgcccaggtttagatcgaacactgcgacgcggttagggagagggatggagaaagaaagaaagaaaatggaaaggccctgaaggtctgaaccaggtcgagtagatatttcactggaattgagcagacagcaacggtcttggtttctccggggctctcaccgtaccgttgctgcatcagcgttgcctggtcagctcaggtcagggatagcgctagctctccattaccatgagaggacctgtcagtctctgtgatatctatggtgtgagggggatcggaaacaaagagaaggacaattcatcacgttgtagttttcagtgtcgtgcgaatctagcgacagatgtctcaggaaaatacaagaggcagaaagagtgatctggccggcctggatcatcctgcatatatcatacaagcaatcataatgtcggtaggcccccctactaccacggacatatgtgtgtgtgtgttc

SEQ ID NO: 128264 - DNA, 395 bp, Zea Mays
aaaagtacatacagtgttgaagcttctctggcatgcttctatatcgttcccaaaagcggtggccggcctcctgatgccgaagcgagaccaaatggggcgttgaataattccttttatatcttccctctcaactaaattattcttcgcataaaaccattcttccatccaagctcctagccaccttttccgaaatgttggaactggatagcttacatcagggcgaggcacgaagccataacaaccaaagttgttgtgatactgctccttgctagtagccttctcctcatgcaacagctcgtgcatgttgcagaagcattttgcgcttggctctagcccctggcttctcacggcccaaatgaaaacccccatcctgataatggcttcaggggtaattt

SEQ ID NO: 128265 - DNA, 279 bp, Zea Mays
gcagttttttcagccaaaatttgctctgtcgcttttgtctctttttctccggtttccaaggatttctccttgacggactctgaaggcccagcttcgatctcaacctggtgctttgtagcttcggcttcagaggctgttgtctcaatttgtgcttttggagcttcggcaattttcctcggagtagagcttgaagactttattgtctctagtacatctagaccattaaccatcctttttcttttggggtcattgctggacctttctgagtttttggcactt

SEQ ID NO: 128266 - DNA, 494 bp, Zea Mays
gtgaggtgttcatattcaaacaaagtgtatgcatatgatgggaaaaatctaggggagttttggggaaagataataagaagggggggggtagattagggtttcaaacctgggttagaaattgggatgttacaaacctaccccacttaaaggaatctcgccctcgagattcagacagggctcgagaaaaggtaagggtattccctcctcagagagtcctcactttcccaggtagcttcctcttccccttctctgctccactgaaccttacagagtcttacttctgagttgcgggtctttcgaactgttgagtcgagaatctttattgacttttcccggtactggagatccttttgaatctgaattgtctccgcttcgatgtggttttctggtacttgcaggcatttatggagctgggacacatgaaacacattgtgaatatctgacatggattatggtagctcaaggcagtatgttgcgggtcccactctgctagt

SEQ ID NO: 128267 - DNA, 517 bp, Zea Mays
cgcaaaattaccttgaacacaccctggagaaatttgggagcaaaattcggtcgtttgacatgatcttggcagggatttacctcgggactccaccctgtgacactgccacattaccgaggcgacaactctctgcccttgacccgaaaccgctcggctccacgcgtaaacgacagagtgtagtcgggagaacaaatcctacacagcgatcttgcccaaattcgcaaagatctgcgccctatcggcgttagaactcgggcagaaacaatggagccacgtgtttgatcgcggctgacacgcctggtttacgctagttcgcgcacccacgcccagccgtccacgcccacgcgcccacactggtccacacccgcccgtgcaccacggtgtgcctataaagaagccccaaggcctcggccatactcccctgcacgttgtcggtcttgcccaagccagagctcatcgaactttgccttgaacgcgccgcgccaccgcccgccaagccacccgagcctcggccacc

SEQ ID NO: 128268 - DNA, 531 bp, Zea Mays
gtgggctcgggcccccatgtcagaggctcggtcaccctggcgcacgtcgggcgacatcttctgtggtgtctcagggcatcagtgggggaatctttctttaaaaagggactcccccgagcgtggtagccattctcatcactcgcttcaccctttcaccctcgagttctccgcgctcttctgccgccgtagccgccatggccttgctagatcctcccgagcgcctctagcccgaggtggcactcaacttggtgcgcaacctgctcggatggggtgtgtcggcgtttgccggaaagatctgtgtcggtgcctctcctcactgcaatctcgccaccggagagtttgtgttcttcatctccagcctccccagcgggttcgcgctgccgatcccatctttcttcgtgctgctgctggaggggcttggcctccaacctcaacaccttacgccctgcttcatccttcaggaggccatcatcgcctacctctgcaaggtgttcgtgggggcgacacttcttcccgcttcttcctccagca

SEQ ID NO: 128269 - DNA, 306 bp, Zea Mays
ttagccactaaactttagtcatctcagatcaaacggggccttattcgctgcttcactggccgtaaattcgcaatcttgatctggggaatgaattaacaaactccaatttttggttctctggttccttcagggggtcgggtctgcacgccatctgctcggcatatgaaatctgctgagccgtcaacaccacttggagtaacttattcgatgagttcatgatttattgatttattgcagccagaaatcacgcagctgagtttagtgctcgtatccctggtgggctttctttgtgttttatgttatgtg

SEQ ID NO: 128270 - DNA, 601 bp, Zea Mays
tggactgttccgtaataactcttcaatgtatatggacgacaggttattttctaggttttctagggctctttaacaagaacactcgcgacgaaggggtatgggaccatcacaactgttcgatcttgtgccgacgcatcggattagatctttctatcattcaagcagtacacaccgcagcacgtcagatcgcatatcaataatcgcgatttaaagaagcgcgatttaatcctagactccggttaatcgatcaacagctacggtgtgccctcctcaacttctaactacatccgacgatatatatccgaataggagattatggcgaaccagatggaagacatctcaccatggtttgatgcgctgacccgtctgcccacgacggggggtatccccgcgatgctgctcgcatctgttgagcaattagtggagctccaatataacctccgtccgagaagaccacgagcacgcccccgtgaactcgcacagcgcccagacccgttcgccggggatgaagcaatggtgtggcatgagatgaccgtggcggtgacccatctctcctcgccccgctctgtatctctctcttctcttgggtagcaggacggcc

SEQ ID NO: 128271 - DNA, 504 bp, Zea Mays
ctgtacaaatacagtctcagaatcataagggtagcattagcatggactgtagagaacatatgcaattcccttttccaaggccctggcaacaggtgaaatgtattctacaatccaaaaggggcttaacaagccttgctttggtacatattcttccaatctctcatcatgcatggggcaaggatacagcccggatgaggtcgtttcaggcgtacaaaaggctaggctttccttttcactaactacccaaaagttaaacccgtttacagacaatgtaccttgatgaagaagacaaaagacgacaataagggattcagcagtcactacttacagagcgattgtaattttgctcgactatacgtgcattcatccacagcagacaacactacacccttataggcctctgcaagtatacaaaacagctgctggatacaatgacagtgcatttaatttgattactaacactgatcttaccctcactcttgtctgcctattcataatagtcac

SEQ ID NO: 128272 - DNA, 778 bp, Zea Mays
aagtggcagagcgatgcaatggcgggtggtagcaggcgagtgcggcaccagcagcacgacgcggaggaaggcaacgcgaacagaggaagcagggtgaagagcgtgctggagacagaagaatggcatgctgctctttttatataggtgaaagggaaggagaaaggacgcccaattaatgcagatttgatggctaattgatgcgttgtgaatttccagagaaatgaaagcttcaaactccattaatggagaggcaggaaacgctcgacacagtggagaagaaacggatgaaaacggacacaggaagagcaagggcgacggatggtccaagagcagcacggagattaagaaaagagtaattgctgggaagggaaccggcacgggcaaccatcattgatggcgaaggcagaaacggtgagatagtggggagggggaaacaaccgtcgacgtcacagccatcggggagacgaggagccgagtggcgctgtcctcagcagagatgaggagcgggaggcatggaggccgacggctctgtcaagcgatggtgactgcgctcgtacagagaagacgaacgaacaaaaaaattgagaaagggtgatgacgtgtgggtcccacatgtaagggagagagaggtgagagtagtgtgtagtgtgtttcttggctggctgagacttgctgagccgattggtctttaagcgtgaggtgagttcgttgcttctcttttttttcaaaaatctcttttctttttcttttttttattttcgaaattctttttttaaat

SEQ ID NO: 128273 - DNA, 476 bp, Zea Mays
cgggcagcactcactcttttatcagtcaacaatttgtctctaaactgactaaggttaccttggtgtcagtcagtgttcaggtgcaagtggctaatggcaacattatgccatgttcccaggccttgtctcaagcaacttggcagattcaagggtaccagttctctcaagacctcaagttgctgcctctccaacattatgatttgattctgggtattgattggctagagcagttcagccccatgcacatccattggaaacaaaagtggatggttataccatatcaaaaagtgccagtcgtcttgcatggtattaactcggagcctccggatgatatccttatacaattatcttctgtatctgtggcagacaatagctctgaggctcctgtgattccagaaattcaagtcctccttgacaggtttcaacacctgtttgctacccagctgtccttgccacctgctcgaccttgtgaccac

SEQ ID NO: 128274 - DNA, 522 bp, Zea Mays
gccgactgtttttctgaattaaggggatttcctactcttcttcctcatcctcgtcaacaatacgaacaacacactcattggggtcagctctggctggattgcacccattgggatcagcatcatcaaggtcacacccattgggatcagctcgagcaggatcacatccagtgggttcagcatcatcgaggtcacacccattggggtcagcgtcagcagggtcacacccattgggatcagctccaataaaaagttccaccggcacttcttcagcagcaggagcagaagggccagcatccttatccaaacacgacactcgccgaagcctcctctttttcttcttcttcccctcgacaggagcagttggatgactagtcgggcgaaggcgctttgggcgagcaccatcagacttttgagcattcaaggttttttcaggctctatgatagttgcaacagctatggtttcagcagggaccgagtcagaagaatcctcagccaacatgtccagcataacgcttatctctg

SEQ ID NO: 128275 - DNA, 303 bp, Zea Mays
aagttaatatgttggccgctcactcgatgccgtatgaactagcgaaggagttcgacagtttgagtcttggatttctgaacaacatacaatgagtgacaatcgagttggaacccactctagagcaagacatcaggaaaggtcagaaggatgatgagaagatcaacgagatccggcagctgatcatagatgggaaaggcaaggatttctgtgaagatgtagaaggagtggtatggttcaaggatagactgtgtgttcccaacatcaaaccgatccgggaactgattctcaaggaagctcacgaga

SEQ ID NO: 128276 - DNA, 336 bp, Zea Mays
gattagttccaaacttcattgaaccggtacatgatcgtgatcgtaggatcaaatatcgacagtcatgatttaaaatacccaaggcctaatcctacgcgttctctgcaagatctatggcacaaattcctcgatcgtaacgttatcctggtaatctaatctctgccctacaccaaggatccaacggtccttggccttcttccccactgcagcttcgcacccagcccacgacgccgacccgatcacggcgcgccatggtcggagttcaccaatccccccgaatccatgaactattacggattgcactggtagaaagaagttgaccagggagaatctcac

SEQ ID NO: 128277 - DNA, 295 bp, Zea Mays
cgaccgtggggcactacatgcgtgtatgataatgatgtatcctaagtaatagtgaaccgactgaacttatcttcctataatcctaccgacttatctttatttggttccaacgtctaggggtgtcacgcgggaaaatcggatcagagctgtggataacgcttaaatccaacgagtcgcctgggcccgagtccgctcattccctgtgtcggcccattctgccagcagttctcccctggcccacgaagggacgaccttgagagacaataggcccaaagcctttcgcgaggccttctag

SEQ ID NO: 128278 - DNA, 474 bp, Zea Mays
acactgtaaatatctgaagaacgtggataaagatctgaggcacttttgaaccggatgtgctcgagtgatctggtgaaggagtcgatcgcggagagataacttcggacgtggcaccatcccgcgaacccagccgtgcgtggtcggagatatcccaccggcggtcgccgtggctcggtcacttccgccgtggtgtcacccatgcctcgttttccccttactgtgcctcttcactatgtggtaaccatgagtgaacaatgcaatctgtggccgctgatcgttagtcggaccgccgtgcctataaatagtgccatgggccacggcgaggcactcacaatttcaccagtgaacttggtagaagccaaaattcgcactgccttctccacctctccccaaattgagtgtgcacggtgaatcggtagccctttgcgactgtatagccccaacaagacctcctaattccactcgagctcgtcg

SEQ ID NO: 128279 - DNA, 292 bp, Zea Mays
atcgtgctgcctctcccattgaaagcaggcaccaccctcctctttttcaagatcacctttctcagatacgccgtgggagccgcgaggcgaagagtgcttccagaaggaaaaggagccgactcaagaattgcaacaaaagggaggcaaacaatgggccaacgatgctcgccgcccgccgatcgcatagtgacaaacctacgcttcttatgcagtgccccgctctcccatgacttcctgttcctgatggagtgccacacccgccacctacgacaggggcgaccaggggagcccc

SEQ ID NO: 128280 - DNA, 478 bp, Zea Mays
cgtcgtatggggatggagcgtggccgtctccgagtagaccgggttggtaaacgagaattgttgtcctcgccgattggggcgagcataggcgagggggatcttcggaatctttttgagggtgaggaattgaggataatgttgttcaattacagggagatgggtatcatcgcgaaggttgagacgatgtaatatgtgatgccctcgccgtgtgtatgtaactgtaatttgtatggtaatgtggcctgttggctgtattcgtatgcctatgttgatccggctgcgcccgtgggcgactttgcacggagtgtctttttaatgagagattttgattaacgcacttgttgtggtactccggctgcacccttaggcaacttttgcacggagtgtcttttaaataaaagacttcgattcacgcacttgttgtgctattcttgctgcacccttaggcgacttttgcgtggagtgtcttttaaataaa

SEQ ID NO: 128281 - DNA, 353 bp, Zea Mays
gacgctgttgagcttctggtgtggcggccatggcgaggtacggcattgtggttcaagcgttttccgacgagaaatacatggctatagagtgacgacttatgaaggacgataggcactgtgtattttacaggtgaaggtgaggtcgtagaggtgctcatcgaacccagaagctcgagtcttgacgcggctgcttgacggcgtgacgacgatgagggaccgaggcgacagatcactacgaccccgaaaacctggcgcgacctgcgtcggtttggcggtggagcgaggcgtccgcgggtctgggttttatagggtcagtcccgcggatcccgggcggaggacgaccacggactcca

SEQ ID NO: 128282 - DNA, 488 bp, Zea Mays
gcggccgccccctgcccccggtcgccgctcccgccggtgcggccacaccctttcaccagctgtgctagtggataaaccgcataggcgcgattacctcatctcatcgctacctctgctaccttacattggaccaagtcttgtgaggcttatcaagtgtgtactgcttctgctgcatcggggtaagtgatttttctgattgtttctgacatccctccccctcctccgactggcttggctgatgggttgttctctttccatggccacacacagttgccgctgttaggcccaggtccttaaggggagcgtgaggtcgttatgtatctgtctggtcgtcgatatgctggtgtttggaacccaagcagagcagccctctctctggtccccttggcatcgcttgccagtacagttcgtagtcgtcatcagcgttgttcggtagccggtccattctccggcctttggtggtgatgatgacaaaaactggaagccgt

SEQ ID NO: 128283 - DNA, 333 bp, Zea Mays
atggatcagggtttgtaggctcaaggacctaagcggtgctcattgggatgagaatacattcacaatcatccttgatgatgaacatctgctgggccatacaaaagacaacccaaaggatgctgaattcctcaatgtggcaattgaaaactatgtgcagatgcaaattatatttggagctgggcaggctactggcaagtatgccatggcctcaaatgagccccttggcaccatctcggatgtcactaaaggtgctggtgcatctgaagaaccatgtcttgttggtactactgcttctggttctgctggtgccagcccttctcatagtggtgctgg

SEQ ID NO: 128284 - DNA, 403 bp, Zea Mays
tttgaattcgtactttgccacgttcatttaatccttggcaaggaccagaagacgggaggcaggagcacagcacgagattagttccttcctccattgatttcatttcatcatacattcatactcgggctcaactacccccagccccttcgacactgcgtatactgtctcaacacacatacatgtaactgactactgagcacggctactgacggatgaccaggatcacatgccttgcttggaagccccgaacagcaagcctcgttctatctgagccccacacgaaggacaatggcatggcgactctagtattgcttcaaacgaactgtttccagagctgttcatgtttcgcactggcctttattttagctcacattttctttccaaaaggcaagtttcaccaaac

SEQ ID NO: 128285 - DNA, 526 bp, Zea Mays
gtgcagggtccgggccactcacagcaaggtcccgggattctgggacaaagaatacccaggccttgaccaaggccaggtgggggtccggagctgacacgtgtccagaccataccgcgtacgcttccgctccccgttcaggcggagacccgatgctgccgcatggtcaactgcccgtgacgtaagccaatgggtggagcgtgatgtaaggctcctgggccacgtgtcctatgcatttattgcggataagacgcgccacctggcaggcgatgtgttgccccccgcatttaatgagtcctgtccactccactgacgggcgatatgctgcctcagcatttaatgcgccctgtccactccgctgacggacggtggcccagccaccctgcaggcagcatgcctgtctttttcgttggcaggcggtacgcccgtgctgcggcatacactgtgctcatcatcactcgtacattgccagtgaagcttccgctgcacgccaatgctacacagaccgcagatatcagggcgcatggag

SEQ ID NO: 128286 - DNA, 614 bp, Zea Mays
aagcatgactgggccttgacgttgaattcggcccacctgaaggaatccctcgcgcggcccactctattccctttccctttttctttttccaccgcggcactgacgtgtgggccccctggccaagtgaccctaagcgcttgggcgagactgctccagcgtgcggacttgtctccctgtccccgctgccatgtgggtcccggtggacagcttcttcctcttcaacgatcgaccgatgtgcccgccgcgaaatgtggatggcgcaacggatttcgccgagcctgggggacgcatccgttgatcccggcgcattcggttggggaaaatgcaggtataaaacccgacagccgtcctccttgctcctccatccaaaccgaatccaaaggagtctgggctgcttggtgtggtcgttgtcccgggaggaagaaaatcgcgccgtcggtggggtctcgctggcaggccagggcgctccgcctgggtcgtgcgctgcgcgtcaggcgaattctccgttcgtgtgcgctgaccgaggaagatagagcttcttcgccgcgcgtcttggccccggcttgggacgacagccgccaagctgtgtctccgcacgaaccgggacctccaca

SEQ ID NO: 128287 - DNA, 295 bp, Zea Mays
cataacacagatgacccaggggttatgtggaataagcacaaagctagatgacaaatattacaggagagaattgaaagggccagatagatagcgacatcacgacaaggagtgaagggcaatgtttcctaaacgattgctttaagagatcaaagatagcaagcatgcatacatacacctgaccgcaagctagaaaaacacaaatggcctagatgtcgaacgttcttatctttgttattttatttatagatggcagccgcatttgttctaagattattttgtatgccataccccagca

SEQ ID NO: 128288 - DNA, 355 bp, Zea Mays
gcttgaagtttttatcgtctctagcacatctaatacactagccatcctttttctcttgggggttgctgctagatctttttgtgtcttcggcgcctccactcctgccgaagggcttagaacttctgatgttttcgtcccttcggttctcggttcttcaattttgtcagccttcggcattacagccgactcttcaatcctctgcgtaagagcaggtcctttggcttcaatagccgaagaggtctcaccgccaaattcaggcactatggccggttcaatgtagcgcggtcggtgagtaagaaccttcacctttttcctcttcggtgtgggctcgcttgaagcggctgaagcagcagtc

SEQ ID NO: 128289 - DNA, 593 bp, Zea Mays
gtcgccgtgactctttacagccgtcaaatcgtcgccggtgagctcaccacgactgaggacacgaaccgactgcgccatgatccttccctgtttccggccgccagctctgcccggccaaattgagcaccaccgtcgaagccctctataaattgatggccgggggagctgcgctatgtcatcttgaagccgtagcacccgctcccacccttaatcattcacccgagcccgtgaatttcgaacttcccccaaattcgatccctgccaccgtgaagatcagctcgtcgcggccagcttgattcaggttagctcgagtccctctgctgcttgttctagcatccttaggtaccccgcaaacccctcgacccctttaattaatttggaccgccagggatcaccgggaacacactcatctgtccgccacaccctcggttcacgtggacagagcttgatagctcaccaaccgtgcaattagcctagggaaaatgctcggagtaggtcggatttggtgtccgccactcgggaacgccagtcattgccccgttaggccggtctgctagctcgccgaagctccaccgcgctcaccgtcgtcgtgg

SEQ ID NO: 128290 - DNA, 300 bp, Zea Mays
ttccagtagcggttgcaaggagatccttttaatcttcctaaagtggaggggaagaccaagatactttccaggtaagttagcatatttacccgggaacacatcggcaagatttgaccaaagcgactgaggataacgaattgaaaagatttctgttttatcaaaatttatctttagccctgaacaaccttcaaagacttccagaatcgttttgagaactttgaggtccgacttgtctgctctcacaaacaccccagcatcatctgcatatagggaacaacgaagctttgcccctttaggcag

SEQ ID NO: 128291 - DNA, 567 bp, Zea Mays
ggtacgaccttcataagaaaagtctcccatatgaatacgggatacctttgaagtgtgaggcaagggtggaaggcacaacttcgggcattcataaatgtaaaggtcatgaagattagggaaccatacagtgctgtcttatatagaagaaatagaccaatctgaaaccagcaaccctgtcagcctaggacaattagtacacttgattctttcaattcctgagaacagattccagttagctcccccaacccactcgacaagctctggcatatcattaaactcaactgccttcaagtgtgagacacttttttctgtcgtgctatcgaagaagccaggtccaatctgtgatatgccaacaattttactcagccttagctctcttaagtgatagaactgcccaataggtggaaggttagcccacgatacgctctctagatgtagagtctccaagtttttcatgtatatggtgtcgctgctgcacaaccaactaggaccgagggtaccaccatgatttacaataaaaagactcctaacattagagtgtggttggatactatctaggatatcatc

SEQ ID NO: 128292 - DNA, 366 bp, Zea Mays
ttttgctttagccacttcaaaatcctcattcttttccgcaagctttttctttaagctttcaattttggcgctatgaacttcggactacgcagcaagattggcttcactagccttaactctgtctaccaaggaaagcaaaattttatccttctttgcggcttcatttctcagtttaataacctctgaccgaaggttaccaagggctatttggcagctttcgtcctcagcattcttctgtgcccttaaagcgttgctcaggattaagccctacaaaaatgggtaggaagaggatcagcatgatagtaaaagatacaaaaataatctgctcataagtcaacaacatctgtacctttagactattgtaag

SEQ ID NO: 128293 - DNA, 758 bp, Zea Mays
cctgtggctcgactccgcctcagcagcatgttggagggcgaggttggcctcggcacacgcgaggttggccttggcgtgcacaacctgggtctccgcgcaggccctgtccgcatcctccttttccgctgccagctggcaagcgaggtcctctttttcggcctccgtgaccgatagcttctctgtcagattgcggcttttgttctccgcggctgatttgtctcgcacagcctcagtgtgctgcgtctggaggcgctcaatcctcccctcaagtcgtagcctttcggtagcgaactccgaggtcagggaccccgatgcaatatgctcggcaaaggcggccccctggcataaaaaactgtcaaaattcgaagtcatataagaaaagcaaaccgtcggagtcaaagattacccacatgcttcagctgctgcgcaactgagccagccacatccttagcggcggcgaccgaagcaatttcgccgctggcgcaaaacctggaccaagggtcctgcaaagaccccttcgccctagccgccacggccaccgacccagcaaccgccggcgccgggacaacagccagttgcccagcctccgaccctgcaccatattcacgtcagacacccagactccgttaaaaaaactcactgacaggtccccgccttgtatgggcatcgaaaatcgtgaccccgctcacaagatagtcctccacggaaatatccatggagacctcggtcccacccactcccgtctcagcagtacgcgg

SEQ ID NO: 128294 - DNA, 449 bp, Zea Mays
gctttatacttaacttcaatacagaacctagattcagtgtcttgcttatgcacactctattgggatggatatcccctgggtcatcatggcactgttacgcttcgtgggccacctgcaaggcccccaatggtccgcctgtaaggcgcctcatgggcctcagacggatgcgaccgagaacgactaaaggagttgcacgctgaaccaaaaagatctccaaaatcgtgtcccacgtatgcagccacgtgcaggcctcgcgacgaccaactacccgtcgaaagacgtggcgcgcttctagtagaagtggcatatacgaatcgtgctctgaattgtgcgaggtgatctcttcagtcggatatataaggctgatgggaaacccatacaaaaaggttagaccttcatactgcattcatatgctaccttcagaaaccacttgtaatcctcaacctcaa

SEQ ID NO: 128295 - DNA, 479 bp, Zea Mays
gtcgctgacagtagggcccgcgtagccagtcgtctgcgccatgtaacagagtggtggccccgtgttgtcagcttcctctttccctccagtttctctttttccgtctggctgacttatgggttcgcattgtcatgcccttcttctttgtgggtgtcgtccgcgagtaaaaatccgcacgggatccacgcgatcctaacaaatcatccccagtaatctcggtggatggttgcaaccgcctcaccgtcagctgcgccaccacgcgaactcctgggttataaacgccggcttccctaactgtccgcgaggaaaacagagtgaccggggagaacaaacagtcatcactcgctatccccagttcgctgtcgattcgatctcggggaaggcgctcagggcaatgctgataaaccgtggaagtgcgttcaagactcacagcgcctggggcgtcctctcgacgtctgaattgctcgtcggagttcgtg

SEQ ID NO: 128296 - DNA, 426 bp, Zea Mays
ctccctccctggtgggtctacgcgtggtaaacaggatgcagagggattgaagggaccttaccagtgtcgattccatcttgagttccttccgcggagggtgcaatcaagcggcaccaacttcatcaattacagcttagattcaagcaccggctgcaccatggccaccactacttcatccaccccgccgtcacgtatgagcccagctgttcacggtgaaaacgcgaccacaacgaccccgcggcatccgcggccgccgcgcggatcttggtgctctgttgggcagagtcggctaccgcggaagcaggagatgaagaggggaggtcacggctagattatataggcagaggcgggcggagacaggcttgaccgcataacgaatcgctacaaatttgcacaaatcgtaacaacccaggcggcccagtggat

SEQ ID NO: 128297 - DNA, 298 bp, Zea Mays
gttggttgcttcgcttcttcggattgcggcgctgcacgcgtgtgaatcatctaggccccttagtgatgttttggtaattaatgacgactgtttgtggactaacggttcttggagaaataagaatgcagggttggaccatatagaacagaaaatcttggagattgataagcttggttgtggatcaagtgaaggcaaaggtgtaacataggttttgtttttaccggtctccaggagtttagagaagatacttgaccggattagtaggctagatagtcgtactattaagaggggtcaatga

SEQ ID NO: 128298 - DNA, 362 bp, Zea Mays
aaccaaactagaggcgagaggactcgagggtgccctagaactgaggaggcctgatgagctgcgcgaagatgtgacagagataatgcgcatatggcagctgatggcgagcatggagaccatccaatattgtatcctcgatctcacaaataaggaagtcaaccacatcaaactctaaatgtgagatcaaggcaccaagtagccatagctgaatatgagtagtggcctctctatatcccatcctgggtagcagtgtccgtctcatcagctcatataagtacttcactgtaggagtgaagtcagcaggagatcgtcgagacccatctgtgaaaggaggtctgaacagggccacgacgtgagctgta

SEQ ID NO: 128299 - DNA, 473 bp, Zea Mays
atccaccccaacgtatgtacctagagctgcaggttttcgtgtcttctttatcaacaactcacagcagccaacaacttccatttacatcaaagcaacagtgcccagcgccacttcagtgcggcagcaatggcattggcgtcctgagtggtggctgcaatgggcatactgagcccaaactacctcaccgatagccaacagctgctgacatttttaatggaaccaacctctccacacctccagcatgggacaccaaatacttcactcggagatttatcaactgcgatgaagcaaacatctacaggtcttccaggctgcaagaattcgaaacaacacagcgcatgtactagctaatcaagcttatcactacacatctatgtacactcagcatacgagggcttcttgctccaatcaggctcatgtaaacagctgtcccttggcctcgtttggttgcaccgggatcagagagggctgag

SEQ ID NO: 128300 - DNA, 775 bp, Zea Mays
cgaaataccatgactccattctattcggtacgcggtggtggccacatcataaatataggaggtgcgatcttctaagattgcagcccctcctggttcaactattaacggtgcatacaagtatcaaggcatagaggtctccatttttcacttctaatcagtagggaaacctagagcaaatgctaataaagacttgtaactaatcacctgcattagtcactaagtgatctttgagtacttggatgctgagctataggaatctagtctcaactccctagcaatgtttctcagttctaacaactctcaaatagcgtgttggatgggtatatatagcccaagcctgcgtcgactccgataggtagatgggaaggtattggatgatcatcatgtcatcactcgcccctcccatgtggcaagcgaggcggtagtcctcaagccaaatgaacaggtttgtggtcctagcatacttgggatgttggtcagaggccggaaccattaggggagctcacagtgcaaatggcatagccaaacgcccgatacctcgcatggtcctttccaatgtcatggtcacccccatcatggcttgtgactcaagccacaagctaggttggttcgttctttggtcaaaaacttgtgttgcagatcatgcgcgtgtcatggaccgtacctaagaattcacgcactagtgtgcgtgacatctagggttgctggattgtttctttgttggctcgatcctgtggacgagcgtaggaagtcttcgttcactatatgaccccgt

SEQ ID NO: 128301 - DNA, 478 bp, Zea Mays
gcggtggcaccacagatgtggtatctagcgggggagtccgctgtgaagtaggggccaggactaggacaagtcccacagccaggagccagtgaggacgtggccgatggccgggtcgctggtgctgtcgtgctccaccacggtccacgaccagcgcgtgcccttcacattgtcgcatccccctccactttctatatttgtttactagattaatgattgcttactaaccttctttgtaaccgactgtgccattgaatttggatattgacaattgaaatccacatttgctcctaacaaatgcgcccattctatatttatttactgagattaacaatcgctttttaccatactttctaaccgtctgtgcaggtttgtcccttgcactgagcaaaagcatctctaaattttcaaaaaattggactcgaattacaagaggtacgtttacataatagtataatacattgacccccctattttaatt

SEQ ID NO: 128302 - DNA, 848 bp, Zea Mays
tgccctcagcgctgttgcttctgttgaaggacttaaagtccctagcatctttgttacctcttcagttgttgacctttcaaccttatctttgtcaaccttcgtttcaactagctcaatcgaaggtgccttcggcattatagccggttcttcggccctctgcatcggaggagcggtttctcttgattcagcagctgaagacgcctccccaccaaactcaggcaccacagccggttcaatataaagtggtcggtgggtaagtaccttcatctttttgcccgcagccttcggcacaggttcagccgaggcggccagagcagcacctttcctcttcttcccttgcccccgcagcgggtagcggtagtcggggtagacgaagccaatagcgtcaaaaactgtgttcaatctcttcttttctcgacttccgaaggctgtggataatgcattatcttctgccttggaatatgatccaagcagttcatcacttgtgacttcgatgcattttagccaatcatcgttcggttcatcgaatttatccccatatctgaatgtatacttcagccggaccagttcaccttcactagacttggtgatggtctccttcggcatttcccaactctctacaagcggccatactctgaatgctatgtgctcttgaattaaatctctcataccaataaagaagcagacagtaccaaatgccttctgacatgcttcggcggcttcatcaatttcaaccttcggctttcgaaggccgaagcgggaccatatggggcgcataataacctccttgatgtcctccctcgctatcaagtcgttcttcacataaaaccattcttccatccaatttc

SEQ ID NO: 128303 - DNA, 579 bp, Zea Mays
caacaccctagaaaaacctagctacacgacgactacacaatactgatgactttggggaggtacttacgatagctcgcgcaggaacttgccccaccgacggcacacggcggacacgcagcgacgacgaatcggcggcgtccagatcgtcctcccaccgattcgacggcaagttagagtcccaccgcgacacgcccgtgcgatcagtgtagacgccgagacaccgcgatacgcagctaaaaccggagcccgcggccctatctcactcgcctcatgaagtgagctcccagcaatggcagcccctggtgtcctgttttctaggtgcgatggatcagtcgggaagggaacgagaggagcacagggagaagcaggtgcttaaataccccagcgagcaggggagaagagatcggatcataccggccacccgcaaaacctgacgatttgttacaagggaggagacgaaactggcaagtggggtccacgtggcagggagtatgcacaggtgaagctcagatggaaaggctggccacttgggcccacaaatcggcgaaacaaggcgcaacacagccgtgggatgagggg

SEQ ID NO: 128304 - DNA, 347 bp, Zea Mays
ccggccggccatggcggcgtggatgcggtcgctcttctcgccgctcaagaagctctggatccgcatgcattccgcgcacagcaagagtacgtgcccagccagtcctccgtctaccccgccgcctctgtcgttcttgttccagctagcgctcgttttctctttggtggctggttcattccatccatccgtgttctgactgcgtggtgatgagcaggaaggggcatctacatcctgtacgaggacgtcaagtcgtgcccctgcgaggacgtgcacatcctctggtccatcctcgtcgactcgtcccactcccgcccgccgccgatgcgcctagaccatcactgactcgc

SEQ ID NO: 128305 - DNA, 442 bp, Zea Mays
ccctactatgagcacttaggtgcaagataatataagtctcatccccctccgctggaagtagggccttctcttgccagaactaggataaactttgtgtcttcttgcatcacccatctagaccgggacacacatcactaattcactagttggttaggactcccgggtcaaaacaccgatagatggcacgccaggtagggggtcgctgcatgttgacaccacgttcccaccaagactctagatggacaatcatgggcaccctttgcagctcggcacggtgatctggttcgggagtctcgagttcatgtcccttggcttcggctatgacatggtgctcctcccatctagacacccatctgacgtcgactaccttttctcccaaccagggatcacgaccatgcctgctcccctggctggaggagggacatccagacctccgttgtcg

SEQ ID NO: 128306 - DNA, 1030 bp, Zea Mays
cttgaatgatatgatccactccatgtcatcatgtggacttgttggtttgttgatcgcaactccgcttgctcttgaccattgcctcggtccatcggcgccaagttcttgctcaagcttctccgccatgtgcggtccatcgtgctaaagcctctaacttgcccttcacacttgcaatctggttgtcatagtcaagtcatgtctcttgatcttctctatctagccatgtggcaccatgtcatggctcatgtgcaatgagctccttcatcataactaattgagcactatcaacatgaccaagacacctcttcaccatggcttcaagtgttgttcacactagtgtacctttggattaagcacatggtatctcaacataaacacatattagtccaggttgtcactcagttacgaaaatcaaaccagggtctttcactagcaataagatcgaagtgggcagttggctatgcaacaacaaggcctttagtcccaagtaagttggtgtgcataggcagaggctagagatgaaacccaacaaaagaatgatgaagtaaagttaaataaatataaaacagtaatatagcatcagtggtaataaaagtagtgaaggatgtttgattatcatggttctggcatgtggatcgttaattcctattcagtaaaaaattgttgcctacttccagtctttcttgcctatttttactacatccatgcaaattttgcctcatttctacctctccttgaatggcattggtccctcaagtataggtggtaaggtggattatgatgtaatgttagggtcctctagactttgtgccttagacttggatgtcatacataattttactgtggagtatgctactgtgtaggagttactttctttacttaatagataatatgtcctggagattgatgttgaaaaagatttttcactgctgcttcaatctgaggacaatgatagtaatatatggtgtatggcaggagcctcagacttacacgagttccttgctaggtcgctggtcccagggggtgaagc

SEQ ID NO: 128307 - DNA, 881 bp, Zea Mays
tcctggaggtcatggaggtccaccaccacctcctcctagaggacatggaagtggtccccctccccctcccggtgcaccttctcctccaatgcctcctggaatgtctggtggcccccctcctcctccaggtggaagagggatgcctactccacctggcggaaggggacatggccttgctcgaacgttaggcccgacattacaaagtgcaatgcgaaagtcatccctaaaaccactacattgggtcaaagtaacaagagcaatgcaaggaagcttatgggcggagctacaaaaacaagtggaagctaataggtactatcaactgcccaatagtttctccactatttaaccatattcataacgggaaaagctctgttgataaatgtcatcatgaacttaatttagttcccacatatttacttaatttgaatcccatattttttactgattgtagattctagtggcatttaatgtatgtttcttatcttattactattctaactggtaatgtggtcaatgcagccatgctgaattcgatgtaaatgaactagagtctctgtttaccattgctccaaaggcaaaagctggctcaaaatcagaaggccgtggaaaatcccttggaacaaaatctgataaagttcaactggtaatttactaagcatgatagacaagccaatagccaatcttgagtttcacctacttcctttttattaaccgctgcatggaagtttatttctttttgtaagtttgtttcccttttttttaattacttttgtagccaaccgacactgcatggcctacgacaccgcacaatagtatagtacatttaaggttatgctcagatcctaaacaggctaaactaataccaccttgctaagtttccc

SEQ ID NO: 128308 - DNA, 324 bp, Zea Mays
cacttggtcaccgacggcttccccttcagacctgcggctcaccggaggctgtctccaccggcggctacaccaccctgccccttcccctgctcgcctgctgcagtctccaccggcggcggatgtctcaaggttcaccagttgtagtctccaccctggcccttcccaagctccagcagacctgcactattgaggagatgagctcgtcatctcaaggttcctcctgctccccccatctccccctagtctgtagttctgccaaactagtggatggttgttggctgctctaatcctaagcatgtgctaagtagtgactttctaatttat

SEQ ID NO: 128309 - DNA, 381 bp, Zea Mays
gtagcaagttgatctcttttttgcgaagttgatttcttcagaatagaaactaagtaactcgggcatcatattgccgctttggaggtgatggccgagctattgttgtcgatattttacgcatttgaaatagagtccgagtgatgacgaaaccatgtcagcgtcggaatgactgatgaccacgtcggcgttcttagagctgacagccgagtgtcttgtgacattgccagcgttttttagagatagccgccgagcgacggatgatagtgtcggcgctttagagatagccaccgagtgactggagacatcgtcgacgctttagagataaacgccgagcgactgagggcatcatcggcactttagaggtaaatgccgagcgactga

SEQ ID NO: 128310 - DNA, 405 bp, Zea Mays
aaaagagagcctgtcagacaacctgtaggccatcccaaccaggcaagcctgatcaaggaacgatcctctacagcaaccagagcaagcagtacagctgaactcctggccgttaatcacgctctggcccacaggtcatgactcatcaaccaggctaaagtgcttgcctccttattaatcaaggatgcaacggtacgatcctatagaacagatcctgttcaagtaaggtcgtgctaccggactccagagctgaacttttaagctggctactacccaatcgagcgaccgaggtggtactaattggtgggagtgtccggcaaatcgtgtactgggtcgcatcctatgtgtgggctttcaggtcgagcccatcgaggctgcattagcctgacctctgtcgagcccatctag

SEQ ID NO: 128311 - DNA, 496 bp, Zea Mays
gtggaggtgtcatgtgtatttgcgtggttggagatgggccgtatgaattggactccacagcaaagtacatgggccgtagacaaacctagtttggagaggtgacatttctatatattaaacgcgagcgcaaagacgctcagccaagcatccacgtcgtctctatttttcgtagccacatgatggcctttcaacggtagccaaaggttcaaacttctccatggatggccgatttctatatattaaacgcgagcgcaaagacgctcagccaagcatccacgttgtctctatttttcgtagccacacgatggcctttcaacggtagccaaaggttcaaacttctccatggatggccgaacttgcccactgcgtcgcgagcattctaggctcctccagtactcctctgcagtatgcaccatcatggctgcttcttcgcttcccctccccttcaaagacatctccagcatccttcgcatgccgcctcctccatgcggtcgcg

SEQ ID NO: 128312 - DNA, 717 bp, Zea Mays
cctccctacaaccgctggtccgtgggaccaactggcagcctctccaccgcgtggacctgttactgtgcttcttcccctcccgcacgacgcgcgcgcgttcaaccgaacgtctctctcccctctgcaaactccgagtacgtaacaatccagctccaaagcttcatgtctcccacgcgggggtatatagggacccttcctatcgcctgctccactgcttgactcgaatttcgccgaagggaactaggaattcggtgagctgaaagatctggcggacctgccgccgtgagcccttagactcgacgccgttgtcggcaaatttgggggtgggtcgtgatctgctggtgcacctcggcgtagccagggaaaatttcggtactgcggtgacttggacctgtggtaattcactgccggacttcgaccaagcttcgaatccgccatacgccgaggacagggctgcccgctaccttcgtgctggtacgaacctcacccgatcacttgaaattacttccttgtcgtgtagatcccacccgattggagtttggacgcgtagtatcgaggttaggttgtgcacggcgatggcgccgctgtgggttcttgggtcatcttcaccgtcggtgttaggaggtgaggaagaaagactcagactgttagatccgtagcgggcggtcagatttgactccggtcccgatagcacctcgaccatggattcggagttca

SEQ ID NO: 128313 - DNA, 420 bp, Zea Mays
aacaaagtttgtagactcggcgaacgtggatgaacaggaacatcctcctaatgatgatggacgagagaaagacaatcaaggaagacctgcccctacactctacaaagccaatataaatctaacgcaatgttccaatgtcaatctaacacaatatttcgtcgcacacaatttcacgcatagcattctctctctcccacaaaggaaaattcagaaatttgcaatcgatgttctttgaacagtttacattaccatcatgcaaccacatctacaatttgatctacagtctatccatattatatatcctagtttctagggaaaacaaaaaaaccactaaaagggactggatcagacattgcaacttgtaggaggcgtatatgtggttaagtataatgacaattgaactcttatttgagctctctc

SEQ ID NO: 128314 - DNA, 946 bp, Zea Mays
ctgggagacaacggtagcctggaagtcaagccaatgctagaagacctcatatgcaaggctcaacgcctggacgcggaaacaacaagacttatggaaagagctcacaaggagcaactttcggaccttaggacagatgaacaaggagttctttggttcaagaaccgtctatgtgtaccaataggagaagcacgggaagtcctgctcaatgaagcccacaactcagcctactccatccaccgaggaaccaccaagatgtacctagacctcaaagccagatactggtggagagggatgaaaaaggagatagcacagtatgtggcccggtgtgacacctgccagcgaacgaaggccaaacaccagaaacctgcaggcctactgcaacccctcccagtgcctgaatggaagtgggaggaaataagcatggattttgtaaccggactaccccggacgcaaaaagggaatgactctatctgggtaataatcgaccgtctcaccaaggtggcccacttcattccagtaaaaaccacttttggaggagccacccttgcccggatatatcttaaagagatagtcaggctccatggtattcctcggaagatagtgtcagatagagggacgcagttcacctcaaaattttggaagagccttcagcaagctatgggcaccaagttagatttcagcactacttatcaccctcagtcagatggtcaaatggagagggtcaacaaggtcctcgaagatttactaagagcatgtgtgttgacgttcgataggaattgggagtccagtttgccatatgccgaattctcatataacaacagccatcaggccagcatcaaaatgtcaccgttcgaagcattgtatggaagaaagtgccagacccccctaatgtggtccaatgtaggggaaaggacactagagggacccgactttgttaaagaagcca

SEQ ID NO: 128315 - DNA, 526 bp, Zea Mays
tccaactaatgaaatctatcttaggccatccaacaactaaaaccaattgtatcacgtcatgtcggtccattaatcgtgttgtgcttgtgtcaacactgcaggtcgaacctcaggcatggctctagaccatgtccatgtcagcattgacactatagaccgtaggcccattgtcgctctgacgagcttggcccatttaaccatctataatgattaatagaatcatggtaaaaaaaaacttagatgtttacgagcataagcccataaccaaaataccagtctacacttagcccattaggccagaaaccattattaaggaaccgcaatcggtgaaaccatttcttgtacttacacaacttcagcgttcatggtcacttctgtcaagccagcaggcactgtaagaacatactatccaccgcaccatgatgtggacaactcgcaagagataataaggattaaagaatactcctgcaatgtattcaccgcgtcctaaaataaatgccgttatggtatttatattggtcatttt

SEQ ID NO: 128316 - DNA, 388 bp, Zea Mays
tagggtgaccaagacgtgcatgccaggtcttgaatgaatctacattctgaaaaatcactttgtacgtaacatgaggtactggttttatgtatgtgtagtacaatccgaatggaagtgaaggtattctttctagaatgttagcgccatattcagaaggtttggaaatgaggagaaattcctcattatattctgtatgagtagaaatatgtaaaccacttttccgaatatctcgaaaactcagaagggtacgagttgaatcgggatacaataaagcatcctcgatagtgacttgtgtacccatagggagcgtaatagtcgctcgtccagagccaactattttcgcatcgcgcccaacgattgtcaaaacatttcctgacctctttgtgag

SEQ ID NO: 128317 - DNA, 551 bp, Zea Mays
cctacccccttaaaaggaatcttgacctcgagattaagatgaactagggaaaaggtggggaaatctactcttagttcttctctctcctagtagcctcatcttctccatgatgactcaattgtactttgcacattttgatcaccttattcctcgtaacacaagtcaaagtatcaatgattttgatagggtactcaatataagtcagatcatcttgaacactcagttcctccataggtagttgctcttttggtaccctgaggcacttcttcaactgggatacatgaaagacatcatgtacatccgctatatggtcgggtagttcaagttggtaggcaacttcccccactcgctttaggatcttgaagggtccaataaagcgaggggacaacttcccttctactttaaacctcctcatatcctgaattggtgaccccttcagatacacatgatcaccctccttaaactccaactgccttctctgggtatctgcatagctcttctgcttagactgcgcagttctcaagttctcccgtatcatctggacttgttct

SEQ ID NO: 128318 - DNA, 396 bp, Zea Mays
ctcagatccccttaggatggccggtattcacatttcgaatcggtatgccagtatataattgtggccgaccatcctagcttcaacgacacacgataacacaccccaccgatctaatcctatacgccagtagtggatcgaacggccacgggttcaccttctacctccgacagcaccaacggcggcgccccgcgcccacaacccaacggtggcgccatggccgagttgcggccacccggcgattccggccccaaatcgaacagacaaggtttgctacgcatctaatggaggattgcgaagcacggggaagcatccatatcgtggttttgggcgtcagtggtacaatccgcggcgagcaatggatcagcggcaccgtccttactccgatgacgaattgcg

SEQ ID NO: 128319 - DNA, 620 bp, Zea Mays
tcagatccagtcaccactccacctcccacttcgccagctcatgtcactctcgagccttccaccacacctgatgcatccaccacctccaccacaccagcttccactgctcctgctcccgcttctgctccacccattcctccacctcgcttccgagagcgtgatgagactgaggtgcgacctcttgctacggatccgcgtctgcttgatcttcagagggccacagctgctagggtaggtcggttcagacatgtgcccgtggacttgtggctgcctgctcagagggatctggcatctgtgccactattcagtaccaggacccaggagtccttcttcagggcacaactgacagctcagatcgctatgagggctaaccggcgtttggatctcaccgctttctgttcagcggttggtgcagagtcagagggccatatcacttacttgccagggttatactccttgccgactttcggtggcagatatgttgaggagtgggttagagttttctatgccacagtttgatcgacctagaccatcagtggatgaggtttcagtttgagcgtgaggatgtcactttgcatgctgctcagatcagagagctatttggattcactgagtcatcg

SEQ ID NO: 128320 - DNA, 668 bp, Zea Mays
caagcacagtgcatcaaactgaataactgatcatgtagcaccagaagcagaagttgttgtcgtctcagtgtccgcaccaccattgcggacgacaaaaggcagctagaagaaactattactggctcacgaaaatgttccacccccacaactctgaaaaatatggcaaccatcaagcgcatgcatgtagttcctatttttgtacagattcaaaaaatatggcagatcatagaagtttccattgcgtgcgcgcaaattttgaatgatattctcgttcccactgcacgcaaaattagatgacagaaatcacgcaaaagcataaatccttatagaacgttgcataaatatctacacaatgcatcaaaaatgatgaaaaatcctaatatggactcaatcaatagccccttgtgcataatcaaagattggacgagacggcgctggaggatgccgctgaggccaccggatcagagaatgtcattgccggaggacgccccctgaagccacggatcaaaggttatcgaaggaggacgtccgagacacgccggatcggaggagttcgtcgccagaggacacacgaccgcaaactctcgcggcccatgccttgcgagatcaccgctgccaccgaaaccactcgcgcctcacgtggccaccgtcccggagatggccacgcc

SEQ ID NO: 128321 - DNA, 345 bp, Zea Mays
cgattctcccttggcttcagcaatagcggggtactctggctcaacagcagaagaaggcccctcaacaagcttcggcactttggtcgtttcaaaactttaaccttttttcccttcgacgtggtagaaatagctgaagcagcagcctttctcttctttccctactttcacgagggataacaatagtctgggtacacgaaaccaataacatcaaagactctgttcaatctcttcttgcctcgccctctgaaggccactgttagggcatcatcctcggccctcttgtaggcaccaagcaactcgtcgctagttgcctcaatgcaatctagccagtcatcattcggctca

SEQ ID NO: 128322 - DNA, 382 bp, Zea Mays
atgaggtaccgacaatcttggtagtgttttttctttttgggcatctcttctcttgcaagatgagcttgtggttgatacaaataagtgggtatacttaaaagtagtcatgaattgattgactacaagcactactagaaacagaaaccaccacaagttaaagttgatctgcaaaacaatgaacataaaatacatgtgaattaatatccaatatctttctttgcaagcgatcaaattcacctctcatgttcattgcaccatcttcttgacctcgaatcttggatatatataagcagtggtgacaaataaggccaataatagcttcctccagtgcattcgagtcataatgcaatttcttagagcatgatcaaaagcatccatcaat

SEQ ID NO: 128323 - DNA, 646 bp, Zea Mays
tggaagttgggctgtcagtcgtgtgttggtctgaaggttagactgacattggcattagatcaactttagaactgaattgtgcttgattgagtggaggtataagcaataaccttagaacaaaatttaagctggcatgatggacaacaactttgctatagtcggcttggtagtttgttgaatgaaaatcaaagagaaatgactctcaaattactctatcaggcactcagaattcagtttaacatgaacagtaaactgaacaagatcaagttcagtgcatccgccgccgatgttccttcgccttgattcgagctcgtgccatgattgatgtcgttgagacgtggatcgatgaagtggtaaaagatcactgggtcggattcgaagaccgagttactgctctagccacgaacaccacgtgtcctcaccgtgcttcattcaccaccaccgtggcaagccatcgggcgctccggccatccacgcagctggttgagggcctcgtgttgaaccaccgtaaagggtccatggtaaatccaccatgttattggcctgaggacaccgttgaggctaacgtggagcttctcggactatcgcgctgccgtgattcagcggtcaaattgaccatcgtcgtggtgactccctttaaattgag

SEQ ID NO: 128324 - DNA, 466 bp, Zea Mays
gctgtctttaggtgctgcagatccggacgcctggagatccaggtcggagaggctgcgttggccaagtggtggagcagatgcgtgacggaaagttgcttgagtcaaagatgaccgcgccacctgggaccgcttgctcgcacctttgccaagatggtgcttcgcgtagcagccgatgcactgatgttgtgtacagccgccgtcaggctggcggatcacagccatggtcgcactggagcctcgccggtgtgccactcgtgctggtgtcgcgatgctggcgtgggcaagtggtgttgggaaccctagcgacggatgcgaggagcgttgagcgctgaggaaacgaaggcaagggtaaggtgctcgttgtccaatcgtttgggccagtttcagtcgacggagtattgagaatgagtataatgtcgctagtttggtatggaggcgtagagctaggaaaacaggaagaggcggg

SEQ ID NO: 128325 - DNA, 426 bp, Zea Mays
ccccggaggataggatctagagcggataagtcatacacacagtaaagaaccacgcgaactcaatcaagacatacttaccgtctaacgatgagtcagtggccttcgcccatggcaagcgacggttcaggcggcgaaggaggactccagcaagcaattctcggtcacccctctgctacctgtgcacgccaacacttgcaccagctcccacatgccccgacaacgctccatggtaattcctcaaggacctagcgatggtgaaccgcgggttcgattatggcgacatgttccactctctacttcggcgttgacactctccatggagatggtggcatacgaacccagtggtggtggcgaactcgacggtggatacgtagatggtggcgggcatggggaggtgcatagttttataggcacaaggggatgtat

SEQ ID NO: 128326 - DNA, 313 bp, Zea Mays
atctactcaaccacctcccaaccaaggcggttcatcaccccacccctgcttttctctctttgccacctcctcctatgttcaccttcacgtgttcgggtgcgcttgttatcctaatctctctatcactgcccctcacaaccttgtgccccgctccacacgttgcatcgtccttggatgctcttctaatcacaaggcatatcgatgccttgacctctctacccataaagtcctcgtctcccatcacatcatcttcaacaagtcagactttcccttctacgtctccccttccgctacctcctcctctaagtataac

SEQ ID NO: 128327 - DNA, 370 bp, Zea Mays
catggatcaggatgcgccagtctcatcggacctcccacttacgggtcgggaggaaccagtcgcttcttggtaggacgcgtcaatggttggggaaggaccataagtattcaaccacatcccttttcagccaaacatcgataatagctcactcgccggcttgtatgcgggccttcccatcccctcaggatgcctagattccgaagagggagatggtccagttatcggcctagacttgtccgggctctacgatcttgagtccatgatgcagttcctgtacgcaagcgacaagttactctccaacagttcggatggctacaacaccaatgaggaaggttacgaatcaactcgggagtgctaagttcagaaagac

SEQ ID NO: 128328 - DNA, 604 bp, Zea Mays
gtggggactctaactttaggttagtctggcattccttgtttttaagacgcttccggaccttcttgactggggcgaacctctttagtttcctggcatagtctatctttagggtcctgtatgcctcacgagtgttggcttcctcgccttctaccatctcgagactattttggagggcagaattttcttcccttggttccttgatccgctgctctaggctttctacccaggagtttaggtgggtgtaatgggagaaaaggtcatcaaagtgagtgtcaagggtgtggagatatccggccatgtagattatggtggggtcatcctcattatgctctcttcctcacaaagcttggagtcttttcctccaagcagggttgtttttgttgctgggtgggaagtagcgaagggatgtctcgatgacttctttgttgtagttttggcaaaactggcagagggcttttagggcagcattttggcatgtgtcttggaagcggtggctagtagcggcgatctggaaagatggtggtttgggtagcttcggctttccccaggtagactaccatggagcacttctcaactccattttcttggtgttccttccagacat

SEQ ID NO: 128329 - DNA, 893 bp, Zea Mays
tatgttgccaaggtgtatgaaggcgctgcttgttgagttgggtgaggcttttgtgatctgtgaggatgacaaactcctggtgttggagatacggccgccactgctggacagcgaggatcacagctaagtactccttctcgtaagttgacaaccctctcaacttaggaccaagtgccttgctaagaaatgctagggggtgacctttttgcataagaactgcaccgactccgagtgcactggcgtcagtttctacgagaaaagtgctactgaaatccggtaatgcaaggacaggagcagatactagggcctttttcaatgtgttgaaagcaatatcatgctcactggtccaaataaataggctgcctttcttgagcaatgctgtaagcggttgacaaatgaccccgaaatttctgataaatttccggtagtacccagcgagccccaaaaagctgcgtaaatcgcgaatgccacttggcgttggccactcagcgatagcttggatcttcactggatcggtggccacaccttgtgcatcaataatatggccaagataagacacttgctgtcttgcaaaggagcacttagatagcttgaccttccactgatctcgagccaataattccaggaccagcttcagatgacgggtatggtcgtccagagatgcactgtatacaagaatgtcatcgaagaacacaagagcacacttacgaagtagaggtgctagagtatgattcatagccttctgaaatgtgcccggtgccccggtgagaccaaatgccataactcgaaactcataatggcctgtgtgtgtctggaaggcagtcttgtgtgactctcctgctttgagtaagatctggtggaagcccgctctgagatctaatatggaaaaccag

SEQ ID NO: 128330 - DNA, 650 bp, Zea Mays
gtccgtccatgcattgtttgtatgggagtggtgtcctcatcaccgaccacactctcatgctgaactttctatgtggtatacctaaatgacgttctcatttcccctcacatcattcaaaaccttctttatgttcatcggttcacccccgacaactcttgaactattgagttggacttgttcggtttgtctataaaggatctagctatcaggactcttgccatcccatgtgacagcttgagaccactctacacgctctgtccatccacctcctccgctaccacgtcctcctcgcatggtctggcttccaccaccacatccaccacttgccatcatagtctcgccaccctggacccgacaaatgaccaagctcatccgtagttctgatatatcttgtagcagggccattttgagattctatgtcatgcttgtcagctaggctgccatgctcatataccttttgctacttctacttcttgggctgagcagacttttgatcttgttcattgtgatctctagacatgtcctatattcaatctttctagatataaatactatttggtgattttggatgattaatctcattttctctagacttttcctgcgtctgaagtccgacacatttcacaccctcttgtacttattcacctggg

SEQ ID NO: 128331 - DNA, 350 bp, Zea Mays
gttgagctttttctcttctctggaacttggttggagcagtcaatcgatccgtggttgatctgttcttttgcagagtgtttttgctatccctggaggttggattgggtcagggaatcaagtcacaagtgctgttctcctaagtttgagaattttttagtggctcccattctcccccctctggtcgcctcaccggtccttcaataaccaataaatagcttagagagcacattctagagcccaaatgcactactacacatatgcactcaacttcaagccacgtttgagagatctatcacattcatttcacttcgcaacttacaaaaccttgtttcatccaatggttttgtaaa

SEQ ID NO: 128332 - DNA, 598 bp, Zea Mays
aggtgatgcagagataagtgctatgctggacatgttggctggggattcttctgactcggtccctgctgaaacaatggctgttgcaactatcccagagcttgaaaaaaccctggacacccgaaagcctgagggtactcgcccgaaacgtctccgctaggtcagtcatccaattgcgcctgccgaggggaagaagaagaaaaagggatggcttcggtgagtgtcgtgcttggatcaggatgctggcccttctgctcctgctgctgaagaagtatcggtggaaatctttactggagctgaacccaatgggtgtgaccctgttgatgctgatcccaatgggtgtgaccttgctgatgctgagcccaatgggtgtgaccctgtcagagctgaacccaatgggtgtgaccctgcgccgtttatggtccgtattgttgacgaggatgaagaagaagaagaagagaaagtcccattaattcggaagaacaatcggcattatagagtcagtggggggggatagcgacattccttctccagctctgtctgctcttgttggcctgcaagaattatccataacaaattttgatcaggctctcgaggatgt

SEQ ID NO: 128333 - DNA, 274 bp, Zea Mays
ggagacactaagtcctgcaaggacctccacccaacgaaatatagtctcttgcttagctttacaacttgagaataaggttgggaagaagaaagaaaccttagagcaagagcacaagaacttatcaacaactcggatcaagaacactctagcaaggcacttaatctctctagctcggatcactttgatttggcacttggaggctttgaatgcgtgggagttgttgcacttgttgtatggatgttaggtgtagctctcgtgtcttcaatatgctggt

SEQ ID NO: 128334 - DNA, 560 bp, Zea Mays
aaaggaaactttaccggtgcagtggattcgtggcctctaccgtggcggtcattccggtgatcaacggaaaggctagagggagtcacgacgatgcagtggcgaggttgggacacgcggtggacaacagcgatggcacgacggcgatgagattccaatccgagggcggtgagaaaggggaggggtatcacggcttgccggggtggcatccagctcaccagcggcgaggatctttactgggtcgtgcttatctgatggccactgcgcacgaatcacggcgagcaatgatcaacggcggcagcatgaatctatgcgcagggaggtcaccggcgacgagcgagcagcgctggcgttatgatccttatcaggtcactgtaccatggcaaagttcagacaaatggacctgacagcccaatttgaagccaagttttctcttaatttcaaatggcaactcatccagtgacctgcagcaaagttgtagagctacataccacctatatttcgactatagtgactgagctcatttgatcactagatcatggttgaattcacactcaaagctg

SEQ ID NO: 128335 - DNA, 386 bp, Zea Mays
cacagcgaaacaatattcaaatgagacgacgtgctaacctaaccagtctaggctgtaagatagaaatgcagcaatgtaaggttggacactgccatcgatgaaagtagaggaaaagatgtatgtggagtatggactcatgaaatgcaatgcgatggccataacagagaaattagagggctatccactaatgcaatgtccatagcattagcgcgtagtgcttatacagctttccaaagcatgttagcagttagctgccttatgccttagctcctaccgcagccacagaaaacaaggccacacgcatgtaatgtacagaagtggtgtcctagaaaatagtgtttagcactgctatattttcacctaggaggcagaggttaatataattg

SEQ ID NO: 128336 - DNA, 448 bp, Zea Mays
gttggatcaacggtgagcggcccggattagatcggtgtgagttataaacggtggtgcgttcacaagcgttggatcggcaaccagcgttctggattcaaagtgaaccagaataccccgtcgcccgcacgattcccatcctacggccctaatttaatatcgcgaatgggtaagctaccatctaatcttcgccctccatcaacagatcgacgacacgcgtccatccccaacctctggacacaggacccccgcagcgtcgtgactccccacggtggcgctccgccggagtcggccaaccggcgtaccagtgccccaactcgcaagctcaaacgcgctacacagtactgagatcaaggcgatatggtctagggtttccttacctggaatcgaagtgcagagagccccgcccacggtaagcggcggatgccgagctccggcgagcaattggacg

SEQ ID NO: 128337 - DNA, 289 bp, Zea Mays
ggatgtggtcgcgccgttggattccgatcccgcgatcacggtttgatctatggatttaaaatttgggtcgtcggatttggatccgagggatcacactgagtaccgattcagtaaaacccaaagtctaatctggaacgtagagctgagatcgggcggtccagattaaaagatacctcttcaccgcggcgtatttactaaagagaccctaggtaataggggaatcaacccgccgtccactgcgcattaggcctgtgtctgtgtggcttttgcgccgttgcccctgcactct

SEQ ID NO: 128338 - DNA, 891 bp, Zea Mays
cccgtgtcaatatgaccaagcacataagaaaggtcggaatccttgctgagcttgaatatctccacaccattcagaagtgcatcagcacctgaagcgctggccatggagtcagggcctagctgaagccaaagtgtgtctgcctgctgcgtcgagttgtcaaagaagtcctcatgatatgctttgttaattcccccagccctagcatacacatcgtagctctcagcagcagtcttgttattgatgtagatcttgaagatcctctggctgggcttgtcatagacaagctcacagaaatgaaggcgtactaagtaatcaaagtttgggtggacatagaaccgccacgacacgttgaaccgcttgtccacaaccatgttattgcccatgattcttgcggtctcgtaaacatcaatcggcgcaattgtcgactcgttgcttgatacatacactatgcttgaagcattagacacagtctgagcagcatttgtagaaaacatgaacgcttcgtcagtgtaccatggcctgtggagatactgatcactgggcgatttaagtgcaggacctccaatgttcagccggtacattgtctcaacacctctgcccctcaaaccaagaggaagctgcgtgactggactgccaactttgctcactgtatcattgaacaaattatctggggtcagcatgacctcaatcgcattcacaaaggcaaacgacccaggtcttggatcaaactcaatactcaggccacgagcaccgactacaagaaagtactccttgacaactgcgctggtgaccgaattgctcacagaggctctccaagcaatctcctctgacgcattgaattttgaaacaagcttgaaatcatttgccgtgacatcaaacacggagttgttc

SEQ ID NO: 128339 - DNA, 378 bp, Zea Mays
gttggatgttgcatatggtatcttctgtgttggctgctagtagtaattttttatgtttgagttacttaagatcagctgggcggtagatgaacaacacattataccaaagaatatgatacatcatacagagtgtgccttcatgggtttgcgaacaaaataaatgtgtagatatttttgagcatcgaacagtccctaaatgtcagataaggagagcaaaacaaatacattcatgttcgaactcgaagacctagatgactgcaatctaaattttaatggtgtgttcctcacacatgtgtgacatgcatgaagccaaatgttttcagtagattaaagtagcccgagcagaagcgtatactgaccttgacgagccacggagag

SEQ ID NO: 128340 - DNA, 410 bp, Zea Mays
atataatagcacacaacttttataagcattcggcatttgttcaggtaagccttatttctaacgtatcttgctaatgcttagttaaagtgttcagatggcatgtacaagcacctagctttgccaaacttccattacaagttctcttataatgtgtcttgcatgttgaaagcgatccaacaagaacaaacctcagggtgctgaatgtaatgtaaagtgatgtctgggaaactgtggctgaccatggggtgctgaatgttgttggcaaataatcttgtgtgtccggattatagttcaggtgcagattagtgtccaggttcagtctttagtggtagtaggatcttctgtggttttgttcatgctttcttcactgaggctcggtgcttaactgacatgctatatttgaaatgtgt

SEQ ID NO: 128341 - DNA, 578 bp, Zea Mays
ctttttgatttactgtttttcctacattgtgggaaaaattatagcttcataccatggttgatcgtacttttgcccaccataatatcaatgtcgtcgttgctctgctcttttctggtataatgaaagaataaaatcaacaaatggatcccgagctgtcatctacaacaattgttgtaaaggcggcaaagtctacctacctccttataggcctaggcttgaacccttattatcactggcacgatttgatggtgattcatcatctaagaggttggtgcaaattataaggcaatataactgttcatttacatttacatacacgtgtggccatattgatagaacaaccaatgatggtcgcggtccaccaatcttcaaaacgaatatgatcattattaacaccatataaaaagcctctaattttttgagctttatgtatatgatactacacatgaagttagcaatgggacacgctcgatttctcatgatgatgcttctgatatctccattcaaccaggaaatgttcatgaattattgaaaatattggatggaattatattatgttgtcttttttgcatgatgat

SEQ ID NO: 128342 - DNA, 771 bp, Zea Mays
ggggagacggtgctgacaggcggggccatgctggcagcgtcaggcaaggggggaatgatgctgacagatggggttgggctagcacagacaggaggggagatgatgcgggcactcagccatgcgacgcgggccataggtggcccaagggaggggacgcgagcatgtggagggggcgagcgcggacctctaggccaaaattgtcctggcttgagcagggcatagagaagaatttattctttttatttttcctttttgtgtataagtttttctaggtgtaaaataaattcctacaattttctaccaaggtgaaaatagttatgtgtagtgttcctaacaatcatcattcatgcatgaatatagattttccataaatagatgtgatgatgctaggtttttgggattatgcactatggttttcttaactaacctcttttgaaaaatggaatgttacattagatgaactaatacatgtttatgttgaggtacatatgatttaatcaacaagtatattgtgtgagcaactctagacataaaggaggaaatggattggacactattggtacccctaaatatggtgtaaccactcctgctgggtcaaggcgagacccctgtggttgcccgtagccaagggattactaggtggctagcctgactctggactaaggcccaccatatgaagtcgcgggctagaaggacttgtttcctaggctgggccaccatcaccaggagtcccacaaagtagtaaacagccataggactaggtccccacat

SEQ ID NO: 128343 - DNA, 712 bp, Zea Mays
cggaacgggagcttggacggcgtcggcgccggcgactcgggcttccgcttcagaccggacgccggcggctggatagcgagcagcggagggcggccggggtccgtggcggcgacggcgacgccaacggccgcgacatctgggacgacgcccggcgagttctcgtcgttgccggcttccgaggcggaagccttcgccggagttcggcggagcgcggcgtgatccctcaccattctgcggcggcgccaaacttataagacttggcaccaagaggtgtggtaaaaaaattccaaccgcacgaaacacagtcagagctagctgttgcaaatgctgggaggacgaggcggcggaggcacctgagcggggcggaggaggcggaggcggcgagcaggaggatggtgaggcggcgaatggtgctctctatcgtctgccgccgcggccgccttctgagagctgaaggagcatggggaggagatccgcgtcagaggaacaggagatttcaaaatttggatggagaaattcagatcgcgccgaactcgattcgaaccacttgagtggagtggaggagctcaggaacaggagtggcggaacaaagacgctgcagaaggcgcagagcaacaggagctgcccccggcaaggagtgttcacttctagaaggttctagaaccctccctagtccctcctctccgcgccctgtctgctgcttgaagaagga

SEQ ID NO: 128344 - DNA, 395 bp, Zea Mays
atgacccagcccccgagggtgtccgagcgggttccccttctcatacttccatggatgtccatgtcgggtcttctcctccacactctggttgcatggctgcagcacgtgcttcgggtcaggaagtcgccttagaggccggcgcacctgacgctagagttttggtttctgctggtgatgctaaattggtccccaatgatgctctgcagattgcttcagttggtaatccttcgtcaagtcaccaactgacttcccatgatttggggcttccttcattcttctccaatctccaagtaatttgtcctttcccgatctagctatactccgggtgaaatactgtctttgtacttatttgttttccatgtcaggcttaggttgacgagatggctggtcagctg

SEQ ID NO: 128345 - DNA, 309 bp, Zea Mays
aaaagatcgaggctatcatgaggatggaagcgccacggtcatagaagatagtgcaaaggcttactgggtgcatggcagctttaagcaggttcatatcaaggttaggagaaaaaggcctaccattctacaagttgctcaagaaggtggacaagttccagtggacctcagaagcccaagaagctcttgatgcactaaagaagtttctgaccacaccaccagtgctaaagccatcacgccgagccatgccaaaccagccgacagaagatatgttgtcgtacatctcttgcacgactcaggtggtgagcaccg

SEQ ID NO: 128346 - DNA, 697 bp, Zea Mays
gaactactccggcgccaccataccagagagctgaagaatcggcgccgtgtttacagaaatcacgtagggagagagaacagagagtgggatgttggccgctggcgccaatccacatgttcactgccgtcggggtctcaacacagggcttgggggattgctggggcatcccaatagtaccggtgaccttgctaccctcagagctagagctgtcgcgccgcaatttctcgccggcgccagatctccatctcagaccggcataccaccgtggcgggtgtctacgcagcataaaatccggtgagatctcgcccatagtattcgttcttatctcagcatcatttagcacctatcaatttttgatttgcgcgctgtagcgtcggggtaagctgctccggcatgggcgccactggacctggtgctcgtcatcgtttgtggaaggcaggggtagaagaagaggtgtgagccgagagccgtttgacccctatgacccctatagtatgtaccgcttcgtggaagggttgcggtggccgttgatccgaccgtggatgcctcagattggatcacagtcgttcaaaatccaaaccattgatcccagatctaacggctctgatcgcatcacgatccgatccgaggtggtcctgatcatggccgtggacttctaatctgacggccatggatgcttcgtacccttcgaccgtgc

SEQ ID NO: 128347 - DNA, 372 bp, Zea Mays
acccggcagggggtagggttggaggggcttcttccttctgctcagtctgacatccttggcttttggtcttcttgcggatttttcttgcgggggcgagcttcttcaatttcttgtcatatctttagggtgcggtaggcctcacgggtattggtttcctcgccttctgctattgcgaggctctcttgaagggacgccttttcccttaaaagttccctgactttttgctccaggctttccacccgggaggttaggtgggtgcagtggagggtgaggtcatcatattggttatcaagggtgtgaaggtatccagccatgtagacgatggtgggatcatcctcaataggatctcctcctgacagggcctgaagtctt

SEQ ID NO: 128348 - DNA, 696 bp, Zea Mays
ttaaaactggaaattaaaaccagaattcgaatttagtttgaatttttgatttggaaataaaacagaaattataaaagaaaaataaaacaaaaagggaaaacgcacttgggctgattctggcgccttcggcccaactccctccgcgcctacagcccactcaaccctctcgcattttcccacccgcagcgactggccttcggggcccgtgtgtcggccacttgagtgccgcaccgtcctatctctctctagcgcttgggacccacttgacaggtttccttcttcctcgcgaatagacctgaacaaacccggtcacactcgctgacccgcgcgtcggtgccgtgattcccgggaaagtgctccgtgaatctctctggatggttgggatccgaccgcgccttggggctatataacctgggctcccctcaatcgatcaacagaagaacacccgcgtcgtgtgccagggcgatacgcaaaggagggagaaggaccgccgtggtgtggcctgcgcgtctgctagattttggacctcgggtttccactccgagcgatcgtcgcagctcgttggtggcgtgtgccttgttgattcgggcgaagatcaccggattcgcgtgtaatttctcgccggtgtcatgcgcaaccaccgtgcaatggcgctgtgtggtcagcgacgtctatgccccgaattgtgataaggat

SEQ ID NO: 128349 - DNA, 301 bp, Zea Mays
ctcggcctccccaaaataacccaatttcttcatcataaccatatcgtctgctgtcacagtagatttaccaaactcaatatgactgggtttcgctgggctcagaatagtgtaatcctcttcatcttcgttctcactcccttcaactgcaatttgctcagcttcagcagtcaaagtaccttcgacaacaggcccctctggcacaacaagacccgactgtctcatcacttctgatattggtgctgtcttagttgcttcagcttcgtctccctcataagacactctagcagtagatcgtactctg

SEQ ID NO: 128350 - DNA, 404 bp, Zea Mays
ctcaacttttcttatgcttaagcatttagttccctatagagggactttctctgtgtggattaagacaaaccatccttgcaaagaggatgggtctgtcttacttagtgatgatcattggtacattgctgagaagatgttatcttttcttcaagtcttctatgattcaactgttgcactgtctggtgtttactacccaacatcacctttaatgctacatcatatcttgaaaattgctagacaactaaatgtatttgaaaatgatagactgcttagagaagctattgttcctatgaagtcaaagtttctgaaatattggagggatatacccattctctatgcttttgctttcattcttgaccctagagctaagatgagggggtttcacaaacttcttctcaggttgt

SEQ ID NO: 128351 - DNA, 2637 bp, Zea Mays
caacataattccagtcacattggagttaatcatccatggataaaatcgaaggatcttgcaaatagtaggggaaaatatattgacaaattagaaggcaaaaaaggagggtggacacacagatccaatcatagtagcatttttgtcattgtattcttttttgaggtagcaataaacatatcacacactggtgaatcaagtgatgtgatttgtatgtcgaacacctgaactttaaacctaatagaaattacttgttgatatctgtgtgcatgaagtcctaacatagctacatgtgttgactgttgaccgttatacaacaaactgcataatgtttgttgactaattgcaagtcaaatgaattaaaagggaaaaacaggcaaacactgagattttttatatgaaagcagcgtcaaagagccaacctgctaagagctccaaatgtcctgtcccagaagcacgatatgcaaccaaatcaccaaggagtcttgcaacagaataaacctcatcttcttccaatacagttctaaattagtaaatataattatcagctcaaataactaaactaatattggagttccaaggtgtaaaatcattggactgccacctacagatattttgcacgtcctaggcagcacaaagcttctcggattccatggtcgaacacttccctgtaatgagctttccatgccatatcatgtgttgcataaaatgatcgccacctcaatatatcagaacccgtgaagcattggacaatgatcacaacccatgaaaggataagaaataaagcaataagtgctcgtactgacacccgatcagctttatcctgtcctagattataaaccatccaaacgacttattcaatcccaagtagatgagtggattagcacagcagaaaataaaaccttaggatagtataatgaaatgtgtatactcttaagagttgttactagattgtgttaattaactatgtttcagtgcatttattgaagcaaaatctgctcaaagtgagagtagttagcatgtttgtggtacattcactaaaaaaatttcatatggaacttcaagaaaagggtgctcgaaagtttttcccactttatgtgtgtcgttgtatatgtatgaagttcatgtgattgtaaactaccagcaaacaagaacttgtaaaaaattatgtacaaagttaggaaataaatagctcagaatggcgaccaacataccaaagaagcaggaagtggatcttctttcatttgagagatctcttacaatgacaaacatgagataaattgctgcaaccaactgcaatgcaccaactgccataccaaatctggtccaccacaaccagcgtttgtacctcaccttttcagcaagatgaaagaagcgatgataagttagcaggaattcctaagaaaaaatgaaagtagaaatgcaacaactgcatctaaaaaatgcttccatcattatccccttattttactgttcaattcatctctttttcatcctttttgtttcctgtcttcctatatgccttactaccttcgcaaaatccaaccatgaatatttacttttcaaggattccttgacatgtctgaactgtaaacagagtgctgctatattaacattggttttgaatatttgggcaggcatacattgttaaaaaatgcaacactgaatgacactcaaatagatgaaaagacaaggtcagttcagagtacagcaagaaggggttatccacactttggtaatcgaggcatctcatagctcagggatggaattagaccgcatgaacaagcggacagttgaaagggctaaaatggattgattccaaattgatagacaactacctcctagattacaccaacaaaacaaaattgatgcaaatggtagccatagacctatatataaatatgaaaccaggtttccagtcatagctcgtataccacaccaaacaaaagatgctttgatccgatgaagcttcctgccttgaactcatagtaaaaccaatctatgccatctcaataggctcattgcgcttaaccacatagtaaaaccaatctatgccatctcaataggctcattgcgcttaaccacatatgttccgctgtctgatcatgtgaatcaaataagctcccatctcaacttttttgtacataaaaactaattttcaatgctagggaagttgcttgtagtcacaacttaagccatagacatatcaatcacactgtgtttgcatcaacgagacaacttagacagtagcagctcgagctattgggacatgagcttgtgtaaaagcagcacaatctaagctaaaccgttcgccaaaccagcttgaagccttgaaccgaccacatctaatctaaccgaggcagaaagtagagctctcaccctaatctcgtggcgagctacggcatcagctgcgacagatgcgtcgctctcgtggaggtggcgcttagctatggcgtccgccgtggcgtgctgcgcgcgcgcggcgccgatcatggagagcacgcggaccccagccagagcgggcgccgaggcgaaagcgagccccccgccgcaccccgacgggagcacggcgtcgataatgtagagtccgagcagcagcaccgcgaggttgagcccgcctacaaggaaagagaccacccg

SEQ ID NO: 128352 - DNA, 491 bp, Zea Mays
ggagcatggccgtaaagcacctcagaaggagaacgtcccaggaccgagtggtagttggtattataccaaaactcggcgacagcaagccaagatgaccatttgcctaggcataaatgaacaaaacatctgaggtagggttcaatgcactggttaaccctttctgtcttgtcgtccgattgaggatgataggccgagctcatacacagctgtgtgccggataagtgaaagagctgttgccagaaagcactggtgaagatccgatccctgtctgaaacgatgctggagggcataccgtgcagtttgtagacattgtcaaggaaaagctttgccacttttgcttctgtgaagggatgagccagaggcaagaagtgactatatttcgagaatctatcaacaaccactaagatacaatccactgatcttgacttcggaagtccctcagtaaaatccatggatactgagtgccaagcctgaggtgggactggtagagg

SEQ ID NO: 128353 - DNA, 407 bp, Zea Mays
cagatatgaagcaaacaggggaacctgctgccgcttcccagctgtctagagttttgtcttttccataattcaggaacaaagctacatatgcaacaagactggtgtcatttcggaaacgttcgttatgccgattctgatgacgaacgaaccaacgaatgaatgcaggcaggcaacttcagttttagctgcagaaacgagctaataggcatcttgtgcttccatatgctagcttcaaccaatgttccagcagagtaggctcagactagctcaaaaacaactttagtatgggctgggtgtgggcctttaatgtactgagtttattgagaactgggctgtgtcgttatgggccttgagtctttgtcgaaatgacttaacatactaccaattaatatggtttagtccattct

SEQ ID NO: 128354 - DNA, 605 bp, Zea Mays
ggctaatcgagggtgagggttggtgctctggcttcgtaacaatctagcggaacaggttgaggcatcaatttatagtggacgaccgtgagaagggtcaatttgaatggagaagcgctcgcggtgagaagggggaagagtcaccggagttcgctaacatggcgttcactggttgacggcctacggtggtcactgccaagtcttcatggcatgcgacgagtcgtgagatgacttaaggcgtgtcacaaccgagtgagatggcggcacaatggcgacggtcgcgcagccatgtcgctggtgcaagtgggtacggcgacagggcaaaacagtgccctaagttcatcctcggtgaagatctttttactgccgatcgtgatccacaccacagagggcacgaagcgcgggcgtcaccagcggcgagatacactttatctgcaatcttgttcagtaactgtaccatcgcgaactcccttcagggcgcctaacagagcaagtttgagagcgatttactctaaaaatcgttcagcgcctggtcaagcttggtataacaaagttgttcactaatgttagagcttcaactttgccacagtgaccctggttatttgcac

SEQ ID NO: 128355 - DNA, 2062 bp, Zea Mays
tcagcagcttcttgtcaagaatcttctagtttgtattttctccaaaagatttttctcaatatgaaactaatttttattgccattctatttttgtagatgtcctatgaacctaagaagagcttggggtaggaacttaaactaaaaatatagagttgggggtggggtggcaagggctgatgagaatgtgattatccaaagtaatgaaggagagcaaaaaggaactgaaggagaggatgaagttgataaggaaaagcatgccaaaaaatcaatggcaccaagatctgaaatgcgggaacacttcaaaattaaggatgactaaggtgtggggaagaaaatgaagtgcaagtattgctaccgtgctattagagcttattcttatgtcaatggcactactgcaatgtggaggcattttaatatctgcaagtgtaattcccataagaacaataagctagggtccaaagcatgccaatttgaaagtgtgccaatgagaaggtgttagcacttggaggtatgatcctgaggcaataagacaaggttttgctgaaatggtcatagaggatgagctcccttttatgtttggtgagaagtcgggatttagaatttttttgaagatagttatcccacatggactccaccatctcaaaggacatgcataaggaacatagttagaacttattttaatccatatatgttgtttctatttgctagctgctaatctagcgtgaattgtggagtctacttcaaagaacttaatgctatgactgtgaggcggagggcatgattgcctaatggagtgagggcttgaggcagtgaagtcgagtcttcaacaactttccaatgatgtcctcctgtccctgatgctacattttattgagtaatgactaatggcgtattaaattaaactaatgttgtctaagtgaagacttatgtctcttatttgtggctttatgacttgtgagactaagttgttagcttgttagtctatgtcaaattgttgatcatgcaggctacagctgtacaattaaattaaattatggttgtgtctcagtaaggactggtcatatttttgcttgtacaattatacactttgcacatgtttatgcttgctgctagcgccctggcttcatgaaggttgtagctcagtcctaactgaagcctgaaaggtacgggctttgctcacaacaagcatgtcgtcatctagcaggctagcagctaggctggctagcacccactactcaggtggctagcttgcttgttgtttctcggttctgttgggttaagaccgaaaaccgaaccgatattttagctatctggtctgttggtttttatttgctgagtcattaattcggttctcatactatacaaattgaaatttaaagaaaccgaaaagaccgaaccgaattctcggtttagcccggtttagaccgaacgcccaggcctactcataggcggtattctcaagcaatagacaaaaaataggcagttgaatgcatatcaagcagtgttgatagcttcagcccaaaacctctatagtgtattgttctcgtttagcatggttttagcaaaagtgatcaatggacggttctttctttcaacaacacaatttttgttgatgagtgtatgttatggatattcatacttgatcccaacttcatcacgatattgttttatgtttgtgttgtcaaattcctgcccattatctcttttttcttgattttcacttcaaacttgttttgtgctttcttgaaaaacttcttgaatgttgatgcaactttggtattatattgaagaaagaacacccaagtataacttgtatatcgtcatctactatcataagacaatggaggttgtctcccacatttgcatatgatgttggttcaaataagtccatatgtaagggctctaacggtctcgatgttgacatgaaacctctagttcgatgagtgttgacaacttgcttactagcttaacatgcactacaaattttatccttctcaaacacaatatcttttaaacctctaaccatctctttattcaatagcttttttagtgtactcatttc

SEQ ID NO: 128356 - DNA, 604 bp, Zea Mays
atttaggtcatggaccatcaggatggagaaactgagccatccacaatagtataggaccatccaggcaaagacgtcgaaccatccaatgacaacagaggcattaccttagttgatttgattaacaatgtgaccgatgcagttgattggagaacaccttgattgtatacctatgtaatccaagtgttaggacgaataggaatattccacggagaactttgaagtatgttctaattgataatgaactttatcgtcgaactcctagtgatgtcttccttaagtgcttgggccatgatgatgctatattagcaatggtcaaagtacatgaaggaatttgtggtactcatcaatcggctccaaagatgaagtttcttttgaggagagttgggttttattgacctgacatgatagctgattgtttcaagtattacaaaggatgtcaagtatgtcaaaagtacagtgatctgcaattagttcctaccaatgaacttcatcctattatcaaaccttagccctttaggggatgaggtttggagtaggagaaatccacccttcgtcaatgaaaggcatcaatttgtgctggttgccacagattatttcaccgaat

SEQ ID NO: 128357 - DNA, 479 bp, Zea Mays
attataaaagacatgcaaagtaacatcttgtttgttcttgaattacacacgtattgtactgtaagataatactccctcctttctaaaatataaatgcagtttgtatgtatgtctatattcatcatcatttattagaatatggatagaaagaagaggtctaaaaaaactatattatatgtgcctacctagactgctagcagtaagcataaacattataattgtaactattattgtttaatagtttatcaattattggaaactattccctgaacaaataacacaacagttggcttctaatttcacttcaaattatattatactacgtgtaaattttataaattctactatatcgaaaagtttgtacattctgactagaatattatgacatatcgaagagaagatatgactgcacgccgagcatggaaaaccgaggacgatgctgtggacatggcagtggaagagcatagcgtggcaccata

SEQ ID NO: 128358 - DNA, 659 bp, Zea Mays
caaacgtgggaggcttgagcctcaggaaatcccccattctgtcttgcggtcttccaccatttggtcgttgattgtccaaacttcgagtgaggacctcgatgagtcgggtttgattggctagaacttgggctagatctaagggtaattgcggaggtgcggggaggtgggtttcactttcctctctaatggcttccccttcagctctcaagggaaaccctgctccaatcctggaggcggtaggcgtggttttatccgaagccatctgccaggggagagagtcactatcatgcacatgccaattgttttcaaacaagccattttattcattacatcagtgcattacaagcatatggttacgacaagttgtactacacgagagcgttccctgaggtactaccgaactctttctctaaggtatccccaaattccttgagaagatcatcaaggcttgctagggatatatcctcggtgtcaggccaatcatctaccctggggggaggtggggctggaagggtcttcttcttcttctccgtttggcaccctcggttggtggtcttcttctggattttcttcttgggagcgagcttctttagcttcttgtcatagtccatctttagggttcgataggcctcacgggtattggcctcctcgccttctgc

SEQ ID NO: 128359 - DNA, 336 bp, Zea Mays
aacaattatcagatgtgataagaggacaattaagttggtgtccccactaggagaataagtggtagttcagttagtctcacctgagccaaggaaaggaggttgtcatcagatggctattgatagtagtttggcaggttcactcgagactatcagggttgtgttagagtttccggatgtgttcccgaaagatttaccaggtatgccacctaagcggaaagttgagtttgacatagagcttcttcctggaaccgcccccatttctaaaagagcttacagagtatctagaccagagttggttgaactcaagaagcagattgatgagctgtcagagaaagg

SEQ ID NO: 128360 - DNA, 625 bp, Zea Mays
aggtcggagtgctcttgacgcgtaggtaataactcggttgtcttgtatcaaaacacaacctagtccagtgcctgaagcatcacaatacacatcaaatgatttggcgttgtcaggttgcgctagcatgggtgtggttgttagatgctgcctcaaagtctgaaaggcctcttcacatttctgaccccaatcaaactttactcccttcttcgacaactttttcattggcttagcaattctggagaagtctggaatgaatcgtcgatagtatcctgccagtcctagaaaactctgaatctgccgaacggtggtaggaggcttccaatccatcacctcttgcactttctcaggatcaactgctatcccgtcctgagaaattgtatgacccaagaacttgatctcccttagctagaaatcacatttggagaatttggcatacatgtgatgatcccgcagtcgctggagcactatgtgcaagtgctttgtatgcttgtcttcacttttcaaatagactagaatatcatcaatgaagaccaccacgaatttatccaatttcggcataaacattgaattcattaaatacatgaagtatgccggagcattggtgagcccgaatgacatcaccaaa

SEQ ID NO: 128361 - DNA, 539 bp, Zea Mays
cttctgtgagctatatcacacattttcatggacaaacaaccatgaacattgttgggggagggccttcgtcgccgaagggctccgagatatcaactttgtcaagaaaagcaagtttcaggtaaaaacgttcatcttcgtcatcgaaccaaagttgataaatggatgaagtcaagaagagctgaagccgaaggaggaagcttcgggtgatacgtggcgacctacgaagcagagaagaaggcagagactgtggaaggcttgatcaacaagatatatggatggaaaagtacaatactaccctcataatatttgtagttcatatgtataaggtttgatgacatgtttgtaatttcagacgaagttgtacatcgtggctataaatagaagaacggtgccatgcataagcatgcattttgatcagagcgatccgagttgctccgactacaaagttgtatacttcctttgctttcacttgtttgagtgtacaaccaaaggtatacttgtaatcatttgatatattgtaaagaacgaaataatgtgct

SEQ ID NO: 128362 - DNA, 1467 bp, Zea Mays
ttactataatttttttattacatcccatgctaagatttttgtcgaagcatctaaattgtatttgaaatttaaaaccaaatctgaaattgaatataaaattaaaaaaataaaacataaacaagtagaaaaaaaagaaactaacagcacctgtttgttttcccagccggcccacacccgctatggtcatgcacgacatgtgcatggtgtgttttcgtttttctttcttttatttatcttattctcttttctctattatttattcctcccatcacgcacaacgtcatgtatgctttctccaaatcgctgctcgcgatggccgcgcgggagatcctgaaatcacttgcgtcgatctcgctcgcccaactgaatcctcaccagccgcctagaaccgcggacttgaccccgcgcatgcccggactctcccagccttatataatccgaccgctctcgattaaccgtgccgtgcgccattgacgaggagagagaagcggggaccaccattgatgcatcgtgagcgcaggagagagagatgcaagaagagagaaaatagagctgggccactgcgagggagtcctggatcaccatcgatctgagtcaagcacgcggccagaaagatccccgacgagaataactgaatgcgaggacctgggatttgttcatcagcgattgctgctgctgtgtgtccgcccctcatcgaggcctcctctaaccgtcgcttaatcacaggtaaaaagtccctaaatgcattcgcgacaccttaatcttcgtgttcccgtcggtaattggatctgcgtgagcctgcgtactagtttggtatgtcgccgtggagtgccacgccgccgggtgtgtcgtgcgggccactgctgctgggggctgagaaggaagacgatgggagaaacgtcgatttctggtggacggctcagattgaacgctgcgtacaccccttcgctggtttgatctgagcggttggttccgatcggacggacctggtgtgatcacggttatttaaaatataggccgttgatctggccagggacggatacgattagactggacgcttacctcttcgttggttgagtatgtactgttgatctatgatctaacggttgtgatgcgcgcggggttaggcagccgagccagctttacgtaagagccctcgagatttaaggtaataaacccgccgtccatttttttagtataaagaaagtaaaattaaatgaagactttgcgttttagcccatggggtttgtttttaggcacaaaattgatacaaatatgcacaaaagctaagaaaatccatatcttgctcatgttaactcctttttagtccgttcaagttgcgttagcttcgtaataaaattatctacactttggtaaccttattttatcatgaaacatgtttgtaaataattaatttgtttaccctatgttcattggattaacttctttatttaaaattaaagtaaa

SEQ ID NO: 128363 - DNA, 370 bp, Zea Mays
tcaatttctcaccggagccacgaagaccgcggcggaccacgcattgtcgtgggcagcgtccctggcgccattaacccaggtatgaaggacctcctccgcctcactttggtctctgatgtgctccgcgacaaactaatttcgggattggggcgtgtgggcggcaatcgcatgggcgccggtgagcctccactgtgggcgcaccatctccgccgctctggtggtcgtgaggtggaaggcctcccatggtcgttagatttagatagacggtggagattagacatgggaatacctattgggaggataaaccagagccgtagatctagatccaacggttgtgggcctatatcggttccaagtcgtcccgatgtga

SEQ ID NO: 128364 - DNA, 535 bp, Zea Mays
aagatgttagtccacaataatatgttgagcatctaatcaccaaaacaactagaaatgccccaacggcacatttccctttcatgcatccatggtccggacgaagtttggtgacgacgcatcttgttgtggctgacgtgagtcaacagtgtcctccttgttttcataccagtgggtacaagcatatctaagtgaacattgggtgagtcacaggtggtcccaagagccgggaccacgggcgtgcaacaaatcacaacctggtcgggacctccacctcgcagggttgctcggttaggacttggttgtccgctcgcgcgtcgctgggttgctcggcggggacttggtcgtctgctccaccttgtagggctgctcgaccgggacttggtcatccgctctgccttgtatgggctgctcagccttgacttggttgtccgctccgcctcttttggttgctcgactaaacttggttgtccgctccgcctcatagggctactcagtcgggccttggtcatcctaggtgggttgtttaaggatcatg

SEQ ID NO: 128365 - DNA, 530 bp, Zea Mays
aaccatgtggcctcaatgtgactaagccatataaataccttgcataacaatgttagtcacataaccatgtgatcagtagccaccaaaactcaaaatgagataatacagaggctcacatggttggcgtccgactacaaatgggtcaactaggctcattgcatctttgccaatgattaatagcggaggatgtcatcatcattcccaccttctcaaaatgggaaccagatgatgcactcaacctaggtggggtttgccgaggcccaacaaattagggttgtctagactccaacagttcattatgaacaccaacttaaggagaggtccaatcgccccaaaaatactagtccaatgggggaatggtggttgacccttttaagatggtttcctcctcccaaattaagcgagatggtataattcagaggctcacatggtcgttgtctaactacaaatgggccaactaggtcaattgcgtctgtcaatggttaatagtggatgatgtcctcttccatgactaatatatcttatatgtg

SEQ ID NO: 128366 - DNA, 545 bp, Zea Mays
tcatgattgaaaattgatgtagttacgtggatctaatgttctataacagtccatacaacacgaagtatcacaaggcacacagaacaatcctataattcaaggacaccacatctacggggaaatgaattttgcataagaaaaaaactgatactgcaattctacaagttcatgtggatgtctatccatgcatcccctgtcccattagccagttatatttgttgaatattcaatcggttaacctacacggggaatcaaatgacatttcacttgttttatttgttgaatattcaagcggttaactatccaactacaccctacattgcttctcacatgttctttggatggctagaaggatttagtaaggaattccgaccatgttcggagcagctaggctctttagaccacttaagtggtgtttatttttaaaactattggaccttatgtacacaattaatttctacctacttgaaaaaaagttagccctcacaatctcattcacacacacagcaacaccagagggagccacacagtcacagaatcgatat

SEQ ID NO: 128367 - DNA, 684 bp, Zea Mays
gggtattgtggtgacgcgcttatgcggtggagttatatgtgttggctatttacccataattttgatctctttttattgttgccatcaatagagttaattgagtgtagtagccattcatggatctaagaaatatggactttaaaaactattgtgagcctaaaatagtgtggattttttttaaatatgtgtatttatcgatattttatctgttgtcttcctccatcctctttgttgttaaaattatgaagcattaaagtaagcagatttgttcgaagtgacatcaatgtcgcctgttgctccttggggaattgtcacgaatgtaggaggacaatcaccatatggggatagagatggcaatgaatataaacctgacaggtaatagcattccatacttgtatccaccaaaaaaatatgttcgtcgagttgcccatatacactcacaatatacaatcttactcgtacacataccccgcgtaggtaattttatccatcgggtagcccgtaccgctagaaaaatcttaaattgtaatatgccaatcactcagaatgacaaacaaacatataaaaataagttgaacttcaaatataacaaaccacatgactacataacttgataattaaacaaataatattcgaacaaggggttccttctagttaagatgggctttattagatgataatatt

SEQ ID NO: 128368 - DNA, 549 bp, Zea Mays
ctctgtataaacttcgagtatcttctctgttgtctgttccagtcatgttgacgagggtgatcagggggtaaatgccacacaattgctgcataacgaacctgtacttgttactgtaagtggtgatggcaggtgagtaactagcccaatgacgtacacattctgtcatcaatcaatctgcatttaagttatgaaaaatgcttaactaatttaatatgcttttagtgttggaatgtgggacgttactttaggtcaaccttgtgtcagacatatcgttgcccatactcgacgtgctaatgcggtgagcctatattgtgatattctatctgtggcacccttcatcttacctcttctgatattgattttcattgtataaattccaggttgttgtggcccttaatgacaaatacctctgcacaggaggaagcgaccagaaagttgtgagttgcttatttgtccttttagtttcttatgtggcttatgttatgtcgtactggaaaaggtatgtttggattgttttgttggttaacaactgaaatcagtagaaatgca

SEQ ID NO: 128369 - DNA, 492 bp, Zea Mays
cgagcacgttcaccttgatccctagctcaaatccttaagccccatttgacaaagttgtgctaaattaacccctctacaacatgtgcgaagatggcatcaagattcatgccctagacatgtcaagtcagggatttcatctcgaatttcagcagtgagacaaacctgatttgatcaccccatatctttggctccagtaaacaaaacccataagccgccacacataaatgacaaagaaaggtccagtgaagagatctctcaatgggatcatggccataatcgctaagatttggagccaatccgcacttgaacttgaccattctctgtgctgcctcatgatcgacgtcgtgcccaggcgctagagcgcgcactggcgttccccgcgcacaccccgagcgcgtgtcagagccacccttagtcgagctcgtccgcacccttaaagaccacccccgggcgcacaacactccactccacgcttaccctcgctatcccgac

SEQ ID NO: 128370 - DNA, 633 bp, Zea Mays
gcttaatatgctatttttcctatgttccttgggctaaatctatttttgtaaggttttagagataacgagctcttaatgttacatttgtgtttgtcacctcatgctccgtataggatttatcctaaattttttaaggtcactgatatccatggtttgaaaaccttataagttatttattggacttctctaactaactatgtttgaaaaaagatgaaattgtcttgacgagtgacgaccacctctaagcggcgcaaggaggtaactctcaaatggttttaagagtcgatatggttttgaagttttaagagggaaattagacgatggtgctagttcgataggtaatatatctctactactctataagttcttattgtaggcgtccacaccacattcatggtgcacggttctgccctgcagtaccttcccctcctagaaccttccatcgacgccgctccctgaattcctccatgccgctccccgaaatcctccatgcccccgcgcctgaaattcctccttccccttccagaaccttccatagacgctacgccgtgatcccttccaccggccattcaaccatctgcttccaactcctcggcgtccaagttgtccacaagcacaagcagggggctcttc

SEQ ID NO: 128371 - DNA, 438 bp, Zea Mays
aggatgtcagggatactctggtgggtgtagaacacgttcatcgaagctctagaatggtggtgtggaaagtggtgaggagtcaagataattctgttggctaggagcttggagtgtggtgaggagggggtgaagagtggctggttttataggggtgcaccattgattggaggggagaagacactgtgtgtgcagcgcggctggtcgtcgttagaatgttggcagacccgctcggggttaatgaatgcatggagtctccaccataggatgacgcgtgcaggggcaacattcggatctcgtaggggcgagatcagcgaaagggaaattgtcgttgaaaggaggatgcgagcgaaaggtcgaggttgacatctgagtcccgcgtgtcagagggagagagggagcacatgcagggttttggctgaacagccagtcccacatgat

SEQ ID NO: 128372 - DNA, 487 bp, Zea Mays
aattttctatgaattattgaagttctagcactcatttctataataaaaacctaaattctaattcatttattcattttatcacgccactggactgggcctcaattctggaaagtcaagggggcgcctgggtaaaatttataagacacagggaacaacgcataggatggcgggtttattatgccattccctgggggtctctttagcaaaaaccacggccgaaagggtatctttcaatcagagccgtccgatcagaaaccggccgccagaattagcccacgctttataagaatcggtaaacaatcctgatcggtggatcgggatcctacggttcagatttaccatacgcagtaactcttccacgctcgcttcccgtccgccagatgcggatcgaacggcgccgaacccattacgcgaatcggtatgcagatgatctaatcgcagtcgttgctggtcatccaacggcgcacgatcatcgccccaacagggc

SEQ ID NO: 128373 - DNA, 308 bp, Zea Mays
gaacctacctacagtacctacctatccatccattccattggcgtagcggacaaagaaaggaacaaacaaatcagcgaaagatgcacgtgtggcccacgttggtagggcaagattggagtgccaagtgtgctttccaccgtggacctgattttggagtaggccgtgtctcatccttcaagacttcgcataataaatcttgtctgctctataacatgagccgattaattagctgcagcactgaaaagaaaccatcttgtttgaatccagtaaacaacacagtcatctgatcgtcataaaatgatataatc

SEQ ID NO: 128374 - DNA, 290 bp, Zea Mays
gggggattttttgcgtgtatattacatggctccacctcattaaaaacctcacccccgggaggaaaagagtgcgggccggaaaaaagctgttttgtgaattacaagggcgagctggccctgaggagtcaaacaaaaaatttgcggagattgtcaatgttccaagaatgctctaagtccttgccagatggcattgttagcctgtacgcgctgggggacgccttcgtcttgacgatgaaagggccctcccactttggctctagcttgccccgggactctgtccgagctgtccg

SEQ ID NO: 128375 - DNA, 356 bp, Zea Mays
gcataacacattctaaaaactcgacccaagaagattaaatgacaccagattgacactttaatttgcatggatgcaaggaagaaacggattattagtacaagaaactaattgagagggtagaatataaaaaggggttgacatgcaacattcagcatgcgtccacttgcaaaaaccacatgataagtattctccttgctttgaaccatacgaacaccacaatggaaacagaaacaatgaccttgcagatggtaattgtccacccctaagaaaactacacattgtgacatatacccagtttaattaatgtacaatccaacctgctttccactatatgtgaacacgaccttctagccgtc

SEQ ID NO: 128376 - DNA, 406 bp, Zea Mays
ccggcagcagcagcaggaccagcagaagggccagcagagatatgtgcatgggagctggaaggagctttcctcaagcgccctgctggattgttgggatcaatccagaaaggggtataagattgatgtcttgtcctttatcatatcaaaactgcgtcacaacttcaatcatcttcatgataaaaggtgcatgaagacatcccttcagtggaaagcaggcaacatggatgatttcctgccagatcatatcaaagacgttgatgctctctgagctgctgggcttcatgaatgagagcaaaaccttgctctctccaagaatattcatctggttaccccctttaggaatgagggtcatcctgctgagggagttgatgtatctgtaatacttgtgcatgttggtggactccca

SEQ ID NO: 128377 - DNA, 329 bp, Zea Mays
ggaaaattttcggggaagaaggtagtggatctggactcgattttggaggaaggaagttcagggtcgggtatattccaggggctgggtttgggtgacgagttgcaggagggtttgggagaggaggaagttggcagaactaggtcgcagccagaaggtgtgccaggtagtctgctctcagcttatgagatggtaaaaaagaacggtcaggttactccagaggtggcggtttgtgctgctgttccggcagtgtatacaggttcatccgtgtcatatcgtagcaagaggagggctgcaacttcagcgggagacagtttggagagggcttccag

SEQ ID NO: 128378 - DNA, 424 bp, Zea Mays
tgcttatcttttcactctctcatgtagcagtcaggtcatgatggtgcggacgaagagcgtctcatcgtcaggggaggagacaacggggaccctcctcgccccttcaggcagatcaaggggaagacagtttaccttgagcagcatgagggcaggaagaagcgtcgtatggacagagccgctcgtgcagcacttgcagcggcaacagcagcagagcaggctgagcagggaggccagctctagatctcctcagataagataacgtatcgagtttgtcgcctcgtatctcggcctcgctccactgctcccttcacacctttcaccactgtctccactcctcctcccacttcactagctcctgtcgctcgagagccatccactacttctgatgtacccaccacctccaccactccagcttccactgctc

SEQ ID NO: 128379 - DNA, 430 bp, Zea Mays
cagccctaagactgaattctgatcaacagtgaagttggatgaacttggagatcgattttgagtaggatcctgtgactatttgattgtggatactataacaaagttagagagggattgtagggcaacaatttctctgcaggccgaagatcatgttgtcacacaaaaattagagaataaggcgcttcatttagctctgtcaggcgctctaaatgggatcccaatggtacagtgcctgcaaagattagcagatacaacgtatctcgccgccggtgatcttgcgctcggattcacgccgacctcgtgattcacgcccggtcgaacgcggataacgatcctcggtgaaaaattgggcgctggggatgagtttgggacactgttccgccctggccgtcgtacccacttgcctcacggccagtccggataacctcgc

SEQ ID NO: 128380 - DNA, 613 bp, Zea Mays
atagacccttgagcctccaatcgagactatcgagtcaatcagggttcatttagtgggacaatcttatggtcagatataaagtttggacatctggttgtcagttacacttggcacactagggcgaacatagcctctagagcccttgatcagtctatcgagtcgaccagggttcatttagtgggataacattatggtagggtaggaagtttagtcatctagttgcaggacgcacttggcgctctagggcagacatagactgtttagcccccaagcgagtccgtcaagtcgatcaaggttcattgagtaggacaaccttgtggttgaataaaatatttggccatctggtaatcaggcatacttggcacatatgggtggacatagacccctatgcccctaggcaagtatatcaagttgattgggattcatttggtggtagaaccttgtggtcagacaaaaaatttggtcgtctggtcgccgagcgcacttggcgcactaagacaaagacccctgagccttagagtgagtttgttatgtcgagcgggattcactaagtggtacaaccttatggtcagacaaaaaatttgggggtcgttcaatgggcataaccgttcat

SEQ ID NO: 128381 - DNA, 451 bp, Zea Mays
attggcaagcttcacacctctggactaactcggatgcatcactctttgctgtcggccagtagaaaccagacctaaagaccttcccaaccagagtcctggatgctacgtgtatcccgcactgtctgacgtggatctcatctaacagttgcttcccagtaaccgaaggaatgcacttcatgaggactcctgttgcgccccttctgtacagtgcatccccaatgagggtgtagtggtctgactgccttgcgatgcgttctgctgcggctttgtcatccggttcctcttcattctttatatatttgaggatgggttccctccagtcattagagtgtgactctggctggcttaaaacattgcactcttctgcttggtttgaggaaatgcttggtcgtggcacctcttagacgaaaactccaggtggaaactgagtccgactggattctagtttcga

SEQ ID NO: 128382 - DNA, 309 bp, Zea Mays
gggatgaattggctagataagtaccaggcagtcatcagttgtgatacaaggacaatcaagttggtgtccccactaggagaggaagtggtgaccgagttagtcccgcctgagccaaagaaaggaagttgttatcagatggctgtcgatagcagtgaagcagacctaattgagaggatcaagattgtgtctgagtttccagatgtgtttcccaaggacttaccgggcatgccaccagagcggaaagttgagtttgccatagagcttcttcctggaactgcccccatctttaagagagcttacagaatatcc

SEQ ID NO: 128383 - DNA, 630 bp, Zea Mays
gccgctgcgcgtcccagccccgcacgggcgggcccaggctgtactcccgcaccttgaccagcgtcgccgacgccgagaagttgccgaagctggccgccgtcgcgttgcgcggcgacgacgacgacgacgacccgccctcgaccaccaccaccacgtcgtccgcctcggagtcggagcggatctcggccaggatgcgctccacgtcctccaccaccttggcgtccgccgccgcgccgtccaggtcgccgctgctgaccagcaggttgaagccggccgtgccgcggaggaccagcacggtgatgaagccgcagaggagcgtgatcttgatgttgttcagggtccgctgccgctgcttcttggcgctgctggcacgcagccgcgccccaccgccggcggccacccccatgctagttcttcgttccgatgcagcggtgcaccctgcacgtgcttctctctagatcgctgggactgggagaagctgtgcatgtgcatgtggtggtgaactcgatcgtggatgtatagccttggcgttgccgacgagctagcagggaacgttctgcttcagtttgtgtgtactagaagtcagcggggggcgcgggaacttcgagggagaggtgaattttgcaatct

SEQ ID NO: 128384 - DNA, 551 bp, Zea Mays
ccagcatgtgattttttcgcatcgcctgtacatttctggataaggattgcttatttttgtattttttggacgctttaagatttttttggggttagatggtgttggaaggcaattgagattaacgatttggtctctcgaacgaatccatcattttctatgcacatgttatgtattagtaatatataatgatagagagccgacagtctgtctttttcacacactagattttagggttttcctgtgaggctatgaaaaaaaccctttatgtgaggaaaaaatatttcatgagtaagcatgccatgtcaactaaatcgagtggatattgtgaattgtgaactttaagtctgtgaacttgtgatctttatgaacttgttatattgtgagcttgtgatctttgtaaactttttatattataaatttgtgatccttgtgaacttgttatattgtgaacttgttatatcatgaattgtgaacttgtggtatttgtgatcttttgtcaattttgttttattgtgaagtttgatacgtttaccgatcgtattttagatttc

SEQ ID NO: 128385 - DNA, 441 bp, Zea Mays
ctacaatccttgataaaggtgacattattttaccaagttggattgaaatgtagtagcatgccttatgagaaacttgttctcatacatgagactatatgagattactaagataacgtgctagtctcaatataatcaagatatagaaataggctccccctaaagatatgcatcaagaatgaaagaaatgggtggatgcactcacttttaaaggcaaatagggagaagcactatttatcttgatcaaggcttaaaagatttgcaatagacaatttttgcctagtattctcataatgaaaagattcagaatgcttacaaccacactattgaatgttttgaaaatctcattatccaagtaggtgttgttgctcttgatgtcttccttttacatttgagtgtcctccctttatagtcgactctttttccttccaaacttatttaaaa

SEQ ID NO: 128386 - DNA, 476 bp, Zea Mays
caacagaggatgcaggggctccactaaccacatgagactcaggaaagatgacctcaacgttaccagcaccccggcggctaccatggatctctgtacagatcaaaggaagggaaaaacgaccactttttggcaccacttaactcatacagagttatagaccatcggtagtcggcactcagcaccacttaactcattcatatgaagagcagaccagaaaacaggagagaaaagagggaaacttggggcgtgggaccttcacttgaggagctcaagttgtggttgccttgccggagaacaggagccatcatcggtcaactggaataggattagctgtcgactctagagcaggagaggagaggtggagaggagatcaagagccgcagccactggtcttggaacaggggcatcgatttgtatctagggtaacaggggcgtcggcatagtgtgccttttcggctaacctcgtgctcccgacg

SEQ ID NO: 128387 - DNA, 344 bp, Zea Mays
ggcgtacagacttcaactgcctgaatcattatctacagtacataacgtgttccatgtatcccaattaaagaagtgccttcggattcctgatcgaaccatcgatgtggtggatgttgctttggaactagatttgacttattcagaacatcccattcgaggtttggatcagaaggacaggatcactcgaaaaaggatactcaagttttataaggtacaatggaaccaacatgctgaagacgaagctacctgggagactcaagatttcttggagaaaaattttcctaggtttttagcttcatgtaacttgtaagatttgtatatcttactgtaaagttggaacaaac

SEQ ID NO: 128388 - DNA, 413 bp, Zea Mays
gaaattgaggttcccttgggccgtgggaagcggcccaacaatgtccaggccccagcgctgaaggggccacgtgtgggcgatcagctttatggattgcgaagggttgcccgagcggggggaaatttttggcaagcttcgcacgatttcgtgactcgattcgcggtgcagatcatggcgggccagtagaagccttgacggatcaccttggcagcgagggccctgggcccgcgtgagagccgcaagtcccgctgtggacttcgcgctggatttggacgccttcggtctcggtgacacatttgagcatgggttggctgacccccttcttgtaaagctggccttcaatgagtgcgaagtctcggcttcggtgcttgaggcgcttggcctcgttgatgtcacttggatggtaatatccc

SEQ ID NO: 128389 - DNA, 584 bp, Zea Mays
cgcggtcctgttcaggcgcgtcgggcaggtcgctgggtgtcgtcgggtgcgtgcagcaaggagatgagcggagcaggttgttgaagcgtgagcaggggagaagagagagacccgagtacggcggcggctagagggagaccaggggcgggcacgtggcttcagctttataggaagggagagggcagaggtcgccggaggggagaaattcgcggccaaattaacactactaattgtcgattgatgaactccattaatcggtgtagaaacggctgaaagcttcgccatcaatggtggctgatgaaacgacagcagagtcgacgcgagcgcgggcacacgactcggagggaagaggaaacagacagccggtggcgagacgagaggattcgacggccattaatggaggtcgcgtaacgcagtgagtaaatcacattgattaaatcgtggggagaaaatgcatcgtgcgcggctggcgaggcgattcagtgtggctaggcgttggggaggcgagacggtgcagaccaagcggcgacatcgggcatccgatcggcggcggctcgcttcctgttcgtgcagcacgacgggag

SEQ ID NO: 128390 - DNA, 299 bp, Zea Mays
cttgcactaatgctaaaaagaatagctgatgagttgcgtcaataagattcttcttggtaatagcagaaaaaatataatagaagtgaaggttgaagaaagtgaagctttgtctgaaacatctttgtttcaaagcaaagtcttcatgtttccctcacacaccaaatgtggtcgagagaaaatcctagctacatatataggttggtgaggaaagatatccacctataactaacgagaagctagatatagtttaggttgaaattataaatttagctacataggaggatacaaccaaaattagt

SEQ ID NO: 128391 - DNA, 414 bp, Zea Mays
ctgaacatcctcgggggctgggttgcagcttgcgctacccaccagagccagatcactaccggaaccacccttggggggctgggtaactaccagcaccaccctcgggggctgggttttctgtagcagccacctctaaggctgagggctcccctgtcacctccatgggagtcgggcaactcggaccaacgtcttggcattgaagactgccctccaaagtcgacgatgcacgagacattgctcgggatacctccaatccaacgtctggaatttctgaacaaacagccatcacatcatcagcagttggctctgacagcatatccttagggacgacctcctcgagggcctggtcaaaattcgatattgacagtccttggagactgacaagagccgacagagctggagaaggaatatcac

SEQ ID NO: 128392 - DNA, 378 bp, Zea Mays
tgtgtgcgtgatgtgccaaggccgaacggattggaatttaaggtccggtctagactcgacttcgaatcgtgctagctagatctataattttttttttgtgctggatcatgttttaggctactgtttttgagccatggcatagtggtggcccatcattccgcaggctctcggcgccacgcaggcaggcagatgctgtgctcaccctgctcaccgcctcaccatctccgagaccttcccgttctcagcgactcagcgtcgctgcgccgctggcgtggagtctacacccttgcgtggctgcactccagcaatcctgcacactgatttatttttccccccgtaggcgcgcgtgaagtgaaactactgtgctttatttactcg

SEQ ID NO: 128393 - DNA, 297 bp, Zea Mays
gccggcgagagcgccaccgttgtggtgctcggtgccgctgtgttcgggtttgggaggaagggaattgtcgtggacgtttgatcagtgaacccatggtgtggatttgatcggattcaaagaggattttgggccatcgatcatagtgtggatggttgtgattggaacctaggtaccgcttcgcttcgattgattgtgggccgtttgatctgggtcgggcgcttgaaaaccggtctaggcattataaaatccaaagcgtcaattatcaatcccgcgaccaagacttcaagcagattcaat

SEQ ID NO: 128394 - DNA, 957 bp, Zea Mays
caatccgatgttctacaataaaatctgctacgacctgatctttcatagatttcaatggttcataggccaagtcatattttataagtgcataagcccatttaccaattctaccactcatgatcgggttttgcaacatgtatttgattacatcgttttgaccagaaacaatacaatgactagacaataaataacacctacatttggtgcattcataaaataggcatagacataacttctcaatgaaagtgtaccttgttctagcgtccaccagcctctgacttaggtaggtcaccatgtgctccttttcttcagtctcttgtgtcagaacagctccaataactttatctttggctgcaatatataatctgaacgacactcctacttgtggcgcttttaatacgagagttgaagacaaatatcttctcataaggtcaaatgcttcttgctgctctgcccctaggtgaattcggcatcatttttaagctgaaggataggagtgaatgcatcgatctttctagctagattagaaataaaccttcgcaaataatttaccttgtcgacgaacttctgcatttcaagcttacaggtcggaggtcccacattccaaataaatttaattcggtcagggtctatctctatatcgtgctcatgaatgataaatcctaagaacttaccggtcgacactccaaaagcacatttacgtgggttcatttttagactataccgacgtattttatcaaaggctttgcgcaaattagctatatgagaactaaaccgacgcatttttagattgtaccgacgcatctcagtgcaattccaagcaaagcaatcagaatattcttttaatagatcgattatttcatctctaggatcggtctccagggtcttgtttacaaaattcggcctcaaagttttaccatctcctacgtcgatctcctccaacggatcggctgatgt

SEQ ID NO: 128395 - DNA, 456 bp, Zea Mays
ctcctagagagtgggcaagtcgcttcctcctccgtgaatctaagaccggagaggagttccaggatgcggccctattattgcacttaccaacaacatactataggtaacgaagaaatggattatttaccatgtgtgctaaggcaattcaacaatgtattaaaccaattgacccatttagcaacttataaaagttggagatatcaacacgattcagcaacataaattcacatctagggacgtgtggacagtccactcaaaatgtaaaatgaatgctcgcatacagacctaagaaccagccaatcttcaccgcctaagagcatgtggcgaacaacactgggaagaggattagggatagaagggattagaacaggggccggaatcagacctgcgtccacgagcacaaaccactcctggccggaatcaggcagccccgcccatgctgttgtcatggctggc

SEQ ID NO: 128396 - DNA, 607 bp, Zea Mays
cacttcaattgacaaagccgtgactaattacctaacctaacccatgtcagaagatggcatcgaaactcgaagccagacatgactaaaccttgaccttgcctcggaaacagcctgttggacagatcacacttgagtgtgcaagatctgttcatccagtgagcaaaatctgtcggcccccacatcttatctctagcttagagcataagtaacaaatcgtatacagggatttagctgagatcgggcatggacaagcgacaaaacgacggagaagagggccaggcaagcacttgccaagtgttcgacgccggttgacagaagccgagcgggctctgtccgcctgcccgtgctccaacgagtgcacatgcgccacaaccaggaattgcagcgtagcgagcgcccgcgcctagaagttccaatacgccctcgacctctccctccacatccactacaagccttcttttccagagttcacgggcaccaaagtacgccaccaccctccctgccagccgagagccaaccaccgtggcccggctggcacagtcttccaacccccaaaccatcgtcgccaggagcttccctagcctccagtgaacctcctcggctagcc

SEQ ID NO: 128397 - DNA, 365 bp, Zea Mays
gcgaggggaaaaagaagtccgcgtgccagatccccggcgagatccacgcgcgcgataatggtggggcggttacgaccgagctcgaagcggagctgattccaggtccccacccgccagccttagatcagagaagcgcgacgctacagaggctggttggtggccccgcggagctcggagtggccacgggcgaggatcggttgagctcacgccatgattccggggatgcgaccgcgagtctgttttaggggaaagggatgaatctgccaactgggacccgcacgggagtgagaagaacgtgactgacccaggggcccaccagtcagccagccaagcggtcccgccagtcggtgtcacgcgggcagcag

SEQ ID NO: 128398 - DNA, 513 bp, Zea Mays
taacttttgactttattttctagatctttgatggtagcttcatttttctcgtcttcaagatcttgttgcatcctcagcactttacttaataatatactctggcaaaacaaccttcgtcagaaaacatcttaattcaaaaaacaataaaagttgagagtttttaccttgaaattagcgtagaacaagctaccggcgatatgctgtcgctggtacctgcagaggtccgcttcaatcttccgcagcccaacattctttgagaaagtactaacaactttggcctcggtttgattccgaaggcatcttagtttcccttcattgactccgccaaacagcagagcccctggtttgtacccacaggatacaacatatttctttagctcttctttttcagtttctgataactcttgtcccagtatatcttgaaaattgaaattttcctcttccaaagtatcttcagtttgctcttttcccttctcaattgtcgtgtccaccgcggccgcagcagcttcttcc

SEQ ID NO: 128399 - DNA, 625 bp, Zea Mays
cctcaaggcatcctttcatcctatttttcctctgtcgacccacagcgtgttttccaattggagcacccacttcttttgcggaaggaacttctggccaaaatgatttttcaccgataggtggaaccacccttgagtacgctgtggtgaaattagctacagagtagtactcatcgacaaaatcctccatcctgacatccctaaattcttgagctgttatcaagcacaatgcatggatacatggtttgcccgtgtgctgccactctttgcaagaacattcctgcagctgagcattgacaatgtgcttcgaatgcacatcattgttgtcccttacctctgcaatgtagttgtcagctttccgtactgataaatgacctaaacctcttgttctggcgtgtaggatatgcacaactgatggtaaaatccgtccttgcaacttttgtgcaatcctcctcctcctgtgaaacatctccataatttcctcccttatcctgtcagccaaatcacatacaggcagatccttccaatccataatccaattgttgaaatcctcagcaatgttgttggttacatagtcgcacttgatgtccgtattgaagccacttcggtaccaaagacagtcatgatg

SEQ ID NO: 128400 - DNA, 711 bp, Zea Mays
acctgctccaccaaattttgtggagttggagcaatcccaacacaccctaaacatggagctcatactcgtgcagattggaaatgtatcatgccatggaaattataacatccatgtcttcttatgaaaagaatatgtgaaggttcatagatcttaccttgtaccattgtacaagtagcttctcactacgtggtctcattgatttttcatggtcagcttacattctctccttcagctgatgatggcattattgtctaaaaccttttgtaccagtatactgagaactgatctaaaagaaatgctattttatttatattggccagcttatatccattatctgcttgtttaatttttgaactgaatcacggttttgcgaattggattagtactttagcagatagtagatgtccctttgtaatcgttgcctcttatattctgttagtggacagctcaactaccacttcaacttatttgagaatcgtttgaatcataatccttgcggtcgaagtactatgtgagtagcgttgtcttgattgagaagtcatcttccttagcattctatagaggcccatattttttttcccgattcaattacttttgtttcaatggtcagtaataacagcttttaactaactaaaatgcataatgttgggcccttaataatttcttttgttttccctgtaaaaaattttctagcacctgactgttgggcct

SEQ ID NO: 128401 - DNA, 931 bp, Zea Mays
accgagtctggtcaatttattttagtttccggtcccatataggaattgaatatatcgtaatgcacactagtgggtgaagcaacagcatcatcgcttccatattattgcatcttccgactccctcgattcaccagtcaacggcttcatttcttcgctgcaccattaggctccgttctacttctacctaataacaggtgcgttagtttttttttctgcttgcagtaggcggtacttgcaataattatttttggttacagcatttgttcataataagtcagctaggtttctcctagtctgattctgttgacttttctgaggtgtagtggggatctctgatacacagtgcttgtgtatctaggtcaaaccgaggtcaagatctgatcattttctcagcatttcaggctatatctagatgctagtttctagagggtttttttgggggttctcagcgtttgtgctgaagaaatcacttccctttcgaatgaaatcgtgcatctattcggggaatatgcacacaccgttggaacaaagggaaatagtgtttactgtcagatttcaaccatctcattggggggtgtgaagcacttttgctgtttatcatagttcttcagtctgacactctgactcatcgcttattatggacgttcttgcacatgatgtaatggcaagagcaaacgtctgtgctgctatagtggcaaatttcttgtgctctacactctgactcttgctgtttatcatagttcttcgcggccagagcaaacgtcagtgctgctaaagtggcaagtttcttgtgcatatattggggttcctgttttccttgtgctatagtgccaaagctgaactttaattgcaagttatcaggccaaatgtttgtagatactgctgataatcacgcactgcgggtcagctaagcttcaggaaacgataggcg

SEQ ID NO: 128402 - DNA, 514 bp, Zea Mays
ggtgagagtagtggagttccttctcctgctttgtctgctctcattggtctgcaagaattgaccctggcaaattttgatcagactcttgaggatatggttccagaggatctgttatccgagccagcagatgatggtgtgatggaggtttgtgctgatgtgctcgacgctggattgaggtcatcccgtgcctcatcgaccttagagcgcggtctcgaggatcaggagactgacttggatcgtcctggtcccatggaagtaactgagggttcatcagccttagaggcggctattgcggagaacttggttctcagggacggtgttgacacttgcccagcccccgaggatgttgccggggatgactcggcccgggtgggaagcgcaagccactgcccagcccccgagggtgctgccggagatgatccggctcaagtgggcagcgcgaaccgtgacccagcccccgagggtgtccgagtggggtctccctcttgtacttccatggacgttcatgcgggat

SEQ ID NO: 128403 - DNA, 292 bp, Zea Mays
gacgaaaggctgctcgtctgagcaggagaggaaggaacagttagagctcttgctgtcgactgagtgtggggagaggcgcgggaaggagatgagcaagagatgtttactctgcaggatagtttggttctgataccaattgtagggtactgaagagggataaagccggagagtttggttctgacgccacggggcaattttcgtttatttctcacacactactcaagtgctatacccttagaagggttggagacacatatttatagcactaggggctgcactacactgcactacg

SEQ ID NO: 128404 - DNA, 343 bp, Zea Mays
tcaactcaaagactgggggcttgtgggggacagatatcccctaggtccactagaaggcaagaaggcctcgcgaaaggcctcaggcccattatttcgcaaggccatcccttcgtgggcaaggggaggaatgtctagaagaatggatcaacatgagatcggatcggctcgagcccgtgcagctcactgaattcaaacgttatccacaacagtgatccgattctcccgcgcagcgccctcagacgacggaactgaatgatgataagtcggcaggattataggaagataagctcagtcggttcactattacttaggcgcacgttgttatcatatccacatgtaacgc

SEQ ID NO: 128405 - DNA, 479 bp, Zea Mays
gcattccacggcctcggcaccatccgtctcgtgacgcgtggcggcggacctgaaatttcctagatctcagttctgagcagctggcgtctccgtctcccacagaacactctctcccacgccgtccctgcatcctctcgacctcgccgtcatcactcgcatccctgccgtcgcgcgtgctcgacccacctcacagtcgggcatgaccttcgaccaccggccctccttcaccgtcgaccacgcgctcagctgcgcctaggtcgccggcaccgacgaccacgaggatgacctgctcctctgcgagacctgctgctccggcgaccgtgacctgctcctttgcgaccgcgagcttcacatcttctgcctcctcccatcgccgccaaggtccccatccgcggatctacccggttctgccccgtctgcgcctcacccgccaaggcactcaagagtgcgtctttctctcaccctcctcgccgcctcca

SEQ ID NO: 128406 - DNA, 643 bp, Zea Mays
gcatagtggtcaccccgagttaagtaagcgcgagcatgttgcaccgtcttaagtcattgctgacttaagccgattgctccattagcagggcatagtggtcaccccgagttaagtaagcgcgagcatgtcgcaccgtcttaagtcgttgccgacttaagccgattgctccgttagcagggcatagtggtcaccccgagttaagtaagcgcgagcatgtcgcaccgtcttaagtcgttgctgacttaagacgattgctctgttagcagggcatagtggtcacctcgatttaagtaagcgcgagcatgtcgcactgttttaagtcgttgccgacttaagccgattgctccgttagcagggcatagtggtcaccccgagttaaataagaatgccggtcaatcatgaacaaactgagtattcttgaagcctttctttattgatgacatatttcccactttacagagtacattatcgtcccgatagcttttgaaatacagctaggggtaaaacttcctgaggtgctctatattccaggagttcccaatttatgtgccgtccatttgagtgagacgatatgatcccggtcgagtgacttctgctactatgaatggtccttcccatgagggcgacaacttgtgccgtcctt

SEQ ID NO: 128407 - DNA, 397 bp, Zea Mays
atgttggagtcctagagaatataaaatttgaagccctccatgcctaatgggtattttaaagtcagggagtaccagagaaaatccggtagcgccgagggtgcggcactgtcgtgcatatgcacgacaatactgcactggctagagaaaccagaatggcatggaactttggcactgagttcctagacctaaatagaggtgaatgatggagtttgagcattggaagacctagtaaaactagcaaactcgcaaatccttaatagtatgatatgtctattctaggaaacaatataaatatgaaatgtagtctatattagcgtttggggtccctccttttgccatgtgaattctccctttttgttgctttcatgttacatcacttgataataaatattatttc

SEQ ID NO: 128408 - DNA, 776 bp, Zea Mays
tatttcttgtacaagcactccacctcaatcaggttgcaagtcctacttttgctagttcgcggtcggaagaagccatagccatccaggaagaagaagccatagcaaaagcagctgaggggggattagagaagaacagcagcgcatcagatagggagaattgaagctgatcttttgtatcatatatctttcctgcatgcttcatcagtccgacacttgagagaggttcgagagagaagttattaagctgcctccacactggtagcaagtgattgcatgcatgggggataggacatggcagcagccacatgcgcaggcttcttccccagacgcagggaccaaggtccaagcttcatcatcgtccgtccatggcaacatcatgtaaaccctaacacacatggatatatagctggattcggatcttgctctattttcttgcgaatatatagatatatagatggatcggaattgaaggtttgctttttttttttttgcttgcttttgactcctttcttctgatttctgaagcatatggtggattatatatactgtggcgtcaatctcttctctggttttcatcagatttttaattttccacggtggatttaatttaactgttcaacatagaatttgctcgatcggaaattttgtctttacataaacttattttttttattggtagcatttccagtatatcattttagtaactgaccaaactaaaatgatgattgataccagcctaatttataattttgcgtgtattgatttgtgcaagtgca

SEQ ID NO: 128409 - DNA, 340 bp, Zea Mays
aggaatgtgcaccgttagatctcaatggacatcccagattagatgtctgcgtaccctttcgcgctgttgtatgcaggccgtggatctgtgatcgtgcggttaggctgctggggctagtcataatagatctggaccgtcggatccgtatccgacgactgcgattatgttctggttcgcgcggagataagatttaattgtggccgttcgctcaatccgatggcccaaatcgtgcgataccccttcggctagctcaattgcaaaagagaccctaacctctctgtaaatcaacccgcagtccactctgtggggaatcctgattctagtaaaacttgtgatctag

SEQ ID NO: 128410 - DNA, 474 bp, Zea Mays
ctttattttagcttcaagtcttcaacattcctctgcagcagccagcagccaccagtgaggccgtgagggtgagtcgagtcgagtccaccaccaccaccaccaccaccaaatagccaaacacgcagtggtgctgctctctagtcctcccttcttccactccgctaaccccccgtcgcaagcacgcacgcgcgcgctcatcggattcggctacgcgccggcgagatccgggccgccgcagcacggtccggcagacgccgccgaaggcgcaagccgcgatcttgtcgccgcgggagctgcattggcgccccacgcggccgttccggcgtttcttgggaggttgcggcggcgggaggagttcgtgtccgggatccgccagatccgtgctcgccggcggcggcagcagtggtggtggccgccatggaggccgatgcgccgctcgacctcgcgctcttccagctatcccctcggcgtcag

SEQ ID NO: 128411 - DNA, 652 bp, Zea Mays
cttcttgggggcgagcttctttagcttcttgtcatagtccatctttaaggttcgataggcctcacgggtgttggcctcctcgccttctactatgtcgagacactcttggagggatgccttctcttgcttaagctctctgacttgccgctccaggctttccacccgggagtttaggtgggtgcagtgggaggagaggtcatcgtagtggttgttgagggtgtggaggtatccggccatgtagacaatggtggggtcatcctcggtggggtctctccctgacagagcctgaagtcttttcctccaggtgggggtatttttgttgctgggtgggaaataacgaaggggggtttcagagatctcttggctgtagttttggcatagctgtttaagggcttttcgggctacactttggcaagtgtctgggaagcggtgtccggtgaagttgacttggaagggagggtggtttgggtagcttcggctttctcccaggtagactgccatagagcacttttccactccattttcgtggtattccttctagacatattcgggcttcttgcggatccccatgcgtagcgcgcaactccgtaagaggtgagggaatccttcttcccctgagcagtaggatgtcctaataacccaggagtcttcc

SEQ ID NO: 128412 - DNA, 688 bp, Zea Mays
atcggcaacgcgatgctgtcgctaggttgggattttctagtatatttgatttgcgaactgatgccttagagtgcagatcactcatcaggtggttgatggataaattggatccacatgacatgaccatacgcccaggggctggcaaggaactgaagataacaaaagatacggttcgtctgattttgggtttgccatgtgctggaggaggcagggagtttactgattggtacggtgaagtggatgctgctgcaaaactgagacgtgatctcaatgttggtaaagaagaatttgatgttgtcaagcttcaagacaagatagtgcttggcaatgatgatgagctatcaatcagatgctttttctgattctattcaatcgacttctttttccttctgcttcatggggcattacaaacaatgaggtactaatgacttcaaacatggcccgaatggctgatattgactggtgtcaactagtttacacggatttgtgtgatgctgccacacgttggcataaaaggaacaaaacaaacatcacaacaacaatatatggatgttcactcattgttctagtaagtaatttttttgtttactgtgtatatatatgatatgcaaatatttgttatgtactaattttatatatttgtgcattctttttttcagatttactatcttgatcacttacatcaccc

SEQ ID NO: 128413 - DNA, 694 bp, Zea Mays
gcacatgacccccttttcagtacttctgcaattattaatcgtttcgtggatggtttacgttcagacattaaaactattgttttcattcatcgcccgttggatttggatactgccgtctctctcgctttgttgcaggaggaattgctgacaccaaatatcatgaccaattcccaaaagagctctgatcaagcgacagctaagcaacacaaccgtttccagcagggtgtgcctaaacagtctaaacaacactctgatcaaagtaaagcggcagctctaatggcgtatcgtcgtgctaaaggcctgtgctacaaatgtggtttacgatggagccaaactcacaagtgtagcaccacggtacccctgcacatggtggaggaattgtggcaattggttagtccttctgattcagtggatgaacaacaacctttgcaagatgagtcgaatcaagaccttatgattctgtcagttaatgcagttcttggcactaaggccctggaaacagtaaaacttctagccacaattttcgcaaaaaaggtaatcatgttggttgattctggaagttcgtcctcctttatttctgaccgattagcaaaagcacacccagctctaattaccttgcctgctcctgttcaagtgagagttgccaatggccaagttatttcctgtactcaagaactgcctaaatgcaaaatcc

SEQ ID NO: 128414 - DNA, 1814 bp, Zea Mays
gctgggtgtacgatttatgagataagtggcagcaagaaacgcttcatcccaaaattttagtggcatggatgctcgtgctaaaagagatagcccaacctcaacaatgtgcctatgttttctttcagcagacccattttgttgatgagcgtgaggacacgagacatgatgagagatgccaattttagtgaaaaaagggttaagtttctcatattctcctccccaatcactttgaaccgcaataatttttctattgaacaagcgctcaactagattctgaaattcttgaaattttttaaaaacttccgacttgaatttcaataaatagatccaagtaaatttgctataatcatccacaaaactgacataatacttgtatctgcctacagattcgggagcaggtccccagacatcagaaaaaataagttctagaggttgatttgacacactactagactttgaatatggaagctggtggctttttgcttgttggcaaggaccacaaacatactctttattggactcaacttgatgtggaagattataatctctaaggactctttcaacgacttgaaaagctggatgaccaagacggtcgtgccatctgacaagggatggcttattgactccaagagcaagcttcttgtggcaagaggatggcaaagggtacaggcctcggtgacaatttcctttaaggagagtggtcctcgtgtcccgatcctttacaagaaagaaccaaggatgaatctcaaaaaatacattattatctaaggaaaatcgatgagtagatatcagattctttgttgcatgtgggacatgaaggacattgcgtaattcaagatttcgtgaaggggtatgaataatagattttccaacgtgactaattttcatacctgctccatttgccgtgtgaacttgttccgcgccatggtacttgtcacgaacaaccaatttgtcaagttctcctgttatatgatcagtagctcccgagtccatataccagtttgtgtcgacattgtatgagtttgtggcagctgcagcaacatgcttctgatctggagtgaaattttcgtcgaatctatgccagcaacgatcggccgtgtgtccaattttgccacagacttggcattgtgggcgattggtgacactacgaccattagaccgagggttattattgtggaaggaccctcgaccactttgtgtcgagctgttgaacgcccgaccaccaccacgtccgcgactgaagccgctacgtgatggtccaccacggccacgaccacggcttgtggcattcaccgatgatccagaagaatcataactgtgtagattaacacgagtttcaaaagcaaaaatctgggcaactagttcgcttacggtggtaggctcggtcttggcgagaactgagttcaccaccgaatcatattcttcgtcaagtcctgctagtatgtactcgaccaattcttcttcttctaaaggacggccagcgacagccatctcattaccgagtgcacgcatcttggcaatgtactcggtggccttcattgcacccttctttgtggttgccagtgcaaggcgtgtgttgacagcacgcgcacgagtctgggatgtgaagagcacttcaatggtgctccatgcttctgctgcggaactcttagatgccacttgcatccgaatgtccttggacacagatgcgagcaagtagctgagaacctgctgatctgcagcgatccagtcttcatattctgaatttgcagtcttgatgagattgccatcagcatccttgatttctacttcttctgctggcttcgtcttctttc

SEQ ID NO: 128415 - DNA, 356 bp, Zea Mays
tgttttcagggatcgttgcctttgtttgtctagaataccttgctgaacttgagctagaaaagctgctcgctccaccgactccggaacatgagattgcaccggcccctgcagctctggcttcagccctttcacaaactgagacacataaagtgtttcatccagtgtgtggttgtgtaccgaggtagtataccgtgcctcatcaaacgacttctgatattcctccacggatccaacctgacgcaagttcaacaaggattgcatagcctgcgaatactcttgagccccaaacttttggatcacagccccacagaactcctcccatgaacccagtccatgctgaattttgaaaatctgaa

SEQ ID NO: 128416 - DNA, 344 bp, Zea Mays
gtgaagccgtaggtttattcccctccagctagcagtgggtcgatacactataggtaggctgtaaaaaccatccaagcccctattagtggatcattgccctactcccaaacccctattagtgagccattaccccatagatgggtcgagaccacccaaaccgtatacaagaggaagttcccaaaaaatcatgtgggactcctttctccaagctcttcatcttcatagctcaactcacaaacacttgcaactcagccgcaagtttaatcatgtccgctatcgtctaacctcgttatcatgttcgctatcatcgtaacctcgctacccgcaactgtcgtggccttggt

SEQ ID NO: 128417 - DNA, 877 bp, Zea Mays
gctagacggaagggaacaaactcgtaggccgagacgatggccgcgtccagaagagcggcggcggctatgctgtgcctggccgtggcggttgccgcggtcctggcggcggagaagagcggggcggaagcggaacggccgggatgcttctgcgactgcatgaagaaccggtgcatgaccctcggcgcgagcgcggcggacaagttcgactgcgcggccgcctgcaccgagggctgcgcgcagatcggtcagccgggccagcccagggccgacgacttctgcggtttctgagccgcacgctctctcgggctttgcagattatagcaggccggcgtaggctcgatctatccggtgaccggacggcccagttggatgccgccacgaccacggtccacgacattcatgcatcgtatgtgcatgcatgtcccatagcaagagtctaaataaagctggttgttattatttcgtgttactcctatgtccgatagcatatactacaggattggattcttgtctcacgcacacacatactgaacacaaagcccatactagattcggatcttgcctttcacgactagattagtagctatgggtcgatttaattaggagagctccaaaactttatagaactagattttagaacaacttgaacttcgagagctgcgccatgaatgttttgagtctaggaagtaggaacagtatttttgggagttgcgctatggatgtttttttttgttgttgtttacagacagtgagcctgattgtaccactgattgagtctaggaacaatattttaatttgggagttacttgtacctgtaaaattgtacccctcgaccctcgttgagttaccccactttgtatccggcgcttgcaccctg

SEQ ID NO: 128418 - DNA, 276 bp, Zea Mays
aatcaccaatgtggttgattttcatacctttgtcgctatcggtgtggatctgatcttccccattgtatttatctcggatggacagtttctctagctcactggtaatatgatcagtagctccgctatcagtataccagtttgtgtgtattgtgtatgagcttgtcgcagcaacagcagcgtgggatgtaattttcatcatatcggtgctaacagttgatagtcgtgtcctttcttgaagcagacatggcatggttcactgcttgggttggagcaccg

SEQ ID NO: 128419 - DNA, 584 bp, Zea Mays
cgccatacgcgctcacggcagcgcagctaccggagatgaggtagattggggctcctagggcgctagggatcggtcggggttgccagagaggttggggaagtcttggcaaacactaaggcgaggtcaggatggcgtgaacggggccgaggccgacagatcgtggaggggaccctaaggtgaacccagggctgctccagcgagcaatacccatcgtggtgggggttaatctggcgctctacgaccgacataggtttcggggagagggtagggatgctctaggcctgaattcaagcttggggaggggttgcagtggccgaacgccgtgaagaagtgatggtccaacaaagggggctccagcgacacaaaattcatcacggtaaagcgaaattggcgcaaactagggatgagggagagtcacttaccctgagacagcgcttggggcggcttggcacggcgcgtggaggctccggttgtccggatgtcgaagaatcacgacagcggcgaattccgatctgcgcagggaagaggttgagcgtggaccaggcagaagagttgaggaaaggggaaaccatcgcgggttcccg

SEQ ID NO: 128420 - DNA, 294 bp, Zea Mays
ggttaccaaaggtgtagattagatcgaagtataacggttgggccatctaatcaaggccttagatcctcgaatggaggtccggaattagatcaaggtgtgggagatttcgtgtcgtggatcgtagatccaagggcccatcatgcgtacctattcataatacacctagatctaatcgtggccgtatacggtggatcggacagccgtagtaaccccataccccttccgtcgagaacaatatgctaaagagccccaatctttttacatatttaaccactcgtcctcagtcgttgtaag

SEQ ID NO: 128421 - DNA, 415 bp, Zea Mays
ggaagaccaaactgactttcaatctaaaattggtgctatgatctcgatcccccccaatgatgagatttttcatgatgggaaaggcaaaaagcctctggacatgcccactaacattgttgatggcgtcagaaaaagctctaggttggagaagaatgatgatgtgaaggtggctgataaagcgatatccagagccgaaggcaaagatgccttcctcaataaaggtatgtgttctaactccttctctttgcttgattctaataatgatgatttgatagatatagctaataaacttggagtttctttgggtccctctgactctgatgcaatagataatttggagttgatcaaagatctggaactttccagaaaattttggcattccaagcttgtaaaaaaattaatacctcaaatgtgg

SEQ ID NO: 128422 - DNA, 514 bp, Zea Mays
aaactacaaatcatagtaagaaagtttgatcagcaaagctttgcaaaattctcaaaaagacccttcaagctaaacttcaaaaaggaaattcagaaaattcagaactgaattttcagccctttgtaaagttcagccgtgttctctgctttccaaaactcaaatctacaaaacccaaatatgaaagaggcgccaaattaccttgaccacaccttggagaaatttgggagcaaaattcagctgtttgacatgatcttggcagggatttaccttgggactccaccctgtgacactgccacattgccgaggcgacaactctctgcccttgacccaaaatcgctcggctccacgtgcaaacgacagagtgtagtcgggagaacaaatcttacacagaaattttgcccaaattcgtaaagatctgcaccctatcggcgttagaactcgggcagaaacattgaagccacgtgttcgatcgtggctgacaggtccggttcacgccagttcgcgcacccatgcc

SEQ ID NO: 128423 - DNA, 678 bp, Zea Mays
cacgaccaatccgacgtgcatacaatatccacttgaatggtttttgttcagtttgtttgacctccttcaccttcatccatctcgtccgaccccttggctcgaagtaggggggtcatcgtgcgggcgtggtggatcattgattgacttgcaacgaattaactccgttttacccgtctgttgacccgtgaccctagagactcagggatacgaatcccgacccatagtatctcatcaaagtgtgcagctgtttgggggaaggagagcggatttttttttgcaaaggaattagcatcacatggaaagataggggtgctttaaaccgttacaatggcgggaaccatgtcaatttggttgatgggttgggatgtatgtcgtgtatatatcgtgcaaaatactaatatgaacggtacatattaatgtttgtggagtgttatctttactacatattaagacagtaaaggtagtctgcctcccctcgttctgccgttctgccgtccatcgatctggaccgtccgtatcctatcatgcgtctgcgtctcccacactccatctccctccaccgcacgaccgcacccaatccctaaccttcccccgcacgttcctctcctctctgccgcgttacccgcccctgcccctaccgcgatagatgcctcgtggcccctgacaacgacgaccgcg

SEQ ID NO: 128424 - DNA, 392 bp, Zea Mays
atttgtatcatatacaattataaactatagtatcttaaaactataatgttttaaaactgcatttccaaacaaacaggccctaattcgtgcagactagctactcactcgagcacagtgccatagtatagtattccgccgtatgattcgctccacggatcacggaggcatggtccgacacgcggcgacagcgtacgcatatagtaataatatacaagtacaaatacgatgtataatcgtatagccgtacatactatatagctacagtagcgaaacgccctgcatacgaaactgctgtgcgtgtggaaccaaaaaaaaaaatccagagaggtgactcgatcgatcgatcgtggatcaagatcgacgatcagttcctccgcttctgtgcccacggc

SEQ ID NO: 128425 - DNA, 634 bp, Zea Mays
gtcaggggaagcttatcaccgtgcctgtagccgttgcgacgtggccggaccgccgatgtcgtcgtggacactccggcgacctcagttatgccacgccgtgactcttcactacgcggtagtaacggtggcacacctaggcttaccctctctgaaccgctgcaccggtgaacaccacgattgagccaccaatgatcttcttcctctccgaccgccagcgcgccattccaaaattggaggccaccgctcttgaacactataaattaagaacaccactagctccattagataatcacgaagccagagcacccactcctgccttcgattagccaccatagctcgctaatttctctttctccccaaattggttttccgcacccgtgaacacctcgccgtggccagacgtctacaggttagctcgtgctcttccgtgggatgttctcgcctccctcatgtcccctgttgctctcagaaccatcttattgaattagaccaccttgaatcacccagaacatgataagttacctctggtccatcgccaccatggataggacgattgtaagctggaaccttgcaattgattgaggggttatagtcgttaggggtagaattaggtgttagccgagttagggctctg

SEQ ID NO: 128426 - DNA, 555 bp, Zea Mays
gttgtacctaggcatgcatcatcgtagttggtgaaagccgacaggactgcgatcctatcggtcatgttcgcctgcgacgttacgtggggtaggtacgcgcattgaatgctcatgtccccttggggcctttggctaaggcctggctcggggttgtcttccttgctcgagacgagctcgggcgaggcagaaatggtggttcagcggagagggacgtcggtcgggacaaggatttcccctagtatgtaccttgtccgagggcaggctcatgcgaggcagagttatgagtgaccgctgagaggggccttgggcgaatcgtggtttactatttcttgtcctcggggaatgtttctgacagtggtcttggggttaagcgcgttttaggggcgtaatctatgtacccctacttacgatacccgacatctagcttctcaaaatcaatggtgaaccaaacaccactgtacttttgtataactggccaaaccgattttagaaatcgaccttactatttttttagttcagcctgagaaagctctagggcagaagcaaggatatcac

SEQ ID NO: 128427 - DNA, 605 bp, Zea Mays
ggacgatcgtcgatcgacgccgagaaccaccatagaacaacatacttgccaaggcacagagccatcgcacaaccgcatccctcctcgtagctacactactctgttgtcgtgcgaccatataggtgaggggccacgcaaacgcgagtgggtactaagacagacgagatgcacactggccattgcaacaacagaaaatgacgatcttccttcgagctagcagtggcactgctacaacaaatccgagctccgcttgctatcgtccaatgccgctcgaggggagatgactcgatgaggggaaattagtagaggcatctaatcactgacccagcataagatttagcacccatgccaacaagaaggtcaccgacgaagtagaggcgcctggggagagcatcagccgtaccacgaggagcaacagatcgttctggtcctagcacctccaatctgggagaaatttccacgctgccaccttcctagttgcagcccttgggtcggcaactccgacggcggcgaggtggggaacaagggtgggagacggtggaggccggtggtacatggaacatggatgccaccgatgggaggaaccagacctagggatggcaatg

SEQ ID NO: 128428 - DNA, 394 bp, Zea Mays
aaccgaacaaggcctaaagtggcttcctcctcccaagttatgcaaggtgggataattctgaggctcacacggttgtcgttcgactacaattgggccaactgggctaattgtgtctttgccaacgggtaatagtggaggatgtcctcatcattcccaccttcttaaaatgggccctagctctgataccagatgatacacccagcccaggtggggttggccgaggcccaataaattagggttgcccggagcccaacagttctttatgcacacccaactcagggaaaggcccaatcaccccaaaagactagtccaatgggggaagggtggctctcccttttaaagtggcttcctcctcccaagttaagcaaggtgggataattctgaggctcacacg

SEQ ID NO: 128429 - DNA, 291 bp, Zea Mays
ctttttgtattgtgattgcgttctcgtgtgtgtttcttcctccctcttgttccattggagttctagccttcagcttgtgcaaggctagcaagacacttcgatatgtcgagatccatgtgaggagataattatacgagaaaattgtggcctcaactttgatctctagatcacttgagaaggttgtgtgcaacctttgtcctttgagacaccacagtaggatataggctcttcagagttgaaccccggtcaaacaaattgctacatcttgtactcttcgctttctgcaatttg

SEQ ID NO: 128430 - DNA, 469 bp, Zea Mays
tagttgtagttcctaacctcaaactttatgtctcttcgactcaacgtcatctagatgagctttgggtagcctcccgacaccgaagcaacctcaaggtctttccttcctgacaggatccctcccggaaagcgatatcttgtttttatgtgaactatctgcgccatcgtggatgatccgccacctacacgcagacagtccgcacgctcgctgaggagtgtatctctttgcgtagtcacagacggtccgaatacctatcgtggatggtctgcgttcccgcagagaggaacccaaggtcctacatgccgcgtacacgtgccatagggtttgtttgatgtttggtccaaaatggcgtcgacacactttttgtgactccgctaggatgagtgtgttttagataaattagatcagccatgatgtcatattcgaaagatcgcactaatgtcttcccaaacaatatccttaggccgac

SEQ ID NO: 128431 - DNA, 440 bp, Zea Mays
cttatttgtatcctcctccatacatgtacaagtatccatacactcctcatccatatggtgctcctcttgcgttctttcccaccaatggtgttcctcccatatatggtgttcttactccatctcatgctccctcaagcacgatagtatcaccaagaaggtagtgttgatgcccatcctgtcgactggctacaacagtatagtgttgatgcccatcatgttgaaggcatggaagaatatatcatgttggcctggctgccattgtccatgagggccttgtgtatttctcatcctgctatgttacaatttatgaccattgcgtttgtatgtggggcattgcaaaggttgacgtcgcttgcgtcaaacgtcaaggggacgtgtgaccattttgtttggataattgtcctgctaactacaacgtgattcacactttgataatagtc

SEQ ID NO: 128432 - DNA, 778 bp, Zea Mays
gcattcctccaactgcatccaaatatggcaacattagcttgcaatccaccttgcaatctttaaatgagtccgtaaatacctgcacttgaataaagtgatctattttggcaaatgcaataatataaaaatgttacagactggaaagcaaatcaaccaatacctccaacaaatagccttttgagtcatctggagcattggatataagacctggaatgcaggttataagtgggctcaaatatatttcgatgaggtccttattgcgaagtgtttttgcctaataaaaacagaaggatgttcaatagataatccaaatccataagataatggcaaaacagtatccgtgcagttaaattgacgagcaaggaacaacctttgcgaacagagaagacacaaaaaggcaaaattcttcagctgaaaacacagtgttatctatccatacattcaagcgcagaaagatttcagcaatccttaaattgaaaatgaaaaatttgtcgtctccctgccatagtgccatgagaaagttcacagtaagtcaaatgcaaaagattcaaccataattttattctaaagcaaaaaaaaatctaaatcagaaaactagctctagataggaacacatcatcagcgacgaagtccagaagaatggtttagtcatgatccaagtgttgtcctagacttatcacttttaccactaacaagcctagaagcaaagcaaacatcagtgcatgaagtctgtgtattcacacacttatagtgcagcaaaaaatgctcaaacatgaac

SEQ ID NO: 128433 - DNA, 686 bp, Zea Mays
cacaatatagcaaagttgtagttggtttatagcactacaatattgctgcagagatctggatgtgttgccacagaaatttggaagaaatctggccctaaactatggctgtcaggcttattgaagaagcagtgccatggtacagtgtccaaaacagatcaggccaccagcgcggcaacctcaccgccggcgacctccctgcacaaagattcatgccatcaccgtcgtgactcgtgaccaaatcaactggatagcacttggagatcatcgtcgtggataactccggccagtaaagtattccggccaccgtacaagcgttcaccgcgacgaaattggataagtgcaccgatgaccgccgcttcccggccttgcaccgcgtgtccatgcacttccaccgcatcgccgtggcctcctctcgctccccgttgatcgccggagtaattgccacggcatcatacacaaattcactgcgccagtgaacttcccctttctctgaccgccgcgcatctcgcccaaattcacggccaccgctcactaagcgtataaattgaccccgccgcgagctccgtaaggcagtgaagtatccagccaccgctaattagccacgatcgttcgctagagctcgagaatttcttgtttcccccaaactggtctccgccaccgcgaagaacagctcaaccgtggtcagc

SEQ ID NO: 128434 - DNA, 423 bp, Zea Mays
cgggtcacatactaagctatttctttcttcatccctctccaccagtatctggttttgaggtctaggtacatcttggtagtccctgggtgtatggagtaggctgagttgtgagattctttgagcaggacttctcgggcctccccttttggtacacacagacgatttttgaaccaaaggactccttgttcatctgtcctgaagtccgggagttgttccttgcgggctttctccacaagtcttgctgtctctgagtctagacattgagctttgcatatgaggtcttctagcattggtttgacttctagactgtcgctgtttcccagacatgtattcagttgagctgattctttcttccaatcttctaaaaagttggtcccctttattccgaatggttttcgactgaggatgtctgctaccacgttg

SEQ ID NO: 128435 - DNA, 303 bp, Zea Mays
cagtatcattccattagccctttccacctgaccattggctcttgggtgtgctaccgatgcatatttgatctggatgctccgttgttcgcagaaatcaaagaattcagagctagtgaaattggatcctaggtcagttatgatgctattcggtatcccaaacctgaatattatatcttgtatgaattccactgccttggctgaagttagagaagcaatgagtttgtattctatccatttggtgaatttatcaatggcgaccaacacgtgtgtatagcctccctgagctttcttgaagggtccaat

SEQ ID NO: 128436 - DNA, 906 bp, Zea Mays
aaaagttgtcaaaccaattttgctagctcctgaatattataatctatcttttaaaatagtagaccctatgctttctgttctaaatttttgagtttaaaattaaaaacagaaacctactaaaccttgtttaattaaggaaaattagtttttcttctgtgctgaacttaagaaaatttgtagatgtttaaacctcatttagacatagtttaaaaataatgggaaccccagcattgaaaaatatgatgtagttattcctttaaagctaatttgtccaaaacttagagaaaatcagaaaggccttagaaattaatgaacaatgattaagattatttttcctagtttacttatgcaacagagaacctaggaaaaatacaaagaccattaatttggaccagttttaaattaaaatgatttgtttagctttatatagactgaaaatcaattattaaataggcaaaactataaccaaaatgcttgataaaaatccagtgaacttgtaaccaccagagccccagtacaaaaatacagagcacctcagcccaactttttaagtaaagaaaataaatacaaggtgataataaggctttttttcaaataaatcatgaacaaccccttttaatgtgataatgggtaaccaaaaatttgctaagtccatgatgaggtaaactaccagagaaaaatgcaaacccatgaaaaagaagtaaacccataccttttgctaatgatttaagagagaggccacttaattcaaataatgcaaaccacccctttccttaagcaaaaagaagccaaacttcagaatgattgctcttgcacaaaatactaactatgaaaaatgagaactctgttgttggatgtttctcaaatatagtggtagtagaaagcacccatttggctagaaacttg

SEQ ID NO: 128437 - DNA, 662 bp, Zea Mays
gagagaaggcttcacggagatggtaacggaggtttgggaaaatgagaatggtggaagtaatgctcttgaaaggtggcaggcccgtgttaggagagtgcgccaattcctgaggggttgggctaaaaatgtggggggccataataagaaggagaaacaagatatcctcgatagattagatgctctggataagaaggcggagcacactcttctatcccagtcggagatggattataagaacgtcttaaaaaaaagactggtggatatgctccgggaggaggaactgaagtggtaccagcgagctaaagcgaaaaatctgcttcagggtgacgcaaatactcaatacttccacctcctggctaatgggagacataggaaaactagaatttttaagcttcaggatggtaacaatgttatcgagggagatgagaatcttaagcgccatatcacttcctattacaaagatctctttggaccaccggaagcctcacatatcactctggatgattctattagaggggatatttctcaggtttcggtggaagaaaaccaaaggctcactagtaggttctctgaagaggaagttaaggccgcactcttccagatggaaaataacaaggccccgggccctgatgggtttccagctgagttttggcaggtgttct

SEQ ID NO: 128438 - DNA, 719 bp, Zea Mays
atgttgctatccatctcttccttttctgccacaatgcaacaattgcagggtgttctcttatgccacattcatccaccagctaattccactccacctcaaattgtgtgggccccaaaggatagtttatcagggactgcagtttctcctttagattattatcatgcattgtgcaatttgtacagctcctcgagctcgtaatcccatgttctggttatgtgtcatcggcaatttcggtgttgtgtcttgttaaacacaatccttattgcttccttcatcgctgcatcttcatctgtgtgtcaaaaataaaaatcagtaaaaaacccccaataggtttgcaatcaagcagtttaaaatattgcaatcatcttcaaagatacagttgcaacaacacagcagtaattatgtgacaagcatttttttgtagccaaagcatacctgtaagaatcacaaaaggctgctgaccacccatgcaacttttaaaggtctcaaaaagccatctgaatgtgtctattgtttcatcccgaagaagtgcttggccaaaggacacatttttcaaattattgctgcaacccacaaacatggctaacggcatatgcttgttgttagtcttgtgtgttgtgtcaaatgtgactacatccccaaaatccttgtattctgcacgctgacttgcatgacaccaaaaaatgctccgaagcacatttgtttttggttcaaaatct

SEQ ID NO: 128439 - DNA, 883 bp, Zea Mays
cggaatattggtgggttagattttatatcacgcgcgcgcccgcccgtaatctatctagttgctgtcgatcgtggagcgagcgatgactccgtggccactccgctcggcatggcgcaccttggcggcacggagtggacgattggtcagtcaccacccccatatccccacttgagctgctagactaggaggatggctacagattcctagaattgaacggaatcggtcatatcaactcctgctcggctgctctagcgcgaaccggatttggatcggataaggaggggacgtcgccggctccaacttgcactctccagtctccacctgcgatgcgatctccttttttcaatcagagagagagagagagagagatcagaagattattgcaggcataaatggaaacatggaactgatgccgcttctgagagaggaagagaaaaaaaagatgggcggaggaaatttctttaaaaaaaatgccgcggtggacggagagattcttgggtggagttggaatgcggtcgctttcatggcccgacaggcaggcatccaagggaaaatgaagtgggagaagagtcggaaatggcccacgtgtttggtgcaggaaccggggccgtgcggcacgcgagatggggcagtgtgttgcaaagcacgcatgtacggcggcataaaccgatgccgattcttggtggtcgggtcagggtggagacggcaggaaggaaccactggtccctgcgccacccgcaccgcaccgcaagcgttcggtggagcaccagtaatatggtcccgacgcggtgcggttcttgttccccacgtatggggacccccctctcgccaaccaagccatgcacatgcaccggtggagtaccattaccaagggcaaagccag

SEQ ID NO: 128440 - DNA, 331 bp, Zea Mays
gactacgttgtcgcgccaggcctttgtttgagcttgatatttgtcgagggcctacagggcaaggacgcggtctccgtcgatgagatctttggaagttggttcgtcaacatcggggattgctgatgtgtttgttctgggcgacccatgctttatctcttgcggcgtcatggcctcggatccatacagtaggcggaaaggtgtgaacccggttgcccggcattctgtcgtgtttagggcccataccacttcaggtagttggtcggcccatttgccctttttatcgtcgagaagtcttttcttgatggcggtaaaaatcttgccattggcgcgc

SEQ ID NO: 128441 - DNA, 341 bp, Zea Mays
cttcttgtccttttgaagtgagggagtaccttctaaattaaattgcacttgcaggttatgttgaccactttgttaaaggtgtgtattataaatgtggtctctttgagaaggctaagggactgctaactgaactggaagcctcaggttttgcacaggatgaggcaaaacatgtggtctcacacatagaagtacttaatgtgcatacttgcacggtcccttgaaattaaccaacattacatgctatcatgattccataatcctttgtactgtgtcgagatgccatactgcatattgattgatggccttgtcaaaggtggaaagatacatgaagcaaagattct

SEQ ID NO: 128442 - DNA, 321 bp, Zea Mays
ggagcggtgcataccagatacaatgcagtgatgaaaattgaagaagcatcggggaagtctcttgccaagtcggaactcaagaaagtttgggttcagttcattggaattcctcctgatatgttgcagttcaagttgatttgggcggtaggttcagttcttggggtgaccaaagcggtggatatgagttttacaaacaaatataatgttggccgtcttcaggtttgcgtgcttgatcctagcatcattccacaatttgtggatgttgtgattggtgattttctatacgaactgcagttccgggtggaagagaaaacgttggag

SEQ ID NO: 128443 - DNA, 468 bp, Zea Mays
gcggtgacttcgatgtggtcgaatgccgaagaccgtcgatgcggtctttttcgacattgtcttaattttttgcgggggatttttgcgtgtatattacatggctccgcctcattaaaaacctcaccccccgggaggaaaagagtgcgggccagaataaaactgtttggtgaattacaagggcgtgtaagccccaaggattcaaacaaaaaatttacggagattgtcgatattccaggaatgctctaagtcttcgctggatggcgttgttagcctgtacacgctgggggacgactttgtcttgacgatgaagggaccctcccactttggctccagcttgccccgtgactctgtccgagctgtccggacgagtacgaggtccccttcgttgaattctctcgggacgactgtgtggtcgcgccatgcttttgtttgagcttggtatttgttgagggcctgcagggcgaagac

SEQ ID NO: 128444 - DNA, 411 bp, Zea Mays
cttcggttattgttttcctacagtcgtgtcatagttgattggatctgggaatatagcatgagcgtacatttacatgttcaagcaggatagggaattcttggtgacggtcactataaaaaagattggtgataggtggtggtacaatgcatgcaaaaaatgcacccgcacaactgtggctcatggggattcctacaagtgcaacgatcaagtttgcgctaccattggcacgcccaaccaaaggttaggcagcatctcttcgcttcaattgcctccattctacctttgcctcccaatagttctcgctgttttcacttccactcacatctaatatacagcggctacttttctatgcatcaccctgagtgaacgtttccatttcctatacacacggcctacccattttcactaaac

SEQ ID NO: 128445 - DNA, 834 bp, Zea Mays
aggacacggtggccggagtgaactgtggccggagttcatccactagcgatatttcttactccctctgcgttatccaactgcaccgagcacgaatcactgcggcggcatgaatccacgtgcgggggtcgccggcggtgagtttactgagctagcgatctgatctggttactgtaccatcgcgcagcttcttcagtcggtctgacagagcatgtttgggctcgatttgctccagattttatgtagcgacctgaccaactctctgcatcaaaattgcagcctaacaatccagctttaactttgttataatgtccaccatcaaatagtcataggattgtactcaaaatcgagctctaagttcatccaacttcactgtttctgaaaattcagacatagggctcactgacagcacatctttgagcctagttttctcccaactttgcataacaataatgcttaatcccttaagaaaagttgtacttctatagtagctctagacttttgatgtgttgaccctaggcaaatcttttgtattattagaactacagagccccaaagtcagcctggttcatcagttttcagacatagccatgtgaaaggaattgagtgactttttgtaaataagcccatttcacatcttttgacttggaaatcctcacatgtgtgaaccatatgctttagagtaccctaattccattgttttcgcacttgggtccaaaagtgtgcaacatttacgtataacaccctagggtttcagtccagggttttccaggggtctatttagggtttttggtgcttctagggtctgggtgccacttaagttcattaatggtgata

SEQ ID NO: 128446 - DNA, 385 bp, Zea Mays
atttgctgaagcgatccaccatcgtcatgataacggattttcctcccacacgcggaagcgcctcgacgaagtccagcccgatgtcggcccagaccgcgactggcaccggaaggggcagtaacaggctggctggatgtaggtggtctgacttgtatcgttgacatgtggcgcaggcgcggacgtagtcctggaccgtccgccgtaggtttggggagtggaagtcacgtcgtaggcggtgtagggtgcgctggacgccttcatggccatcatcatgtatggcggtgacgagctcgtggaggagtggcgatgctggtgggatgtagaggcgtccttggaacgcgacgagcccatcaaccagcgaccatgcgcccgtgcgttgtcctgc

SEQ ID NO: 128447 - DNA, 318 bp, Zea Mays
cgcagccgcatagagtctccgttaaatgcagctcgagtcgtcggcggcggccatgcgcgcacggtagagagcttgtcgacggagatggcggtgatgagcggcgctgcagacagcatgttgccaaagctggtggacgatccggaggcggtggcgctggcggtagagccgtgggcgcagccagggaggaagaacaagaagacgtgccgtcgggctttgctcgtcggcagcctgatgacgctgctgctcctggcgtgcttcgtcctcggccgagagagcgcgtcgtcagcggcatggctgcagatcgatctcctcgccaag

SEQ ID NO: 128448 - DNA, 384 bp, Zea Mays
agccaccactgtacgctactcagttcgcttcaacggtgtccctctggacactttccaactcacgtgtggtgtatgccaattgccaaggtgattcactatgtccttttatttattattcttgtatgtggctgatggtttgtctaagctgcagtagactcagcaaggtaatatccatggagtgaaggtctgcaggagagcatgcacatgaggtttcacacctactgtttacagatgattgtttgctatttttcagggctacggctgagcagtctggacgcattgaaaatgcgcttccgaaatattttgcagggccacagggcaacagattaaccttgacaagtgttccatctttttttagaccgcgattgggaaccgtgaattttt

SEQ ID NO: 128449 - DNA, 418 bp, Zea Mays
tattcatcctttacctgagcatgaggtcttatttcccgcggtcagagatgtgattagggaatatttagtggagcaccaaaggataagggtgagagatattcagcgttctcacttgggcgaggtgctggtgcagtttcacagtgttttggagcgagataatcttgttttgcttggtccccaacagtacctagatgctactttcactgctcttcgtcataatgatgcttggaaccaccgggctctttttttcaatcgtgaatgttggctgatgttactgggcttccctttggactaccgctcttcagagtacctgcaagcagctattggttcttttggcaggttgattctgtgggaggaggatcgccataatgtcaccaggacgttgcttcgtgtccgtgtcacttctcttgaagaagtc

SEQ ID NO: 128450 - DNA, 380 bp, Zea Mays
gagaatttggaaagatgagcttcatccaatattttctttctgagctcgggatttttaggaacaaccaatcggtctccaaaccatagaattcctttgatgtcctgatggaaacatttgtatttgtccatcttctgtttgatcatttccttaatgacttgaacacctttgtcaccaatctgtgccatgactatttgctcatgtaaggtgggctccactaaaatataacttaaagcaccggaagcaacgacttccatgttcagcttgcacaactcatcacacagggtggtgattcttgcatccatattcacacagttgcactgggccttccgacttaaagcatctgccacaacattggctttgccaggatggtaatgcacctc

SEQ ID NO: 128451 - DNA, 726 bp, Zea Mays
ttttcaccgcgaaccagcataggtcgtcaaattgcaacctggatgacggacttgcgtgaccagtttcccactcaatcccctccaattctcacgggatcccggatcaccaaatcagctctaatggtgtaagctgggacgaaccagctgccgctaatcactggtggagagaaccgtagcatcgcaattatgcccacatcatctccccccgtgtcataatttaatttcgtggattccgctctaatgacggtcattatagctctattttcaccgtgaaccggcatgggtcgtcaaattgcaacctagatgacggaatggcgtggccagtttccccctcaatcccctctaattctctcgggatctcggatcaccaaatcagctctaacggtgtaagctgggacgaaccagctgctgcaaattactggtggagagaattgtagcatcgcaattatgcccccatcatctccccctgtgtcataatttaatttcgtggattccgctctaatgacggccattatagctctattttcaccgcgaaccagcatgagtcatcaaattgcaacatggatgacggaatggcgtggccagtatccccctcaatcccgtccaattctcctaggatcctggatcaccaaatcagctctgacggtgtaagctgggacgaaccagctgctgctaatcactggtggagggaaccgtaacatcgcaattatgcccccatcatctccc

SEQ ID NO: 128452 - DNA, 554 bp, Zea Mays
ggtgagttggtgggcggcgaggctcactgatctcaggcgatcactggcgataagtctcgggcgagggttaggggagtgcgggagagtgagaccgagggctagggtaggctttataggcgtaggcatgggcggatggggctatggctgcccatgggcgcggggatgggttgggcgcgctctcgtttgctagcccgcgttgaacacgtggttgcggctcatcttctcatcttcttgcacgtgttgtcacacatccatgtttgatctcgcccagatctctatacacaacaccttctcctctccctaagctaactctttcctatgggggttgaaagatttcatccactggttagggagatatgggaggggaaagtcggtctgtcactagggctaaaacctagagcaaaacattattgtcttgtcaaaactccaagtcttgactcttgaggccatcttatggtatgtgttagttaaggtaattaggcacaactttggtaattagagttcactagttttgggtttgtagcttagtgaacacttagggtctttaatgaagg

SEQ ID NO: 128453 - DNA, 498 bp, Zea Mays
ggaagagtcgtcggatgaggacttggattactttgcggccttggatgtggcagcggcagaggcttcgccgcgtgctgcggatgctgaagttgtgcctggtccgagtgctgggcgtaggcggcgaagggcggttgcgaagcgtagagtgagtgaggtggatggcagtcggcttcgtgtgggcagggctggcaagcaggaattgttgtcctcgccggccgagtgtaggtgagggggagttgcaaagtctttttgagggtgaggagctgaggataatgctatttaactatagggagatggggattattctggaggttgaaccgatgtaaggtgtgatgccctcgctgtacatatgtaactataggttgtatgatgaggctgtgcaccttcgcgcatccggctatgttcataaaggcgttgcacacttggtctagtacgtttattatgtcggtccggcgcgcgtgttgaattaatctggctgcacccttaggcgacttttgc

SEQ ID NO: 128454 - DNA, 364 bp, Zea Mays
gccaggagcagggcctcctcctccgccttcgcctgtgcgacgttggcctggccacgtcgtggctgtcgacagtccctggcccagtggccaagcttgccgcagttgtgacagccgtcgtctcgtgccggcttcttgttgccgacggcgctgccttgggcacctccacgggcaccaccctcagcatgtcctcgcgccccggcctgggcgcctccacgtgccttgcgcggcttgccgcgtttgcggcctcgtgtcgaggattcccccttcttcttgtcaccctgcaggtctcccactgctcccgagtgagatgtagcttcccgccgatagtgataggcctagagggagcatgtggttcgtcgccgtc

SEQ ID NO: 128455 - DNA, 531 bp, Zea Mays
gcaagcccgagagtagtgctcagtgagttcctagttgaatttactcccgctgttgtaccttttgattcaggagcatctcattcattcatagtcactggttttgtggaaaagcatggcatttccactgcacatctagaaattcccttgatcacccgaaccccagggtcagaccttctatgccacctcaaatgctcccaagtcaggattcttttaagtggggtagtgttcttggcagacttagccgtcttgccatcccacgaaattgacgtgatcttaggaatggattggttaaccaagcacaatggtgtcataagttgcgcagataagaaagtcagtttcatgtcaagctcagccacccgcccaagattcaatggtgtttaatctagcagcagaaagcatatctgtagtagaagaattcatggatgtgtttccagaagaattgccaggaatgccgccagaaagagaagtagagttctacattgatctaattctcggcaccgcaccaatcgcaaaaagaccataccgcatggc

SEQ ID NO: 128456 - DNA, 363 bp, Zea Mays
tcggccatacccaacaacttgaccaacataataggttacataacctatccaaaccattcagaagcaaaacaacccaaccagattctgactaatctcatttaattcatagccacatgctaaactagctgctccactatcttaactacatgtccctaattcggataacaacttcaagaacgaagatcgaagatgatcgacctcatcaaatcaaggaagaataagattcaagccagatcttcaaaagaatcaagaaccacaatcttggatggagtcttttcttaccctactctttcttaccccaaacctataactgccttaaagatatcttttatcctgcataataaagtggctatatccatatag

SEQ ID NO: 128457 - DNA, 541 bp, Zea Mays
cttggctacccctataggaacttctcccacgtcgccttcatcaagaagtctctcagtcgcgtggtcagccccaacggctgggtagcgtggaacatgaacaaggtcgtcgaggataccacccgaaccatcgtctacctggaatactgcaacgacagcgccgttgccgacacgtccagccatgtcaagtggttgggcttccgcgtcctaaacgccaccgccgaggtggccgcgtacacggcggacatgttcatcaatgcgagcaagtgggtccctgagcctatccagtatgaccacaccctcagcgcggcgccgtcgccgcgcgcctgatagtgctctgctcggcgtgcttaatttagtactgtactacgcaggctggcgttccgtttcgagatcccaccaccttattactatgacattgtatgtctctagtatccatccatgcatcattgtatgaattaaggcatattatggcatgcatgacgtcgtatatatcgtgtatgcatgcatgtacctggacctctacctctatctaccatttctc

SEQ ID NO: 128458 - DNA, 509 bp, Zea Mays
gtttggggttttgatgaagtgacacccaaagaaagcgtcagggactggagaggtgacgattcggattttttaatacctcccgggcgaactcctcgaagcaactatagctaggggtccaccgatcagagacaccacgggggagcgaaaccaggtactgtggtccagagattttcgatttcccaccaaaatggcacgactcccaaaggcagggaacgaggctaaaggaaaaccgaaagaagatttcttagagggacaaaataattccaagtgccccctcaccttacagaaatgacagcggaagacaggtgggcccagtggcccagcaggccctcgaacccgaacgggacgccattgaaggttgcgagtccgagaccagttaaaattcgaattttgaaatttgtaacagtcacgaattctgccgccatgaacttcgccaataggatcagggaaaagcagtgatgaggaaaccctcctagaattcgaaaaccttggggacacagccctccgct

SEQ ID NO: 128459 - DNA, 509 bp, Zea Mays
aattctgctctcagatacatccacgtcaacgcttttcacttcagacaagtgatcctaatccaacggtcagaaacacgtatcacacaacccactgatatacggataacagatgcccttccgctcctaccggccaccggagcattctagatagtgcacgaaggggctgttggagaaaaagaaaaagccacgccgtcgtcgccgccacggggagacgacgatgccatcactctccctgtgcggtcccccatccattgcatccctcctgagtgttgcctttgccttcgtccttttcagcctcctactattcagtttgcgttctagacggattagctagccaatatacagtgcaaaggaaaggtgtgtttggatggaaggccgcacacgcacgcatagaagaagggcatccgtgcacctttgagtcccactgcctaccaacgaattgaccgcaatctcgatcaagagctgagcataacgaggaagacaatgtagatgcttgctttcgtagggaa

SEQ ID NO: 128460 - DNA, 775 bp, Zea Mays
ccacgtacggcgctgattctccgcgcgcggccgtgtgcatgcatggttgttcgtacgttgttgttaataagttgtgaatgcggtggcggcgccgcgggttggtgtctctcgggtggtttgcagatctgaaatcctagtcattaattgggagagaaaatgggaggtttgttgcaattttaaaagggaagttagttcgatcccatctgaaagaaatgctttgcatctacttttagaagagcgaaatcgaatcggagttctctgatgtgacacaaaggctaaaacttaaattttattgcagtacacaactggtacaacgacgtacagctagctgggggtgcaactgcaggaaataaaccaaaatttgcatgactaaattcacacaaacgcttaaaccctgtttattctgttttgtcaattaccttccgcccctgtttgtccaattccccttttaccctgctcctaggacggagccacagtttcagcattattgttgtccagtggcagcaatgcttttgtgtgtgtgtgtgtgcaagaaacggtccctctgtttctatgtttttttgagcaagattatgctatcgtgacatgattggctccacccctgcctgcttggtcctacccactaagccaaaatggactactacaccactatagcatatatatagtactggtggtggcacacgtcttggtagcgacgggacaatagagctcgtacgtggaagaaatcaaaccaaaacttgccatgtttaactgaaaatggatggcacacttagag

SEQ ID NO: 128461 - DNA, 566 bp, Zea Mays
ggggtatcgtgctctctagaccgcacgatcagaaccaatggccaggatcagatctcgcccattataaaccagcaagcgccctagatcgttcgatcacaatccaacggtccagactctaaataacattgatggcgtaacagccctacgatcgcagatcgacgcgtaggatacaatctacctaacgggtacgcgtgggctgatccgatccgtcgaccgcgggatcgacgatccgcgcccttctccacaacccgagcgcccccaggcgacggtatgcggctcccgcggcggccagctcgccggcgagggcaaaatccggccaccaacacctcccgagcccaaaatttaccagtgctagatgttgagaaggacatggagaggagaatgagggttggaattaccgagattgagagctagagaggggctggccacggcgcagagcggagatacggcggagacgcaaattcggcgaggaatttccacggtctccggtcaccttcctccgattgcgcccacgtatggtttcaacacgagccgaacaagcctccgctgccccgattgaggtacaa

SEQ ID NO: 128462 - DNA, 444 bp, Zea Mays
ggaaggggcaatgatagtggtgggcaggaggataatgccggcaattggactaagactcggttggatgaagaatgtgaggtggatggagcgtacaactttgttggaaacatggttaagccccagttggttgaggaatatgaggagacaggtaatgacaaggatggattaaatgatgacggtgaacatgatcttggtgagtgggggatgactcagttggttgaagaccctgatgaaggcataagtgacgatgagttgagtggtggcactgttgtcctaattgacaatgagatcttgacagaagatgagaggggtgcaaagtcaggaatggataaaagagatacgaagttgggattggaagaaagtatcgaggggttaaatggttggattaagcagcatgatgataacaataatttggtagattatggtgcatcaacagatgaggat

SEQ ID NO: 128463 - DNA, 666 bp, Zea Mays
atttgaatgacttgcactttgcacattctagcttcctcagaactagtgaggatcacagcatatcttggccaaggcatactctaacaatttcaacacaaagggataccgatttgaatatcaaatgaaaggttgacttaatacaacaatgcatgcatcaagaagtataacattttacaagcaacctagacatgcttcatactttacaatcattgcaccacatatactaattgaaaaaacaacacgatcatgcatataaagcgcaatgtctaagcacatcataattaataaggttctttaggtataccaaaagaaacagcattttaaagtaaggagcacctaagctaagatactaccaatttaggggcaagaacatagttgtgatcacaatcaatggaacttcaagatattcaatgaaattgcatagttccattctccatacctttgccttttcctgaattgccatgagagcaccagttgtcactaattgagggctccttttgttcatgcaccttatagctcaaaagagtgcattagaggcacaacatggagttggtattcacacaataccagactagagtaatcgtgtgaacattaactaaacaaaatatcatatttgcacataggttaatcattaaaaccatatagcataactcacaaagggataca

SEQ ID NO: 128464 - DNA, 475 bp, Zea Mays
tagtttcttaagatatgggcgataagctagcacacagtaaatggcattgtcatgctatttcgagcgttctttaataagtgattccagggttaggtttcagtgcttctcatgccagcgcgattttttttcttaaaaaaaaaagagaaatccatacttggctttacctttcatgccacctattgttatataatatatctttactgaccatatattacctttagttcacgaaaatatcaacgcgtaccgagtcgattatccttaataaaacaatccggttacgaaaaaactggtggtgagaaaagctttgcctttgcgaaggggcggcatcagctgaatgcatgcatgtatatgtcaacatgtcacgaaatgtaagcggatgggaagacacgtagacagacccaactgcacgtttttttctatccctgggtctcttggccctcggttgttaaacgtgtaccggttaactgtggccaca

SEQ ID NO: 128465 - DNA, 805 bp, Zea Mays
caaggcacggttgactacttcagtttgcccatccgtttgtggatgacaagtggttgaaaataacaactttgtgctaagcttaacccacaatgtcttacaaaagtagctgtgaaattttgtatcccggtctaaaacaatagactttggaactccatgtaaacgaacaatctccctgaaaaacaaatcagcaatatgtgaagcatcatcgctcttatgataggggatataatgtgccattttagaaaagcgatctacaacaacaaaaatagaatccctacccctctaagaccgaggtaaccccagaacaaagtccatagatatatcttcccaaggtacatgtggaataggtaatggagtatataaaccatggggattgaggcgggacttagctttcaagcaaacgatgcagcacccaacatgccgctagacatcatgtctcatgtgtggccaaaagaaatgatcggagagcaaccaaaatgaccagctagtccaccttcatgtgcttcctgcaaaagaactgggcgaatcaaacaagctggggtgcatattttgttagtccgaaataagaagccatcatgcacataatatttatcccaaccttttccatcaatgcaatgagagaaaggttctttaaaatcagcatcagcagcataaagtttttaatggattccaaaccaagcacttttgtatctagttgtgtaatcaacgcacatcttctagacaaggcatcagcaacaatgttatctttaccacgcttatgtttgacaacatagggaaacatttcaatgaactcaatccatttagc

SEQ ID NO: 128466 - DNA, 464 bp, Zea Mays
tgccgggtcaacacaagccacctgttcgacgatttacctggccgacgaccgcaacttcgctgacatctccgttggcgcgctctgggaggagacgatggaacaagcgacaacgactctacatcctagttttcctaagaagaaattggtgctcctctcctcatccactgatggtaaacttggaggtatgaaggcctatcatctctggttcgacccctccgtgttggtcatgctgctcaccaggtacctcgctgagcggatgacgctctactacgacgccaacaccgatgactaccacaacgtgccccgcgtcgagactagggtatccgacttcgggtccacctccaccctccgctacctgccaagggggcaaccttctcagatgggtagcgcgtacctgcagcgcctcaggctactagtggtgtcggcttgcgaccaactgcgagaggcccgcgatcctggtggcg

SEQ ID NO: 128467 - DNA, 562 bp, Zea Mays
cggctgatgggttaggtttctatgcctctcagtttgctaaaaatgctgccaagaaacctagaaaaagtttttttaggtttggttaaagtcattgagggagaggttagatgtgaggatctggaacaggattttagtttccactttccctggggaagaacttggaaagccaccaaatgtccatctggatttttaatgcagttcccctcacaggaaagattggaggaggttgttaagtttcctgaactaaaaatgaaaatatctggggtcaaaattagtgttataccttggtcctctcaagctaaagctaaatctagactccatactacttgggtggtagctgaaaatgttcctgaagaacttttaaactaccaggctatttgtgagcttggctcaactattggggctgtggaggaaattgatttgaattctcttgaatccaaagatatggtcaggtttaaggttcatgtcaaaagtattgatatgattccagaagtcatagaagtgggtgtgaaaccttatctgtatgacatattctttaaagtagagaatattgctgcagagg

SEQ ID NO: 128468 - DNA, 315 bp, Zea Mays
attacccaatacatccaggcaccatgattctatttgggttattgtggacagattgacgaagactgctcatttcttaccagtgcacaccacccacaggacagagaagtatgcggggatctacattgaccaaatagttcgtctgcatgggataccaaggactatagtctcggacagaggagcaccatttgtggcacgattttgggagcaattgcaggaatcacttgggacccatgtcatacgaagctcagcataccatcctcaaacagatggccagacagaaagggtaaatcagattttggaagacatgttgcgggc

SEQ ID NO: 128469 - DNA, 301 bp, Zea Mays
taatttggcttgatcggctgacgtaatgatgaaataaattggtcacagatgagttttagtaaaaaacggcccacgtgtacacaccacttgacggcatgggatccttggcctacatgggccgcagtgttttgggacacagcccccacctggcgacgcggacccggcccagtaggaagcggcagttagttatttggcaaaaaaaggtgcgcccgcggagcttcgaaccagggacctgcggcttgcgttaaatcgttgctaccaccagactacggacttgttcgtgtatataaagaaactatcc

SEQ ID NO: 128470 - DNA, 847 bp, Zea Mays
cgacacaatcgtggcgttgtggcgttaaactctgattcaatttgtgtgtagtacatgtcatatatttcccatgctgctcctagaaggaaggtggaaagaaggttttgtagtaggtggatgatgcaacagcagtgacttgcgagactggaatggcatgccgtaggcgtgtgtgatgccggtggggatgttgtggtatctagctgatttttttctttttctgaaggcgtcaccagagaggtgcgtgcctcacttggatattttccattggtatctaggctgatgtgattgcgatgtgtgtttgttgttgtgatggtagacttatttggcagtggatgagaacaacccgtcaagatattttagtttggataaagatagtgtactgctggtgttgtgggagaaatgaattcgtgtggtttgcttgttagtagaagcaacaacatttgacactttccccaggatgttgatgtcttgctgccagttgatggaatatatgtggtcattgtttaacacagatggagaaggtttttaggattgggcgcacctatcaatgaatgaatgaacaagatgtatacaccagaaacaaaaggaaatggaggatgtgttgttttaaggttattagacatttaataaaggcacgagtgtatgggtttgtgcaggtggctcatctagcagtcaaacgcagagcagagaagcagactggtagaatggaagcagagttgagttagttgcagataacattcaattcagagacctgagactgaattccaagtgtactggttggttggttggttggttgttgatgggcatgttttgatcctatgtgctaaactttagcagggtgctaaag

SEQ ID NO: 128471 - DNA, 352 bp, Zea Mays
aacgaaggcatgccttcaaaaagcttcggtaaacaacaacttcattttcctcaggagcaggggcggtgctgtctcctccaaccctcacaatagacatgtcgcgaaagtatcttcctctcatggtgtcaatatgactttgtttaatggtcaattttctgaagatggtatgtcttggccgctagggccggtcctcagaatcttcatctccactttccacatcataatcatcgctgtcgtcggaatcttcagacaaatccaccattatttcctttgtgtttgtctttgccatagattcgtaaaacccagcgataaaaggatctgcaactttcttctcctcatatagcttctcttc

SEQ ID NO: 128472 - DNA, 634 bp, Zea Mays
tccggcggtgccccctccccttgcactgtagatgtttagtgtcacacggactgcacaacgcctagccctactgcgttctctaccggctacgatgcaagagtgaagtctagtaccacgccagattgagggggcactgtgtcggctcccttccctggctatgtgtgcgcgatagtgtttgttagttaggaaaaaaaattataatagatagtgaatgtgtatgaaaaatattattttatagttatagtgagttatagagtggaagttagaggtaactggtgtgggaagaaaaaaaatagaggtaaaatttaagtgacatggctagggaaaaacatttagagaagaacgttgctgtcagtcgaaaattcacacaccatcttggtactcaacgaagaaagaagctcgatgtacgatcgaatgaagaaactagaaccgatcaaaagggtttattatagctgctaaacagcagccggcagcacaatgagccaaggagataataacacgcacgaataacgggtagaatctgacgatcggatcgaccagcgaggcagcgagacggagaaatcaacggcgcctgtaaagcgaggcgatggatggatggcctggccatcggagatccccggggggcagcggcgca

SEQ ID NO: 128473 - DNA, 310 bp, Zea Mays
caatcccaggctaagcagcatggtcaatttggtcgtcgtgctcaacacagagttggaccacgcccttgacgagttgggcaggttcgggcagaggttgcaaaattgcgtgctgagtgcgtagcacgccactatctggatggtggttctcccgcccttgtcgggattcagcacccttaccattcaccgcctcgtggtcgcttcgactatggtaccccagactgcaggacccggatagatttggatccctagatcgacagagtcggagtctatgataatgcttagttcaatatctcagtctagtcagtctagt

SEQ ID NO: 128474 - DNA, 470 bp, Zea Mays
gctagcttgctaaaataccttcaagttcaagcttgaataggccgtacgtccttggcatatacgatactctaccctgcataataatagtaagctgccaagctgcaaatatgtatacaagacaaagggtgtgtttgtttcaatgttccagtttaaatccagcttatgtccatgagaagttgttgcagattgtcaaacacacttagcttttcagcctgttttttgtgaaaaatcggccaaaatcaacgttaacgcaaaatcgactgaagcactgcgataggaaaaatccgttactttatagattctaaaccttatgaacaccatataatcctacgcatataattcctacgatatttagattttctctcacagccagatttttaaaaaactcgtcaaaaaaaactgaaccaaacagtcccagcatgagtgcatgacttctagaattgcgtatgtacccattttaagttcaatga

SEQ ID NO: 128475 - DNA, 712 bp, Zea Mays
aagtttgggtatgattcccataacaaatttgtagatggtatattactctacaaatttgctgcagagtgtggatcacgttgccatagaaaatctggagaaaaagagttttgaagttgctctgtcaggcatgtagcaagaaactgaaactgaacttcttatggtacagtaactgaagaagaatctcaggtttctttcccccgccatcgatcactcctccaccgcgattcgtgccaccggtgttaggactcgcgctcggggtgggtggataaggacgtgcggtgaaagattcttgccggcggtgagctggaggtcattccggtgactcaccgtggctttcttatccactgtgcagctgggcagataacttcgccggtgcaccgccaccttccggccttgtgccacgtgtcctaaccgcgccacagcatcgccatgacatcctttagcctctccgttgatcgtcggaatgactgccacggtaaaagccacgttgtgtggccaccagtgactcgcccttcgtctcggctaccggtctctctgcgcaaaattggacgccaccgcttagcttctctataaattgaagccactgcaagctccgtagggtagtcaagtaccccgacacccagtattgcccccaattgatcgtcaacgagcttgaatttcacaatttccccaaatccggtttgcgccaccgcaagaacaccctcaccgcggc

SEQ ID NO: 128476 - DNA, 733 bp, Zea Mays
ccctctttaacaaactcgctcgtgcgcagcgaggggatcgaggtgggaatcctggagtcggttgtgttgatcatgcatacctctgtcgcctctgcctatataacctagtcgcgcctcccatcccatctcatcttcttgaccaccaccaacagcgagagcaccataaccgagcacgaacgtgagagagaaggagagttgagtcaccgtcgtcgccttgtgcccacagccgttcggggtccgcgatgtggccagggtgctttgctggattgtgtatgtggtgccgctgtggtcgaagatccactaggacgaccgaaattcgtcgtcgtcgttccgcaccgacgcggaacccgcgtttcgccgtggttggagcggttgtcggatcttctgctggtaagaccctgtccctgttgttagttttcatctccgcaacgcgtagcatcctccagaggttggggtagagtactgcagcgccgggttgatgtcgccggtgggaacgctgcggcggtgaggcaggccaccgccgttgttggtcttcacagggaaggagaaatcgcgtgggtcgttgatccatagatggatgattcagattgaattttggaattccgcttcgtgtcttaatctggggcctcgatctggaatccgatggtccaggctccatactgtttcattaaatggattgatctaatcatcatcgtgggtctaagatccaacggttgaagatgggtgatacccc

SEQ ID NO: 128477 - DNA, 653 bp, Zea Mays
ggcagatctgagccatcctttctcagatacacggcccggattagatctctattaactttgaaccggtacacgaatctaaccgtcggatccgacttcaacggtgagggttttattactctagatcgatttctatccgtccgatctagatcgacggaccagatcgaacctggagaaagggtacgcagtatataatctcaacccttaatccacgcatcaacgatcgggatgcgttctcctacctcactgccaacatcggcgaccgcgcctaacaccacgtcggctcgccatggttgagacacctgacgcactaatcggtacacgattcccatgtatctcgggtgcaaaatgaaatttaggggatggcgatctcgagaagagaattcttacccagtttccgacagtgcgcagctctggtcacgacacacaacggacacacggaggagttagtaccacgacgaccaatttcgagggctccggccgccaacccacagcagggaggtcatcagatcaatccccgacgactcgacggagggagagcacaggtcggagtacggagcggcaccgatccggggcacacgctgacggagcgccaatggcggcgagtcgcgcttgaatgggtaggcatcctatcggctatgagcagagggttacag

SEQ ID NO: 128478 - DNA, 602 bp, Zea Mays
gaaaaaattggtaataaatgttgaatagtatgagaaatgatatttttaagattgtagtggggtataggggatagtatagagggaaccgttgtagaggataaagatatagggagagagagaggttgctggcgtggcacgataataagatatagagggagaaaaatagagtaaactgttgaaccacgcctcgacaacgtcaactttccaccgctcgtgctcgctgccccgtccatggctcaacccggcgaccctgctgtccgcccggagcattcctgtgctgtcgcctcctccaccagcaacatggagcgggagcttgagcggctgagttcccatgcggtggtcgtgtggctcgggcgtgaccgccccaacatcagcccggagcgggtgatgcgggccttctgctcccgcttcggggtgaggacagaggacatcaaggtggctcgaagccctccgggcgacttcctcgtcaccttcacacaccgccaccaccgggaggcggccgtcgctgcaagagacttcctacatagcaaccttgacttccgcatcaggccatggcagctggtcgccctcggggagcgccatgatctctacttccatgtcag

SEQ ID NO: 128479 - DNA, 548 bp, Zea Mays
gtcaaacccacaacaaaatccatgcaaatgtccttccatttccaagaagggatggggagaggctgtaaggtacctgctaccttcgaatgactagctttgattctttggcaagtgtcgcactcagatacatacttagttatttccctcttcatcctggtccaccaatatagggatctgaggtcatgatacatcttgttactcccggggtgcatggaaaacttggaaagatgagcttcgtccaatattttcttcctgagttctggatttttaggaacaaccaatcggtcttcaaaccatagaattcccttgctgtcctgatgaaagcatttgtacttattcttttttttgttcaagcatttccttaatgacttgaacacccttgtcaccaatctgtgccatgattatctgctcttgtaaagttggctctactgagatataatccaaggtacctggggaaaccacttccatgttcagcttgtgcaactcgtcacacagagtggcgatcttagagtccatggttacacaattgcactgggcttttcgactta

SEQ ID NO: 128480 - DNA, 285 bp, Zea Mays
gcagtctcgatgctggtctcgatggtgggttgccaaggaactaagatggagtcagtggacttgttggtcgacaactgcatggcgaacaactgagatcatagatggttttacaactagctcacttcattctcgttggcaaattctgcttcgctctctcttgcatactggatcttcacctaaaattcccattgcatcccatccccaagattccttaccccgacgtgctacttgcgatctcctactaaattctccttctccatatcgtctctgtgtattcttctcaac

SEQ ID NO: 128481 - DNA, 859 bp, Zea Mays
cttgaacttgtcacgggtgctagaattggtccaaatgggctttgatctctcttgagctcccgatcttgctgagcagcgtactggcgatggcaggcccccgtgcatagcgggccctctctcttgtgtcttcttctgccgcttccttgctgccttgtccaccgttgcctcgataggcctcggccactaaatcatcccttgggcaccaaattagcacctccactcttggccttggccacatgggtggaccgctgtggtgggcacctttaccagatttgggaaggaagaggctttgagaaagagaagagtgacggtgacacttggtgtcgggtccatatcaaaacccagtcagcttgtcatctcaggcgcatgtgggtcagagcctgttgggaccaatgcttgcacccaaggcaaacttagagacctagatcacatcacacataagttcggggcttagaaaccggtaacgtggaacttgtccacgttcctgtgaacgtgggaacaatctcgttcctgtagtgttaaaatcttttttaagtatcatgggcacgtaccatgttcccattccatgaccccatcgatccgggaacctggttcctcattcttggccttgtctcctgctagccgagtaggagctgaagctgcccttgctgctggagcaagaacttccatcgttgccagagcaagaatcgcccccatctcctgtgcctccctcattgctggagaaggtgagcagcagccaccctagtggcccccaataccggagtccctattagagcctaaagctactgctgcacctgtcatggtatggatatattttaattttggtgggcctcacaacatatccctaacccaaaccatg

SEQ ID NO: 128482 - DNA, 321 bp, Zea Mays
ttgaaccaccaacaccccgatagcagaaaacaggagcacaaaatctagaggacgaaatccatatcttacaagctccacatcccagtcattcgaatgcaaaatttgaactggaccttcgcaaccatcatccataaaatagaatccaacaccacaaagccgagtagagaaaaccctatcctagaagctccaaatcccaatcacccaaatgacatatttgaaatggaccttcaacaccaacatccggcgataagaaaaaatattgtagtcctaccgacacaatcaatccaaaaacctcccctaaaacgcaagcctcacatcctc

SEQ ID NO: 128483 - DNA, 411 bp, Zea Mays
tccggcaaggcaagatacttggttatctagtatcccatagaggcatagaagcgaacccagtcaagatacatgccataatggacatggccccgctacagtcaacctaagatgtgcaaagactaaccggaagactcgtagcattgaatagattcatctcacggtctaccgagcgtagcctccccttcctcaaaacgctacgcggagccaaggactttgtctggggccttgagcaggctgcagcctttgaatcactgaagcagtagttatctgagctcacaactttgacaaacctagaccccacgtcacccctcctatacattgcaggctcgcacaacatggtcaacgcaactctgttataggagagatgcaaatatggcaagccacaacagtacccagtctacttggtttctg

SEQ ID NO: 128484 - DNA, 308 bp, Zea Mays
accaggccagcatcaatatgtcaccttttgaagccttgtatggaagaagatgccaaaccgctctgatgtggtcaaacgtaggagaaaaaaccctagaagggcctgccttcatcaaagaggcagaagagaaagttgccctgatccgcaaaaggctactcgaaacccagagtcggcaaaagagttatgcagacaacaggaggagagaactcagtttcaaggaaggtgattttgtctatctcaaagtctccccaatgcgtggagtcaaaagatttcaagcaaaagggaagctagctccacgattcgttggc

SEQ ID NO: 128485 - DNA, 326 bp, Zea Mays
tatctacaaaaatattggcagcgcatatctacaaaaatattggcgactacagtacaaatttatatcacggtgggtagcgggtataagagcatctccaagagatcatgtaaaccaactctaaaaatgtttttaggaaagagaatatattttaagtcctccaaccattctctcttcttgtcttcgtattcttcgcatcccgcatccgctgcttgttgccccgcaaatttgcgtgtcgcgaagccttccccaattgcccatatcacgcgcaactaaccgactccggtgcaatgccagccgccaggtacacgtatccatctgatggcaag

SEQ ID NO: 128486 - DNA, 327 bp, Zea Mays
acgttctgccaatggtctgtttctctctcaacgacagtacactcaggatattttggagcgcgtcgggatgagcgtgtgcaagccgtgtagcacacttgttgatctccactccaaattatctgcaaatggacctcccgttgatgacgctactcagtaccgcagcctggcaggtgttgtacagtatttgactttcacccgtccgtacaatgccttcgctgttcagcagatttgcctctatatgcatgatccacgagagccctacctcaaggctctcaagcgcatcttgcgctacctgcaaggcactatatctcttggactgactatgcg

SEQ ID NO: 128487 - DNA, 408 bp, Zea Mays
gtcggtcacaacatcgtccacgccggggtcgacgactgggaggattcaccctctatcgcggatacctcggggagcagagaccctcgccggagagagagaattaagaggagagggagagtggatccgcccccatgtccggcttcgccaagaacgcgcgcgggcggacagcagaacgtcatgggcgagttcaagtccgatgtcgtccccatctgcgtctcctcgccaacgtgttcgccgtcttcgaccactggtgccgccccaattgctcacaagcgtcatgatctccacagcaacaccgtcgctcgcgtgaccaggaatctccatgcttcgatcttcagtaagaagtcgcgccgattgttcgctatgcccttaggatggtttagcgccgggccgtgtggtcgatcgggc

SEQ ID NO: 128488 - DNA, 291 bp, Zea Mays
aagaaagtcacgtttaaatataatagtgacagagaattgcggtcaaatcccaaatagttttggactgggagtggtacattaaatcttagataggtggtggggctttcatgcactgcactgtagaccgtagtacaggaaaacggttgccgccaccgctggagaatcaacacgacccacgctgcactgcactgcacgcatgaaggagcgggaaaccgccgtgccatctgccatactactccgtatcttgtatccgtcacacactcacagtcacactggggatgcgatgccgag

SEQ ID NO: 128489 - DNA, 396 bp, Zea Mays
cttgtaggttttgctgactggatcaagagatagagaggggagaaatctggtttgtctcactgccgcgcacagagagaagatcgcggttttgacgtgtccaaggcacgtgtcccgatgccatcttctgacatgagatagaggggttagttaggcacaattttgtcaatggggtcattaggttttgagctagggatcaaggtgaacacgctcggcctttagctcaagggctgaaattcagaattctgaatttgaaaaattcccatttgagaagcttgtttggagatcttattaaactattttggacaagcttccataatctttattgcagcttacttagtgtacctcaatgtttatatttggcccaagccatgattttatatttttcatactcttttg

SEQ ID NO: 128490 - DNA, 335 bp, Zea Mays
gtcgaagggggtatgagacgatcgaggccgtcagatctgacccagatggtccagattagatccccacttcaattgaaccggtatgcattccagtccacaagatcagagatcaacggtgggcacttaatcacgagtgattccatcctgagtcgcaggttcacgatccaggtgctgcgaattatccacccaaccggtcatccccccctttgatctcacccgctcaaacctaatcaaacggccataagaccatcttccacctggcaacacccaagcagtggcgcccacatccccgcggcggcaagaagcccgccggcgatcgcccaccaccccacccc

SEQ ID NO: 128491 - DNA, 640 bp, Zea Mays
gtcctaatccatgctcgcatgcatgatcattagctcataatcgtgaatgtttctagggttgctagtgtgatacatattgaagattggatctggaacgctcctataaatggtttatcatttatctggtcctagatttggttaatagtgtgaataataatggtgaatttttggcctatttctattcttttggttgtgcacatagcatgtgtcgctttaggatcaataatcctctaaatcatgctttaggcaggtttgtttatgttgtcggtcactctcaatgcactgttaatttcattatttttcactatcgacacaaaaagatgataatctaatcaagggagtcaatgaatgcaactgacacaggttgatccacacgatctggctagaattcgacgtttaatctgtgttatgcatttcacataccataatacaccctccctggtggcatgcctagaatccccctagtcatatatgctttaagagggatgatcacagtgcacctcctgattcttcctatgtcgtttgcttggacgatcaaccacaagcttcttgcaacgacatatttcttgcacgtccgatgggactgcaacatcgaccactcatgagccgatctacattgactcatcatcgctaacatgcc

SEQ ID NO: 128492 - DNA, 547 bp, Zea Mays
tacctaattagctgatttcacaatgtctactacacatgcaagctttgcattttattacatgaataggaggtcttgtctcaatatcgtgtgatacttgatgaaactgcggcacgataccaagacgcaccagagctgacccaagatgaagacgcaccagaaccgaccgatacaaccactgagaggtcaaggaaatggaagcatagcgatcgaaaaagaggtgacaggggactgaacaagtttgctaacaaaacatataaaatctcatatgtgagcccgaaaggtcagcccctagctctagaagaggcactccttaagttccggaatgcacttaggttcttagttagagataatcttgacatcacaatccgacattggagagatgtgtcatttgatgtcaagaatcaaatatggaataaggtattaacgaggtttgttctgtctcggggttcagaagaacttgtgaaggaatacacgatgaagcagcttgcaatcaatttccgaaactggaggtctgagatgaatacaaagttggcaaagaaaggcctag

SEQ ID NO: 128493 - DNA, 886 bp, Zea Mays
acctgacaaaagcaacatgttcaagctcaccgccaccaaggagaaacgctagctgcttttcctcgagaagtacgaagaagccaagatgtggtgggtttgcttgacgaatctgacattctgactgaagtttggacatagcattggggtgggtgcctgactgcctggtcagggttcgcaccgagatccttggacggaagaactgaggcgatttcgacacaatcttcttgggctcaaacaggtgaacggagaattcaggtcccacttcatccgacgatcacgcatccactccatttgccactgacctctctgttactgcgtccaggggtaagatcttgagagagcaacgcaagaacagagctcactagtagctgtatagcaatcttcgttttcttgttaaaaagggagaaaaacaagagagcacagcagatatttttgtattccattcctgaacctggtctcactttccattccattccattccattggatgccaaaccaaatcacaacccgtggttgaaaccaggacaagctcgcaagaatttggcatcagcagtccctagtagccgtttggaccttccgtagtctgaaaccaccaaagtttggccacggaatctgtagacatgaaaactaacaagaattaacaacaacaaaatggatcacaacttcaaaacaatattgcaacattgttatttggtgtatacacaaacctgtcaaaatcttcaaaacaatgttgcaacaatggccacgtctccagatttttattaggtgtatacccaaacctgtcaaaatctggaaactacgaagcttctgttctgaagatggctattgccagggaacggcggtgtcttgtttgcgctcacttgacgcatatctgcccaaaagggttt

SEQ ID NO: 128494 - DNA, 988 bp, Zea Mays
gtggttttaggtgaggagagaggtgaacatggtatggaatggagcatgcagtggtgaaaacttttgtcttgctcagtcaaacaacggctcatggttgactgtactggcatcaacctttgtccacagtccaccccaccatccaccattagcagggcatcaatcagcatgcatctttcttcctggtggcctctgcaagctctgttccgacttcatcgcctttcacctactcccattgctccgccattaattttttaccggatcaagagcaccttccttcctgtcctgtgcatcgaggaggagagagaaagagtatgtgcgtgtgagagggagcagagtcaagaacagcaagcagcccagaacccaacatacatttaagagggggatccaaaaaaattgcagtctttacctgcaccacccctccctaccacaaatttccctctctgctggaactggaagcagccgtggcatccgccgtttcttgcgtgcttcctttcttggttctcctactagctgtcatcgctggtactgaaccagcggagaagagagaggtgaaccacggtgatccccgtgctggacaccatggccgtgtcctggtaggggataagcaacccaggaaagcagcaaccttccgctgtgcggatcacaggagggggactgcgtggggaccagaccaagcatggaggcactggcggccgcattcgccaccggccttgtccttgccctcgcggcggcgccagcgggagccgaaaccgaccccgacgacggtaagagccctgggcggcgctcccggttccggctgagtttcttggtttcttgggatggcgtggtgggttttccttttctttcttgtttcgcgcgcgattgatggttcggttccgtgttgcagccgcggcgctggcgaatctctacacctcctggaacagcccgtcgcagctggctgggtggtcggccagcggcggcgatccctgcggcgcggcgtggcagggcg

SEQ ID NO: 128495 - DNA, 592 bp, Zea Mays
gcggggtcggcgacagcatggggaggaagaccacggtgacacggtgaggagaagtctgggcgtggcgaaacattggatctcgcgtggccggagcttgccctggcattaaccactgcaccgctgtccagcgatagccatggcagcctgcacgacagcgcggcgtagaaaacaccaccagcgccccctgtccatgaggtccgatagcggcgtgactgaatggcttgtttgcgtcgaggttatccctaggtcgtgctgcccgactgcggaattttccaggatctgttctaagctgccacctgtgaatttgcacttcaatgtcttatatgccaaattcaacatctacaataccagctcaaacgaatatatgcagtgtcaagtacattaaatcttattatggaaattgggtatttgttgtcctcattttcttaggtagtccacgacctctattcacgaactctccaaaacagaagcacaatatttctcagcttagttctgtatcattggacccctgaaataaataagaaaacagccactataaaacagtttgtcaggttcatctcttctctccatggttgcgttgccaaactttttc

SEQ ID NO: 128496 - DNA, 350 bp, Zea Mays
caaccacagaattgtcaaggaagcgtcgtgaacacaccgaccaagaacaacaacacaactaccccagtccaacctaatggttgtttcaagtgtggtgaacttggccaccatgccaacaactgcccaaggcgttatcaacagacaccccagaagaacaacaactagaggactgactagaacacacctgctcgtggatctgcacagaacaaaactccacagaaccagagtaggggaagagtcaatcatgtgacaacagaatcagttcttgagtatgccgacgtggtgtatggtatgtttcttattaactccatcatcagttttatttgattctggagcatctcactcctaag

SEQ ID NO: 128497 - DNA, 604 bp, Zea Mays
ctaatttattccataataagaaaatatgtagttctaatcttttcctttttgtgtttgcagcaagccagcaattacagctcgagcacttaggttctttacaatttaaaaatgttattccgccacaggtttacatgtaccctttgcgaattctgtgtttcggattgatatacctttccaacagtttgcagatttctcttactatccccaaagaacacatatcatggtgttcccatggattacccttttttggcagctaaagcaaatgtgtgttataatataagattgctatatctttctacaacatggtgtttcacatcgtccaaatgcatatgatcgcccctatggaggcttcacccagacaaatttttactcctgttgcaatgcatggacatgaagctatcatcaatcaaacatatccgacacttcttcaccatgagttatttgttggtttctgattctacatttctggtggaagcatttgggttgctgagaaatatttgggataaaacttctttttttctgctcatgtacttgtctactgatgttgaatgaataattggacatcctttctaattattggacattgtggtatgtcagatagggc

SEQ ID NO: 128498 - DNA, 530 bp, Zea Mays
tgatcgtgtgtctgttgttatgagagatgcgagcaagacagatgatgatgtagatgagatcaagcagtacagagatgcaaggtgggtgaccccgccagaagccttatggaggatatacagctttgagcttagtcagaactctccacctgtgatgcagctgcagctccatcttccaaacatgcacatggtggcatttcatgatcggcaaatggtccagcgagttgtaaaccgtccaggtgctgataggtcaatgctcacagcatattttgaggcaaataggctacacgaagaggctccaggcatcctatattgtgacttccctgagtggttcatttggcagagtggtaagggcaaagtatggcaacggaggaaacgagatacgggtggacaagtcggtagaatagtctctgctcatccagccgagggggagcgctactatctccgtgttctcctaaaccacgtggctggcgccatctcctatgtggatctaaggacagtagatggtgtcacgctaccgacttttcgtgagg

SEQ ID NO: 128499 - DNA, 595 bp, Zea Mays
tgacatgcccatgatgatgaagctaggctactttggggaagctgaaaggaaacttgtccgatttgccggagaagagaccaccccaatgacgaaggatgatgaagtagtagttttcaagagttttttcagggcaggactgcgacttcctttgaatgagatgataggggaagtcttgaaattttttgaaatatatcttcaccagctgccctctaacgccattgttaggcttagtgtcttcatctgggccctccgaagtcaagggatgagctcagatgccaaagcattctgccgggtgcacgaattgcactaccagacgaaggccagggcagacgatcttcatgaaaattttggttgctacaattttgcgtatcgcaaggatacgaaggctccagttctcagttaccgcaccaaatggccaactagctggaaaggtgaatggttttatatcaaggttgatgagaagaagagggggaaactaatgacgatggtcatgtgcccgctgtccttgaacttcggaatgaccaggcccctgtgcaacatgcagctagggtcagcatgccagctggccgaggtagaatttagggtggtggttgaa

SEQ ID NO: 128500 - DNA, 350 bp, Zea Mays
gcgaaatgacatggcgaaggggtacggtggattccccaccgcaggattagaaatcaagggccacaatcaacaccattgattcaatgaagcggtgcacatccagaaccgtcgatcgagcgatccacggccgagattcaatgcggacgatggggtatacacaatctaatctaaaccgttgcttcttggatctacggtctaaatcctaccgccatcccgatctaatcctagacgccccaaaccgattcaacggccaggaggccttcacccaattccgcaccgggtcacgtcggcgcggcaatcctccatggcggagagatggccggaggtcggcgaagctacgcaaacgagcc

SEQ ID NO: 128501 - DNA, 417 bp, Zea Mays
ctgggctgggcatggctgcgcgccatggctgggagggctgccagcaaaggctgttgcagggccgagggggcttcctggccacgccatcgtgagagcaggggctgacctgcccactaggatgcagtaggggatgggcacgagcagcacaaggagtgaccaggcttggggcgaacgacggttgtagaggctgcgacataccactagaagcgaggaagatagagaagggagagaactcaccagaaatggaggagatggccagagaaaggaaccactggcgacgatgaaggtgtaggttgccgtggcaccgcgcgagcacgcatgaaaaggatggctgcacgagggggaggagttgtggtggaccagcaactttgggagtgggggcggggacatatatttatatatagagagagtagaggg

SEQ ID NO: 128502 - DNA, 348 bp, Zea Mays
acgaagacaacttgatgaccaaagtcagcaaatggaggtcattgagggtgaacttgggaggttcaccatgaagaggggagaagggccacaagaaatgtacaacagactcatgatcctggtgaccaagtgtggaactatggaagcaaaagatcgatggatcatgaagtcgtccgactcatgctaaggtcattactgttttagatacaaatcttgtttccttgatccgttaaaatactaggtacactaagatgaatcccgaggtagtgcttggcaaatttgttagtcatgaaatgatggttaaagatgccaagtacatcgatgacattgctaatggaagcaccccctcca

SEQ ID NO: 128503 - DNA, 630 bp, Zea Mays
ctttggcaggagcttctgaaggtccagcttcagtaagagtgtgggccatgctagcgtcgtcagttttccttgaatctttagcctgcgtgataagagcttcagcaaggacaggagctgatgtttttacggactccagaacaacatctagcacgctagccattctccttttccttggagttgttgtgggaatgcttgatggcttcggcaggtccactgcacatgatggactcagcgccttaaattgtcctgtcgtcttctctagtttcggctcttcggtcagatttgtacttgcctcgactggcatagcatgacctagttctatggcaggaacaaccccttcacttagctttagcacatcggtcgtctcaatacacctcggtcggcgtgtcaaaactttaaccttcttcgacctcgacacactagaaggtgttgaggtagcagctttccttttcttcccttgctttcgcgtgggatagcagtaatcggggtagacaaacctgataacatcaaaaacctattcagcctcttttttcctcgagcgccgaaggcgactgtcatagcttcatcttcagcccttgagtaggctccaagtagctcatcacttgttgcctctatagcatccaaccaatc

SEQ ID NO: 128504 - DNA, 354 bp, Zea Mays
gcagaagagttatgctaatactcggagaagactactggagtttaaggagggtgatcacgtgtatctgaaggtgtcaccgatccggggtatgaggagatttaaagttaaaggaaagttgtcccctcgcttcattggatctttcttgatcttaaagctagtggaataagttgcatatcagctagaactacccgatcgcctgtcagatgtacatgatgtctttcacgtgtcccaactaaagaagtgcctcagggtacatgaggaacagctacaaatggaggaccttagtgttcaagatgatctgacctatacagaacacccgatcaagattctcgacactctcactcgagttacaag

SEQ ID NO: 128505 - DNA, 629 bp, Zea Mays
aaacaaacagaccatccgccataaatgcgccgcagtataataagtgtgcgcgggttattaatacgcagctgtccggagtccgtggactgacgacgcatgtcgtcactgtgctagagcctctgcctgtgcctcgtggcggctattgccgtcggcaaagcagattaatcgtgtcagcggatacagcaccggtatcccctgcggccgtatcaccacaccacaccaaccgctccaacaccgagccttactgagctcttcttgtatctcaatcaccaacgagctgtccagcgcgttcagggggccttggtcttgcgggcacgaggcccagcgcgaagagaggccgctcgggtcctgtggtaggtcctgccgtcctggcggctggcgaagaggaggaggttatagtctgcctgtaagccgctttctgcgccaaccctcctgtggagtcatttggtgagtcgtctttcctgctctatatgtgtgcatatccaatatccaatctatatgtaatccatttagtactctaacttaataaaccagtctgtaatattttagaaaactaatttagaaaaataaggaaacttagccaagggcatatcagatgccgaccataacaataatacaccatggaagtt

SEQ ID NO: 128506 - DNA, 1672 bp, Zea Mays
tattaattcaacagtagcatttgccattgctttgtattctgcttcagtgttggaccgtgacacagtcggttacttcttagcacaccaagagatgagatttgagccaaagaaaactgcaaagcccccgattgacttacgatcatcagtacacccggcccagtccacaacatagttgaggtggacttgtgaatcttgagaccaatggtcaaggtaccttgtacataccacatgatgcgttttacagctgtcatgtgtgtagacgttggtgactatagatactgacatgctttgttgatagcaaaagaaagatctggccaggtgagagctagatattgaagtcctccaaccatgcttctatacagtgtaacaacctcatgatcaagtggagtgccaacatgtgctgataacttctcaaaggttgacattggtgttgccattggcttgcaatgagacatctcaaacttctgaagcaagtcaataccatatttatgctgctggagtaaaagcgcatcaatacctaagaagtaatgaaggtcaccaaggtctttaagagcaaagtcctgcttcaaatcgtcaagcaaagcatcaatagcgcctggtgacgagcttgtaactatgatatcattcacatacacgagcacatacatagtgaattttccacgatcataaataaacaaagatatatctgcctgagagggaacaaagccaagatcctgtaattttatgtggaggcgagagtaccatgcacgtgatgcttgtttaaggccataaagagctttgtccaacttgcagtgatatgatgggaacagaggatcctcaaacctaggagatttgcttcatgaacacttcttcctctagaacaccatgaagaaacatgttctgcacatccaattgacgaagaatccatcctttggataccgcaacagaaaaaacaagtctgatagtaacaaacttgactacatgattgaacatgtcgtcatagtcaataccatatcactatttaaaacctttggcaaccaattttgccttatatcgatcaatagaaccatcaggtttccttttgattgtatacacccacttgcaatcaattaagtttctttgcttgtcaggcaggactaagtgccatgtcttgtttcgttggagggcagatatttcagattccatagcatttttccaattttgatcaaccaacgccacttggagtgatgcaggttccacagatgttacaacagagagaccatatgggatagtaccatcgatatagactttgggtttgcgaatacctgcttgcagccgggtgcgcggaccagagatcggtggaggtgaattgtgagcagatattgttggatctagtccttgcaactgcaaacgttctggcatggaagtagtcgctgatgtgtcgtcaacatcggttggacctggggcaacctcggttattggctcgttgtcgggcggggtaggaagcagcgaaacacttggcgaccgaggatttgctgctagaggttgagacagttctggtatgggggccctgaacgtcgctgcaaacaagtttgccagagccaaaaccgaggagggttgcacgcctaggatcctttgcggctgcaaaatagggtgagtccacatatttggaacaatgacggtagaatccgtatgaatattaacaacaggctca

SEQ ID NO: 128507 - DNA, 446 bp, Zea Mays
gacaagtgatgatgatggtggaaaggatgatgagattgaccttccctctacccacgctcctattattcgagggttggttctccaccgggtgaaggcccgtcgttctggcaatgagccagttacgaattttactgccaacgggggttttgcacttctccaggacatccgctttcagaatcctggattacgtattcgtgatgccaggattgatgggaatcggttctggactcttcagcatgtcgatttctacaactcggtaattcttcccaagaaacatcagcccattctgcatcagcggtacatcaattgggaaggatgtgaagctattggagatccggaaatgacacaggctttgagggtctgtgagaggaagaaaatgaagaatattatgaccttccaatatgattggaatgatgaggtcattgctcagttttattccactcttt

SEQ ID NO: 128508 - DNA, 557 bp, Zea Mays
gcgagaagagatacgctaggagagaagaacgcaaccgcagctgcaacaacaatttcaacagcaacaacagcaacaagtaccattgcttccaccaccaccaccaattccacctcgtgataagtaccgggaatttatgagccataagccaccgaccttcaccagttcgccagatccacttgatgcggatgattggttgaagtcaattgagaagatgctcaacatcgcccaatgctcagaccgggagaaagttctttatgcctctggtcgtctgacaggtcctgctactgactggtgggattcttatactactacccatgatactgctgatactattacttgggcagagttcagtacacagtttagaaactaccacattccagctggattgatgaagatcaagaagaaggagtttctgtcattgaagcaaggcaacatgtctgtcagcgagtacagagataaattcattcaactgtcaagatatgctccggatgaagttgctgaggatgagagaaaaaaggagcactttattgaaggacttaatggacccctacagtcac

SEQ ID NO: 128509 - DNA, 315 bp, Zea Mays
gtgcaccttcacgccgaggaccggaaaaacttcggcggaaatcgtggagctagtcccctgcgctcgcaacaagtggggcaactggtgggattattggttttatgtttcgggaggcgaagtcgaagacctcccagggctccccgcggccataatgtgctcccaccaccgtttgaggtggcggaggacgatggggacgaaggggccctccggtgcactgcccccattagtagcgggcgtgacttggttgaggaattcatcggttatggagtgtggcccttggcgcatggctgggtacttggtgaagtgtgccctcgc

SEQ ID NO: 128510 - DNA, 572 bp, Zea Mays
tggggccatagtgtcagtccctcaccctggtgtttgcttcagccaacgctcacgctagtgtcgctgtcatatagggcccgcggggcgtccacccatgcgcacaactgacgacgactcttgggccctccccgtcaaaaagctccatcgccgcgcctcaaccacctcccacgacatgcacgtgcaccagctggcgcaaccaaccaccagcctcgcccacatataagtcggtgtgtgcatccgtgggcatcgtcacatgccatacgctgggcccggctctattgagattgagggagagagagagagagttgaattctgtcgtggccgtgaaagagggagattgttgccaacatcgctcctcgtctccgccattgtttggagcccacagtgtggacgagggtgttcgcacgaaagcatcgatcgagtacaaggaaccgtcgggcgcatggtcaatcagagtgcccagaattcctcaccggcgtgaatcaccgccaccgaatccgccttgcgccgcggctgggcatctctacacctctatctttggtaagaatcccctccattagtccatgttcgcc

SEQ ID NO: 128511 - DNA, 825 bp, Zea Mays
aaaatacacaagagccaatcaaaggcagcaggttcctacatgcatgcatgagtagtagtgtagtactaagctgatctcttgggccaattaaagggctgcatgcatgatctgcatcttatatcatatgtcataggcaccagtggcctatgctcttgcatatatgctccagatatatgcatgatcgtcagatgggagatcgagctagctagctagggacgagaggggagagattaataacgacgagcacacagttattagttgtttaaactatattatatatacataaatactatacggtgatcaagcgagcatcacatcatttctttcgcagccagacattcttcccgtccatgttagtaaactgtaaaggcatggggggaaaagcagtattccgggcactattcttataggccccagatctttttatggatctcactgtttggtgcattgtacatgtatttattccatctctcgcgcgcgcctagaattttcctcccattggcattgagcccccttttttttctctaaatcctgcggctctgaattgttgcactggccgctgctttaacctgcatgcttaaatgttccatctgctgcacaagatctaagatgttcattgctgtgtactgttgggttccttagcttgtggatctcatcgagttttgcacttcctttttagttctgcccgtagtatatattgaagtgtgtgtacccttcttgcattgatgccactgttggtccccgtttaacctaaccatacctagttcgattccatgcattgctcgagtgagttttctatatataccaacagctgcatgatgatat

SEQ ID NO: 128512 - DNA, 651 bp, Zea Mays
tactatacaaagcgcgacgaaaacgtgtgccgtcattcgtccacgtcggtgtaaaaaaaaccgtacgcacgatttctgatcaacggacgttgtttcttctcggtctgcctttgcctggaaggttccagtaaggcatattcgaatactttgcctccgtacttcgcgtctgtcatctctcaaagggcctgctgtctgcagcgttggtgaccgcggcgccggagtccggagaccaccgggcgtgcgtcccctctcctcgtctgctttgtccgtctccacatcttgtgcaggttcgtccaatacgtcatagtgtttccttccccaacaacgcatactgttagctaaggtttcctaagctgttaatcttggccggcttcaatgtcgccctctccctcactcttcttcttaattgtaattgcgacgagatgaggtccgcctatgtcggatctacgaagggcagcgtctttttcccccaaaatcgcatactggtagctaggattttccaacatcttgatcttggccacaatccatgtcgccctcaccctcgctgttcttatccgcgacgagaagaggtcagcctgtgtcggatctacgaagcacagagtttcttctcaagcttggagaccgaaggaccacctccatttgaaatccaat

SEQ ID NO: 128513 - DNA, 496 bp, Zea Mays
gtcagccggggagggagggtcccgtccaaaaataggccaccgcgccgcgctcgacctctcggcgagttggtgacgacggacgagggcatggaagtggaagcagcgaaccagcacttgctcacctcacggccgccgtctgcggttttacacctcgcgtgtcgcgggggcctcgactgtgtttgctggcgctgatcgatcgatactactcctactaatctcctcctccaggttgggaattgggacgggtatttattgcttgtccggccggcgctgcggacatccttgagatatatagctagctacaccatgacatcggtcagcgtcaacggaggacgtcaggtccgatcacaccggtgaggttgcttattgcctattggaccggtctgctttgatgtacgtggcgtagtgaaagtcgtcaaggacactaactggtggcggaggacgctccaaaattaatatgttgctaaaatcccaaaattaagatggcggagcatcg

SEQ ID NO: 128514 - DNA, 584 bp, Zea Mays
atgtaatgacaaacctataaatcgatgtcgtttcttgcagccctctgtcgatgacgcgtccgctccttatcctagcacctcgtcgtaatatggaatacagggagatccacacctcttcgcatcctctgcaacgtccacttcctgtgtgcgcgccttccatttcatctggtgagtctcgagtacatcccgatcctaattcttttttgctatgtgtctctgtgaacatcttatggtttcagttgcaggctggcgatgccaccgcttaattttatagataagtttaacattggatttttctgacttcttgcactgatctgccatgaatcctgaaatgtagtcccatgtgtgccatatttcctccatgcatgattattaagtctgtgttctgttcttgaagtttccaatctcacacgcatgattaatgtgccatatttcctccatgcatgtcacctttttcaaggaatgtgggtaataaattctctctaatattttagctccgattcaatctcgtatctagttctagacgaactgctttacaacgaaccctgcctctaactctgggatgatttcttctgcagatgcgg

SEQ ID NO: 128515 - DNA, 563 bp, Zea Mays
ttgggaaacaacggcagcctcgaagtcaaaccagtgctagaagacctcatatgcaaagctcaacacctagactcagagacaacaagacttgtggagaaagcttgcaaagaacaacttccggacctcaggacagatgaacaaggagccctttggttcaagaatcgtatgtgtgtaccaaaaggggaggcacgagaagtcctgctcgaggaagctcacaactcagcctactccatccacccagggactaccaagatgtacctagacctcaaaaccagatactggtggagagggatgaagaaagagatagcacagtatgtggcccggtgtgacacctgccaacgaacgaaggccgagcaccagaagcctgcaggcctattgcaacccctcccagtgcctgaatggaagtgggaagaaataggcatggattttgtaactggactaccccggacgcaaaaagggaatgactctatctgggtaataatagaccgtcttaccaaggtagcccatttcatcccagtgaaaactacctttggaggagccacccttgcccgaatttatctcaa

SEQ ID NO: 128516 - DNA, 625 bp, Zea Mays
accccccttaaaaggtatctcgacctcgagattaagataaactagagaagaggtggggaaattctattcaaagttcttcttctctctcccaagttgcttcatcttctccatgatgactctattgcactttgcacattttgattactttactcctcatgacacgagtcaaagtatcaaggatcttgataggatactccgtataagtcagatcatcttgaacgctaagctcctccataggcagttgcttttcgggtacccagagacacttcttcaactgggatacatagaagacatcatgtacatccgcaagatggtcgggtagttctagttggtaggcaacttcccccactcgctttaggatcatgaagggtacaataaagcgaggggacaacttccctttaactttaaacctcctcataccccggattggtgacacctttaggtacacgtgatcaccctccttgaattctaactgccttctccgggtatctgcatagcttttctgccttgattgcgcagttctcaagttctcccatttaaaccatacttgttcttctgcctttcaccagtttgatcccaatatagaggagtcctgcactttctgccatataaagcttcaaacgag

SEQ ID NO: 128517 - DNA, 273 bp, Zea Mays
gactgttgctcacatgtacaaggaacaccgcgtgctttggacggtgctcttaaattgagcgtcactcaactgcggccgctgtcttcttgcacgggagcaatcgtggacagaacgatgtgaagtttcagtgccacgcctgtaggctggctggccttgatcgatcggagttctacgcttaggtactggtgccagctgccagagagcagctgttagctagctagtactagtagctaccgtgccatctgttttcaacgcaagccgcagtgttttcgc

SEQ ID NO: 128518 - DNA, 477 bp, Zea Mays
ggaaaattgctgcttcggcatcctctagtgcgtcgaaggcgaagaaagtgaaggtcttgacacgtagaccgagacgcattaagacggctaatgtgccaaagcttattgaaggtgtagaaattgccctttccgccatagaattaggtcctatcatgccactcaaaactcatacagatccgggcgaagagtcaaaatcagagaaggcagcagaacagctgaaggtactgagcctagcaactacaacagaactaccgaagccatcaagtgtttctgcagcgaccctaagaaaaaggagaatggctagtgtattagacgctattttggaatccacaaagatgtcagctcccgcttttgccgaagcttctagcgaaaaaactaaggatgcaaaagaagacgttgctgcgagcgcggctatcgctcctaccgaagctgggccaatagaactggtggaagaaagtgctcctaagggatctaaac

SEQ ID NO: 128519 - DNA, 459 bp, Zea Mays
gggaattggagagcccagcgccccaccatcgcctcgtcttgtggtgccatcgtagttctgcaagtgcgccgtcgcttgggccttggtggatatccaggaaggttcgccgtcgtttgtggcatcgatgcatcgttccagtgtgtgctggcgtctggggtcaggggattacgcacctggttctcggtgccgccgcacggcatggtctgcacctaatcgtagaaatcccgggtaagacatcatgaactaactcgcgtcaatctgtgtcgtgttgctggggtgccttgcgccgccactgtcgtggggaggaagaagctgaccagccgttggatccggtacgattagatctgcggttgatagtgtttcgatcgccagatgtagcttgtgcggttaagattagaaccccttacaccttcgccttgattgaacttagaccgttggattagatcggatgggtgagac

SEQ ID NO: 128520 - DNA, 637 bp, Zea Mays
ggaagaagtgctcgcatctccatctttcaagaatctaactatagatcggaggcgagcggttgtcctttcaagggaggcaagaaccaaacagtgatgttttagttcatatctcaaccaattttaatcatgggagagttgtcagtgatcttgggcaacttcaacttctaaatgatgtcgaatgtcacgggcaagggccaattgggatctgatatggccgacttgtttctaactctaagattgcaaggcctagccggtctttttaatttgatggagaatcgctcgagcggacagcagcatgagacctgttggttccaggagagttgtactatatctaaaaaaccgagggctgatttgatgaccaaggaattggaggtatgcattgctattcaaatttgaatatcacggggattcctctcatgcatcccctccaattctctggttaccaaatcagctctcaaagtgaaacatccttttatcccttactctatccatgagacccaaaatcagtgagcaatgatccgacatttcagaagcacaactttggagaatattatcaggataggtatcatcccagtcattagtgcagagacaagcatgccaagacgcagacgtcgtattggcaactttggagaatttg

SEQ ID NO: 128521 - DNA, 651 bp, Zea Mays
gcttttacgcaaggtcaactgaaaattaaccctaccgtgggctaaatcatgtcatgtgtagtacgtttgatttgtctgggccttgagtggtatagactccaatagttctttatggccctctggcagtctgtaaaggagagggtgagccagaggggaaggcattgctactggccttaacttctttgtacgtctgatggacgatttattggggaagagccgaagagggccagcctcagtactaacactactgtttctgtagtagtaggaacagtgctgcgtcgatatgcatctctctctcatggagatggagagccttggttgcgttctgtgttcttgtcctttgtgtgcgagagacagtgaggagagagactgtacattaccgtctctcctcttttttttttctctctctctcctttcactgcattgagtaggtacggcgtgtgtgctagctccttgctgggagcaatggaggcaaatgccacgtaccggctcagcaataggtatccttaactagtaaggtgtaggagggggatctttttgcactgctgaggctagaatagacatgtatagatgctgtgtctactgacaaaagtacctttggtacgttgtaagctggaaaaggcaatggggagttatgggggagggaaaaaa

SEQ ID NO: 128522 - DNA, 409 bp, Zea Mays
gagagaagaagggtagagtagccaagtgccatcagattgggtgccagcggtggggattagatactggacatacttgttcagggaatagatctgggccgtaggatggaatcgagcgggttggatttgatctcggttccttaaaattagaccattgaattttgatcagatggacaccacttcatactggttcagtaggaataggatgtaatcctgacctctagtgccaatcggatggtcggaatcagcaaatacccccttctgtggtcgaatcttggcccttcgatcagaatcgaacggttggcactataatagggtttagttgaaaccgggccgttgttctcggatgttgcggacgagattccatgccggttcaatgtatagtcaatctaatctgagcgctcatttagca

SEQ ID NO: 128523 - DNA, 1214 bp, Zea Mays
ctaggtgctctcaaaaccatagtaaaatattatttgagtctccaaaccatagtacacgttttggtccccggaggacggtaaggctattttggcctcccgcgacacatgtttttgtcgttgaacaacaatttgatgccacccgttcgccacccttgttttggccactaagacaggtaaggctgtttttggcctcgcgtgagctacaacacatgttttcatggccgaacaaccaatttagtgtccaaccatagtacactagtgttaaaaccatagtacacatttttgtccccggaggcctgtaaggctatttttggcgtcccgcgacacatgttttcttcgtcgaacaacaatttcatgcctcccgcccgccaaacatgttttggctactggcatgggaaaggttgtttttagcatctattgagctacatcacacaaaacacttaaatcctaaaccccgagccccaaaccctaaaccatgaacccgtaaccgcgaacccttagactaaaacccgacccccaaaacacaaaatcacaaatcccaaactccaaaccctaaacattaaaccccaaacgctaaccctcaaatcgaaacccgaaatctcgaatcccaaaagcctaagctctaaacctcgagccccaaacgctaaggcctgaacattgaaccccaaaccctaatttgtgaaccctatacctcgaaccctaaatcaaagacccgaccaccaaaacacaaaactccaaaccccaaacttcaaaccctaaaacacaaccctaaaaagtaatgtaaggctgtttttggcctcgcgtgagctacaacacacgttttcatggccgaacaaccaatttagtgtccaaaccatagtacactagtgtccgaaccattgtacacgcatttggccccggaggccggtaaggctatttttggcctcccgcgacacatgttttcgtcgtcgaacaacgatttcatgcctcccgcccaaactctaaacacagagccccaaaccctaaagcccgaaccctgaaccctgaaccctaaattgtgaaccctataccccaaaccctaaaacgaaaacccgaacaccaaaacacaactccaaacccaaaaacacaacactaaacagtaaagtaaggctgtttttggcctcgcttgagctacaacacacgttttcatggccgaacaaccaatttagtgtccaaaccatagtacactagtgtca

SEQ ID NO: 128524 - DNA, 380 bp, Zea Mays
aatgagtccctagtcgaggaaggtctgacctctaagaccagacggttcgttctgtcgcagaacagttcggcttttaaggccgagcagtcaccacagcataaaccagtgtcgcagacgatccaactctcgagaccggacggtccgccatcacacagagatcgtctaattcccctgtgggagacgtaatagaggaattcagagatctcgataaattaggacaggggtttacatctgccgatcctttggagcagatcgatataggggatggtaaaactctaaggccgacttttgtgaacaagaccctggagaccgatcctagtgatgaaatgatcggtctattgaaagaatattttaattgcttggaactacactgagatgcc

SEQ ID NO: 128525 - DNA, 424 bp, Zea Mays
ggtgacgcctcctcgtactctccctcagttgttcttgccccgctatgtggaagaatctagttgaggaggaggagaccccgctatgtagaagaatctagttgagggaggcaaagacaagaaaagagatatgaagttgggggttaatatacgataacaacaacgaggaggaggataaagcgctcgtggtggttgcatggttggttacacatacaagcaaatggggataaatttgttaagcgagaagaggggaatgagaacacacttttgccctttgtgcgtgacataggacaaccatcgaaactggtgctttataggagtagagatgtgcaagtgtgcaagtgagcatcttgttccattagatcatgatccaaacacacatataattgtggcttgttagatgatactatacaaatctacatgaact

SEQ ID NO: 128526 - DNA, 288 bp, Zea Mays
ggctcgcccacccatttcttgaggaggccgacatggaacacatcatgaagcttggcgcgtggaggcaactcgagacgtactgccacctcattgatgagctcggtgacgcggtacgacccaaagaagcggggctgaagcttgctcttcggcgcctgagaaatggaagccactggccgctgacggagtcggaggagcacccagtccccaacggcataggagacgtggcggtgagctttgtcgtagtagcgcttctggatcgcctgggcctgctctaggcggtgacggacg

SEQ ID NO: 128527 - DNA, 598 bp, Zea Mays
tcaaagtattagatgcttacagaaacataccagaagagtagcagtagcagtcaccttcagaagtgtagcagtagcagacgatagatgttagacgtcagagatgttcttcagttcttgcttagcagttctacactcgggaaacagttggaggcttggagcagagtagcagacggccagacgccatggtccagacttgagacagatttcctcaagaacttaggataggaaggaggaagggaggagtcagccagccagattgaagaaagcaagtagcagaagtgaaaaggaaatgtgccttggttttggaaacgaggcgccagtgaggcaacgaggcaatcaatgagccaatcagtatttaatacggcacctaaaaggaaacaaaatgtttcaggcgccaaaaaggggtcaccagaccgacatttccaattccaggtttctggtcgctgtattcatgacatggacgattaatagtgattacaagacgattaatcgaacgtctagacgaccaactaacctaatctggtcgttgacccttatcgctagccactgaccgaccaagccgattaatcgcgataaatcgcgattaaacggacgattt

SEQ ID NO: 128528 - DNA, 496 bp, Zea Mays
cccatcttctcatttttttattcatagtttattcccctagccgcaagtgacctcagcatgacatcacacattacatcatcatgcaaatccctctacgccgcatgctgtgccgggctctgcgcttgctgctatgaaattggaagccgccggtgtaacagaaagaaaaatcaccagggaactcggaatttccgtttggatttgttccacctgagcctataaaacgtagtcgcccactaaaatattgccagccccgcagtcgagatggccctacgcctctagctcgtgccgttgggtagcagagatatccgaccgccgtcgtgggcgattcttgcccaagccgccgatccggcctcaagaggagagcagagagggagtgcttcgatgccgctgacaccgctatcgccatgcgctggattcataggagttttggatttgggcggctgtgtgcgtggtcgccagtgttcgcctctgcggatagcatcttcacggggtgggc

SEQ ID NO: 128529 - DNA, 532 bp, Zea Mays
gctgaaacaagagagcagagggcaagatcggacctgaaacgagctagccacgtcgaggactctttcacggtggcggaaacctgatttgggagaatgagcaattcgtggactctggtgaacaattggaggcaagtgctggtgctttggatgggtaattaccctacggagctcatggcgtgctcaatttataggtcccttgagcggtggccagtgaatttgagcttgcgcggtggcggtcggagagaaggaggtgcactggcgcaagcgattggtggcaattaccgtggcaagctcaccgacgaccaccggatgggctaacatgagtcacatcgatgtggttaaaggctgcgtggtgtctaactccggcgagggtagatccgaagcggccgtgagctaagcggacacggcggccggagtgaacagtcgtcggagttcatccactaggtgatatttcttacttcctctgcattatccaactacggcaagcacgaatcaccgtggcgggcgtgaatccaggcgcacggtcgccgac

SEQ ID NO: 128530 - DNA, 720 bp, Zea Mays
gagcgctacattatatgtgggtttctattgtgttggtcttatatggtttctcataacttatctatggtataatagtttattggacccattaggcgagaaaaggaaagagggaaacaaacatataccttcgcacttcatatatgactcaagaattttgaaactgttgcattataatagtagagatacagatgttccgcacccactcgtcaatgcgcagtctgggtcgttgtttcccgtatctatctattgacaaaactacaaagacaaatacctgtagctgtagctgctactctactcaagtgggcagcaaatgaaatgtaaaccctcgtacctgacgcgcgcggcgctatagatacgggcggcgcacacttcgtccttgtttcttctttctcaggtcgtcttcttcgtcaggatgtccccagccggccgggcagccccgcccacgctgccctcgatgatgtgtgcgctgcttcagttagcaggacacacacgcccgatcgattaggaatctgcccacacaaacacacacattttctctttggttctccaggcgcacgccggtgccatgcctaccttctttctctctcacctcattgtgccagtggcgttgcagcggtgagcgagaacaccgcgagcacgggcacggctcagaaccacagaagagcgtgagcgcgtcaagcggctgcccgtgcccggtacacgcattattgccggtacttg

SEQ ID NO: 128531 - DNA, 521 bp, Zea Mays
gtggagaaccagatgttggcacgtggtggtgccgtaccagaactccagaagagcaggaggaggctggcggtggcttgctagaagatatagatcatcagcagtagtagcatcaatgcatcaccatcgtctttcgatccaactccatgcatatatatcatctgatcgaatcttctccaattctagttactcggatttaaatgacatggcacaaatctaatggctgaaatttaaccagacagagagccacatagaaagcaaccatagaatatccgaatagtgagtcagtaaaagaaagccaagttcgtacatgtggggaagaggcagttgtttcccttacttctccacgataactgcagcagcacaaatgttgaatctcttttcgttgagaattgagacagcgaatctctttttgttgagaattgagacagcgattgagggggagaagggagggggctcacggcctgctagccaaggatggggctggccacgctaagcgtagggtcactcggccgaggaggggc

SEQ ID NO: 128532 - DNA, 850 bp, Zea Mays
gccaggttgcgtggagcctccccatccagccagctatggtgctagaactttgctttgatgccgttaccaatcaccacagtggtggacgcctgaaacagcagacgatctagcttgttgcaagggacctggagcccctcccaaggttttgagctgtctgtccattcttgccaaagccaacggagccggagggcacgactgaatttctcaagatcgagtacccctagaccccctaggtcctttggtctagccaccgtttgccaattaacaaggcagtgcaccccatgcacgttatcctcgcctttccataggaaagaacgtcgaatcttatcaatttgctttctagcccatttcgcaagagggaatacggttagatggtagatcggcatggaggagagcactgaagatactagggtgaggcgtcctgcacggttaagcagtcgacctttccatccagcaagtcgctgtccgatcttctccactagtggttggacatgaattttttggagcgggcgggtgtggagttgaaggccaaggtatgacaagggaaggttttgcaacatcctgggaacggctggaggatgttggacaaatccacattttcacaacggatggggtggatggagcttttctcaaaatttgttgttagacccatggcagctccgaacgcattgaggatttatttgaccgcttgcaggtcattacgtgttggattgatgaagatagccgcatcgtcagcatagagcgaggttctgagcttagctgtagcaagagggagaggtgtcaggacgccatgctttgaagcaaggtctaaaatcctttgcagtgggtcaaaggcaaggttgaacagcat

SEQ ID NO: 128533 - DNA, 388 bp, Zea Mays
ggggccccgggggcccggttctcctgcaaacgtgggttgcgccaaggtgacccactgtccccctacattttcattctcgtagctaatttactgcaagctataatcagtcgtgacgcttgcatcaggcaccccctctttgccaaccaaacttgtgcggtcctgcaatacgtggacgacactctcatcctcctcaaaggtcacctagataatgcctctcacctaatatttgcccttgaactattcaacaatgtaaaaggcatcattatcaacttcaacaaaagggttgttgtccccatgcatataaggacgatcacatccaacaaatcacctcctccgtcggctgctggctgggagatttcccacaaacctaccttggcctccctctttc

SEQ ID NO: 128534 - DNA, 437 bp, Zea Mays
cgcgaatttgaagaaggacacgcggcggtcggaggaaggggagttcactggcgcagtggattcgtgtcccacgccgtggcaattactccggtgatcaacggagagtgagagtaggttacggcgatgtggtggaaaggtagagacacgcggcggatggtggtgatggcttaacggcggtgaggaccttatccaaggaatcggtgagcaaggggaggggcacgacgactagccggagtggcgtccagctcaacggcggcgaagatttttctaccccgcgacgttatctatccactccaggcacaaatcacggtgagatgagcgcgaatctgggcacagctcgtcggtggcgagctgagttgttgatctgatctatttcagttgcagtactgtaccatgggacttcctcattcagttggactgaccgagcaagtttggcg

SEQ ID NO: 128535 - DNA, 763 bp, Zea Mays
tgtggatgtcagacatggattctggtagttcaagacggtatgctgcgggtcccactctgccaatgatgggatagggaccaacgaaacgcggtgctagctttccttttacttggaacctcctgacaccacgcatcggggagaccttgaggtagacgaagtctccttcctcaaatctgagttctctccgcctgttgtctgcataactcttctgccgactctgagcttcaagtaatctcttgcggatcagggcaactttctcttccgcctctttgacaaaggcaggtccctctagtgttttttcccctacgttggaccacatgagaggtgtctggcattttcgtccatacaacgcttcgaatggtgacatcttgatgctagcctgatagctgttgttgtatgagaactccgcgtagggtagactggattcccaacttctatcgaatgctcgcacacatgctcttaatagatcttcgaggactttgttaactctttctgtctacccgtctgtctgagggtgataagcggtgctgaaatctagcttggtgcccatagctttctgaaggcttgtccagaatttggaggtgaactgggttcccctgtctgacactatctttcttgggatgccatggagtctgactatctctttgagataaattcgggcaagggtggctcctccaaaggtagtttacactggaatgaaatgggctaccttggtgaggcgatctattgtcacccagatagagtcatttcctttttgcgtccg

SEQ ID NO: 128536 - DNA, 571 bp, Zea Mays
gcctttttggctatctccggtacatggtgcatactcgaccagacatcgcctttgttgttggctatgtcaatcgatttatggagaaccccaccactgagcacctcaacgcggtgaagcggatcctacactaaatcgcgggcacgattgactatgaatgctactacaagcgcgaagggaaggaattgaagctgcccaggcacgacgacgctggcatgagcgacgacattgatataatgaagagcatcatcggcgtgcttttcttcctcggctcttgccttgtgacttggcagtctcagaaggatgtctttacgttatcgtcctgcaaagcggaatacattgtaggaacaaggacagattgtcaaggtgtgtggttggcacaatttctcgcaaagctgaagagcgagcaatgcacaaccttcctatcgaagatggatagccaattggctataaccctcaataagaatccgatcgaagcaaacatatagatgtgagattttatttcatttgggagctgctctcacgtgatcgtttctgtgaactgtgtgtaatgttgcacgtcgtcaagatcggc

SEQ ID NO: 128537 - DNA, 289 bp, Zea Mays
ctttccgtccactcctttggtctcaaatcctcaatcatgcccggaattttgtaccagctcgtcgtcgccgccgccatctgcgccctctccagcggcagcatcgcggtcgcctcaggtttgaatgcgaccgactcgttcctcgtctgcctcgtcggcgcgggcgtcccgccgcgcctccttcagaccccggcgtccccgtcgtactccacgacgctgctctcctccgtacgcaacctccgctacgtcacgtcggacattcagcggccggtcgccatcgtggccgccaccg

SEQ ID NO: 128538 - DNA, 1059 bp, Zea Mays
ccaggtccgtcttagtcggcaccttctccagcaacaagcacccaacaaatggtatgcccgcctcttttcttcccttcctgctgcgcgaaaccgagcagcacccaaagcgtaacctaagctatttggcccgccccttcgattcactttctgctgctcggtttaaacctaacctaagctagttgattatttgtaatgggacctgaactacttggaagcgtatacatgaattatacctactaactttgattctttttgcctaaaaaaactcatgagctgcttgctagctgcaggaagtctgggttttatttcggcacatttcagggcatttaattggttgtagcaatttggttcagataaaaatattctattcttgctacaaaacgagtaaacgttaatttaacccgtgaaactccgatagccagggtagaattgctctagggcaccctggattttaagatactattcattccctcattaaacttttgagtaaataatttatataggaattgattttttgaatgcagcaagttcttttgttcctgcatttcattctcttttgggaggacggaaccttgtttgaaggggctagtttatgttctggaggcaaggcacctaccccatatgttctttattctgcagtccaacagaaatacgcacataagagcccatacttgaaagtagaggactagaggtgtatgagattcaaatcatgacaaacctttgtttgtgtgtgcgcggctgcgtgcacaactcgtctgtgagcttaagtaactgtagcattttttcttcttcttttgtaccccccatttagcagtttccatggcgtcaattatagtttagcggctacgaaatacaagtatttttttggtatttgagtgagccccatgtggcctcaaatcaagtgataaaatgttgtctatatggagtaaatttttgatattagttgctgaaaagactatttctgttgggccgttggcagaatgctttggagcagttggcatccattgatctcattgagctatgcaaggaggccagaattgagcgctgccgtgcaactag

SEQ ID NO: 128539 - DNA, 512 bp, Zea Mays
ccgcggtgcccgggcaggacgacggcccctgggcgagcgagccgtgatggtggtgcggtgtgacgaagtagaagctcgccaagtctgctgcgccgagcgtgtggcacaccaacgtcgccatgtcgtctctctgcatgattggaatggaagctaatagctgttgcagggtagctctccctccgaagttaaagttgcaaatgacgaggagatggtttggaagctagctgttgtcgtatcctcttcctcctctaaatctaaagagggactcttcgatcgatgaagggaccgagggaaggggacgacgacgacgacgtatttatatatacagatacagatcgaggtgagtgagtttctttaaactgcacacacagagagagagccctaaagcttcaggcatgcatgatgcatcgtgctgacggcgaaccttcctttttgcgtccgattgcgtctccatgcaggattatcctgtcgaatttcggggtgcgattgctgtcgtctggctgcaaaaaaat

SEQ ID NO: 128540 - DNA, 542 bp, Zea Mays
gacgaggccgccggggcggaggcggaagcggagcgagagatggtggagtgcctgcgggtggggtacctctgcacggcgcacgcgccggacaagcggccgacaatgcagcaggtagtgggggtgctcaaggacatccggccggcgcctcccacacccggtccgggcagctgagccaagtgccaccagccacgccgggggggtcggactcggacggacacatgctcggggtcggggtcgctggcttgcacgaagcggcggcgtggccagtggccgttccctcccaatcgaggagaagcgtccgtccgttgttttgccttatgccttgcggttgcgggttatccatgatccaccaatggatcgggagcagcttttgctgttgcacggggtcctggtggcctgatgtagtgtggaccagaacgagacctcgttgtttgtactttgctgagatgtgaatgtaacagttttctttgccacttttcattgatgagatgcctgatttctatcttctcttttaaaaaaataatgtatccatccatttgttt

SEQ ID NO: 128541 - DNA, 513 bp, Zea Mays
aggaaagaggtctgaccgccgaagctgtggttgctgattttgtttttaagaacatccagcccctgaaggacagagcatacccggcttacttgtacagcggtgttaccgactccactcgggttactaataggacaattcctgctaaggatttggtgagccggctagacatgatcttgagaggcaaagtatcaaatgttggtgctcctgttgcctactctgcttggaatctgcctcctcctaagtcttttttcaatttcgtgtctaatcctcctgctggtgatagtggtctgggtcttagagtgcgaccctctcccgaagatattgaggccttggttgcttctctttatgatcttcccaatgatgagaggcaagttcattttgaaatgccagcgagtccagatgatgcagagatgaatgttgtgctcgatatgttggctggagaatcttctaacttggcccctgctgaaacaatggctgatgtaattataccagagcttgacagaatattggaca

SEQ ID NO: 128542 - DNA, 584 bp, Zea Mays
gattggacgtctggtagatggctcttggctagtcttcatttcgctttgtgcttcaatgcttctgttgattagacttgtacttcagcagctatatttggctttcctctgatctccattgatatctttcttctgtcttgatacattcattgtgtatactgtatggatgtgactgcttgggaaaatctactgaaaattcctggacgtcccccccaatgggtgtgaccgagggacggcttggtatgccgagcgtttagcaaactgtccttgagtagtaacttgacgtgaccgcggggtgtaatcatatcgtccaagcagttgaccttagtccaaatggtgtcgtgttacatgaaacgacgtctgctgcctgacttgcttccagatgatttgaattgcttattgaatacttgcgactgttcggtgaccgtggtaggagatgagcggttgcttccggtctctataaatagactgtctgcctcgctggtgtcttcacacatcttctgatcgtctgttgcttattttcccacttttctcttctcttccaaccgaccatgggcaagaacaagaagggtggaggttcgtcgcac

SEQ ID NO: 128543 - DNA, 471 bp, Zea Mays
gattgatctaacttcctgcctgaacgtgtcaagtcagaaaatgagtgctcttcaatcttcataatcttcacgttttgagttattccaattgaccttacctgtgcagcaggattcatccttctttatctgcagaaaagtacttttcagaattgccagcttgactcagactagacacgcttcccctgaagttccagaaacaatattcaactcttcattcttagcatctgctttaccttttttccccattcggacaataaatcgcactacgaaactagattttgtaatgctacgaagagcaagcaattatccgctaaaatcgccggttcgtttgcaggtttggggcgtacttactacttactttagccgtgttttcgatgctctgctcgtgctctacgaaaacactttgagatgtgtctggctcacggtctcctaaatgttttctttgatgatcgattcgatcagaaattcttc

SEQ ID NO: 128544 - DNA, 300 bp, Zea Mays
ggaaaatctggactagacacatatggaatgggtgggttagcatgagcatttcgaagccttgcttatgtggtctagtgtaaaaacatccaattgcaaactatactttcataccatcatcctactagattagcctctatttgcatcaattggtttcttatcttccttgctattcaaagttggtgggtctactaagcctacttaatagatagtggtggagcttatagggataggtatggatctacaatattagcaaaatataagacacgacaatggttggcagcgaaggaggggcttccaaag

SEQ ID NO: 128545 - DNA, 610 bp, Zea Mays
tggggccattcgatacggggccttatgaatgggctgcgtacccggaattagcttaatctcaaaagctgcatcgcgctctggaggaatgcctggaatctctgccggaaacacgtcagcaaagtcacacaccacccggatgtcctgcacccgcaaggcagcctcaccctccaccaccatggagaaaaagattcccgacttccttgactggtgatccagaagcaattgcgccaacaaggataacgtgaactttggggaacttcccaagaataccacctccctacccgacggtgcctgcaataacactgtcttccaaaaacaggatataactgcgtgatactgggataaccaatccatacccaagataacattgaatgcccccaaggaaatcacaaccagattggctgaaaagacctcatcagcaagaatgacggaacatccctgacaagctgaacagctactaatggagccattagcagaactaaccaaaattgggtgacccaacctctgcaccgaaagaccagcccgcgacacaaaatcctccaaaacaaacgaatagctagcgccagagtcaaaaagagcatgggccacaaacaaatcaactgaaatcgta

SEQ ID NO: 128546 - DNA, 1524 bp, Zea Mays
gccctataaaaatagcaggttttttggtctgcacccaggtacaggtggttcttgggtccgcggtcaggatatagcaacaagtgaagcgctcttgtcttttgcacggtgtttgcacccttgtgagctcgtgggcatgaactgcattgagcagtataatcctcatcgtgttgcgaggcagctcggcttcgatcaggacatccctgggacggttccccgtgcaagctcaggttgggagaaagcatgggagacatacaacatagaggccaagagttctgcttttatctttccaaatcacaagcctggcgtgacggttcagtatgcaaagtggtggaagccttactcatcagcatgcggtagtgccgttgctaatgctgcaaagatcaaagaaggccacgatcttgttagtccagtgaaaaggaaaatggaaggggttcttgctggaaattctggcaaaaaggtgcgtctgcgtgtggccactgctaccctgggctgcccgcccaatataccagcaggaattaacgtctacccgtcccagtcctcaggcagccatgctgcaacaagacgagctgcggcagcaccagggcttgttctccgcgcgtgtccaccccacctaaggtttaaagctgtgtcccccacagggatgcctcagccactacgagatgcagcctacgatccgcttgatcacgtttctctttctgaaaggctcgatggcattactaagatgcctaagcagcacaacacagaatgtttggtgaaggatagtgagcaggagagaattgtcaaacgtgtgaagattgttacaccaaagcctccaagtgctggcccagagaaggcagttctacacaaagttgttgagcaagctttgcctgacgcagttgcaagctcagctataattcatgactcgtctagtgtatttggtactgaaaggccacatgcaaggtgtctccaacaaagtaaagatgaagatcttaatagtgccaatggggaaaatattagcagaagaacagagcattgtgatgtcgtgcttcttaatgttgtccagggtgcagtgagtactgtaaagagtgaagccattggagctgggactgaagttgatatgcttccaacacatgaagacttattggtggtcagtgacggtgacaggtgtgataaatcaagtagcatgggacatgaggtgcatctggaatctcatatgtcgggagcaaaaatgtcctttataagagagcgaaacgaaggtaccgagctggttgatgcaagaaacgacgaggaagacagccaagttctgaaggaagcgacaaaacaaggcaattttggtgataccgttaaattcaatgacgatgagcttgataaactaacaaggaaggaagccagggtgtttgttgaagcaatgagcaacaaagatgcgccgagtgccatgcatctgaaatgtcctgagatggaaccaacgcggaccatcttacaggagtgtaatgaagaaaagcagatggtcagggaaacaaatgatgagcacgacaacccagtgat

SEQ ID NO: 128547 - DNA, 744 bp, Zea Mays
gtggaatccggacaagattgcccaccgccccagctccagcctccctcccttcctgttccacgcaatcacctgggcgtgtcgtccgctgcctctggtgcgtgggccccgtgccatagaatcgtctcctaccccagaaacagaacacgcatagctccgtatgtgccgccgcgcgaattccgcgctcagctgtaaccaccgcggatcctctcctcccgtcgcgtccccaaccaacctccgtacctccgctataaagcccagccctgcggtgtccccatcccctcgaccatctggatgcgccagcagggaggtgttggggaggtgagtgaagtgcgccgccgtggctgattcaagcgtgggtgtcgtcgggtccctgatggccggccggggtgtcgctcgactctttgggcgcgcaccgtcgccacaatttctcgccggattttcgtcgcggccatagatccacatcgcgacgtgaacctggagcttcagacaataaaactgcccggtaagtctccaatcgggttcgttttctcctcctccatagaatagcacgagattcgctagaattgcgccggtagatggccggaattgtcaaactccggcgtgggattgccgtcgtctggggagcggatgcccctgctcggcctcgggcgcggggtaggagaagaactccttgtcgtgcgatcggattcgtgcggctgggatttggtttgggttgtgattcggccaaatccgatatctgtcgtt

SEQ ID NO: 128548 - DNA, 420 bp, Zea Mays
gtgccgaaggcagcagtcattagttggtcctccttcttggtataattaccaaggatctcgttgcacatagtttcaatcatctccagccatggcttcttgaactctttttcaaacttgaaccggtagggtagccgaacaagttcgtgcttcttgcttgcatccttcttcttaggcatcccctagccactagaggtcgggaataccctgtttgccaagaactcttgcaccaaatctctagtgctgacctcggccaccaccactctaaactccacttcatctacttggcatggggagccaagctacatgtggcacaagggcctcgtcattccaaagtttaaagtcagtggactcataaccatactcatcagcttctccctcttcttctcgtctgctttcatgtaaaaccattcactcttccag

SEQ ID NO: 128549 - DNA, 575 bp, Zea Mays
taggcgaggtaaagccgcaagggaagtcaggcgcattgagaggaacccactcgagtggattccgtgtttggccaggactaacccgccgcgccgcattaactgcacatggcgtcgagtcacagagatgactcagcccaccttccactcacaacctacgggccactaggaccgcgggccactcatggcctatcaagcctatgcctgagtgcgctggccgtctacagactttgcaacatgaagagctgagccgagacccaggctacgacaactaggggtcgacacaacacatgacgacaatgatggcaccaaagactcttcccctcacgccgcccatcataaatgagcacgatcaaagatgaccggacgaccaagacacatacggacaacatagcctcacctagatacaacactcagttttatctcggcataacatctccttctcgaggaagctatcagtggccgaccctcgtcgaggcctataaaaggaggaggtcagccgcatgaggaggaggccgaacagaaggcaaaagatagaagacgcatgctcgacgagactagaagacccggaggctgga

SEQ ID NO: 128550 - DNA, 463 bp, Zea Mays
gccccttagaccatgaaggcacaatgcatagagaggaaaacgcgtgggctgctcatgtgtgagaaggaagagggaaggggttcatggcaggggtgtacgattgtatagaaaggagagggtatgtatagaaaggagagggcgcgagaggtggttgtcaatttcacgatggctcttgtcctggccgagcgagagagacagctgcgcggcgagttgcacgagatagggttagacagagttagatgggtggtagacagggttagataaaattagacgaagacggtcagagtcggcccgtgggcccaagatgatgaggtggtcgccgaagggaaagacgaggatagaggaggatcgccgaagcgagcagcatgccgttcgcgagaagacgcggttcagtaatctcgcgaaaaggggcacgagatctggaataggttcgacgagaggaagaaatatatatatatatata

SEQ ID NO: 128551 - DNA, 600 bp, Zea Mays
cgaccacgtgcatcgatgttaggccgcccgtagccaagcccttgatcctgtccaatacaggcaggaactctggcgagagagacggcttggtcctccactgcttgtggtcgagcgctagcccatcactcggcaggacgaggcggtcgttggcctcggcgctggcaatcacccagtcgctgcgccagttttcccacctcgcaccgccaaaggtggggatgtagacgacggctggatctggcctcgtctggaagtagtagacactgatgtggtccctagtcttcccggacttgaccagcacggagaagaagcggaagagggaagtacagggggccacacctacgaacatctcgcagaggtggacgaagatggctgcctggaggacggagtggggcgtgaggtgttgaagctgaagccctaactcctccagcagcagcagaaagatgggcgaaatcggcagcgccaacccgcaagagatgtaggaggtgaacaacacgaattccccggtggcgagatcaccgaggggggcagcgccaacacggattcttccgacgagccctggtgcgctccacccaagcaggccacgcaccaggttaagcgctt

SEQ ID NO: 128552 - DNA, 736 bp, Zea Mays
aatgagcacaaattgcacttgggtagctctgccagcatgggtcatcaggtcagctttccaagcaggtaagaggtccgcagacttatcaatgaggctgaagctgagccttagacttcagggagagaggaaggcccaagtatttaaatggaaaagcttcaagtctgcagggaagaagctgttggaccaaattcagattagtaggggtgcatcgaacgggcacgatactgctcttcactatattagtcctcaaccctgaagcttccccaaacaaatccaaaatcatcacagcagtatttaagtcactgggctctggttttaggaagagcgccacatcatcggcgtaaagtgagatctggtgatggatggaataagaagaaatgggctgcagcaacccatgctcctcagccttgaccacaagcacattaaggacatccataacaagaataaaaagcagcggagacaaggggtcgccttgccgcaagccccttttatgagaaatgaagctcacaagcaccccaagaagtcataagaataccacttatcacatccctccacactacggtggcggcgcaagagaactagttgttcgatggcaagcaggcgggaaagaagaggccgacgtcgtttgattgttgggccggatatgggccttgtaaagttggcatataggccatatgcataaatactgtattccaactggtgtggcgtaagaaatattagaacagaaatatcctcc

SEQ ID NO: 128553 - DNA, 1272 bp, Zea Mays
ggttctgtccaaactcagggaacataagtttttcttgaagcttaagaagtgtgcttttgtgaaaagagagctgcagtatctagggcatgtgatatccagagaaggagtggcaacagaccctgcaaaaacagcagctatgctggcttggcctataccacagaatataactgagttgagagggtttctgggacttacaggatactatagaaagtttgtgagtgggtatggagtattggcaagaccccttactcagttacttcagaagcaacatgggttcaaatggactgaagaagctcaaacagcatttgaagccctaaagaaggctatgtcctcaactcctgttttagctctacccagatttgaccttccttttgtggtggagacagatgcttgcgagactggaatgggtgcagtgctcatgcaacaagggaagccaatcgcttatatcagcaaggccttaggtgtgaagaacaggcacttgtccatctatgacaaggaatttttggctttgattctagctgtagagaagtggagaccctaccttcagagaagcccatttgttatcaaaacagatcacaagtcactcacatttctgggtgagcagcaattacaatcagaactgcaaaggaaggctatgtccaggttaatgggcctgcagtttcagattgtttataaaaagggaacagaaaacttagtggccgatgccctttccagagtggggtctatgatggagcttgctgttatttctgaagtccaaccagtgtggatccaggaaatcttgaattcctatgtaacagatgctgaggctcaggatatgattactcaattgttggtgcacagccccaatgagcagggattcagcatacatcaaggcattattcgaaaagatgacaagatctggataggatccaattctgctcttcgaacaaagttaattgcagccctccatgacagtgctatgggggggcactctggcatccatgctacttatcaaagggttaagaagcttttctggtggaggggcttgaaagtagatgtcactcagtttgtgcaacaatgtttagtctgtcaacaggccaagtctgaaagaaatcacccagcagggttactccagcctcttcctataccacatggcatttgggcagatgttactatggattttattgaagggctgccaaagtccgggggttttgacaccattatggtagtagtggacagattcactaagtatgggcattttcttccacttaaacacccattctcagctcaggg

SEQ ID NO: 128554 - DNA, 470 bp, Zea Mays
cgccaaggaataatgtagaagggccagcatcttgttccaggcatgataactgtcggagtcgacttttcttcttcttctcctcgataggtgcagctgggtggttcactctgcgtgaacgcttctggcgagcaccttcgggtttgtagatttccacatcctcaccgaactcttgtccagtcacaatggccatcgactcggcacgagtagagtcagatgattcctcgtccagcaggctaagtacgacatccatctcagcatcattggtactggatggcatctcgaaatgagtttgcctctcagcctcgggaagattccgaaggggagcaatcaaggcttcaatatcctcgagggagggtcgcactctatggcccgggctaccatctcgagtaggaggattggagacaaattcagagaagagattactctgaggcagattccacgtagaataagctaagggagcaccatcattc

SEQ ID NO: 128555 - DNA, 367 bp, Zea Mays
accgaccacagcgtgaatggcggcggctgaaacgtggcctactccctaccctggtgacggctgcggcttgtgctcttgtgcgaggaatagtaggaaaggggaggaagccgcaggacgaccgattctttatgcctagcttcaggtgtcctcggacccggcttcctcgtggtggttgcaacagatcgcccgcaagagggggaagagggttctgaccagaggggaccacctgttggtggcaggtactggcgcaagagcacacatgcagctgacctgcgggcctctggtgtcagcacgcgcgggcgcaacctggccgcgtgaagccaggtaagtgggccgcccgaggcattcggcccagagccaactctcc

SEQ ID NO: 128556 - DNA, 395 bp, Zea Mays
ggaatttatagggggacggttgtgggatgagtaaatataggagagggaattttactaacgtggctgtataatctctactattatataagacgttagtgtagacgtccacatttttttggtgcacggttctgccgtcgcccgctctcctctcactgtctcgccctcgcccccgcccccgctgtcctatctcgagcatccgatctctcgcccgccattatggaaggagaatcaacacatcgagggaaggtccgtgtggttcttgaaggtccgactccgctctcctctctgatgtctctctcgcccgccatctgcgccaagaatcaccgccatctccgcgctcctctctgcaatccaccgccatccatggcagctctatccgcgcccacaaatcgcgc

SEQ ID NO: 128557 - DNA, 993 bp, Zea Mays
gttatatgttttaatttgtcgtgtcatgaacaagatttagtctttgatataagtaaagatattgaacagttggttgtttggtcccattccactcacccactacgctttatgtgtgtacaaccgcaacacagttgaggaaacgcttgcgtccgttggatgagagggacgacatccttcgctcgggcatcgtagaaccttgatcttctatagcgacactcccttcaaggtaagttttgacttgggtatcgatttttttcttgcggacgatggcacatgaaatccccattgtctctcatccatgtttgtttgaattataaccttgcgtttagtcctaatattgagatattggtctttccctgtccaaatcctaatttagcccaagtcagacgtagcagttggggagtttagggattggccgtaaatcacactcagatttatggtttacggttcagatctacaagaacatcaaacacctatggttgagttgattctatagctttatttttttctaggattagctgcgatgaggctgttttttcttggaacagttacattatcctagctttggtgtggtactgcttgatttattttgtgttttaacacttcaatgggaggtgattcgttagtacaagaaatttgtatcctcctttccttgacaaaatctatgacatcctgattcaaaatggaaatttcctacacaaacacgtaagcagttacaataagcaacgtaaaagttctataatagtgtatcagtcaccttcaaagtggcatcacattagctgatcctgatcgtcgatgttgttagttggtgtctgttgtcctacactggttgtgtaaccagataatgtgagtcaaccagtgctagcctcatcttcttcgtgccacacatactgaaccaaagaaccattttcatttcttacgagctcttgctcttcaatttattcaccccacatgcatacaacacgttgtgtagctacaactagattgactttt

SEQ ID NO: 128558 - DNA, 481 bp, Zea Mays
aacaccctcgggggctgggtaagtgtcaacaccatccttgaggaccaagttctctgcagtagccgcctctaaggctgaaggtccctcagttacttccatgggaacaagacgatccaagtcagtttcatgaccctcaagaccgcgctccaaggtcgatgaggcgcgggacgctgcccgggatgaccccaacccagcatcgagcacatcagcacaaacatccgtcgcatcaccatccgctggctctgataacagatcctctggaaccatatcttcaagagtctgatcaaagttcgccagggacaattcttgtagaccaatgagggcagacacagcaggagaagggactccactactttccccactggcaacatattgccgactgttcttccgagtcaaagggacctcatcttcttcctccccctcgttttcatcagcaacacagacagcacacccattgggttcagcgacagatggagcaccc

SEQ ID NO: 128559 - DNA, 343 bp, Zea Mays
aagacatacataggtctaattggtcattttaattttcacccagtgtacaaatggctttggaagaacaagtggcagcctagacacaatatgttttattggttattgttgaagaacaaactaaaaacgagaagtatgttgcgtataataggcatgaatttggagtcatatacttgtgacaactgcattgggtagagggaggaaactctataccacctattcctcagatgcaactttacagatgcctgctggagctcaattgggttaactgccccacgaatcttgaatccagagagagcctcagctaatctaaagcagcaactcaacacacctttcttcatggaag

SEQ ID NO: 128560 - DNA, 489 bp, Zea Mays
gaaaacaaggttgaaggtcttcaagacgctgtggttcaatcacttaaggtggattgagccgaagctaaaaatcaaacgaaggcatagagctagagagaaaacttaaggatgaaaagattgcccatcaaaataaacacatccaagacttgagagaggaaatagaaaagatgaaaacaagtcacaatgatgaagtctcttggcttcatcacgaagtcgaaaatttaaagcaaaaggttaacatgaaggtcgaggagaactcaaagttagcagaagcgttaaaaaaccttcgggatacctattttgaaattgtcacccagtgctttgcacgattacatgtgatctttctctccattggggtggcttcggaagaagccaactatgctcctgacgatctacctggtgcactgagatgggtagaaggcgaagtggatgtttttgacgaagtgatgaagggacagggcgacttctgtgcacttgttgctgctcaag

SEQ ID NO: 128561 - DNA, 525 bp, Zea Mays
cctccgccgaattctaacgggggaggggcggcacaaattgtcacctctatgggaaggaccattcatagtagctgaagttactcggcctggatcatatcgtctcacacagatggatggcacagaagttgggaactcatggaacatagagcatctcaggaagttttatccttagctatatttcaaaagctattggggcggcaatgtattctgtaaaccgggaaacgcatcatcaataaaaagacttcaggaattattcattgtcaatttgcattcttgctcaactcggggtgaccactataccctactaacggagcaatcggcttaagtcagcgatgacttaagacggtgcgacatgctcacgcttacttaactcggggtgaccactataccccactaacggagcaatcggcttaagtcggcgatgacttaagacggtgcgacatgctcgcgcttacttaactaagggtgaccactataccctgctaacggagcaatcggtttaggtcggcgatcactatacccctg

SEQ ID NO: 128562 - DNA, 421 bp, Zea Mays
ggaggattttggtagtgtggaggtggagggaggacttggatctcttggtgttgctagtacatatggttgggctagttgggatggattggttcattgtggaattgttgctggtggtattgctgggatggtaggtgtgcgcaacaaattgttggttgtcggctggctgatttctggctattatgtctttggtagccttggttttggggcaatccctagtgggatgtgtgcagtcttcaccatgaaagaggcagtagaacctttacggctccggagctcggcctctgcctctgcctctggtgttggcgccactgccctgttgtgtggggtactcctggcgacaagctgtgtctccggtggggtgttggttgacgatgatgttcacttgttgctggttgcggttttgtcacacccgaatttaatg

SEQ ID NO: 128563 - DNA, 310 bp, Zea Mays
gggcattcagtttgtggcaagaattggatgccaacatgtctgttggcctagcgtctgcggcactgcttgcgttgttcgatccttgctaggctttgcacaactctcttctgttgcatttgcttggtgtagcctccacgcagttctggcgcaacacagcaccgcttgcctgcttcccttgggatatgccatcgtcaggaaaattgcggtgtctatgaggatcccattgccctgcacatttcatcactgtttggcactttggagttccatagttcatgtttagcagtggcaggatctaggcataagcttttct

SEQ ID NO: 128564 - DNA, 344 bp, Zea Mays
cggggctctggcctcctggtcctcgtcggtgctcctcctcctgtatgtcatggtgggttcatttctgtctaaaggcatctggttgtctccaagtgtctgatccctctcaatctccctgccctaaggcgactctctcccttttataggccaggagaggggtcagccagcggtggcttctctaggaaggagctgtaaggtaggggtaaaaccagcgctttaccccgggtgaggccaccgtaccgtacttatgggacacgagggatgtctagctgtcatgtatttatcgtggtggatgacgtgagggcggcgatggtcccaggcgccaacattcaggcaatgtcgac

SEQ ID NO: 128565 - DNA, 306 bp, Zea Mays
cctacgttttggtcccttaggctagtaaggttgttttggcctcctatgacttataacacatatttttgttgtcgaataacaatttcatgtctctcgttcgccgcccatgttttgatccatgagagtggtaatgttgttttggcctctggtgaactataacacatattttcatgaccaaacaacggtttttatttcaaatttcttgcaccgatattttggtcaccagagaatggtaaaagcagtttttggcctcccgtgagctatagcacacgtttgcatggccaaacagataatttcatgtctcta

SEQ ID NO: 128566 - DNA, 330 bp, Zea Mays
cgaagggacaaaaacattagaagttttaagcccttcggcagaagtgacaatgccgaaggcacaaaaaggtcttgcggtgacccctaagagaaaaaggatggccagtgtgctagatgtgctggagacggtaaaggcttcaagttctattccttcagggaaaattgccgaggcttcgaaaatacaaatcgaagctgaagcaagaccggccgaagttgaaggtgcaatgagccaagctagtgccgaagccgggccttcagagcgtattgataaacaaccttcagaaattgagaaaaaggcagcagaggaagaggctacagagcagagttggcc

SEQ ID NO: 128567 - DNA, 500 bp, Zea Mays
gtagctgttgttataagagaactccgccaacgagaggcacttatcccaattcttcccatagtgcaacacacatgccctcaacatgtcctccaaaatctgattcaccctttctatctgaccatctgtctgaggatggtatgtcgagcttcttattacatgggtcccaagtgattcgtgcagttgctcccagaaacgtgctacaaacggtgctcctctgtctgacacaatagtccttggtattccatgcaaacacactatctggtcaatataaatttctgcataattttctgccctatgggtggtatgtactggcaagaaatgagctgtcttagttagcctgtccacgatgacccaaatagaatcgtggtgtcgggatgtgttgggtaaacccacaataaaatccatgatgagatcctcccatttccaagatggtatggggaggggctataatgtacctgctaccttcaaatgactggccttgattctttggcaagtgtcgc

SEQ ID NO: 128568 - DNA, 272 bp, Zea Mays
gctttcttctcgtgggatggaaggctccacaagcgaaacaggaaggcggcgaggtgaggggaagaacgggagccaactaggtcataggaaaccctaggtctctcttccctcaaaaaggcggattaccgtgtctaaaaggcgacaacgccaacgagtcaccatgggccttgcgaaagtgatcaggagcctggatggcttccacgccaaaggtccacccacgccatttccaagggccaacttgctcggcccaaccctgttcatcaggagctttc

SEQ ID NO: 128569 - DNA, 757 bp, Zea Mays
ctctggcaggcgggccccgcctgtcagctccctcccctcgcccgtgatctgcaatcgacgcgatcaccgccggccggcgccctgccttgtcgcctcgccattactcctccccagcaagacttggtgccttgcggccctgtcccttgcgcctgccccgagctatcccgtcaccccctctgcccgagccatcccgtcgcaactgtgcgccattttcaccgccgcggcaagcgtcgccggtgtgcgccacctcaccccccttcccggtcgcctataaaagggccgccccaagctcctgacttcaccgcaccaggccttagccactccaccttcctccctcggactcaatccagctcgacgccgtcgtccctcccctatccggtgagctccactttgccccctctgttgagttcgagtcaaattagtgtagctgtggacctccgccacttcaccgcgagcacaactcacctctttccctcgcctattgcacagttggcctcaccggcgacctcaccgccgcgagcgcctgccaccacaccgtggaccggccaccccaagcaccctccggccaaattggcccctccatgatgatcccctacccccgcccgtgcctcgccaccactcccccgtcgcagaaccggaaccccggcggagaaccgccgcggggcctcaccagtggtcgagcctcggccggttcgcccccctgtcacccgctccacgctgtcagccccccttcctctgacacatgggcccgctccca

SEQ ID NO: 128570 - DNA, 274 bp, Zea Mays
gcaccaaggagctagagctggatatgagtggtagcctccctataacccattcggggcagtagggtccgtctcatgagctgatataagtacttggccgttgtagtgaaatctgccagagaatgtcgcgacccatctgagaagggcggtcggaacaaagccgcgacgtgagctgtagctggagcaactccgccgtgagggcgacgaggaggatcagaggtaccgtagaacaagctgtgaagacgagtcgatgactcgttgaatccaaacagctggc

SEQ ID NO: 128571 - DNA, 374 bp, Zea Mays
cgcgatctgttgcggagtgcggcggaaggggtggttgcaccaacccggaaatctcggctgggcgagaacagcaacgcgacaccattgaagtccgaccctggtgcgcgcgagctgtggagaagaagacatgcctagcagtggtggcccacatggcattgaagctacggagcgcaggcgcgcgggagtcacgcggagcagccgtggagggaaaatgggttgggtttgcgctgaagagtggagtagagaagggggaaatgggccataagcatgggattaggcccaggtagcgcatcaatcccttgttattttataattctttccaatttcatattagattcaaattcaggtctcaaattaaattcaaacaaagttca

SEQ ID NO: 128572 - DNA, 624 bp, Zea Mays
gtgcaatgctctgagccaaccagagtcaaattctgatgactggagggagccgatcatcaagtacataaaaaatgaggaggaactagatgacaaaaatgcagcagaacgaattgcaaggcagtcagctcattatactctcattggggaaacactatacaaaaggggcgcatcaggagtcctcatgaaatgcattctctcagccaccggaaagcaactgctagaagaggttcatgctgggcaatgcgggatacacgcagcatccaagaccctggttgggaaggtcttcaggtcgggtttctactggccgacaacaaagagtgatgcagccgagttagtccagaggtgcgaagcctgccagtacttgtcaaaatagcaacatctaccagcgcagcaactgcaaaccatacccgtaacttggccgttcgcatgctggggattggatatgattggacctttcaagaaggctcaaggaggatacactcatgtactggttgctatcgacaaattcactaaatggatagagttcaaacccattgcttctctaacttgagctaaggcagtggaattcatacaagacataatatttaggtttggaatatcgaatagcatcataaccgacctggg

SEQ ID NO: 128573 - DNA, 586 bp, Zea Mays
ttcattacatcagttcattacagcatacaactaccaaagctcattacacgcgagtgctatcgagggtactcccgaactccttctctaaagtgtccccaaattccttgagaaggtcatcaaggctagctagggacatttcctcggtgtcggacgagtttcttatcctggtaggaggtagggctggaggggctccttccttctgctcagtctgacatccttggcttttggtcttcttgtggattattcttgcgggggcgagcttcttcagtttcttgtcgtaatccatcttcagagtgcggtaggcctcacgggtattggtttcctcgccttctgctatctcgaggctctcttgaagggacaccttttcctttgtaagttccctaactttttgctccaggctttccacccgggagtttaggtgggtacagtgggaggcaaggtcatcatattggttatgaagggtgtgaaggtatccagccatgtagacgatggtggggtcatcctcaatagggtctcctcctgacagggcctgaagtcttttcctctaggtaggtgtatttttgttgctgggtgggaagtagcgaag

SEQ ID NO: 128574 - DNA, 318 bp, Zea Mays
ggggttaccagaaatgttctcttaacgattcggctgacaatgaagccgatacaagcgattggaggacacctatttttaattatttacgaaatcctaatatcaaaacagataagaacattcggcgaacagctttcaagtatgttttgatgagtgatgaactttaccgccgaacagtcaatgacattctgcttaagtgcttgggcccagatgatgctatattagccatggccgaagtacatgaagggatttgcggtactcatcaatcagctccaaagatgaagtggttgttgcgaaggtctggtttttattggcctaaca

SEQ ID NO: 128575 - DNA, 543 bp, Zea Mays
ctttggattctgcttcgtcacaagaagagcttcggaaaaaaggttattaatttccaaggaattttcaagaaattttcaagaagcgagatggggatgagaccgaagccactgaaaccgtgccgatttttgaagcaatgaggcgttctgggctggtttcatcagaggacacacctgctgccgaagcaacacaagctaatgttgaagaagctggttccgaagatgagtacagctgcggggtgccaagtaaacctagtcatctggattttggaaagtccaccatctctgaagccgatctccctaaaatggtgaagctgggctatttcagtgaggccaagaaggaattaattcgttttggtggagaagaaactatcccaaagccaggaaaagatgaggtagtagtcttcaaaagttttcttaaagctggcttaagattccccttaaacaggatgattgctattgtactgaagaagtttggggtttaccttcatcagctgacccctaatgctatcgttagattaagcgtttatatttgggcccttcgta

SEQ ID NO: 128576 - DNA, 385 bp, Zea Mays
taagcagtaaccaaaagaaaaccttgtgtttaggttgacattttgttttccataaccagaaaaagatggggcgagtccactcattaccagtcatataaacataggccttatgtgaagaaaacaggctagaggaaccattgcagtaccatttgtctccttggtcatgttgaggaagatttgccaacgagtcttgtagggcatgaaactgctcgaatgcttcaacagacagaggagtgtgaaacatctcatgtgaggctgtcgttcttgcctagtgtatagtgatgtctttgttggaagcaaaagaccaaagttctgcatagcttattagcttgcagatttgcacatgtcgtcccaattgtcatgccacaatagagttgtttttccg

SEQ ID NO: 128577 - DNA, 441 bp, Zea Mays
acaggtcacaacaataaggtctagagatgggacccaagggataactaaatcatgatatggatctactctactgtggtggatcacttaaccctgacatggttcaaccctctcgtcacgatcaattgcccttaggacctagttgtcatgatgtgtgtcaatgctcctgatgatgagatatgtagtcttaaccatgcgaactcgaactttgttttctagaaagaaatatggtcccaccaataagaccagtctagtagaggacccaaggcctctatcaatgcctaggcaaggccatacacccaactactgccaagatgcattcaaagatcctagtatagaaagctaccatggccccacctgctagaccaccacccctaggctagtgcaagtaattgacactatgcaactttacattaaggagccccaaaggaataactacaccac

SEQ ID NO: 128578 - DNA, 598 bp, Zea Mays
ttcgcatcatattcaatatctatactacctattaagaacgcaaggggtaggctgcctcccctggttctgcctccgggtaatctggaccgttcgcttcatccagggcgatccgacccgttctgcctcccaaccgtggacgtacatccccgtgccaaaaaatacatcttggtgcggcaccagaggaactagtctgagcaacaaacaatccacgccaacgtttataagccacgtttggtctgtctcagtggccggtatggtactaatcaaataaatcccataacagtgtctgcgtgcagcccagtggttcgtgtggcccaaccgttggtgcggcccattgtgcagcccagcccagcctgtcatcatcttcggcagccctaaaccctctacctccacgatggcgcgccgcacgcagagatgtgcccacgtcctcaatctgcctccacgacggcgcgccgcaccacgacttcaatctcctcccccacgacctcaaccgctctgccagactcaacaccgtccagctccggtcaccggttcatggcggcggtggcggtactccttcggtaggcaaaggagcaaagttggaggcgacgagggtcca

SEQ ID NO: 128579 - DNA, 548 bp, Zea Mays
atcacaatgcaggagagcgctgggtctgtggggaggagagaccgcggggcacgctaattattcctaggagcccaggggatcgcggaatccgtggcgaggcggacgggagcgctggccacgcgagaatggcggattccgttgcttgccagcggtccatgcgcggattccccggcggtggtaacgcacatccgaagtccgcggaaggaagaagaccctggacgcgcgggcccagatgtcagtgcgcgagagcgagagggagaagctgcgacgcggacccacgagtcaggcagtgcgcgcggggtggatttagtgcgactggtgcgtgggcccaacgacgcagtggcagcgacgggattgggctgcgcggggtcaattccttggtgggccgaaatggaggtctgaggcccaaatagccttttattcttttcctttttattctctattccccttcctctattcccaaattcaatttgaatttctaatttgaattcaaacttgtgcctaatttattctcaattcgtgttgtggaatttagaatactaactttg

SEQ ID NO: 128580 - DNA, 347 bp, Zea Mays
agttgatggaaaattctttactgacatttgggaaaatggcggctgagggatagcccatgagataataagaaagagcgaaaaagatactcacgatacaagagaagcaacgaaggcagctgaggaagctgcgaaactcgaaagacggatatgtattgcctaattgtttttaactttatgttgtatttttgttacttcaaacttatttacattttgtatcacatctgaactgtctcctccaccagagcccttcgagtcgatggccgacccagaagcagagaaagaagatgaaattactaaagtggccgaagctattatggacgaagctgtttctcgactgctaaacgaag

SEQ ID NO: 128581 - DNA, 484 bp, Zea Mays
aatcagttagtatgttagctttgtcattttttttcattatgatttgagagagattatggttgacgaggaaggcaatttattggaagagaagcccaaaaagatgctaaagaggtggaaaaaaggaaaaagatcgcggcggtgagaaacaaggtcgaagatttgattcaaagatcaaagagttcaaatgaagtcatgaatttcttagtatcaggtgttatgaacctagaggcttctttcagtcaaattgttcataccaatatgcaagccccacaagaagaatatgatactttcattggttgcaaaatcccggagaaagttgacatacatcctccaaccgatgtttgttcaaagggacggaataaaataattaagaaatctaaagaactacgtaagcgaaagaatgccgataatgagactaaaaagccacagaagcagaagaatgccaacaatgaaactacggaggcacatcaatagatgattatct

SEQ ID NO: 128582 - DNA, 375 bp, Zea Mays
gaacggcaggtccattttgaggtgcccctgaaccctagtgatgcggacataaatgacatgcttgatctgctagctgaggattccttcgacgctgctcctgctggtatgttggcagtggtaccccttccagaggttgatacaactttggatgtccagaaacctgtcagtactcgcccgaggcgccctagccgaaccagtcagcctgagccttctgctgatgagcaaaagaagaaaagaagacgcctccggcgagtatccagttttgatgaggacgctggtacctcagttcctgctgctgaagaagtgcctgccactggccttactgacgctgaccccaatgggtgtacccaaactgctactgaccctaatatgggt

SEQ ID NO: 128583 - DNA, 588 bp, Zea Mays
atctgaattaataataaatcatacctcaccgtggtgagttaccagcaataattcaggacacccatctatatcacacgctcaagtactcccccaacaatcaccagtaaatcgtcagctaattaactactgaatgatccctagaacaatcaccaataaaacaaagttcaggatcatttccaataacatttgaaactgcatgggtcatccacatgtatctagaaacagggataggcttaaacaattaaactgcatgagttcatatctgtcataggccaagaaatactgacaattaaactgtataatcgtactgtcaagacaaagcaattaaacaaacattataattttgttgactattataaatactgatgcatcaaattgtaggtcacctatgtaatttagggctatttttctgtcatgccaattcatagcaagaaccatggccattcttggaaaaaacttgccttgcttgttgcttctaacaggaagcatgggtaatgaaggcaatcgcctcccttggagcacaactttgcagattacttaaacaaggaaaaataaaacgatcagcagccgcacgacgcggtactcgaa

SEQ ID NO: 128584 - DNA, 604 bp, Zea Mays
ttggctcatatgggtctacaagtagggctaatccgcctcacaacctctccgtgcgcagtcgcttccatgcctggcatcgctagtccgcgggttcccctggagtccgtaatgccgcagtgaacctcgccggtatcctcgtcggtcgttgctcgcgctaggataaaattgcaccgcgccctcctcctctttctcttctgccaccatgctgcgtggccgcactgtcggtctgcctcgccaggtcgctaggatcccggcagccctgccttggtgccctgactgatgcctgctgcatcagagagattcaacaatgggagagattgaggagttgatgctgggctgttgattgcattggcgcaagggcggtcaggctccaggaaattgcccgccatcacgctgtgggtgctgcgaactgggtggtcgctggtgttgtcctcgccacggctgatgtccgggggtccactgggagctttggagggtgtccacggtgtcctcgtccggattcggtggccggagaaccggcgattcgttgccgttgctagtgctccaccgcggagccgcatcgtctcgtgggcagagcattcactgccccgatttgaggtaaaac

SEQ ID NO: 128585 - DNA, 359 bp, Zea Mays
tatgcccttcctttctagtacagcctctgtcatctactacccgtccggacaggctcagctgcgccgggcgccgtgctgttccgctgacagaaaaacagaaaagctccgtcttctcaaactggaaactgtatctttatcagcgaacttgctttaaaacctttgttatttgatgaatgatgaagcacgaaagctgtggcatttgggactagcgcagagagtcacgtgctgaaccgcctgaacgtgagaatcttcttttataccatagttgacagtttttgtgtgcggaagagctgttgacataaatattttgcttcggcaaaaataaaaaaggggccaaaaaacatttctattaatatggt

SEQ ID NO: 128586 - DNA, 598 bp, Zea Mays
atttctgggaagtgcagggggcaaaaccgaaggtttcccaagacacagaccactggcgcttggagtgcgggtttattcctaagaaacccagggactccttagtaagattgccgggccgaatgggtacggttgattttcggccatccagatcagatccagaggccaggaatggatcacagccccggcaaatagacaagcgagcgtgaccgcttgatcaacgatcgacgggctcgatctaatctaccccgattgaatccaatgcacccgctcccaatcgggcggctcccaatatggcgcaacagcccttgccggattccacggcggagacgaggaacaaggccatccgataggtggacccacattgttcagtgggcactcgcatggtgaacggtgacaggtgggaccacggaactggtgagatagctgcgactgacgcgtggttgggcgactagttggtggcccccagtttacaaagggtggacgatgtacgagttggcgtggtgtgactgccccgtgggcccgaggtgtcaacgctgatctcctggtgatgggctcgcgcagtgtaattctttgttgggctgagaaaccagggttgggc

SEQ ID NO: 128587 - DNA, 431 bp, Zea Mays
ttgacttcgtcttgttatgccgcctgtcctgttccatgacgccaaacgcttacggcgctgcattatgaaggtgaagctgctggattgaaaaggtcagctggtgttcaaggagctgcttgatggattgaacaagcacacgaggtcatttatgcgattcttatgaataatagatggaaaactgaaacacatgtggttgggaactgggatgtaatacctgacacttgttttataattttgaagatccatttgttttccctcatcattgagccgattccatggcaagtaagaactttaatagagttatcttttttttttgtttatgatgagtcaacatgatgatattgatattttgtgtgaattattgcagccgctttatctaatccgtgtcgttataacgccttgttagttgtctctaaaagtcaaccctgtag

SEQ ID NO: 128588 - DNA, 991 bp, Zea Mays
ccccttggtgtataaatagggcagtggtccctccacgggacacggggacacacaaagacaaactctcactttctcactctgtcttagatattggcacttgcctcaatcatctctagggacttggggacttaccctctcccgctgtgcttgtaaacccctactataggcaccacggtgcgagtaatataagcctcatcctctctgctggaagtagggccttgagtagcctgaaccaggataattacttgtgtcatctcgcagaccatctagagccggccacgcgacacatttactagttggttaaggacccatggtccaaacaccgatatttggagcaccaggtaggggatagtcgcgtgaaacactcctagttctcgccagcgctctagatggcagattcccaccacccgctgaggctagggacgatgatcaggttcaggagtcttgagttcatgtctctcggcaacgagtacgatatggtacttctcccgcctgtccctctcgagtgtccaagctcctatcgccgcacttctcaacgcaggaggcaaggttggagcaaccgcaatcgtgcccccacagggcacttcgtgtgtagaaggcaccgctggggctgatgatggcattgagtccctctcaagggacttggccggcatcaatatttcacccggagtgccgccaaccgcacatgcaccaacattcctggcaccacctgccccaacgtgggagtcaccattcccccacaacgtcgagcaaggggcgtcaactacaccagccctcccacccgtgggtcgagaggagacggatgctccctagagagacatggggggacggaggagaaccgtctatattcaaccccatccccttccaaccgaatttcaacactagctacgacgctcatatgtacggcgagctatcgttccccttcgagtgcctagactccaaggaggaagatggcctaggctttgccctagacttcttcgggctaagggat

SEQ ID NO: 128589 - DNA, 528 bp, Zea Mays
caagcttctttaattcaggttcataacatcaattgagactaatgtgagttgatctcaagtcagtctcaattagagaatcaagcattgctcgtctttcatttaggttgatagcatcaactgagactaatgcaggtgcatctcaagtcgaactaggttagagaatcgagcattgctctatcccttgcgtcctaatcgagggtgcaacaattttgtggctacgtttccccttcatactacgtatataaaatgagaatggggtcgttgtatagaccaacatttatcgataccttgtcgtccccacaaactgaaatgagaaccaaactacgtgattagtgggggatataaccacctctacactctcaccaccaccacctctaacctcatcatattagctaccccatgccccgatgacattgtacatctatgactcaaggataaagcccgcactcacacatgcacatgaatttcagaatgttggcttagactaatgctataaccaaatctaatagagctcgatctatgtgttct

SEQ ID NO: 128590 - DNA, 585 bp, Zea Mays
aaacgacaacatatgacagcagggcactcgggaaacttcagcgcagcggcttcgcgtgctcaagaacgacgacgatgaaagtagaggcaaacaggaaatgatgttgtgcactagagaggagagcgggaggctgtgacctttataggcgagggagagaggtgggattaaagcaggaatcaacgctcctcgatgtcaattattgtgccatattgattcacagagaaacagaagtcgtaattgctccattgatggagatttgaagcaaaagtcagacacaagaatcagaacggtcgcgagaggagaggagaggagagaacgccggtgtgggagagcttgcggcggcaatcaaaatgccatttatggcccgttactgcctgaagagaggagagtggggagaggaagaggcatcgtggttgcggtggagctccactctgcagggatcgtggcacagactgctcgctcggacatccgtgctgcagctcccagttgaaacaagaacgaccgagtgggagagaaaagaaatgaggctgtgagagagagaaggagggcccacctgtcattcaaatagaggagaggaggggctgg

SEQ ID NO: 128591 - DNA, 618 bp, Zea Mays
atttttacctaaaactctactaatttacccacctaactaaacttgtttcattattttagtaccttttcacaatttctggcgcaaataaacaaacatgagataaaagaaaattctaaacatatgaacagtcgcgaaccagaactgactcaaccggtccaactctaagcaaaactagcccagtgcgtgtgtaaatggtcagaatagaactattttagcacaatgcgatatccatagggaacgaacccgcaacctatacacatgcggcacaaattaccataaatattactacgacgacgcccaatgatgaagcgacgacgacttggcaataaggtgagtgagacgtcgcagcacatgaagtatgctcagggcgactttgagagcacctgctattgttccatggcgaggatgaggatggtgaattggtgataccaaaatagcaagacaacgatgattcccaaggaaactacaagcacgtagggtccgtggctagacggctagagcgagacggccgaaggacactcttgcacaacgaccagagaaggggctttggcacctggggcgacagcgacaagacgcgcgttgaggcttggagctgggcgtgcgagtggcaaggcaagc

SEQ ID NO: 128592 - DNA, 343 bp, Zea Mays
cacgtacacatttacccacgccaaaatcgcctaagggtgcagtaaacttacaataggcacaaacaataacacaaaattatcacaaatgaacatcaacacaaagggctcaaagatgccactaatcgcaattcagcgcacaacacacgtcacaaccatagtgtacactatacacaggatatttacccatcacaaatatgaccatcgcagttcttttatgaaggggggagggcagcattttcgctcatcgtcgctaaagaacggtgatggcaacactcaatattacatcggctcctcctttgggataagaccagcctcccggaaattaaacaacatcaacctcaac

SEQ ID NO: 128593 - DNA, 584 bp, Zea Mays
ggcgtgtgggttgtacatcggctcgacatcatcgcaaaccggcgttgtactgcgggcgattcgtctcgtcgcggtgagtgcttcccctctctgttagtcgcgctcttgaattattgacgcgcgtttccgtgcgacacccggcttcgttgcgcaaccggcgtccgtcaccggcgttgcgccctcgctggctgcgcgcgcgaccactgtcctaggtgccagcgatcgagctgttgggcgagaggttgaagatggactaggtagagggaagaagaaaggttgttcgccgttcgatcgtgatgaacggtagtgattggatcgtcactggagttcggccgaatccgatctgtgccattgatcgagtgatgagcggtcctgattataaatccgcgtaccccttcgtctattatatctagacggttagatcctgatcggatgactggagttcagatcagttgtgatccgttggttttagatctagcggtagatatcgcataccgattcagcgtaagtcggatctaatccgggtcctcggttttgatcgaacgacccaaatggcgcgataccccttcaccatgacagatttt

SEQ ID NO: 128594 - DNA, 320 bp, Zea Mays
agataaacaccaaacaaaagagcacatgtgaccatttaaaattgtggttgttggctctgtcatagttgacctttggtcactcatgattagaatgttggtcgaggtggtcagatcaccaaccatgtatatagcctattggaaggcgagacttaatagtttacccctccctatatatagttgagagctcagttctggaggtttctcatccactacaacaaatggatacaaccctctagatcccaaaactcctctcactcacttgtatagcttgaaatctcattcatgtgagattgaagaggctttagcgcattgcaatagtg

SEQ ID NO: 128595 - DNA, 680 bp, Zea Mays
ctagatcgaaaatctctggtcaggattttaaaacctcgctatcggactccatccgccgacccgacgatcaacagcccagatgagctggggtcgaaccggtatggagccccaaatcttggccgttgatggacagatcaatggtcatcctagccttccctaaatcgggcggccagacagcggcgcaccggcagcgtcgtgactccccacgacgacgccccgccgaagaggccataatcgtgtcccgagggtgcaaaattatatcgcgcacggtgctagacgaggtggaggccatgagatacaacatggtgagcatcataccgcgattcgtgtagctgtttcaccacggccacagtcgatggcggatctgcggcggtggtgagctccgatgagaaattcccctgggttcggtccatcagcccgctccgccggatagaggaacaatcatgggcgagtctcaggggcggtggcccgcaacgacgttgcatcgaacggcgacggctgcaccccgccaaaacaccgtcagccgccccagcgacttgcttcttctccctgcgcgaacacggcacggtgggacgagcggcgagccccagcgtcaacagccagcgccggatcctggagcgccatccaccccgcatattcccagatggcggccatgccagagctttcccccatggccggca

SEQ ID NO: 128596 - DNA, 312 bp, Zea Mays
caacaccacagtttttaagccatgcttatttacaatggacaaaggccaaaaggagcaaaccagctaacaagtctcagttttaacaaacccactaacacagtttttccaaaagtacttgggctgcactaatcaccaaaagaagtagcacgagccaaaacggagacttcagccagaaatacgacgatccctcggacaccacccgaaagccctgctcatcgcttcacttattatctttcggataagttggcttccttggaccaccatccttttttccttctctttctgtcgaatggcccaagaatccaaccaaaa

SEQ ID NO: 128597 - DNA, 380 bp, Zea Mays
gtcgatgaggtccttcgaagtaggctcgtctacgtcggggacgactgacgtgactgtccgtggtgacccatgttttatctcttgcggggtcatggcctccgatccatatagaaggcagaaaggggtgaacccagtcgccctgcactcagtcgtgttcagcgcccagaccgcttcaggtaacaggtcggcccacttgcctttcttgtcgtcgaggagcattttcttgacggctgtgaaaattttaccattggcgtgctccacgactctgttggattgcaggtggtacactgaggcgaaagcaagcttggtgccaatggagaagcagaaatccttgaagtcttggctgtcgaattgcttgccactgtcaactgtgagctcgg

SEQ ID NO: 128598 - DNA, 490 bp, Zea Mays
ggcaatgttagccgcgatgcaggccatgcagcaggagttggccattctgaggcaagctattcctgttgcccctgcgggtgctgctcagggtgctagtggtggaggagtgcccggggacactgtccctgtgggtgttgctccaggtggcggggccgaggtgcctcttctagttagtggtctttctctgatgcagtggatgggcatgaagttggatacttttgatggcagtggtactccggtcgaggcggcggattggctaactacgtggaggataagatgaatgtctttgagattgtgtatggtgattgtgttcgctttgacacacagctgctgaagggagaagctcagatttggtggaggggcgtgcaggcagctcactcctcttcaccaggagtcccgtcctaggatgtttttatcaggcagtttgagaggaggttctacctggtcaccttcctggagaaaatgaagattgatttgtagtcctacaagc

SEQ ID NO: 128599 - DNA, 413 bp, Zea Mays
ctcttcctctactctggttctacggagtcttgttctgtgcagatccatgagtaggtgtgttctggtcagtcctctagttgctgttcttttggggtgtctgttggttatgccttgggcagttgttagcatagtggccaagttcgccacacttgaaacagcgattaggttgaactggggtagttgtgttgttgttcttggccggtgtgttcacggtgcttccatgatgattctgttgttggacactagacctttgaccggtctgagtgctgcttcgctattggttctggtattggttgctcctctgaccttgttgtccagagcgctatgcttgatagttgttgttcccactatgttttctagagcggaactgagaacctttggagttgttttgatgggtgttcctgctggtctgc

SEQ ID NO: 128600 - DNA, 843 bp, Zea Mays
gaagaagtggcggagacatggtggggttagttgacctatggagaggttgatcgaccacttagatccaccatccttcaatccaattgctcatataactccttgatggaggttgataattattccaatggtaattggcttctgatcacatgtgcaaagctccatgtgggtcctctaatccttctattgatatgtttcaaccataggatgaatcgaccttgcactaatgattgcattggtcccaaagtgtggttcttctgaatggagtggatcagtgacatgggtgaggtggggccaggttaggttaaataaaagaatacatttgtaaccatattaattgaaaacataatatcactatgatgttggttgcaccctaactttggtgcaatgttgatggtcaacaatggtatttagtgaccatcaacaataactaaacaattcaatgagtggtaatgactcacttgcatgagaaacaccctctttgtaaagacactccaatgcccctatttgaaatctctcatgtgtccaaactcactatgaccaaacttcaatgctaacatgtttggttctactagaaggtaaggacatttttgttgtttctactattggttatgtcacttctaaaagctctaatggaagtaaaaataatccactgagctccttttctcaaacattttcaaattactaactccaacatgtctcccatagaatgaccattacctttagcatcgaattaggatttcacaaacatcttaagttttctacttgataatgcatcacctttcaatcttaatgaatatgcaaagttagaacacttaattgacactagataaatgcatttacgta

SEQ ID NO: 128601 - DNA, 555 bp, Zea Mays
ctcaaagttgactaacactaaacattctacgatttttttaggactagctaatctatgctcgctgaaggatattaatacatgtcaaacataaagaggaagaagcttcggctaaggctctcaaacgaagcgcgctactagagctgattgttgggtattaacaggtggccaggtgggcctaaacactcagagacaaaagacacctcaggtgcacgacaagacggtaggtagggaaatgtagcatctcgttatgtatgtatcattccgctacaagatgggggctttataggtcggtccggggtagccggataggtggcccaaagtacattactgcccccagtcagcgaccacatttttacaacatgtactgtacaacgaggtaattacagtgccgcagcccccactagttacgtgtacacacaattatacccactgattacattgacaggtgggccccacatagcatcattgcgtgtccacgaccaagataggtacgtcttctgcattcgctgccttcgtccagacgagccttcgcatctcctaccggcccttatcgag

SEQ ID NO: 128602 - DNA, 604 bp, Zea Mays
gtcgaggagcatcagaggcatgtaagggtgctgaaacaagagagttgaggataggatcagacctggagtgcactggccacgttgagagcttgttcatggcagtggaaaactgatttgggggaactaagcaattcgggggctctggtgagtaattggaggcatgagtgggtgtgttgagtgcacaattacatagtggagccaagggtgtgctcagtttatagggtccttgagtggtggtccgtgaatttgagatcgcgcgatggtggccgaagagaagggggtgcaccggcgcaagcaatcggtggtgtttaccttggcaagctcaccgacgatcaccggatatgcataacgcaagctaatgcgatgtggtaagatgccaaggcacatggcgcaaggtcaagaggtggctatcaccggcgaggatgtttccgaagcggccgtgagctgggcggacacgacggccggagtgaacagtggctcatgttcatccatacgatgatatttactgcctcgagcaacaatcggtacttcattgagcacgaatcgcaacggcgacgaggatcctggcgcgggatcaccggcagtgggatgaactgaactgatc

SEQ ID NO: 128603 - DNA, 476 bp, Zea Mays
tattttttttctagttatttttgttatttctctgtcatgtcaatgaagtatgatcttctctatctttggatcaaggcacaaggttcgctctatggcaaatcaagatgagggacattcttactcaaactgaagtcgatgacactcttgataagttcagtaaaaaagatccaaaatcttggacccatgaggagaagattgtaaggccgtgactcaaattcaatttcatctttcaaataatattttgcaaggttgtttacaagagaaaaatacatctattttatggctcaagctagagttgatttgcatgtctaaggatttgacaagaaaaatgcatatgaagatgaatttataaacgcacaagatgcaagaggatggttttgtgcttaaccatctttcagtttttaagaagatcgtttcatatcgacattttatggaggtagattatgatgatgatggtttagatattattcttttgt

SEQ ID NO: 128604 - DNA, 543 bp, Zea Mays
tgaggaggccggcgtgaaagtcgagcccgacgccgacgccgacggcgaggagtacatcgaggagatgatcagggagctcacctactacggccctgtcgagatacagcaccacccgtcggccgccggcggcggcggcgcctgctcgagctcggcgatcgggtgactgacgagctgcctatagattgcttagccggctgtgcagtgcagtcgacgtcgttgtacagcgtttgtttcgctaggcatgcaggcacatttagcctggggcccgcccgacccggagggatgatgggccctttcctgttcctgttcctgggctggggattcggggttgagcgagagccagagcgggaaggggaccaaaggatctttcgggataagggctcctgatttggttcgttgatgtgaggcttgttctgacacttgtcgtttacctcatttggtatcgcagctgaagcttctttatctctccctttcccatcgcaaatggtttccctctcgaccacaaagatgcacagcactatgatcaccggcagctgctgcaca

SEQ ID NO: 128605 - DNA, 711 bp, Zea Mays
aaatattctttgaattgttgcacatgttttatttagttggaatttgaaacttggtttgaatttgaattgaaaaccctaggaaaaataaattagaaaaggcattagaaatatcaggaaaatggaaaaaaaccaattcggcccaagtcagcctagcaggcccagtcccgcgcgcgcgccctcagcccctgacaggcggaccccgcctatcggcgccagcccgtgcccacgtctccctctctctcccgctcgctactagtggggccgatctgtcggcaccattacttgtcgcgcacgcgcacgtcccctctcgctgccccgcggaccccacccatcagacctcgtccctaacctctcgcccgcgcactcccaccgtggacatgcccacgtccgcgcgtttcccggccacctccgcatgccctcgcctcctttagagctcgcaccccgctcgcccacttccccctgttcatttgcgccctcacccgagcaccctcgccccctctctcgccctgcgcgcgcatccaagaagctccgccaccgctcaccgaagcccgccgcccgttcctcgaccgttgttgagcctcgtcgcgtcgttgcctcagtgaggtccacctcgccgtcagcaactcgggacacccctcgatttgcccttagcccatcttgtttgcctggtccacgctcaccggagtgtttccctgtgcagccggagtccat

SEQ ID NO: 128606 - DNA, 296 bp, Zea Mays
ttcaagcattccgtggggaacgaccgacccttccaacctctgcctcctcccccaccacgaggagggcctggagaacctcgacaaccccaacagcaggaggggggaggaggagccttcccacgtgtcgaggagaagttaatgtcatcttcggcggacatgggtcgcaagaaagcaagaggcaacaaaagctcaacgaccgttagatattggtggcaaccgttggacctcccgccccgtatcgatggtccgagcacccgatcaccttcactcgggcggatcagtggctcaacttcgac

SEQ ID NO: 128607 - DNA, 287 bp, Zea Mays
gtaaaaccttggatattcagaggcatgtcagtgttcgcccgaagcgcccttgccgagtcaatcaacttgattctcctgctgatgagcagaaaaagaaaaagagacatcttcggcgagtatctagcttggatcgggatgctggtccttcggttcctgctgttgaggaagtgcccgtgcctgagtttaccgacgctgaccccaatgggtgtgatccatccgtcgctgaccccaatgggtgtgctccatctgtcgctgatccccatgggtgtgctgtctgtgttgctgat

SEQ ID NO: 128608 - DNA, 494 bp, Zea Mays
ggcggaagttcaagtggaggtggagctgctgcacctacacctgttcttgcagcgaggccatataaacacaactcttcagtgccagaactaattgatttggatgagctacctagggatccagcaaaaaggaagagaatgtgtgactaccaccccaatcagcaaaatgaaataagaagaaagtatttactatgggggccttatcaacctcgcacttatgattttcctttcaggattattgcgggtaagaggcgtcgattcaatccagattggtttggccagtatgctaattggctggaatatagtgagaaggaggataaagcatactgcttgtgttgttacttgtttagggataaaaatattgacacccatcatggccatgaggcatttgtggtacaaggctggaattattggaagaacagtgatagattagcacttcatgtaggtgatcgcaccagttttcacaacaaggctctcaaggattgtgaggatctttt

SEQ ID NO: 128609 - DNA, 313 bp, Zea Mays
ggaagatccgccctggcggcggaaggtgcaggcgggatccgcccctggcagcgggatggaggaaggagaagaccggcggccaggcaagatccgccctggcgggatgggggaaggggaagacgggctggccgcgatggcagcgcagcaacgatgcgacgacgccaaaaaattggatcagggctggatttagacgtaaaccctaacctgctctgttaccatgtgactaacctggattaggcgagataatagccccctcgggtactgtagcatatatataggcagacaataatatatgggccttatgggccttaac

SEQ ID NO: 128610 - DNA, 578 bp, Zea Mays
gatgctgttcctactgctcgcactgatgttatactagactgtttgctggatttggcgcgaagtgtacagggggggggggggtgtgttcaggatagcaattacttgactgagcttaaaagggacaaattgtggttcaaccgctggtcgtatgaattgattatgatacctgcaaactgaaaactatttatcaatttccgttatacgttatgctcgctaaaaaagaccccggaagtcacggaaaatcaacctcgctcctcttgctagcaggacagtaatgatatggtggaattaatcatggcttgccacaatctagtatcttctgctgcttaatcgctttgaaatgttgtcggggctaggcgcttgtctaaattatatttcgtatcactcttttactgtataacaccgatcaattctctattcataataaaaattgatacaaaacaagaatattgtacccaactgtttgttgcaggctgtagcatctactagcatgtcattctaattcttaatgtcattgaccacttaaatgtggcatgatcaccagtctttcaactagtatgttttggataaaaactaag

SEQ ID NO: 128611 - DNA, 666 bp, Zea Mays
acactacaagcagtgggctggcaccagatggagccccgtcgatctttattagggttctcggtcttgcgctttggatccacgaaccttttggtacagatgatcattggatgtccagctttggaacgggggcgttccgttccatgtgagtgaaagcgaggctgccggagcacgcactgccggcggtcgctgaagcacgccgagatttgttttttatactgctcggcgaggaggcggtggactgttccccgagaaagtgcggtcagagtggcattatcaaatggacacgctccgtcttgtgctccaaagatgataaactgcgcgccgagatcccgtgtgtgtttgcagtttccagtggcattccggcagcgcgcgcatggatcttgctttttagatcagctggatgctagcaacaaaatacatgctaaaaccttgaggatggagccacttctatacctcaagtacctacaggtcagcgcccatcaatccaacatccatcaatgcttcagtccttttcccaaacatgctaatgaaatgtaaccaccggtgatgccaatgagccgctgatctcaagcatgctacccctgccgcgcctacaatatatgacaaactacggttgcagcatctacgattagataatctaaaattttaggggactttctttctcca

SEQ ID NO: 128612 - DNA, 826 bp, Zea Mays
gctccggcgagccactgtaccggccgaatgaggcgatgaccggcgcgcccaagcggcggataccaaatccaagctaccccgagtaatttccccaagttaatcgcacaattggtgacctattctagcctgcccacgagaaccgcgaagaccatgatcgtttggttgtgttcccgacgagtggtggtctcttagttcgaattggaggctcggtaagcatcacagggtgacaagagtgctcaaacaagggagagtgagggatggacggacctagaaagggctggccgcggtgagcagtttcttgcgatggcggagagtggatttggggagaattccaaattcgcggattccagagaacgactgcggttgattcgtggtggctggacagcttactaccctacggaggtcagggaggggtcaatttatagtgctagcgggcggtggccgcgaatttcgagcaagacgcgcggcggtcggaggtggagaagagcactggcgcacgcgaattagtgtcctacgccgtggcaacctcaccggcgttgatttgacagcagtaagcgagttacagcgacgcggtggaagggttgagccacgcggcgcacggccgggaggcggcggtcgacggtgagcttatcggctacagccgcaaagcaggagggcagtcatggtgagtcaccggagttatccccaggggatggcttttacctagcagccttatctggtcaccggcgacgtgaatcgcaacggcggcggcgtgaatctcaatggagatcggtcgtcggcggtgagggacggtcatgctgtcgttctgatctgtccgagtcactgt

SEQ ID NO: 128613 - DNA, 618 bp, Zea Mays
cgccaatggcaagattttcacggcgatcaagaaaatgctcctcgacgacaagaagggcaaatgggccgacctgctacctgaagcagtctgggcactgaacacgaccgagtgtcgggcgaccggtttcaccccctttcgcctgctatacggatcggaggccatgaccccacaggaaatcaaacatgggtccccacggacaagcgcttcagctgtacccgacgttgatgagccaacttccaaagacctcattaatggagactgtgtcttcgccctgtaggccctcgacaaatatcaagcccaaacgaaggcctggagcgaccatgcagtcatcccaagagaattcatcgaaggggacctcgtacttgtccgcacaacctggacagagtcacggggtaagctggaaccaaagtgggaaggaccatttatcgtcaagacgaagtcgtctcccagcacgtacagactgaccacacaatctggcgaagacctggaacattcctggaatatagataatcttcgcaaattttttgtttgaatcctcagggccatcacgcccttgtaattcaccaaacattattattccggcccgcactcttttcctcccaggggtgtgaggttttt

SEQ ID NO: 128614 - DNA, 294 bp, Zea Mays
agcaggtaactgaggtcgagctcgggcgaggtagagacaacacacgagggtgagctcagcgtctggcgagacagagattgtgcccgagggcaagcttagcgtcgggcgaggcgaagatttgcacgtgagggcctatctgatttccctatcatatttaggcgtcccatcgaggggatggcaggccgcgtgcacgcacagtggtgggagcgaaatcatgctgttgcgcctggacatgatcgctgtcttgtagtcactgtgcttttgcgcctctgcgtggggtaggtatgcgtaata

SEQ ID NO: 128615 - DNA, 280 bp, Zea Mays
gtcgaggagtatcaggggcaggtatgggtgctgaaacaagagggcagggagcacgaacagacctggagtatgctgaccacggtgagccaacacacggcagcgcggagaaccaaattgggggaagagagaaattgggaggctctggtggataatccggggcaaggactggtgcaatggatgcgtaattacctaacggagccgcgggtgcactcaatttatagcatgcttgagcagtggctagtgaatttgggttgggcacggtggcggtcgaagaagaaat

SEQ ID NO: 128616 - DNA, 335 bp, Zea Mays
ttcaacttagctaaagtcaagttgaacttttctgaaagaaagttcagttgcttttgaacggaagactcgttgtctctcaaacctaacatcagtcaaactcacagtgtgtccaaagaatttggttttcaaaatagcttttgaatttagaggcttgagaaataacaaataccattacctatgctaaaactaccaaggaagaaataaatcctgcgactcaagaaatatagaaaattttacatgatcgtcacatggaatatttcaaggcaccacttgatgtatttcctttgtccttgatacttcatatttcctttctcaattaaagttgttactccttt

SEQ ID NO: 128617 - DNA, 347 bp, Zea Mays
taagagtacaactttgcttaaggggttaagcattattgttatgcaaagttgagagaaaactgggcccaaagttgggctgtcagtctatctaaaacctgaattatggtattcagtggcatgggatgaactttgggggtcattttgaagatgattccgtggatgtttgagtatggttaccacagtcggtttatagctggatcattagacaacaactttgctactggccgatcaacaacttgccatgtaaatttaggagaaaatcaatgccaaacttggtctgtcaggttaactgaagaacaatccgatggtacagtaaccggataggatcaggttcaggtccctcgccg

SEQ ID NO: 128618 - DNA, 437 bp, Zea Mays
gtccagcagcttctagaccttcttacggatgaagtcctgccgctcaacggactatctccgaggcttatgactcaccggtttggcgttagggtggatcttcagatggtgctcgatcacctccctggggatcccaggcatctgcgacggttcccatgcgaatacgccaacatttacctagaggaaggcgatgagcgtgatttcctatttctcctccaagtcacccgcgatgcgtgtggtctgggaggaatccgcgctaagctggatggtcttgacggggatgccatctgccctagatggttgcaccttaggcaccttggcaggcgtcttggtacaggacgtcgaagggtccctccccccgtcatctgggcgagcagcttctgccgccagggcgtgcaacttctcgactgctgcaagcacagcggggtggttgccccgca

SEQ ID NO: 128619 - DNA, 595 bp, Zea Mays
attttgttaggatgtaagttccactagtacgtaccctgctgacccacgatacttcaaggaggtctattgaaactaacaaaactgtaggggggttcttggtttttcttcctctcctttcttggattgtgttgtgtgtgttccctgctgacccacgatacttcaaggaggtctattgaaactaacaaaactgtaggggggttcttggtttttcttcctctcctttcttggattgtgttgtgtgtgttctatcctcgctgttactcactccctcactcgtacaacctgcaatagttgcggaaagtagggtaaggttttcttttattgctacttactcaatgcacaattaatggctaggactatgcatggttttatgagttgttttgtggaactgatttcctatcgtgacctcaagaaggcaacaaacgtgtgctatggtgtgtgacgtggacgagctatctctactactctatatgtctctagcgagggcgtctacatgcttcaccatgcccccgccagcgcagaccacgccttcgctcgcgatgcccttgccctgctcgcgtccgcagccacggccgccgcgtcagccccgccttcc

SEQ ID NO: 128620 - DNA, 293 bp, Zea Mays
caattgggttcgtgtaccccgactaccattatccaatgcgagggcagaaaaggaaaggtactgcttcagctactcctagcgagccagcgccgaagagaaaaagagtgaaagttctcacacaccggccacgttacattgaactagccacagtgtctgaattcggcagtggaacatcttcagcccccgaagctaaggaaccaactccgttgcccggagccaaagagctggccgaagtgccaacaacaaaagaattggaagaaccaaaatgctctgttaccagaaaccgaagagct

SEQ ID NO: 128621 - DNA, 859 bp, Zea Mays
atgtggtgagagatctctcatttaacctattgatttgaataccttatagtcattcatgatatagtttcttttttccctctgatgcgtctatgcgcatgtgctatgcgcatgtgggagcacgcatacatgtctaaataggccgggcttgtcgggcggctcaaaacccgacacgcatttggccttgcccgaaccggcacaacacctagcaaactaggcccgtgctggcctgactccgtcatcgagactcgacataccctggttttattttctatttttcatacaaatgcatatattatacttcattatagagtataaaacacaagaattatgtgttttgttggttatgtgggtgtaaataaatgtttggagctaccaactatggtttaaacactcgtatatgtataattttagcatatttttatcatttaaacgtcatatactgttatgggccaattaggcttgtctcgccgtgggacggcctaaaacagttattaacctagcgggtcatggccgagccttgctcgagatccgtgggtcattacgaccctctagctaattcgggctaggccaacatggtcccaatttatgttgggtctagccgtgacccgcccatttgaacatctataggagcaggtgaccatgacgctatgcgatggcgtacgctatcgcgcagttgtattgggcaactcctatagtcttagagcaacttcaagaggctatctatatcctttctaatctatataaatggagttttttttacaaaaatacctttcaatagcttatctaaatagctatccaaatattgatatcttctgttttaggttcctcgctagtcaaatatagaaaatgtgaatgtctg

SEQ ID NO: 128622 - DNA, 764 bp, Zea Mays
ctcaaattctacaagatacagtggaaccagcattcggaagacgaggctacatgggaaacccaagatttcttgaaaaagaatttcccaggcttcctagcctcatgtaaattgtaaagcttgtatagctgttgtaataaagaagtaacccccacatcactcctgtcttgtatcaaaattaaagaaataagaatgtgatgtgtttcctttaccattccctaccctaggatttttaatctcgggacgagattcttttatggggggaaggatgtaacacccctggtgttactataactaaaacttgagcatgacatcatagcattggcattgcatatgtttgacacacctagagtgcattcactaggcaaaaattttcaaacaagttgtattgttttaaagttttacaaataggaccctggtttaaggacttaaccctaaatggggattataggggtaaaactttacccaagttaagaaaacctaaatactttagggtaaaagtcataaaatgaccctaaggataagcttgaatcacttttatacccctgagataccagaaaccctaattggaaccctggaaaaccctaaaaccaaaccctaggggcttatattcaaaattagtccacttttggactaaagtgcaaaaaccaagccaaataagtttcttaagtcctttggttcacaaatatgtggacttgaaagcagaaccctaagttttggacttaaatgcaaaatagacctcatttgagttttgctctaagtctgga

SEQ ID NO: 128623 - DNA, 389 bp, Zea Mays
aaaatgttgggaagctgtctatgggtcgggattggatggaggatggcgggagagtgctagtcataggagccgatcactagagtatggtgttgggcggtggcgagggcagaggagggcggtagtgttagcgcagaggggtggaatcgaacggtgagagcacggagaaggccacagcgtgctcgcgcttgattaaataggtgttggcaccggggaacgaccgaccacgatgcgacggttgtgcgggcgcgcccagtgcgtgcgcaggagcgaagcatgccaccgaacacatggtgtagtgcttacttctgcccgtgttcaaacgactatgggcgccagaagtgtgcatatttggccaatgcctatgtacaaaagatgttctaggatctcca

SEQ ID NO: 128624 - DNA, 827 bp, Zea Mays
gcagaaaggcaccacgactccggcaattgctcgtcggagtaccttcaaccacaccggaccgccaagcgctgtggtcgacctccttcgaccccatctccggtgagtaaaatccccccccatcgaattcactcgcgtcccatagtcgtgtacagcccgttagaatagagtttgggatgtagtggtgtgctgcagcgatggccgccgtgggctccttgccgcgcagagagggagtgcttcgatgctgctgacaccgctatcgccatgcgctgggttacaggtgtaccggaggcgcatgctgcggctgggtcaacgcactgcgcaatcaagggtaatgaccttatcctcgtattcctcatcttctttgctctgtgtggctatgtcgaattggggagggatcaccagagcaggtggattgggatcgcctgggagggcaccactgtcgaagcaagcgccgtcgtggtcagctcggtagaggaagaagagccgataaccgttggatgggaaaaggacgtctaggattagatctggtatgtgttggtcctcgaccgtcgatcttacagcgaacgactgcgattggaaccagccattccagcgctgacgtgggtcggtagccgttgatctcgcgatccacggctcgggtttgaagacaggttttaatctaatcccgaccctcaatactcgatcggatggccgaagtcttttcgcgctggcacttttgttaaagagcccctctggatgtaggaaatgaacccgcagtcctgcgctgtggcgctctgagtcattgtatatttcgcgtttaagcccttgcctttctcagatttagtgcg

SEQ ID NO: 128625 - DNA, 575 bp, Zea Mays
gatcctcgttggcgttacgattcgtgcgctctggcgtgtggataacggtcgacggtgaaaatatcttgcgcgaggatgaacttggggcactgttttgccctgtcgtcgcacccacttgcactggcgatgtggctgtgcgaccatcgtcgtcgtgccgccgtctagctaggttgtcacacgccttaagtcatctcaccactcgtctcaagccgtgaagactcggcagtgaccatcgtagaccatgaaccagtgaactccacgttagcaaactctggtgactcttccgccttcccaccgcgagtgattttctgttcaaattcgtcctactcgcggccgcgcaatataaattgatacctcagcctgttccgctagattgttacgaagtcagaacaccaaccctcgcccttgattagccaccatagccagagaatttcgttctttccctaaatctgttgtctgcgccaccatgagacgccgcgtcgtggcctgccacctccaggtctgccctcgccctccttgtccgtgtttcaacgcccatgcatgcttgtgatgcttgtcggctcggccaattaagc

SEQ ID NO: 128626 - DNA, 653 bp, Zea Mays
gggagtacggctaagtccgccaagaatactaccccacttaaaagaattctgacttgggagcttttgaggtggcatagaaggtctgaccctggggttcaggtgaccaaaggaatttctaaagatgcagtgggaatgccatgcttttccacaaaactagttgcgatgaatgaatgggaatgggatgctccagaatcaaaaagtacagcagcaggggtaaactcgactaggaactcatcgagcactactccgggggcttgctgggcttcctgagcgtcgacgtgattcactcatgccctgccgtgaaaccgggtcttgcttagctggctgttggaggagggtgccttggagggaggtgctgaaacattcttggggccattcaccgagttggagtaggtaggtacgaatgtcttcaactgaggacaattattcttgtagtgactggggtctccatagtgccaacaagcattggctggaggttggctgcttgcaatagatggggtgtggagggaattttgacccggctggctgaaacgtgatggagcgggccctattggcttgctgaagctcagtcctttgggaggaaacccaaaagatcgaactctctggtgcctgtcctgctgctaagctcggagaacttgaaacttcctcttgag

SEQ ID NO: 128627 - DNA, 578 bp, Zea Mays
cgacgatatgtgggacttcttctcatcctacgcagaactttcctcacagtaccacgatgaaaggttgccttgccacgacgactctagcaacaacactcgcgcgtttccacttcgtctgcgcacgcttcgggggtgatcacggctctcgtggcccaggaccacctcccaactaccgatgacttggagttcattgggatggtcagaggtggtggagacctcattttttatgcccttttatcagactcaggctcgaaccttggctccctaatgagtagtgagggtggacctcccaacaatggggagagtggaggatgcctgaccctcgcaacccttgcccccggaaggctggaagggcaggcgtcgttggtagcatcagtgaactagggttctacacgaggcaggagccccatgaatcgctaagcatgatgtctccccatgaactcctcgtagttcattgacgaattgatgttgtttaggagtctccaaggttgtggacgacccaaaagtttgtagcacccgctctcctgagccgatttaagaaaagagtttgttttgacctctgtggccggcttgtgaag

SEQ ID NO: 128628 - DNA, 5136 bp, Zea Mays
cccgtaccttggatgattttaggatggctcgggcaaggcataggagctgccgctgccctactgaaaaagatgcaccgctttctttcacatgaatgtcaagtccacctattgattctacctgtcccttcatatggcagttttcaagaacttcccatatcctaagatctgtttttgtattgaaaggatccaggttttccctgtcatgtatattcactattaaaatattgaatgttgaacattattttttgtttattccctaatcagtgcaagcatgaaaatagtcagcatgaaaacagtgaaaagccagcctgaaaactctgaaaaagaggatcagtagttacctcaaagacccatcaaacaaaaaggggctctgtgggaccactgcaaaatgtccacggagttctcggacggcaactttagccaaatcaatgccatctactaatatgcggccgttccaaattggaactaagcggaaaagtgcattcagtatacttgatttgcctgctccagtccttcctattattccaacctaaaaggcagcacagatttcaggataccttcacaaaatcaaaataattcagtggaagtcttggaagcatcgtacctgcatgcctgatgcaataaggaacgaaacgtcacttaaagcaggtgggagctctggcttgtacttcagtgttacatgttcaaactcgatcttcccttccgttggccagcttctcggtggaggttctgatccctggagttcttcttgaggtatgccaatgtactgcaagcatcatcaaactattagagctagagacatgcttgatgaataagagtataagattctttgggttacctcgtcaaccctttccacggagatcatttccttttctgtctctgtaaaggtggttaagaagccattgagcaatgatactaccggtgctgcatatgataaagccaggcccacctgcaatatatattatttttaatattgatttgtatctagtactttgaacagaattatatttataatttgcatcgagatggaaatgcctaagcacaaggtcagcaattgtgtccaataaaacctaccagtccaggtgttgcaaagttgacaagagaactgctatggaagctgatagtagccatcatggcgataaacagaatgataaaacctgccaacaactgaacagttttgctcgtcactgcagtgcctgattataggcctcactgatggataaagtaactaattccatgtacatgattattttattatagcaggacaaaaaatatacacctggagtctcaacgagagccacaaactagcaacgagctcagtgtaggacgttttctgatatagtgtcacatgttggatgaatctttcaaagaagaacccctgtgtagtgaactgtcagcatcttgaacaaaccactcaagcactagcactaggggctagtgcctttgatatgtgacacttttgagttcaaaaggaaagttatgatgttttaacatccttatgaatttgtctaaatgcaattagaatgcttccttctagcccaggaagaaaaatgaaacatacttcattctggaaagctcttattgttgatgaaccatcaagtgtctctgtgaaagatgaatagattggtgaacgagcaacgctatcaagtcgccgtacttcacgtgatgtagacctgtaatagaactgtacaaaacattagtttctttctccatatggtacgccatagatatataccgtgatgcactgtgttaactaagaggaaaagaggattaactgttacacactgatgtattaaagtatggattttatatagtagtctataaaggttgagataaatgagttaagcatcaatacagaaataaatgaaaccagtacctgcaacttcctatagataagccagagtggaagtaagacgagtaagaaggaaacctgcagaccaaacattcatgaaatacaagaaacgcggtttagtttctttctgaggtacaaggttggccctatactattgtttacataatttacctgtgaataagacaaaacaaccagagtgccgaataagctgaagaagttggccacaaatatattgaggatgaaaggaagagaatcatcaacggcatagaggtctgacgataatctggaagttcataaagcgttgccaaggccaagggacatttcaatctttcgatgcttactgaaaactagaggtgatctgatgaataagataccaaacctgtttaggatccgaccactgggattttggtcaaagaaacaaatcggtgcactgatgatattttcaagaagagatgcatgaatatggattgctgcacggaggccaccgaatgcaaaagaaaatgcccttcccaaagtgaaaagagaattgatgatgccaaacatagcaaggataatctgcacaggcaagtttttgaatgagcataaatgtgctgaaaatatttctttcgtgaacaactgaacgccaaattgaacatactgattactacggttcatattcacttggtagaaagtagtcttacaagataaaacctcgtgttgttggtgcctgtgctggtatcaacccagtaagttaaccaaatatcattgccgttacgagatgtttgcattaagaatgcgcttaggaatattaaaacaacagttgaccaccccacaaatgctgcatattttctgtaaaaaagaaccattatgaataatagatcacacaagaccgaaatacttttatcattctattgtatatcgcactccagttcacaaaataactcacttgtagacaccaagctcaaccttgccttgtttccttgcctcttcttctacccgatcttttgtctcctcataacaaaccactgaatcttcaagtacagcatcaggtttcagttcacatgttaccattggtgttttatctttcacagaagctgcaaatgaggtaggacttgaattatctggcttagaggttcttgaatatggagttgccaagaaagatttcggtgtcccgaaccacttgatgagcccattagccatgactacaatcatatctgcagcaaaaatggcctgggaaacagaaaagaaaactaaaggaaaattacattgttctttcagcatcactcttattccatgcatacatcctagtagtatgagatataaccttaaatatgattcatacatttaataccaatgtggtgcagttttttttggacaagattcagtgaatactacctgaagattgtgtgtgcttagtaatcttgttttctgcattagttggtgccccataatagccttttccaggatgcacgaagcaacttgggagtcaaccgcgctaaggatgtcatcaaacaagtatacatcagaattgtggtacaaagccctgcaagtgtatgatcataatgttagctagcgagcttaagaaggatgaaagtccacaaagttgtcaaaaacatgaccttgccaatgctagacgagctctttgtccaccagataagttggtacctttctctccaatatgtgacatatctcctctggtcattgccgatatgtcaacatgaagcgcacatgcctctattacttcttcgtatctgcattaattttgtaatgcagaatgctaattaaaaggggaagcaataaattctatggtgtatgagcatctacaatagttcatgaatcatgatagctgctttaatgccatgcaatgacataatgaaacaaacttgtgataatgtatgtcagagacagataaactacctccttggatcaaattctttaccaagcaaaatattatctcgtaaagagccagataagatccatggtacctaaagaacaccagttacatttttaatctccagacatttcaatgcaaatcttaagcaatttcaggtcataaagtgttacctgtggtacataggcaattgaaccacaggagctaatagaaccactgatgacacgagtctctccaatgactgtgttcaataaagatgatttaccagaaccaacctgatatgggacataaaatttcctcagttcagaggaaaaattgcaatagcatcagattagattattataaaaaagatctgaatatatggttgtatttctttgcagatactggcaaattgagatataatataatgtgccaaacagtatgaacatgctattcagtttccccaaccaaacaaaccattaacgaaattgtgtacccccaccacataactttccaagaacaccttagtacaaaaacgaaaatgtgacaatcagaatagttacctcgcctacaattgcaataaagaaccctttttgtagctgcaaagatatatctctgagaactatgttcagctcagcaacagagctgctagaccaagaacaggatacattctgaaagacgatggccattggattatgagttactttggtatatctcttaaagtggtggtttaaaaggtcagcagaggcatttaactcggatgagtgatgctctggagtagataaataattactcagccgtctgctagagataacagcctgcagcaaacaaagcatgcaatgttagtgcagctgcgaatgtatgtaacagtataatggcataaaccaattatccacttacatcaatcatcccattaataacccatggaaatgagtttagcggtgatattagtgtgttaaagagtgcaacacaagtaaatacctgtaataaggattccagatattagcagaaagtttcttggtccaaaggcatatcctaagcatatcattcatgatattgttttaccgtggcagcatccaatgcgtgtcccgttattgcaaaaatagaaaaggtggaaagggagaacaatgtcggtgtggttgcccagaaatagacgcaccaagcatccagatattttcttgtctattgggaaataggaggcccttgttagttccagtacaatatgttcaacttattataaaatgtagattaatcaaaagcaattgcacaccgcgagatgcttcacttctgattctcttctttccaccaaacgttcagtgaatagtttctcccaactgtacatcttcactgttctaatatgtgctaagagctcccctgcacagcttatcctattcatggacaaattttggagtattagattctatattattgtgtt

SEQ ID NO: 128629 - DNA, 399 bp, Zea Mays
ggcaagagtgaggcgaaagggtcatgacggaaaatctgcagggtgggaaggctcaaggttgcccttgttgtcaaccgcatgctgcagaaggaggagacgcccttgttcacatggggctgattggttcgctgcacgccgtttatccaggcccaccggatgttggtttagggccttcagatacagcatgattggttggcttctctactcatgcacttgaacccgcggaatctcaaagcatggtttgtttggtttccgtatctcctcaaacaggctccatacatgcaagccgtacgccgcagccaggctccgcgcgaacaaccggcgggagcatctcccccatgcaggctcactgcacgcttaagcactgaaaatcgagatatttttattttgcttttctat

SEQ ID NO: 128630 - DNA, 777 bp, Zea Mays
taaaaactcaccttcatcggacagaggtggtgtaagggccaaagcggtgggcaaggatcgacgtcaaggcccgagcagcgggcagggtgggtctagaacctagagtgatgctaaaactggagctacaagcagggaggtgtcagtgaggccaaggctggggaagacgttgggtggggtcgaagatgtgcggcaccggggaaggtcagggatgggagacgtctagcaaggttggtcggcaccagggaatgtgttgggtagggtcgaggatgggctacgctagatggggttagggctaggcgctaggtgggatcatggtaaggggtggtgctggacggggtggaagcgagggtgccaccgtttcttgtggctgacgacggatagaggacataaagcatgtagtgtggttgcatgacggtgagaggcgaaaaagaaatgagaaacaagagagcagaggagaaccgagcaatataggagacctcgacgccatcgatctatggctccaaggtcccaccatgtcatcgtccacactaacgactggtgtgacaccttggcgtcatgacctatggcgttgagacaagtaatcttagcatcatagaccatggcacctacttttggcctaaatatggtattagttcctctggatgtccaaacatggatttaaaaaaattgtaaaaatacaaaaaaaaactggcagcatggtgtacaagagtactttgtatttagatctaacttatactcctttcgatacacgtactgaagagtatataagtactacta

SEQ ID NO: 128631 - DNA, 343 bp, Zea Mays
gtgaaacaaaccggtacgtgtctacagccgttggatccgagatctgtggtcagggtttaatgaaggcgggtttcaatcacggccctatgatccagatcctgcagagtagatttttaatagccagaaggttatcgccgatatgatcctgtccattgaatactggatgaacgccctagatcacgactctgaagcggtatccgcaaatctaatctccaccgtctaatcctcacccaacggcccaccggccttcttgctccccgcgctctaccatcctcctttctctctcttcaagttgtctgctcgccggagttcggccgattcggcgagctagggcaccgagctc

SEQ ID NO: 128632 - DNA, 555 bp, Zea Mays
ctcacacgatgcactcggctttggcacaaacagatgagaagaggggtcgcggcttcaatatacatcccagcgcaagcaacgactggcaaggattacggcggcatcacggactccaggggatgaggaattagttgagggagcactggattccccagccaatttctacgcgctgctgcaatgactcggcaagaatcatgggaggaagacaactggttctgctccctcactgatgagaggaactcgaccactccttatacccgagtggaaccccggccaggtcatggcgtcttggattcacgcggtctgcaacagattctccatggtcacaactgaatttgcgtgaaggttgttgagaattgggacacaactgtcgtggcacacaagagaaagaagaagaatctggcgaactgggcccacgcgatagagagattaagggtttggtggtgtccaggtgaccaggtgggtcgtgggtctagcgtgccggtcccacggagcagtggtggcagcgcggtgaggagttgggccaagggagtttgcgcgtgactaggagtgggc

SEQ ID NO: 128633 - DNA, 542 bp, Zea Mays
cgcgcagcgctcactcgttggctgggaccgacgcagggaatggagcgaactgacatacggatgaatgagaggccactgattaaaatgaactgatacatcttatttgggtgtcgcttggaaattaaattctcgtgcacaagtagaataaaatgaatcgaggttgatcggcttcggattcggcatcgaaataaaacgagttggattaaccaaaatcattgccaatgttgattttcgaatttagattggacacagagattttaagccgagttggataaaaatttattagagaacgacacattggagattccgcttgagaatacggacttagattaatttttggacatagatcgaacatcgagaaattggattcggacatagatcgtctagcaactgtcaagcgtttgattaattgagctttagacgagatttataaatcgagattgattatcaagtttgcattcgcgtcgagaagaaaagttttaacaggctccaaattcggcctttctagagattgaataaaatcagaaatcggtgaaaccttc

SEQ ID NO: 128634 - DNA, 850 bp, Zea Mays
cgccaacggcatgccctagccatggtggcttcatgacgggtttagggttccagtctggtgccatggccgtcatgttggccgggaaccttagcacctcgtcgaggtgtcgtcctgcggcgtttgtcaacagagtagttggcgtgcttcaatctggggaagaaggggagggaaggtgtttgcaaaagaaaatttgcagtgcaaggacagctgtgggagggttaaagtgtaaaaaaatttgacgaccatcggatcgacgttgaagggctaggattgctcatgtgcacatacctgtccatgtttatacgatacggtcccccatttaagcgctattcgtgaagttttatcgagcccgtccagtaataccggctgcgaataataaatagtaagctttgaccagaaaacatgctggcggataccgatggtagcttcttggaagctgcattcccaacctatggcctgcgtgtctatgtaaaacgcatttaatttgtcgtttgattgtaaactacaaagtaaattaataaaagcggaccaaacgggccctgaagaacggactgcggctttgtgagagcgtgtgcttgcttcttgtccatttgaggaattcatatttcaaaatattctgcttaattaaggccccgttcatttgctcaggaattgtttcagttggttgaagcttgtatataaactagacaaacaaacggattaggaattgtttcagtccacgattccttggaaccgaacgggcctcaagtactcaacagtggacactcactgaccggggaaactcggaaccctacgtcttcgcaaatttcaaaacagaacgacgacattaggttcaaactggacgacggcg

SEQ ID NO: 128635 - DNA, 1250 bp, Zea Mays
attaagaattactatttgctcataagtttgtactttggaagctatacactaatttagaattttgtagcagcacttgtagagaattcgggaaacaccacacacccattgtgtgtgtgtgtgtggtgggggggtgaccttttgttatatgggccatataacttggcgtacaaataacgctgtatggcttggtgtacaagtaatgtgtacaaagatatgcacgcctatacatatctctaatacccgctcgcatcgtgataggaggattgcggatgtaaaaaactagacctaagctcagcgaacaattgtgtagacaagccttgttcatgatgtccgcgtactggtgcgaaaacgggttacgaagcacctagacctgtcccaaagtcaccttctcgcggacggagtgaatctcgatgtgcttggtgcgccaataatgatccggattggttgtctgtagacaatactgactttgttataataggcaatggtcacactaacaagaggggcgtgaaactcctggagaagctgtcggagccaacaacactcgaccacaacatgggcgacaacatagtatcctacctcggtgctagagcgggagacaatggtttgtcgcttggatgactaggagaccaacgaggtagacatagtatttggagctaggccgcctggagtttgggcatcctgcctaataagcatccgagtatgatgtcaactagttgatggagccgatgccggagactaaaggagatagtgctcttcatgtagtaaagaatctgtttgattagcgctaggtgacgtcatgaggatcatgcatggaaagatagacctattgaaccacgtacgccaagtcatggtggatcagtgttaggtactgaagggtactaacaagactcttgtagttgtcggaggcatcaacgacggagcaccatccaaagttgagagtttgtcttgagtgtccatagatgtgctggagtcacactggccatgcctgcatgctaaatcatgcgcatactatctctgagacaggattaggccatcagaggagcgcaagatggagatgctgaggaagtggtgcaaggtgccaaggtcagtcacgatgaactccaagtgcagaaggcccatgatgtgctgaagaagagtcgtcgaggggacggtgaggacgatgtcatcaatgtaaagtaggaggtaggttgttgttggaactttccaatccgaggacaacaaaatccaataggaagaaaagggaatagttt

SEQ ID NO: 128636 - DNA, 474 bp, Zea Mays
caatgatctagcgaggttcgggctctcggagcgtaatactctacatccttagggtggctagtttgtattgcttggatattgaaatggctaagtgtgtgtgtgggtgagaagggtccgcctctaaagcggttgcctgcttcctttatacaataagggagagagagttacaagatgcatggggtcatcctagcagtctgactccatttattatattgtaatgtataagtctttccatgaccctgtagcaacgtctcctagacatcacggatagtcaaggtcacttgtctgtcatggatggtcatggtcatcgccagtcgaggtgcacgtcgaccgtgcgtgcacccacagtggcgcaccgatgccatatccaagatgtcgaggtttgacaattagcatgacacatgctttgggcatggtcatgcctatcctgtcgcacagaagtaaaaattctttgaccgcaccaactccttgtct

SEQ ID NO: 128637 - DNA, 775 bp, Zea Mays
ccgtatttcatggtttatgggactgaggtcgtcctcccaccgacattgaatacgacgccccaagagtaaaggcatacacggactagaacaacaaattgagccttcaagatgccctagatcagctcaatgaagcctgtgatgtagaacaactacggtcggtgaaatatcactagacactatggtgtaccattatcgccgcatacaggggaggaccatggcagtgggggacaacgtgctttggcaggtgcagagcaacatggatcgacacaagttgtcgccaccatgggaagggtcgttcataattggataagttctccgactgggcacctacaagctgaaagacaaatgaagcagtatgatcactagcacgtggaatatcaagcaattatgttgattctacccttaacaaggtccgacgtccatgctcgcacacgatacatgatgtgactcaaccctagggaagcaaaaccagggtcaccgataatgggtgctgagggaaggaggacgagatagtaggatgaccacagcaacatcataaatagaacacatcccgttaaatcaggttatgttgccctcagtaaaaaccaccatgctgacaattctccgctttttgctcaaccaatgtaggacacacccatccccatagggctattttccctcggccatatttcaagaggaataaacgtcatctgcgattgatgcattggccctgctgccctgcaaaccatccgtgctcgaatatggtctgcttgccatgggctcccctggtaaggcc

SEQ ID NO: 128638 - DNA, 647 bp, Zea Mays
tgaaaaccaaagcaggaaaaaaaaggagcctgtcagacaacatatgggccaggctcccccgtttctgaactggtacgactagagcgatccgtggtccatgaaaattctgagcacccagttaagtggaggttgctgacaatctagaaaaaggagctttgttgtcgaagaacataaaacggttaccagatggcaggtgatggttgaagagagagctgctccagcgccaaccatcagtacatgttagctgaagaattgtactctaggtgccaaagaactgtgtgttggagacttggagtaatgcagttgcgatgtgctattgtaagactcccttgtgggcaattagccttcttattatcctcttatgtcatgcccggcagtattggataccacgactgactaaaagcccacctttctaactctgtctatatctctactcctttaaagtacgagtttcgtgcattgtctattgtgcgtcacatgcaaagtgagtaaggtgatctattttctcccctacatctcggctaataaataggttgttaccttctagatagggccgtgagaaacacctaagcctaatatgatacgaaaccacacgcaatacaacgctcttagatagtaccatctcactaggtgaaggaggaaaagcg

SEQ ID NO: 128639 - DNA, 806 bp, Zea Mays
atcaggaggttgctgaggccggggctttgctagctgaagttggactgctgaaggagaggggcctgactgcagaggctatggttgctgattttgttttcaagaacattcagccgttgaaggacagggcttacccggcttatctgtaccgaggcctagctgactcaactcgggttaccaataggagaattccctctgtggacttggtgaaccgacttgagatgattcttagaggcaaggtgtcaaatgttggtgccccagtggcatactcggcctggaacctgcctccttccaaagccttcactcattttgtttcgaatccacctgttgctgatggcagtttgggccttagagtgcgaccctctgctgaagaagttaacgccttggttgcctcgctcggggaaattcctaatgatgaacggcaagtccactttgaggtacctttggatcctagtgacgcagaaataagtgctatgcttgatttgctggctgaggactcttctgatgctgctcctgttgggacgttggtggtggcgcctcccctagaaactgatgcaaccttggatattcagatacctgtcagtgctcgcccaaaacgcccttgccgagccaatcaacttgatccttctgctgctgagcagaaaaagaaaaagagacgtctttggcgagtatctagtttggatcgggacgttggtccttcagttcctgctgctgaagaagtgcctgtgcctgaatttactgacgttgaccccaatgggtgtgctccacctgctgctgaccccaatgggtgtgttgtctgtgttgctgat

SEQ ID NO: 128640 - DNA, 350 bp, Zea Mays
gggaagaggacagacgcaatgtttacaggactctgcttagggttcgggtcacgtctctggaggaggtcccatagttcattgttttttcagaagctgatggctttattggtgactcgtggacggtgcagtgtgagatcatccaacaaactttgctggggtcagcctcaagatgaggacccggtgccagtggtcccggaggatggtcagcagctccctcttgagttttttggtttgggccaacctgtgccggctgtgggctgggatcttaatttcccgccagaagacaatgtccaagctcagccagcagacaacattcaaggagattgggaccaatggattgttaatgatcc

SEQ ID NO: 128641 - DNA, 744 bp, Zea Mays
acttcaaatgcaacggaagaccaatctggaggaggtgatagtgaagaaatccagttggatcgcagtggcagagatcttgatgacaacgaagattttatgagaaccccatcgtgtggtcatgacattgatccgcaagagggaaatttgaatagaagtaagcctacctatgtcttccatgcttaaaaaatgttttctctcatcttgattattcccatttttttatttatattttttattcttccccctggcagcacctcctgatttacgtggggcattccaaagtgttgatgatatcttgcaaatgatggattcccaagtgttgactgattcccccacaacactctgccagcattgatggcgaggttagtttattgtgtttttttattaccatcaactcctttttctgattaatattatgcttttttcctttttctacaattccagtcccctcccaatagccagcagactcgtgcaccacgatttactgttcgcaagaggaaggcttcctcaaacccccctggcaatgatcaacggcctgtggtaagctcctctgatacccaagagaaagcagaccctagttgcaatcggccccacccactatagtaatcataacctctgccaacttgcaattaatcatagattctgaacagggagcacctgagacagaagaggagcctctgagcagggacactgggatgcagcatcctactgcccaggtatgttcatgcaattcgtgtctttttt

SEQ ID NO: 128642 - DNA, 375 bp, Zea Mays
tggaggccatggccggagttgccgaccacgacacaaccatccaaaattccaagctaatcggtgctacgcgtttcggaaaggaaagtaaacttaaaggcgtggctcataccggaaatcgcagggcaaagttatcccgaccacgacgctgcggaggcgatactcgacggcgagcaaattcgaggtccccgaccactaatcccgcgcgccaaggccaccagcacctttcttgcgcaccggcgaaaccactagccacgacgcagagggggcggcggcgatgagcgcccggttccactactccgagccgcggcggctctactctacaatggcggcgtaggttttccgcgcaatttgaggtggcggctaggggtaaacgac

SEQ ID NO: 128643 - DNA, 407 bp, Zea Mays
gaacgattcccgtgggcacatgatgctcacggaaagcatcctcaaattctgcccttgtggcacttcccacagcaacactgaaggtgtcccaccagtatagggccatcctaaagagttggtgggtagccaggtgaacatgcggatcttcagggcttccaatagcttctagcttcctctttagtgtgtgcagccaatcatcaacatcgagtgggttgctggatccaacgaacgtgagaggttgagccttagaaattctcccacctgtcctgcggtcttcctccattcgggcgctgattctccaggcttttggtgaggacttcaatgagtcgggtctggttggctagaacttgggctagatctagtggcatttctggaggtgcagggaggtgggtctcgctcccttcccc

SEQ ID NO: 128644 - DNA, 776 bp, Zea Mays
cggatagatagatgttgtaagagtgattggatcaacaatgctttgtaatcatctcaactatgtacaagcaacgactaatacgctgcgacacagtcctgttagttagatcgtttagatcgtgggcgacacgagctcagacaacgtagtcagtctgttctatcattgtactcgttaacagatgcgaggactggtatgtgaaataggatgaaagtcaggaggactgtaccgatccgatgagaaggcctaggacaacactatttaaattcattcaaatattcaatttttatatgctaaacattaagtataaaaaggtatattaaattgagggggttatggcctactttgctccctatcagtccgcccctctatttaacttgtgatttgtgaatgccatgtactctttttatttaagaactgtttttttagtgaactttttggatgatttttttaacgaggcatgtgcatgagtaaaattcagagcactcccaagtcccaaccctctaatccgtaaaatgtttgatccctggtaattccacgtgccacgtgcgcgtacggtcgatccctctgcatcgtcaatgcactacgctgagatcatgcccatgaatcctggaactgcatatggaattatggatccgtcagttgtcgcggtgtcaccacttccaaattgccacctggctagatgctggttaatatctctggggcgagaatcaacactactgtcagcgacgaagagtccaaagacttcgtggcagtcttccttcaccaaacaaagccaa

SEQ ID NO: 128645 - DNA, 543 bp, Zea Mays
gccaaatcaacagtacgtgacatgaggtcccgtccaatccctttcaaaaatcgagctgtgccagcagtagtagctttactcttctttttcttgaatgtggacaccaattttggtagagggaatttagatttctttgattgtcgtgaatcccttgatggttgtggagaaggtgatggtgtcctaaatgttgatgcttgtggcggagatggtggattagaaagaggatgaggagcagcatgggaagattgtggaggtgatgatggatgtaaaggtactaaagttttaggaggcggagatgggtggggatgaaatgacgacggtgttggtggatcaaccaattcgacatccctttgaggccaaaggatgaattttttgatggcttgtccaagtgtctcgattcctttgggcccagggatgtctagcatgtcgtcctcaaatccttggacaaccatcctcatttctaccctgcaataatcatctggtatgtcgcttccgtgaaacttgtgtcctgggatcgcaatgcatgttcctactttcttcgtg

SEQ ID NO: 128646 - DNA, 287 bp, Zea Mays
gttcaatatagcgtggtcggtgagtcagaaccttcatcttcttgcccttcggctcggctgtgatgaccggagcggcaatcttcctcttttttccttgccctcgcagtgggtagcgataatcagggtatacgaaaccaatagcatcaaataccctgttcaatcttttcttctttcgacccccaaaagctacggacaatgcattatcctcggccttggagtatgccccaagtagctcgtcgctagtagcttcaatacacttcagccagtcatcgttcggctcatcaaac

SEQ ID NO: 128647 - DNA, 420 bp, Zea Mays
gctgtctgaaatgagctctgatggtacagtagtcaaaatggatcaggatgccaacatcccgtgctcgccgccggtgaccctcccccgcgtaaggattcgcgccgccgcgttaagattaatgctcactggtaaccggataacgctgcggggtagaaagatcgtcgtcgccgtcgagctggaagccaccccgggcagccgcaatactcctccccttactcaccaccgtgaataaagctgctcaccgtcgtcgtgccctcgccattgtccatcgcgtgtcccaacctcaccatcacgtcgccgtggctctctctaaactccccgtcgaccaccggagttactgccacgccggtgaacacgtgttcgatgcgccagcgttcttcctcactcccaaccgccgtgtgtcccgtccaaaattcgcag

SEQ ID NO: 128648 - DNA, 780 bp, Zea Mays
ctgatgtcttcgatcttctccctcctccatggagggaccgctgccctatttatacaccaaggggagtgtccttagtgaagtcgggtcttgtattcgaagaagagatgcctggcgtctgatgtgatggtgaactgtgcagtagattcatgcctgctgacttctcgtagagagccgaggccgagatcgaggggttgtccatacgcccgaacccccaagggagaggccgcccatgccgtagtggctgtaacaacgccagggtatgggtcaaaggctgcttacggggtgtgtcatcgtcctgcgtgtgatgacgtcgagattccctgcagcactcatcgagatcaaagcacccgtttggtggatgcagaagtctttctgaggcgttagccgagccgtccctcgacgtgtgctatagtcgggcggagtggttgtcctgtgggattcacggcgtagtcggtggccaaggtcaagctctggcgaggcgaagaactcgctcgagggctgagcttgacgtcgagcgaggggggggggggaattgcccgaaggctggacccagggtcgggcgatgcggagaggttacgctcgaatcctgtccgctcggtttgtcgtattaggcgtcccatcggagggcgtcagacggtgtgcgcgcactgtttgtgtgggcgtaatcataccgctgcgctggacgtgatcgctgtcttgtccaccactatgctccgctgccacaacgtgggttggcacacgcattaattgtgcatgtcccctgcctgtgttcgggtgccc

SEQ ID NO: 128649 - DNA, 274 bp, Zea Mays
gcacaagtgtgagcaaagtgcacacaaaaacgtgtgttgctctatgggcatagtctatgatcccagagaattgtcatgagtaactatttctggtccaggagtagctcaggtattacgaatggtatttcttttgttcccattgataacgtggtgacgggtgagtattttccaactacatagaaaaccgacgatgtttcaagtaagttttaactaatcttctattatcatttctagcatttagcatagctaatagtgtttcatttgttccattcac

SEQ ID NO: 128650 - DNA, 550 bp, Zea Mays
ggcaacttcaatggctcatagggtctggttgtgttggcatatactttgttatgatgtgttctgggatgcatttcaggcgtgaattgttgtgtacaaacgaactagcaaagtgcttaccattttcatttatacttaaatatcgaatataaaatatagagacatgtgtgttttattggttatgtatgtgtgaatgtggggtttaaagctaacaatcatggtcgcgcatagttttagcctttttactatttacatcaacgataattggtgttttaatatagaagagaagagacttcccgatgaaacattcctgttcgtttagggctgaccctattgataagtaggtaatcatgtaatagatggttctgcgtctaccttatctgatggtgaatttaattacttctcatgtttccaattttgtagtcttccctatcttctatgacttgaaacgaattcttctggagcaaattgtatgtggagccatttcgtttttttcccgagcaaagcatctaccacttttgtgtctgtatgttagttcatctggtaatcaaac

SEQ ID NO: 128651 - DNA, 610 bp, Zea Mays
gaaggaacccgtcggtggtcgaatccgactcctcggatgaccaggaaatccacggagataccccacctcgctctcgatccaagcgagggcgcggaagcggcaatgtcatgccgggtgctgaggcctccgggtctcaaagtactcgcggtcgaacatcccggaatccttccggacggtctcgacctgcgtctaatccgcaggcgtgggagcctgcaagtgatgatgatggtgggaaggacgatgaagttgatcttcccccggcccatgctcctgtgattcgcggcttggtcctccaccgtgcagaggctcggcgtgctggcaatgagccagtcactgacttcactgccagtggagggtctgctcttctccaggatcttcgtttccaaaatcctgtattgcgtattcgcgatgccaggatcgatggaaatcgcttttggactcttcaccacgtggatttctataattccgtcattctacccaagaagcatcaacccatcctacatcaacgatatattaactgggaaggttgtgaagcgattggggacccagaaatgtcacaggcactgcgggcctgtgaaaggaaacaaatgaagaatatcatgacattcca

SEQ ID NO: 128652 - DNA, 482 bp, Zea Mays
aaaataataggatttataatcacatttggattatatctgagattggacatctgaaaatgcaaatcataaatctgaaattagcttgaagtttttgaatttaaatagaaagagaagaactgaaatagaaaagaaaacaaaaactgcatgcgcttgggccggattcgccccatctcggcccaagttgagttgccaccgcactggcccagttttcccacgcggcccatactgcaggcttgggcatcccgcgccgacaggcgggtcccatgtgccagcctcactctccccttggcatgcgtcttcagctcgttgacatgtgggaccatcttgtcatctctatcccctccaccgtaacaaaccaaaaccgaggtagccgccaaaaccaaatccgtggattgtaactaacgccgcggattaaccggggttttagctcagagattaagctatcccagagcataaatacggtgtgccgcaccctcgcagct

SEQ ID NO: 128653 - DNA, 380 bp, Zea Mays
cttacatagccactagcctatccggatccttcaaagcatcttctaccctacaaggctcaagagaagacacaaaagagtaattctcacaaaaattgcaattctagaacgactccttaatgtatgtcttgaaggatcatgtccatcggatttgaattctttggtggactcttgggtgaggcactttgtttctcagtggttgaacttcatcttcatcccccttgtctagattttcttcatctcccccttgatccttgctatcttcttgattgtcttgatctccatcttgagatgtgggttgagcttgcacggaggatggttgatcttgcccttgattaggctcttatggacacacattcccgatggacatgtttttcaaagct

SEQ ID NO: 128654 - DNA, 395 bp, Zea Mays
ggggtaagaaagtttgcggtgagaaagaactccttgttgggtggtaatgcctttgaagatcgagtttgacttctacccttccttgacgaggttgatcttttcttctccggtcttggtcttattgcttcgggtttagtgtatctcatcggagttgggggaatatggttaagatagatatggtaagatagactacatgatataggtcaaaagtttgtttgttgttagatgggaatagattatattcgttagaaggttatgatataagccaagtggttgggataagtatgcttgctagaacaagacaagtctctacgaataagacataatcttttgagattagttagatctagtaggctagggtagagtctttttcgagataagatggatctattaag

SEQ ID NO: 128655 - DNA, 1031 bp, Zea Mays
gtcatgcacgcctaaaggtagagagttatttcttcaatggtttccaaatattaattccgtctgacagaccgtggatatttctaggagatttcaacctaatttggtcgcaggagaatagaaataaaccaggagcgaacatgcatcacatgttgaattttaattcagcaattagtaagctgggtatgcaagaaataccgctaaaaggccaagcttttacttggtctaacatgcaataacatccattgttagaaaaattgattggtgctttatgtcctaagcttggtcaaccacctttccagggacatgtgccttcactcttgctcaggatatctcagatcatgtatcttgaattgtgacagttaaaacaaatatcccaaggcctcaaatgtttggtttgaaaactattggctgcatctaccagatttcaaaacagtttttcagaactcttggcaacaaccggtttatcaaccagaatatgcaagaagactaatggcaaaattcaaaagagcaagaaaggcaattaaactatggcataaacacattccgagatttcaagatctcattgacaacacaaagctcataatacaatttatgaatttcattgaagaatgtagagacctcacagtagaagaatggaacttcaaattagtgctcactgcaaattgcaatcacttttgagtcagcagaaatcatattggaagcagcggggacagatcaaatgggctacacttggagatgcagggactaaattgtttcatgatatagcaacaactaggcatatgcaaaattcaattgcttctattcatgacaatgctggtgctaaaatctccaatcatgatgaaaaggcaaagattcttttcgattccttcagagccagactaggaacttctcaagatacatcaatgagatttaacattaactcttttattcaaacaacgcaagatttgtctgttttggaagcccctttcaccatggaggaaattgaggcaatcattgggtcactcccttcgaataagtcactgggtcctgat

SEQ ID NO: 128656 - DNA, 952 bp, Zea Mays
cttgggttagttcttttcccgaagcgtgacaaatgatgtagtcagcatttttgttcgaagcttcgggagcaggagctttgatcttttcaggtgcaatctgctctgtcattttttcctcaggcgcggcaggctccatctcgatgggcactaaagcccagcttcggcttcagtttgagcttgcgcagcttcggcttctacttgcccagttttggcttcggtttgcgtttttgtggcttcagcaactttctttgtagcagcagggctcaaggccttcgtagtttccagcacaacatctagcacgttggccatcctcctcctcttgggagttgcggcagaagtcttttgcaccttcggcagttttgcctctgtcggagggctcaggatttttgacattcttattacttcttcaacctttggctcttcagccttatcaaccctatcttcgactggctcaaatgcatgcgtcttcggcattatggtcggctcttcagcgctctgtgtaatcgaagcagtttgtgttgcttcggctgctgaagtggaccctgcgccaaattcaggcactgcggccgattcaatataacgcggtcggtgggtcagaaacttcacctttctactctttggctcaggctcagctggggtgactgaagcagcaatcttcctctttttctcttgccctcgcagcgggtagcgataatcagggtatacgaagccaatagcatcaactaccctgttcagccttttcttcccccggcctccgaaggctacggacaaagcattatcttcggctttggagtatgctccaagtagttcatcactagtagcttcaatgcacttcagccagtcgtcgtttggctcgtcaaacttctccctaaatctgaaggtatacttcagtcggaccagaccaccatcactagagtcggtggtggtctccttcggcatttcccagctttcc

SEQ ID NO: 128657 - DNA, 813 bp, Zea Mays
acttgaactagagaagagaatagaaatagaaaagaaaaaggacagaagcctcggctgggccgacctccctccattcggcccactatcctttaacacccgcgcggcccatcttccaattttctccgcgcgtcagccgctcattcttcacaacgcgtgtgcgtgtctcctacccgagccactgaccggtgggtccacatcgtcagccgtcttcctcctcaaatcggactcactgctagcaacaagatccgcgaatcgccacgtgcgcgtgcgattcggttggggatttccgattccgccttggctctgatatcgcgctgtcgttttaaccgattcccccgatcgtagcgcatctgggtgtataaatcgtgggtacctgaccgcctcatccgctcctcaacccagccaccaggatctgaggttttcacgccgcccaggagagctccgtcgtagagagagtcggccaccgtcaggttgcaagcttgtgaagtcacggttcgtgcttactggtggattttgggggcatggatgcttgggtccatggcggattgctcaccgtggtccgcttcgtccgccgccgggtgtacccacaccatagtcaacaggcgccagccatttttcaccggtaagcaaacctcctccgagttcgcctcaatccgctccacgtgtagaacccatccatgctcgattccgccccctcgttcgtccagttctcctgctcaccgtcgcggtgccgcgtggcgctgttgactgttcaccgccgcgatgccgctgcgtcgcgtgggcaacatcaacgacgctctgatcctcggtgag

SEQ ID NO: 128658 - DNA, 615 bp, Zea Mays
gagacgggacgttcaagaggtcaaaagacgtaaaagcgacgtttgacagataaatagtgacataggaggtttggaattcgaaatgaggcacgaaatgatatggaattgagccgagacttcacgaataggtttatataggtgaatatgagtgaagtgtgtgcttggtttgaatttagtcgaagaaaaagagatttgggcactcggctcggaaacgatcgctcaaaacgggaattttggtgaaatttaagtctgggatctcggattggcgtgaaatttggcaaggatgttgctggaagtgttgtgaaggtgcctgtaaaatttgggttcaattggagcaagtttggctggtttgggcattttaccgaacacgtggtgtgcggagttctagggtttcggtgaaaagcgtatttggggcgggaaaaccctcccgaaggagctaggaacctgcaaggatgtttaaggcacacataggaacacaaatggccacatggtttcattggatttcacagagatttggaattggtacacaggggtggtgaacagcctcactgtcagagaaatagagagatagagatgacagagggagagaagagcagctcaccaagcgaggggaag

SEQ ID NO: 128659 - DNA, 347 bp, Zea Mays
ctggacacatatgaccatgtgtaaacctacacatgcaggaaggtaacgcaaggggtatgatggaagatcaagttgttctagacacaacctagaacctcgtcgtaagcccactttgcgggacccgccaggtatcgcaacattgacaccgaacaagctacaatggcccgtatggagagcggacatgacaaaacaccagattgggagtacgacaacgcacgcccccatagacaatgctacggggactagagcggcccaggggcaacaagctaaaggacccccgagtagaatacgagtcccaactgtaaattcctcccttgagcaataaaagggcggaacattcttccttc

SEQ ID NO: 128660 - DNA, 830 bp, Zea Mays
tgagcaccaaaaatcaactagctgatatcttcacaaaacccctcgatgagactaggttttgctttcttaggagtgagctaaatatcttggattctcgaaacgtgtcttaataactaaaatattgatcaagtttgatggatgtaaattgattgtttgtgcaatatgtcatgagaaataccatttttatcattaaaatcactcatgtcatatttgctaagtgctattatagcccttccgggcaatatctggaaactggttgagtaaaccggctgagtaggacactcaaccggttttcccctggtggaaatcggttgaatcggtataaaaaccggttgaaccggttttgaccacctctgcgtccgtgccgtcagtctgcgccgcagtctgcgctgtcagtttcgcagtctgcgctgtcagactgccagaaattctgcgcagtcaatacctttttctgcgcgcttttactgtgcagtttgaccagaaaccggttgaaccggttttctgtcttttgaccggccgacgcctcccctatttctctccccctcctctcttctcttcttctcagtttcactttccagtcgtcgtcgcccactctttttcctctctctccttcacactttctccactccaaaaacccacttgtgccctctcatctttggaagatttgttgaagatccgttcatcccggcgttctccatcatctcccctcgatcttgttgggatttcttgattcaaactccggatcaaggtattgccctatttcatttctttttactcgatcccactcgttcttgattatctaatgtatcattcgttgggtacattttagt

SEQ ID NO: 128661 - DNA, 613 bp, Zea Mays
tatgtcgacatcctcaggcactgattctgcagtgacgtgattgacccttcctctgctctggttctgcggagtcttgttctgagcagatccacgagcgggggtgttctggtcatttctctggttattgtttttctggggtgtctgatggttgcgccttgggcagttgttggcatagtggcctagctcaccgcacttgaagcagccattgggttggacaggtgcgttgtttctagcctgcgtgttactggcgccaccttgacggttctgcgaatttccaccagacctttggttggtttgggagttgctcctttgttggttctgactctgattatttctctggctttgctgcccagagcgttgcacttgataattatttccgccttgatttccagagcggaactgcgaaccttgagcgttgtttggccgggtgttcctgctggactgaccttggaacttccttttatggtcagataattccttccttttgctctcaaggccaattgccttgttcaacagtgtctggaagttgggaaatgtatgactctgaagttgatagttcagaggtccaatcagtcgttccaagaaacgctcttggcgcttctcatctgtgtcc

SEQ ID NO: 128662 - DNA, 1235 bp, Zea Mays
ggccaggttgctaggtcttcccatccttcgtatggtgaagtttgttgctgtccgagctcaatctgtggtcgccgccgcaaatcctggtggccgttggagcaacccccattgcgcccggtctttgggggaaataaatactcgcctgctatcctcccctctcatctcaccactagcagtgagagcgtcgtagccagggagagaagcaatgttgtcaccgtgttaccgcccttgttgatctgggtcgatcccgtcgctccatcctcggcatagagtctagaagatcggcttaggaactaggaacattctgatgtgggtttaccacattgggatcggtcggtggtagaggaatttgtcagcggagttgagtctctaccactgggacatcctgtgtcgtttgcaggggctctgcgtcgtgcaatgcaaggtaagaatgacctcctcgtgatgctcttagtcaccgcattcttttgcgcttagctaggggtagtgggggagtatggaacgtcgtatcagcgttctccagtgtggtcaccctttgcgagcgggcggcgccgccacctagtgtccgtcgcgggagaagaacgtgtaccgttggtttggaaaggaacggtcaggaatagacctggcggataacggttgggcccttgatccataccattgatatgtgattggagtgttgtgggttgggcacaactattttaaatccgaaccgtaggcacccgatcggatggataggcttggatcaaagggtggactattgtggaccattgattcaggatccaagggtgggggtgatatactgattcattataaaattcgactgatctatgtcgtgggcttttaatccaacgaacaatacatatccataccctttcgttgaagcaaatttgtaaaagaaaatccaaaagaatctttaaaacaattcgccatcctctgtcctattgaaagtattcacatcgcggtccctgagtttcgcagtttagctcctagaaactagtttagatataaaaataatacttatatgtccagaaacttggtaaatttcacaactccctcgttttaacttcgaattagtccgttccaattatattagcttcgtaataatatttcctttgcttttgtaaaattattttaccacgcaacatgttctaaaaaataaataaccaattcatttaacctatgcttattaattaacttgggtaatctaagttgatatagtattttaatttggatca

SEQ ID NO: 128663 - DNA, 552 bp, Zea Mays
tgtgtcagacattgggctgcctgggtcctaggtgctcgtcgaacgggatttcttgcggtgtttcaggggcgcgccggagagtttccctgagaaaggattcaagtttccttgaaaaaggattcaccccgcgtgcagtagttaccttttcgcattctctcccaattggctgcgcccctttgccttcgtgctcctctgttccacgcctgcgccgcctcacacgccatggcttcgcttggtcatcctgatcgctttcaggctgaggaagcgctcaacctggtacgtggcctgcttggtggagcgcgctagggctcgccggaagaatccgtgtcgacgctgccccccttggcgatctcgccgtcggggagtttgtgttgttcacctcctacatctcttgcgggttggcgctgccgattttgcccttcttcctactactgctggaggagtttgggcctcagcttcaacacctcacgccccactccatcctgcaggcagcaatcttcgtccacctctgcgagatgttcgtaggtgtggccccctgcacttccctcttcc

SEQ ID NO: 128664 - DNA, 581 bp, Zea Mays
ggtttggtgaaaatgtcagtcagttgtggatgggtatcgacgtgacgcaaatcgatgtcgcctttctcagaatggtcacaaagaaagtgaaaatggacatcaatgtgcttggtctttgaatgcagcacatgattcttaacaacccttatggcactcgtgctatcacagagcagaggcacatgatgaaaatctaagccaaaatcacgtaaagtagccatcatccataacaactgcaagcaacgaactcaacctctatggtagactgaacaactctagactgtttacacgaagaccaggaaaccatcgaagtccccaaaaactgacaagtccgagatctcgcaaaatcatcatcagaataaccacacaaagacagaacggaagaagaagagtaccataaaacaaactcaggagtgaagcgcgggtacctcataatctgtttcacaaccaaactcagagtgaagtgtgtggggcgacttggaaacgggcgcacagacacactgcaaagtgtatatctagcctcgttgaggtcaagtataggagagagagccaatcatgctcctgtagtcctttaggtccacggg

SEQ ID NO: 128665 - DNA, 434 bp, Zea Mays
ggtcagcagcaagtggtcgcacctcagtctcgtcacgctccctgaagcgaggtggtggaataggcggagcagaaatgggagcgggagggggaacagtggaagctggagtggtggaggtggtgagtatagcggaagtggtggatggctctggagcgacaggagctggtgaagtggaaggtggagtagacacaattgcggaaggtgtggagggagcagtggagtgaggctaagatgcgaggcggcgaactctgtaggctatctgatcagaagaaatctgcaactgtcctccccgctctgcctgctctactgccgctatagctgcaagtgctgcatgagccgctctgtccatacggtgtttcttcctgccctcctgctgcttaagataaaccgtctttcccttgacctgtctgaaggggcgaggagggtcctcgtcg

SEQ ID NO: 128666 - DNA, 630 bp, Zea Mays
ccgagggaggacttgggttgcgcttccgcttgtcaccagcgtgacgagccgagcctcgacctctcttgcctttgcccatggttggacggagaagaagaggaagttagagggaagaaacagatgatcgaaagatgagtgaagagaacaacggtacaagcaggctatttatagaggccgggggtgaccgtccacttcctaccacgctcgccgaacagtcacaagtattcaataagcaattcaagccgcctgaaaatgagtcaggcaacaggtgccgcttcgcgtagcacgacaccatttggaccaaggtcaactgctctggcggtatgattacaccccacggtcacatcaagttactactctaggacagtgtgctaaatgctctgcgtaccaagacgccccttggtcacacccattgggggtaactaggaattttcaaaagattttctgaagaagtcatatccatacaatatactcaatgaatgtgctgagacaaaaggaagagatcgatagagatcggaggaaatccaaatatagctactgaactgaaagtctaatcagcagaggcattgaagcacaaagcggggtgatgaccagccaagagccatctaccaaacgtcaaatttgtcaccg

SEQ ID NO: 128667 - DNA, 481 bp, Zea Mays
tccaagtcgagtcttccaccgaatagcacccaaccagccagccagccgcgaccgctgcgccctttcatttgctctcgctcaaatggtttttgctttttccgcgctgtcttggccgtcttttttttcgccaacgatgatgacgatgttagctcgattagttgggctgtgatatcctggtcagcggggctatttcgatggcatctaggagtcatgtgcgcgtgaaggcgcaacagtgacatccttgcgtgattgctgtgtgattaattagatcagttctcttggatacttttatgatgattagcatattatgtggaataaaacaaaatttgaatgaaaccttaaaatttcatttcatgattttatagttgtttaatttcatgacatataataaattaatagtcgtaccaagagagttttatctagataaattttgtttccacttttttctaaatatccgtacgtgagagtgagggagccattc

SEQ ID NO: 128668 - DNA, 323 bp, Zea Mays
caggaatttaaacatagccgaagcttgacccttgcactcaaacgaagcaccacctcggattctgcttcgtcacaagaagagctttggaaaaaaggtcattaatttcaaaaaacttctagagattcataatcaaatggctagagtgcgttccactgccagggttgatcgtgagggagatgagaccaaagccactgaaactgtcccaatttccgaagcaatgaggcggtctgggctggcaacatcagaggatacatctgccgccgaagcaaaacaagctgacgttgaagaagatgaatttgaagatgagtacggtgcaatgccat

SEQ ID NO: 128669 - DNA, 334 bp, Zea Mays
taattgacggtggctggttagctgatgaccctacggagctggtcacgggcttaatttataggcggcttcgtcggtggtgcttaatttggccggaccgtgcgggtgatcgaagataaggaagaacgcgggttcggtgaatccgtgtccaccgtcgtggcaacctccccgtcgacgatgggacggctgcagggagtcacggcgaagcgacggcgcggttaggacacatgttggccaacggcgatggcacgacgacgatgagcactttacccgcgggcagtgagccaggggagatgaactacggctagccggagtggcttccaggtcactggcggcg

SEQ ID NO: 128670 - DNA, 580 bp, Zea Mays
ccacttctccactatgcccgctcggcccatctaaagcgccccctctggttcatgccttccgcctagtgggacccataggccagtgtgccaacctgtcatggacgctgatccgtgtgtgtgtgacatgtgggaccctaatgtcagctctttcctctagctcgggttgttgcaacaaactcgccgtgaccccggttccaacctcctgccggccgagattcacctttcccccttctcgggccgtttcaggatcctcttgggtatatgtaccaagctgaagcccccttatccatcctctactcgccgtgattcaacccaactaggagtgttgtaggcggagcggggaaaagcagaaatggccgtcatggttgattccctcttcagcaactagtccggcctcggtaacctgtttgggaggaagggatgagctggtgggttgtggtcatggccctgctttgcggagaggagcctcgggttgagggcaatttctcaacggtgcttagatgccaccgtggagctcctacgcaccgtgaacagaagctatcacaacgcaattcaaggtaaggtatttgccctatcgttc

SEQ ID NO: 128671 - DNA, 791 bp, Zea Mays
ggcaagcatcgcagacgcataagaatgcttaaacaagggagcagaggggaagagctaacctgagttgggctaaccacggcggggttgagttcacggtgttttagaaccggattggggagaatccgaaattcgcgcttgctagtgagggatttgggatgcaggtgggtgcagtaggtgcttgggtacatggcggagctgggggcacagtcaatttatagagcgcgcgagcggtggccgtggatttgggcgacgacgcgcggtggtcggaggtagaagaaggtactggcgcaagcgctaggtggcttctaccgtggcggtcattccggcgatcaacggagaggctagagggagtcatggcgatgcggtggcgcggttagaacacgcggcataaggccggaagggggcagtgcaccggcgaggttatctggttccaccgcggtgaactttgtacggtggccgggatactttaatcgccgggcttatcaacggcggtgtgctccgagcgtttatcacgacatctagagcacgaattgagacggcggcgcgaatcttagtgcagggagggtcaccagcggcgagcaagctacgctggcattctgatccactcgggttactgtaccatggaatgctccagcagtgctcctgacaggggaatttacagagccaataacctccaattttgtgcagtaacatgatcgacaccctttaacaaagttatagtcctaagatccagctacaatattgttgtagcaatcctaggcaaatacttgctcgatcatgcattaattcat

SEQ ID NO: 128672 - DNA, 721 bp, Zea Mays
tttaactgcgaagatatcaaaaagtgactgaagttcacttcgaattcgttttcaccctggttttggcgtatcgtcttcacctgtgtattgttcaatgaatttggtaccatcagtgtatcgctagatgtggatggccgatggggccatatacctgcagtgcagtgctcctagctgacagacagcttgtattcgcgaggattttgtcgcgagctggcctggagcccggcgtggttccaccgctcctgtctttacgcctgttgactatgcgtagccaggtctgcggatgtttctggcgtaaaaatgtttgcgcgtgatcttgatgcccgttgcctggaatccaaagcgcgcaacgctggaattagtcaactggacaggtgcaggccgcgttattttttttttgttgttgccgtcggcttctttcctgccgcaaaatttctacggcactaggtgttcgtgtcaggctgtcagtacatcatcggatgcctgaagccgttggccatatgggtagttctgctaggtctagcctactccttactttgttcgttctggtttgttcttgctctcttttttaaccggccgtgccttccctgtttttaagtactgcaagttgtagtgtaggactgctgctgctaaagtgcatgtgacgtgtgtgttctgatggtcgggtaggtatatgattagccttctggggctgcgctgtgtctgtgtgtatcgattactc

SEQ ID NO: 128673 - DNA, 388 bp, Zea Mays
cttaaaagtactccaataattatcaatcgcggaataacgacgacgtggcacatttctaccggtcaagggctggctacacgagggcatagatatcatggtcgcataagatcccgggatcatgcatgcaagggggtgacgtcaggcacaagggatcctgcatgcaacatagggcccaacaattttaagccgtgttttggtcaagtgcatgcaggtggagtcgcatgcatgcaggagtgcgtgtgtagttggggcccacgcacgatatcctttttcaaaagctgaaaccgcccgggacgaaggaatcgaccatggtcgtttggctgcgcggaggaaaggctcggccgtcatggggcgatgctcgccggcgagggcaggcatggccgctgtg

SEQ ID NO: 128674 - DNA, 815 bp, Zea Mays
tgtgtgtgcacggtttgtgctttgactgataattctgcttctgttaatgtgaaatggtgcgtccaatgagtcaccggatgtgcttgtttcagttgtttcttgtagtctgtttcacacaaatgcacatttgtctggtgcatttggtgcataatgtttatttgtaaaaatctggttgcaatcttgggacacatgcaaatcaagaggtagtgtttatttgtgttgcaatctcaatcttcacgcttaccaccagtcaacaaattactactattttttctcacttggtactgctcttttggtactgcgatgaagccagctttatgaaggtttttttataattttctagacttttgtatttataccttcgatttgtgatttataaaagtactatttagaaaatgattgtagtgttatagtgatggttacacgatatggtttacctaaccctggctgatcatttgtggggtaagcaattgatatagatgtgaaaatcacagtcactaaccacgcatactcataagattgcatcataccacgcgcacttagcacagatcatcatatatgttggatgaatacatttctctggttacttgcctaggatttaagtttcgttgttgtttcattttttaattcaaaactcgggtgggaagttgcaccaggcataccttctcatgatgtatgtttgcttgtatatattttgctggctgaacattatatatatgtacaaactggttagcttctcatgatgaaatgcaaaaatgtctctatctcattctttggttatcgtgttattatatgattctgttgcaacgcacgag

SEQ ID NO: 128675 - DNA, 1087 bp, Zea Mays
catgcatttttctgcgtttatttctcttaccttgcttggattctactgttccattgagacccaatcccacggcatcggcatctgctctagctagattctactgttccattgggcaacttgatgagagtgctgagacctctctttctctctctacgtcttgtcaaatgtctaggctcctctgtcgtcgtgcaagcggctgcagcaggaggcaaagccactgatgggagagagaggcacacaacacatgtagtactagaggtgtggtgtatcgattggcccgtcaggagttatccccagtcgaccatggccatggacaggcggcatcatcagtgtagtagtactgcatgcatgcctttcactcctttcaggcatgccctttcacccttttaggcatgcaggcgagaggctgcaaggttcatatgtatccggaccatgtatgagcatcgtgtcatatcctatgcaaaacaatagaaaatgcatgctagccccgttcttgttttatgtgcgtgcgtgcgtgttggcgtggagtggagctagctgctagctgatgcagacaaatccagtgcaggctgacgatgcacgtcatgtgtcgtttcttccaaaaagcatgaatgcgtcggagggagctgtaaataaatttactcattccagttgtccagaccgtattcggtcaagaaaatccaattttgtgtcgggactcgggaggtgtatattatgcatgcatgtgtagtccaaccttgttcatttgtctagttcaaggctacattacaaatctctaaaattaatagttagtagctaaaattagttgggaggtttaaaaacatgtcagctagtagatcagctaattattagttatacctcttaaatagctgcttcaacccaactaaaacatgacaataacttattagctgactaacgattaggtttagaacatgacctaagtatatctcagaatatgatgattagtgaatatacctttgacaattgttatatgttttgtgcatatttaatatattttttctcctaattaataggaggggtacaaatatatagagtgataagatttgattattagagatgataggct

SEQ ID NO: 128676 - DNA, 700 bp, Zea Mays
gtgactttgatcccaaagttcaacccgaaagccctctagtgactcagagcagcagatcagagtacaacacaaaccagtgtcgtttgtatgcaccaaaagccctaataacaagagacctaacttcctagaaaatattagagtcaaaatcacaaggaagtccgagcggcagtggtagcctaaggtccgacagtgccggagtctgacagtgtcgcgcacacgggcagcgccgggcaagcaaaaatgcccagaacgatctcaaatttgacagacagtttgcacggggtaaaagaagttctctggtgaagtatgaacccgaacaaacaaggaatcaaattgcagatcagaaatccttagagtaatggggttttgttgggtttttctcaaaacgaactcaaagagaagtcaactcggatcacgaccaagaactgcactgtgagggcgtatgatccaaagagtttatctccacacaatcaatccccaatagcaccacaagagaagggaaagggggaaatcaagaacacaagacttcagaaattctagcaagggtgcaaaactgaaattgagaagtgatcaaaacctgtgggccgaatcggcgacccttcctcagattaaacttgaagagcacaaacacagtcgaagtataaaatcgctgtggatccttggctaagaactagagccgtctagagataggaaaaatgag

SEQ ID NO: 128677 - DNA, 295 bp, Zea Mays
cccaaaccagccaaaaatgctccaatcgatcccaaattttttaggcaccttcacaatacctccagtaacacattcgccaaatttcacgccaatccgatatcccaggcttcaattttacacaaatccccgtttctagcgattgtttccgagccgagtgctcaaattccattttcttcgcctaaaatcaaaccaagcacagacttcactcatatttacccatataaacctattcgtgaagtatcggctcaattccaaatcatttcatgcctcattttcaatttcaaacctcctatgg

SEQ ID NO: 128678 - DNA, 528 bp, Zea Mays
gccaaaaactaggtgaacagagggtgttgttgtgtgcagaggtcggatctgtaggaggaaacatcccaagtctgaggaggaacatgtattttttggacttcataaatctagaccttaatgtgaacaagcactctatgtatatctgctacgcgatgtgcatgggggaaaacacatttatttgttcaacgcatacagatctagaatagaacacatccatacatttgaagagcaaatagtgtgtagtagaaaacatgcaatgataaccttgcacgcgaacgcgtggcaggatgtcgcttggctggcgctgcggtgttgctatggatttccctcgctttgcagaacctttgccgcctttccttgacactggtgaagattaacgacgacaatgtttcttcactgcttcgcccgtcctagaggccgaatggacagggggtcgggctgtcgcgtcctccagatcggccgttgtcgccgccggggctagggttcgtgacggggggaggggcgaaagacggggatgaagggaccaat

SEQ ID NO: 128679 - DNA, 375 bp, Zea Mays
tagagcttgaagactttatcatctctaacacatctagtacattgaccatcctttttctctttggagtcgtcgtgaggtctttttgcgccttcagcactgtcattcctgccggagggcttgtaacttctactatctttgttctcgcgatctctatttctttaatattatcagccttcggcaatatagccagctcttcattcttctgagtaagagaaggttctttggcttcagtagcagtagaggtctcaccaccaaattcgggcactgaggccgattcgatgaagcgtggtcggtgagtaaagaccttcacccttttcctttttggtgcggcctcacttagagcaactgaagcatcaccttttccagaagttgtgc

SEQ ID NO: 128680 - DNA, 906 bp, Zea Mays
gacgaattgcggtgttctaggagagcccaggtagctatgtcaccctggaaatttggtgattcagatgccgactgactgaccggcttgactgccaggcaacgacatgctcaagattttggagaggattttgatccgtctgatcggagcgtgtgttttttttatgctgcagacctggcagagtttttaggcgtagattagttctgatgatgtttattttgttaatttgagtcaggtttttaggtgtaggtttctgattgatacacgaggtaactgcttcgagtatgacaatgtatctaaaccattcgatgcattcatatgtttacaactatgctgaatacctatagcattgctcgacacacaatttgcaaagccggctgcaatccatagagacaaagacaatgttagtagaagttggtacgaattaaagccaagcaaacatgctgaaaatcgggatgaacatttccagcaatatctgcgatgaatcagcgagataatcagatgagatcgcgcagctatgtcactatgggaactaggaacaggctggggttcagatgttgacgaatgaagcaccgcaacgcaaaggcacaggcccacagtgcagcgcgttcgcttatttctctgtctggccatttgggctcgcaatttggcaatcacacacgtcgctcgcggcctggttcttcctgcccgcctcctcccaacgggccgtgagcgcagcagactcatctcacttatcacccaactccgtagcaggctagcagcggcgctagcgctattcacccgcaccaccaccgccgccgctgttccacgccgtcctccctctagacccagtggcggaggcaccgcccggcctgcccgagcaggcctcaccctcacggtcacgaacgccagaccctagtcggtagccgc

SEQ ID NO: 128681 - DNA, 336 bp, Zea Mays
gtttggcctggtatttgtattctgtacaactttccaccttcaatgtgcatgaagcaatcaaatttcatcctttctttgttgattcctggtcgaaatggacctggtagtgacatggatgtctattttcaaccccttgttgatgatctgctagatatgttcgtcaatggagctagaacttatgatgcttcaaagggtgaattcttcaagttgcgagctacactattatggactattactgatttcctaggtcaaggatacacatctggatctgtcacatctggtgaagcagcatgtcctaattgcaactaccacacttgttcacttagacttagtaat

SEQ ID NO: 128682 - DNA, 1130 bp, Zea Mays
gttgactttcgtttactgatttggaggatcgaatgttcctctctttcctttgacgcttagtagaagcattatcctgcttagcagccctcaccttctttggttgagaagatggttgaatggtttttcgtggtacctccactcgactgggcgcattaacagcaggattcaaggattttgtgacaccattatagtcagtaaacgcatcaggcagattattagcaaaatgttgcaattctatcattttctgaacttgaagttcagattcctgggttcgaggatctgaggacaggatggatttgtcatcccaattgatttcctggcattcattaggatacttgaattctccccctaatgccgggaaatggtcctcgttaaagatgcaatcatcgaaacgagctatgtacaaatcccctgtaaggggctctaggtatttgatgatcgatggggattgatatcccacatagatgcccaatttcctatgaggtcccatagctgttcgcagaggcggtgatacaggggtgtagaccgcacatccaaatttccgcagatgggatatatttggaggatttcctcgaaccaggtgcaacggagatgtggtatgatatgcagttgggcgaagttgaataaggtcagcaacgtgtaaaactgcatgaccccaacaggatgtaggtaaattgcattcatgaagtaaaggtctggcgataagtttgatcctcttaataagagatttagctaaaccattttgagtatgtatataaggcatagaatgttcaatgtgtattccttgggccatacaataatcattgaatgctctagaagagaattcaaccgcattatctaggcagattttctggatttgatgttcaggataatgtgctttcaatcgaatgacttgtgtcatgattttagcaaaagcatggttacgtgtagacagaaggcacacgtgtgaccatcgtgtagatgcgtcaattaataccataaagtatctgaacggtccagataatggttgtatgggtccacaaatatcaccttgaattcgttcaaggaacttgagtggttcagcatgaatcttaagaggagatggtcttaagattagctttcccgttgcacatgatgtacatataaaatca

SEQ ID NO: 128683 - DNA, 318 bp, Zea Mays
catggattttactggcccacgataatttgcacagccaaccgagtcaccaggtcatgcgaagcatgccagaagttctctcctcgcacaggcaacccttcgcaattcaccaagcaaatcgcacacacatggccacttcaatgctgggggctggacatcgttggaccactgcccatagctcaagggaacctcaagttcaccttcgtcgccgttgaatatttcacaaagtggattgaggccagggcagtctccaccataacatcgaagaccgcccaaaaattcttctggcaaaacatcggctgtcgcttcggagtcccatcc

SEQ ID NO: 128684 - DNA, 346 bp, Zea Mays
ggataaaatggcgacgattgagctgatggaggaggaggaggacgacacatctagattgagtgagcttatcgctctcgcagaggcaagattacatgaagaagaggaggacgacacatcaaggttgagtgagctcatcgcactagctgaggcaggattacgtgctcaagaggaagaggatgagtttatgtctcaggccgccgaagaggtagaggcggcttattacaagaagaagtctgatgaggctgaggctgaggatgagctattctcccaagctacagatgaagcagaagccaactattacaagagaaatggtgacaagtgtgatgcaggacaatgcagcaagtgg

SEQ ID NO: 128685 - DNA, 481 bp, Zea Mays
caagatggtatagggagtggctacaaggtacctgctatcttcaaatgacttgctttgattctttggcaagtttcgcactcggatacgtacttagcaatttctcttttcatcatggtccaccagtacaaggatctgaggtcatgatacattttgttgcttccgggatgcatggaaaatttggagagatgagcatcgtccaaaatttcctttctgagttctggatccttgggaacaacaagtcggtcttcaaaccataaaatgcccctgctgtcctgacgaaaacatttatgcttatccaccttttggttgagcattctcttaatgatttgaacacccttgtcactaagttgtgccatgattatctgatcctgcaaggctggcttgattgagatataatccagagtacccggagaaaccacttccacattcattttgctcgactcattgcatagagcggcgacaagagagtctatggttagac

SEQ ID NO: 128686 - DNA, 486 bp, Zea Mays
gtcgcatgagatcgattaggatgagcagcagaaaggttatgaagattcgggacaggatctatggaaagaaacatggccttgatagggtttgtgcgactagacaccaaacaaccattttttgacacaacaagtgcacaagaagattggggttggtctagcggtcaagctgtgggggtctataagctgtgcaggtgcattaccaatagcgcaacacacaggggctagaaaacaccaacacaagcatgtgatttgatttttttagtgtttcacttgctaaccactaggttgtttggagaaggaggtctttttatgggcaaaataggcaacactttttttgcaagttatgagcaaaaaggttgaataattacaataccacctagatatcaagagaaacacataacacgacctaacaagacttaccaacctgacacgaggtaagacatttcttatagttcctaacatagcagtacatcacattattcacaa

SEQ ID NO: 128687 - DNA, 688 bp, Zea Mays
tacaatggcatcagcttcagggtctgggacgtgggtggtcaaggcgaggtagctcatgtatcagcagctgtattgttcttgcattcaagtacgtctgtgtgcagcacctactgtgcgtggcactctgattaccattttgatttgcagctccggcccttgctaaggcactacctctatggcgtccagggcgtggtattcgtcgtcgacagcagcgaccgggagtggattcttcgagccaaagatctgctgaacatcattctggacgaggtagtaggtagccggatactgccaggtttcagtagctacgcctaggggactcatggtttggttctgaatccggattgaactaatgtcaggaccagttcaggaatagggatctcgcgctgcttgtgtttgcaaacaagcaggaccggccgaacgtcatgagcgcagcagagatagcggacgagtttgggcttccgtcacggctttgcaaccgtagatggtctgtaccttccccaggtccctttccctcaactctcctttcagtaaaaatcgatcatccagattgcttccgcaggcacattcaaagtagttctgcgatctctggagaaggcctccacgaggggatggcttggctctgcaccaacattcgataggaccaagatcctcctccttcacaaaagactacagtacaaaaggggggcat

SEQ ID NO: 128688 - DNA, 317 bp, Zea Mays
gcgcttttctatgtccggtgagaaatccgccattccccaaggctcctccacacctggtgaggccacaggtgtcttccttgcaactggcgaagatcctgagcacgacaccgattgcgtgacgatgatgggtctacgggattgaatttggtagcggcttccaatgtcctcgcgacgatgagggtggctcacggttgacagcaccgatggatgaggataggggaaaggggcacgagttttataccggggcagagtccgctttgtggaatccatggacaagaatctcgccggcgccgttggccgacccgcggatgcggttg

SEQ ID NO: 128689 - DNA, 616 bp, Zea Mays
gcgacgaggaggaagaagaccctgtgctatcgctgactgtccggcccagagcgcagaccgttcagacgtacgcagggaaggatccgctcctgcgcccaagtcgcgaccgtctgacctagggccacagacgatccgcacctccgcagagggcaccgacaggcggtacacccttagtgattggggcctagatcagcgccaacagcaacattcatattcactacttcgagtccatcaacacaaactcgtataaccttcatcttcatcgtcaaccaccgcctctgtctccacacgtgccctataagccaatagacatgttgcaaaaaaactcataaaaatgctactgatccctccagaagaggcaaagttaaccacaactagcttgtcaatgctccctcatacacatattcattcagtctccaacaacattgcttatctcaacctctatttcaaacttcactatgtgaacaatgcaatatatattgttctacacagccatatacacaatatgttgcccatagccttagtctatctccagcaataaagcacatgtagatgcacatttctgcagtagggagatggctacaatgtgaaaaatgagtggtttccagcagtgtcg

SEQ ID NO: 128690 - DNA, 407 bp, Zea Mays
cccataacttttagacaaagtctgtgtttttagtgactattttgcaggatcacctattcttccgctctatgtgctctcaaggtcacctagagggggtgaataggcgaaatctgaaatcaacaactttaagcacaacttcaaaccctgggttagtgttacagcgtgaataaagacaatcagagtgtgggagaggtgttctactttcttagagttgcactaatgactgaaattacttgggtggaactcaatttgatatggaataaatcacaagcaagagaacaagaggggggagaaagaagcaaatcacaaatgaggatcaacacaaagacacatgcaatttgttttccaaggttcggttccaaggaacctactcccccatcgaggagtccacgtgggatgggtatctt

SEQ ID NO: 128691 - DNA, 726 bp, Zea Mays
gtttttttttgaattttgtgggtcaagttccacatttgattgtatatatttttgttgataaatgatagtgcaaaggatacattacaccaatcaaatttcctaattagacagcttccttcaagtattttcagtctgtattaaacctggatttgttacatagtatgccatctagttcatttagcaagtttcggatcaatcaaatgacctgaaacaagtggaacttgcatccctaccctggcaggcatgaccctttgtgttgactattgacgtacctggaacttactgagagagtgagggttacctaccaagggccttctagactctagtgaagttcagggaaatctatagagtggttgcaccggctaccttttttttcacgaacaccataggagagctgtgtgccattttgttaaggaaaaaaggttcaaactgcatacagaaaagggagaggctaaaataagcgcctcccagacacactgatacccaggagactaaaaaagacatgtcgagctaagggacataacacgaccagtaaccagcccacctccaaccaccctcaaggctcatggagggccgaggcgccagccaaacaccacatgctgctttcattagccactatgagagtctgaatgtttggtctagcaccttcaaagacaatggccttatgtttccatcaacatgaagagcacaagaaattggccatatttactcttataatactcgagg

SEQ ID NO: 128692 - DNA, 454 bp, Zea Mays
cttcctagtgccgatgaagaactggtgcagcaaggtgatccatggctgccaggtgaaccccctggtgcactggatgctgaagcgcatggcgagaggttgtcgcttcgccgagctggacgacaagggcagcccggaggacctgcaacccaattccaacatcctttgcctgacagcaggcaatcgccacgtgctgcaacagatgcacatggcggatgagtcacagacacaggccaaggccaggaagaaagatgagtcacagacacaaaccaagaagaaagatcactcacaggcctggggaaaaagcaaggtaacaaatgaaccttccatgcagggcaagggcaacgatgtccaggaccagcagcaaccggaggcacatgtcgggagcacatccacggcagcagcagataagacaccttcccagaaggacgaagacccaacccaagttacggaacag

SEQ ID NO: 128693 - DNA, 340 bp, Zea Mays
ggattcgtgattttatcgggagtatatttattaatgtgacgagtagtttagaaaatgctagtttgtgtggaggatgaattattaagacatgagtgtcggagttcatatattagtggttacgctacgatgatcgaagtgtctcgagtgcacgccaccatatggttgtatgcgagacgaggttatgcgcatgacgagtttagtaaaaatccatcggtgtcaccagtgttaagttgaggtttatttgcgcgtggaaagaaataatgtgtttaatacttagaactattagtcgatagtagaaattgttttgacttatatagaaaggtggtgacatgccaaagta

SEQ ID NO: 128694 - DNA, 646 bp, Zea Mays
ttttttagtattgttcagatcaattgaacatcagctgaagtgcaagtggaagtgcttatctctcataataccaggcaaaaacactatgataaatcatgcatgtctgtgtagcattcagatgaactactaattaattttttagtattgttcagatcaattgaacatcagctgaagtgcaaatggaagtgcttatctctcataataccaggcaaaaacactatgaatgttgatgcgtgtctgtgtagtattcagatgaactactaattaatttttagtattgttcacatcaattgaacatcagctgaagtgcaagtggaagtgcttatctctcataataccaagcaaaaacattgtgataatcatgtgtatctgtgtagtattcagatgaactactaattaatttttagtattgttcagatcaattgaacatcagctgaagtgcaagtggaagtgcttatctctcataataccaagcaaaaacactatgataatcatgcgtatctgtgtagtattcagatgaactactaattaatttttagtattgttcagatcaattgaacatcagctgaagtgcaagtggaagtgcttatctctcataataccaggcaaaaacactatgataatcatgcgtgtctgtgtagtattc

SEQ ID NO: 128695 - DNA, 554 bp, Zea Mays
caggggcggagcttccccctcccgtggacagctcgccagcgtcggtaatccctggtacggaacccttatccgtgttcacttccgttggagcaacaagtagggccgttgaatcggggtagggcatcgaagcgcataggtaggccaactccggcgggtcgcgacgccgcgtggggatcctgcgccgccgtggctgtgcggaagatagaagacagcttctgtgccgtaggatcgtaatctggcggctaggattagatcgcgatggcggtaggatattgaccgcagatttgagaagcaacagtctagattagattatgtataccccttcgtccacatagaatctcggtcgtggatcacttgatcgacggttctggatgagcattgtttcattgaatcgacgaagttgatcgaggcccttgatttctaatcctgcggcggaggatccaccgtaacccttcgtcgtggcaacttgcaaagaaatccctctgttttcacgaaaataacccgccgtcctatataactgtgagctgagtctgggttattttgcgctaatgccc

SEQ ID NO: 128696 - DNA, 477 bp, Zea Mays
cgagactacagagacatggtcaagagaagttcagtggattgtgacattctgatctaagacttcttaaaattggagttaataagatcgataatactcgtaccaataatgcacatcttgctttttagaagcctgttttgaaataaccccaggattaagcatgtttggcccaaagaaatttttgtgatggtggtcgaccgagaagttttcttgactgcatgccagtgaggacaaaaaaacacatatgaaagaatcgtgttggtctgtgagaatagatcaggaagttttctcgactgcgcgaccatggatggttggggtgtttcatcaaggatccgctttaaacacatacctttttgccttggtgatggataaggacataccggacataaaggggataacccttggtgtgtgtttttttgcagacaatgtaatgctagttgatgaaagtcgggcatgagtaaatggaaaactagagttgtg

SEQ ID NO: 128697 - DNA, 518 bp, Zea Mays
ttcagaactatgacttacgattggtgcaagaaaaccaccgaacaccatttttacaaggagagatcctcatctacctcagcccctaggccttgagattgaccgttgtccccagcgtgcccaatccaaagtgctcggtttggcatccgttcaccctaccacccacaatcaccgttgtccccagcgtgcccaatccaaagtgttcggtttggcatccgttcaccctaccacccacaatcaccagtgtccccagcgtgcccaatacaaagtgctcggtttggcattcgttcaccctaccgcccacaatcacccaaatgaccaatgttctgcacgcccctctaatcagggacatgatgataacttaaaaagatctaccaaatttttttaaaaggctaaatattaataccaaaatgaagtataacacaacatagataaaaaacagatcgatcaacaatacagctattggagacaacccaagctgtgatgcataattctagtacattccaaggaaaattgagata

SEQ ID NO: 128698 - DNA, 412 bp, Zea Mays
gtcgtcataataggggagccgagtcaagcccaacttatgtgtccacatatgctgctcaccatatcttagaataccaccttctgtactggccacgagcccatctatctgttgacgaatttcggcaccagtcatcgttgcaggtggacagtctttcactacgacaccttttgtaaagttcttgatgtctaggcagaatggatggttaggagggagaaattgtcgatgtttattgaaggacgaatatttgccaccctttttcaaccaaatgaacctaagagcttctttggaaactgggcatgggaacttaccgtgaacacaccaggcgtagaatagcccatacgcccgtaagtcatgcatggagtactggtaccaaacatgcattttgaagtttgtcttcgtaactcggtcatac

SEQ ID NO: 128699 - DNA, 609 bp, Zea Mays
ctgctcttctgcgtcttagctgtcatccttcgccggagaaggaggtcttctcagcacaacgttgaagcgcctgaaataaaaatggagagggctcccagcaacaccagcatcgctgcactggagagccgcttctttccaaccatgagaactaatggtcttctgtgataccttttcctgcttctaaattctgagcttaacgcactctaaagtctaaactgaatggttgcagatactgacccgttccaaacagagaggcctgtcatttttagtttgaaacaagttggagatgcaacagctgatttcagtgagaagagaaagatcggtgagggaggatatggcagcgtttaccttggtttcataggagcacatgtaagacatgtctgcactgtgtcatgtagaaccacgaaacggtccttatgcgtgacttcgctcgtaggaaattgcaatcaagaagatgaaagcaagcaaatcgaaggaattcttcgctgagctgaaagctctgtgcaaagtacatcacataaacgtggtacgtacgttatttgcttgtgaacacatggttccctagctaatgtgttcagttacaaacaggttgagttgataggttatgct

SEQ ID NO: 128700 - DNA, 585 bp, Zea Mays
caactcttggaggttgccatctcctagatggcttggagattgtggctccatagaaactcgcatgaagttgtgcatggatccatagaaggctttgtgaggggtactatgctcgccatgcgggatacacgaaaagcaacaacaatagagtgaggtgtgaagagcaccaagtggtctggctcgatcaagtgctagagcttgggtgtgagcactccacaagagagagtgtgacttgtagggtagcactagcaagaggatcaacgccaaacttggacttgcctcaacagagagtaagtggttagcaaaccatcaacccctttgagaaaaaaatattgtgttaacatttatcttcatgctgctttgcaacttcctatcgctagcttgttcacttatttatattgggctagtgattagtattgttattcaactagtttaattatgtagtaaaatacttgttctcttgtggtagcaagcttgtgtagcttaatatctttacttaacttgtatagttaagccgtttatctcactagttatcttgtgtagccttgctagctgagtagtattaatgtgcttatgctttgtgcactt

SEQ ID NO: 128701 - DNA, 375 bp, Zea Mays
cttgctttgagcaccttctctggtgagggcagcagtcgaccattctccattgctggaagagcaggaggtagcactggtggggcgcctttgtatggtttgaggagaccaacgtgaaagacgtcatggatgcgtgctcccgttgggagttccaggcggtaggcggtcatgtcgattctttctgtgacacagaagggtccagcatagcgaggtcccaacttgcctttgggtcggcgcacctgggactgagcttgacggttgagtagacggagccaaacccagtcatcaactgagaactccaagtctcgatgatgtgcatcatagaatcgccgagcatgttcttatgcttgcagcaacctatctcgaacttcactaagg

SEQ ID NO: 128702 - DNA, 537 bp, Zea Mays
tcgcgtgcgccagtgccttcttcctcatctccgaccgccgcgtgtctcgtccaaattcgcggccaccgcccgtcctctctataaattgagcccgtgactagctccgtaagatcgtcagctaactagccaccgctaatcggccacaatcatccacccgtgtgctcgaattcggagtttcccccaaatccgatttccgccaccgtgaaaccaagctcaccgtcgccagccatactccggttagttcctcccctctgctcccttgtttaagccttcttatgcgtctacgatgcttgccgagccattgaattgaactaagagccctctggtcgccgggaacacgaccatatagtcgccatactcacggccaccgtggccagagctccatagttgatcaatagcgcaattaagttaggggaaatgatcatggtgaccccgatttcatgtccgccgctcggagaacccagccatagccccaatcggccggtccaggacctcaccggagtctctccgcgcgcctcgccgtcgtggaccgcccac

SEQ ID NO: 128703 - DNA, 390 bp, Zea Mays
cctagctgcaaaaatacctgtgactcagagcgctacagataggacggcgggttgtttagtgctttcttcgggggtttttctgcaaagtgggggtcgaaaacggtatgatgcagtttcggccgatggatcgcggatgaatgttcctgattagattggcgcaactgcgaaccggtatgtgattacagtcgtccgatcacagatcagtggccagtattttacgaatcctgatcagagcacgagcgttcgattcaaaacagacgtacccgatcaacaccgtgaatcggtacgcccccgctctaatcgcagccgcccattggccatctaacggccgaacgatacccacttctcctcctaccccgcgacggcggcgccgccgcgcctacggccgag

SEQ ID NO: 128704 - DNA, 331 bp, Zea Mays
gcatgattgacatgttgcatagttcggagcttgcagttcgcacgggatgaccggggcccggcggccgcgcgcgaccgtgagatgggggcatcgtcgcatcgacatgatcggccacacctagctgctgctagctagctccgatccatccgtgtttcgaggcctcaagtgggatcgattgacgtcccaaccaggcaagaggtgaagcttccaaagccatatacgcgaggatctcgatcgtattataattttaccctactacgtacgcagcagtgttactttgggaggtctatttcattctctgcagcataaatgtatggtgcatggtaatgcc

SEQ ID NO: 128705 - DNA, 334 bp, Zea Mays
gttataaggtgaaagtccgttcaagattggagagtatgttgacacagtggagtgcgatgttgcacccatgtctgtgtgtcacatgctactaggaagaccctggcaatatgaccgatattctcagcattgtggaagaacaaatcaatacacgctaggtctgaaagggagaaagtttgtactcaagcctatgacccctcaacaaatcatggctgaacacttacaaaagaaaactgaaattagtacagcaagtagaggaggagaagagcaaaataaattgagtgccatccacaattcggtgagtgagtgctacaagccaaattcaagagataaaagg

SEQ ID NO: 128706 - DNA, 272 bp, Zea Mays
ggctagtctgagtatttcccccaacctaattgcaactaggaccaactacatggctctggccacggtggccgtgagcatcgcggcaagacagccgtgttcccggcgatgggtggcggtctagttcaattaaaggggtcggggagcatcgcagatgcatgagaacgcttaaacaagggagcaggagacgggaactgaccggagtatggctggcgacggtgaagcttgtttcacggtggcggaaatcggatttgggggaaactccgaattcgcgg

SEQ ID NO: 128707 - DNA, 486 bp, Zea Mays
gtgggattccggcgagctgcgcggccgagggtgggcagctccgccgtgtagaggcattggatgtgggacgataaccgctggtcgttgatctccaaacgtgcggcttagattagtctctggcatacactcttgcgggagcaatccggtccataggatggtaaacagatggacccgattaggtcagtgcgttcccccttgatccgttcgatctgagcccttggatcaagatctcacgcgtaagaatagatcgcgccttcattaaattgtggacgtcgatctttgatccaacgggtacgattgtgtactggttcagagtgggaaagatttaatatgggccgtccaaacctaatccgaaggccagaaacgaatgataccctttcgctatgaccactttgcaaaatagaccccctggtatatggaaatcaacccgctatcctgcatattgcgctctgtgtctagggatctttatggattagcccctgtgct

SEQ ID NO: 128708 - DNA, 781 bp, Zea Mays
ggaagatagagtacctggatatcccactcaaagacaacattaaaggatggcgcttagagtggttcattattgaaaatcatggcaagtccctcccccctcggtcagggagacagcctgacgtacacactcccagttggattgagtcccccaccaccttggagataacagaggccagagttctgcttgatgaatttcgtctgttgaaggagagaggtctaaccgctgaggctgtggttgcagactttgtttttaagaatattcagctcctgaaggatagggcgcacccggcttacttgtacagtggtgccactgactcaactcgggttactgacaagaggattcccactgttgatctggtgagccgaatggagatgatattgagaggaaaggtatcgaatattggtgctcctgttgcatattctgcttggaatttgccatcttctaaaccctttttcagttttgtgtccaatcctcctgctggtgacagtgctttgggtcttagagtgcgaccctctcccgaagaagttgaagccctggttgcttcactttgtggccttcccaatgatgagaagcaagttcactttgagatacctactaattcgagtgatgcagagataggtgctatgctggatatgttggcgggggattcctctgattctgcccttgctgaaacggtggctgctgggaatattccagagcctgagaaagctatggatgctcgaaggcctgagggtactcgcccgaaacgtcttcgccaagttagtcatccgactgctcctgc

SEQ ID NO: 128709 - DNA, 320 bp, Zea Mays
cgcaggccgaaagggtatcggggaatcctatccgcccgatcatccatctatggccccgattagatcatcgagccccaggctggtccgcgacatggcccgctagatcgggaatcaacggccagatttttaaatacacccgatccgttcacttagcgatcgacggctaggatcgaaccccgtcgagtgtgtacaccagttttaatctcggccgatcacatccgaaccaacggccaggagatcaccaccaacctcccagcagtcaagctcggacgcgcacacccctcccgcggcggcgcgcgtacgggcgcggtggcgccatg

SEQ ID NO: 128710 - DNA, 302 bp, Zea Mays
cctaagggtgcagccggactaagcacaacaagtgcgaaaaaatccgatgtctctcgcgaagactatccgcgcagaagtcgcctaagggtgcagccggactaagcacaacaagtgcgaaaaaacccgaagtctatcgcaaagactccgcgcagaagccgcctaagggcgcagccgaaccagtacaacaaaagcagaaacgatagcagcaaaccatccgcgctaagaacgactataatcacaatagcacagcataaccaaccataccagacaaaggcacacaacgtcctcgcaggcacaggcac

SEQ ID NO: 128711 - DNA, 698 bp, Zea Mays
tgggagcaagcacttggataggaagtgagagatatgtactgaagcaaagatctatgtactgaagcaaatgatggacaatactatcaagactagtattattttatcatctgcagagatctatgtactgaagcaaatagctttcacatgtgtaaaaaactaacaccaaatacatgttacttctaaacccttaaatctgtcatttttactactaattatatttagctacttgttttagataatttaactgatcagctatgatgaagcatccactactgtaggatgacatgtaatttgaaaatatgcaaagatagaaatgacactgaaaaaggtagcagatgaagttccaatagtaaaacgctcatcatattctctattatagaaagaaacatttccttttgagagaatggaacaagtggctagatagctataacgtcgaatacaaaccacacatatatagttcactgcgcacacggcagggacatgaccacatgcacaagtgtgcgagtatgatctctagtactggaacgaggacgatgcggacagacgtcgagaatcgatcagttacctagaacggacttgatcctctcgacgtcggccggcggtggaaccgcgcctggaccagctccggtgaagacctcgcggcacgcctcgaagagccgctgcacgacggtggcgagcgcggccatcgttcagggtgc

SEQ ID NO: 128712 - DNA, 545 bp, Zea Mays
aaatgtgatatgagtttctttaaattggtggatttcctctgatgctagaacagtaccatccataacaatcttgaatctaatattcagcttgtcgatactttttattttaccctgttcttgtgttctgtttggaaaagagatttacttttccttttactactgactgtttttcctttcatgccacaaggtttcttccttcagtaaatttctttgcaagaatgtcctaataggatgcaaggctcatgatttgtgtggtctccactattttgaggcaactgagtatcttgtattagtgtcacttggtctgcactttctcaacaatgaaaggctagattagaagctggatgatcttgcaggctgaaaattgaattgtttctgcctggtggtattcattcaaactttctaatagagggaaaagctctataatggtaaaatgtgatgtttgatggcctaggatttggttcaacaactttcttgtccaccacttcagtcactacctacctcctttgtcctgacaccaattggtccgctatagacttgttgag

SEQ ID NO: 128713 - DNA, 490 bp, Zea Mays
tatgttggctggagaatcatctgactcggccccttctaaaacaatggctgttgttgttataccagagactgtcaaaacagtggacacccagaagcctgagggtacttgcccaaagtgtcttcgccaagtcagccgcccagctgcgcctactgaggagaagaagaaaaagagacggcttcagcgactgtcgtgcttggaccaggatgctggaccttctgctcctgtttacgaagaagtaccaacagaggtctttactgaatttgaccccactagtggtgtacctgctgaagttgactccaatgggtgtgaccgtgcaccaactgaccccaacgagtgtatccgtgcaccagctgaccccaatgggtgtgatcttgctgaagttgaccccaatgggtgtgaccatgttgaaactagacccaatgggtgtgatcctattgaagctgaccccaatgggtgtgatcctgcaccatcttttgtccgcattttttat

SEQ ID NO: 128714 - DNA, 706 bp, Zea Mays
ttaaaaagtgtgaaactcgtaaatatttatgtatacttacaagtctttcatcctttctcttagtctaatcccttcagcgttagaattgcaatacatcaaagtacgcaaactaattggacgatgcatcattgttgtttcttggtggcactaccatgcctaaggaaggacgaaaaggagtatgaccaccatatgtgggaggagcacaataaggacgagcatataaaggatcaccatacgatttataaggacaggactatatggatatttgtatggtacggagaaggatatggataagaaaaaggttgtggaggaggagcattggtggaagggctttaatggtatgagaagcatcggtcgttggaggctcagtagttgaatgaggagcattagcacttgatcgatatggatatagaggaggaggatacagataaggaaagagagttatggagttagagagcatagaaagaccatcgaagaatatttgtctcgcaccagtaggggtctcaagacgttataaaggttgctcgttgaagtatgtgaacgtattaatgttggaactacaccttagatccattagagagaaatgtgtgtgaacccaaacaccctctctattgtatgatggattaaaaagtagattttttaaaagttcaaacagataaaatagcactaaccaatcagataatgtcatgttagctatcgatagctg

SEQ ID NO: 128715 - DNA, 448 bp, Zea Mays
ggcaagggcagtatccacaataacattgaacactgcccagaaattcttctggcaaaacattgtttgccgattcggagtcccgtccgagctcacagttgacaacggcaaacagtttgacagccaggacttcagggacttctgcttctccattggcaccaagcttgccttcgcctcagtatatcactcacagtctaacggcatcgtggagcgtgccaatggcaaaattttcacgaccatcaagaaaatgctactcgatgacaagaagggtaaatgggccgacctgctacctgaagcagtctgggtgctgaacacgaccgagtgccgggcgactggattcactcccttctgcctgctatatggatcggaggctatgaccccgcacgaaataaaacatgggtcaccatggacaagcgcttcagccgtccccgacgtagacgaaccaacttcc

SEQ ID NO: 128716 - DNA, 513 bp, Zea Mays
gttgctgagcggttgcttctcaacgatgaggttcgcgtcagcggtcgtggtcgtgtccttatctcctgtcattcgtcatcgctgcttgctggcggccctctgcctgggtttcttggacgagtcgcttgctgctgctgctgcattgggcgtgcttcctgacacggcgtaacggtacctccccaccaaccgtggtcagcatggcgagcaattgggtaggcgttacaccgcaccatctgttgccggcaacgtcttcttcgtgtaggctggttctgcggtgaccgtggcggcatcagtaatctgaagcggcctaatctttagatcgtccctgttttacacgccgataacgagtaaaagaaagtgacggacatttcagtccagcgggtatacagacccagttgtcagacaagttaaacagttggttgggtattttgataaaggtagcctatttaatcgacccatttttacaatttcacctaactacgacctactttttaaggaacaattggatctata

SEQ ID NO: 128717 - DNA, 436 bp, Zea Mays
aattgatctcttcctcaaaacacgctccgagaattccaagatacgcaccggacgacactccaaggtcagattctgctgcaccgcaattggttccatctcaatctgatggtccagatcccacaagaacttcctcagcatagagacatgaaatactgggtgtacccctgccatggaatctagcaattgcaagcgataagccaagctgcacacctgggccaagatagtgaacggtccaatatatctcaggctaagctttccggagacaccgaaccgaacaactcctttagtgggtgataccctgagaaggacttggtcacccactgcaaattccaaatcccgcctcctcacatcagcataactcttctgacggctctgagcggccaaaatattctgacgaatttcccaaaccttttcagaagtatgctgtacccaatca

SEQ ID NO: 128718 - DNA, 610 bp, Zea Mays
gtccatggcgagctgcaagcacctcccatgacgcccagcgcaggagctccatggccagcgctccctcctgctcggccacaccgtcggctggccatggcgtccaggattccatgcgccctcacctagtggcggaactttgctcacgacaggactagggccattcgaaaaaaaattagcacagactaattgacagacaagaataagtacctaatcgatgaagaattattgtatttgttccacttagcttcttgtttctgcatcaacaatcgaatcagaccgcagacctacataaaaaatgaacacaagttatatatataacaattttaagaccgtgtcaaacttcaattatttaataaactgaacataccattaacactagtagcctgatgttgtttaggcaacattttcatgcgagacttcatttcttgaaactggtataaaatcttatcatttggaatacttgaaaaaatgactcgttcaatatagcataccatcttatgattgacaacccatgaaaagcaagcatagtacgatgtcgtgtcagcaacctcttcaataccaagaaatctttcaataacttgacctcgtgcattaaatacctcaatataac

SEQ ID NO: 128719 - DNA, 1331 bp, Zea Mays
agctcactttgcttaggcaagatactcgatatagtccactagatagtttcttcacagcggtagaactaataatatgatttttggatggatcaataacatcaactgtttcaacaaaatcaataacttggtcccaacgctcaggtcctccgaagataaggacatccattgttgatccaggaactaagtacagctccttgggagagttgttatccatgttcttaatcctactatgaattccagataagtcaaaccagtacccaccaaaatgatttccattccccccttggagaactacaagaggataatatgcagaaatttttgaagttgcctccagagaaatgggtccaccaaatgtctcaatatctgaatctgaatcaacagcaaatgttgcaactattgttgatctgccagcagcaaatgcactcagagagacccaggcacaaggattgccattttgtccccaataaccagaattatgttttatgtcgtcgatgcttgaggcctcagcggtgttaagaatgtgaaaggcctcatcctcggatagtagactccaccttataaaagcattaaaatgggtacattgtgagaatgggtgtcctgcagagagaaacggtgatagctcatttagaacataacagtttgaaggcataaaagcattaaaatggttacattgtgagaatgggtgtcctgcagagagaaatggtgaaagctcatttagaacataacagtttgaaggcaaaaataattaattagtaattcagatgctacacaaaaatggataagtttaacataagcttctttcttcttgtaagaaaaagacgaagtctgatttgaatccctgaataaattatgctatttgctgaggatgaggacagaacaagagagagttgacagcagaagcattggtatgagagtagtactccaaaacctagcattcttgtactaatgtcattttgtaagacacaagctactttccattcgtgtactaatgccattttgtaaggcacaagctaaacttcatctgatttgtaacaaaggagtgacatcaaattcaacttgcatgaaccaccatatgtttcttttttggcaaacgcaccagcagatgtttttaacactgcagcagaatgaagtcgtgttccaacaggcacctccacaggaaagattggcaagatagacagtactgaaggaatggaaacttcaacaattacctacattgccaaaaaaacaaaatgagctaccaggagtctgaaatttgtggaaacggaatattattaatgtaaaggaagacttccactaaaagccatttcgccactctcaattttggttgtccg

SEQ ID NO: 128720 - DNA, 559 bp, Zea Mays
tgatcattaaaatcatataccaatcaaaattttagattgtagcattttgacaagcattaagatcaaattttaggaacaccacaaccaaaatgaggaaacacttagatgaaccaattgaaagaatcaccaatttaaagtggaacacatctaagaaatgatactattatttaagaaacaataacacaatcatgagtacaattaatggaactacaatataatcaatgaatcgtatagttccatgcttcatgcctttgccttttcctgaatattatggagttcactcctggggcaatataaattgagtgtgcctttcataccaattgagagcacctttttgcttgtccatgcaactcctcctttaatattagcttgacatagcacaaggaagtgcattagaaacacaagcaaggatttcttattttggcaaccataagttgctcagacaaaggaacaccacgaatattgactaaacaataatatcatgttttcacaaagtagataccaattcacgcataaatatactagcaggatgtgccataagcatgatttacaatcaaac

SEQ ID NO: 128721 - DNA, 547 bp, Zea Mays
ttacatgactccgcctcgttaaaaacctcaccccccgggaggaaaagagtgcgggccagaataacattgttttttgcgaattacaagggcgaatcggccctgatgagtcaaacaaaaaatttgcggagattgtcgacgttccaggagtgctccaggtcttcgtcgtttggcgttgtgagcctgtaagcgctgggggaagcctttgtcttgacaatgaaagggccctcccacttgggctccagcttgcccctggactctgtccgagctgttcagacgagtacgaggtccccttcgctgaactctctcgggatgactccgtggtcgcgccatgcttttgtctgggcttggtatttgttccgagcctgtagagcgaagactcggtctccatcgatgagatcctttgaagtgggctcgtccacgtcggggacggctgacggaactatttgcggggacccatgttttatttcttgtggggtcatggcctccgatccatatagaaggcgaaaaggggtgaacccggtcgccctgcactcagtcgtgtttagcg

SEQ ID NO: 128722 - DNA, 626 bp, Zea Mays
gaagagagcacaagatgcaagggaatgggaggcggctagagccgagaaacagatattggataatcttgttgatcgtctcaagggaagtgagtgagaaaaatgatactataattttgttagtacaatttatttatcctgactttgcaaacttatttttctcattatatttgtagagattggatgtggtgtaaactatatcgcagatgaggcacatgcaagatacgttcaggaaaaaatggcgacgatggagctgatggaggaggacgacgatgacacatctaggttgagtgatcttatcgctctcgcagaggcaggattacattgggaagaggaggacgacacatcaaggttgagtgagcttatcgcactagctgaggcaggatttcgtgttcaagaggaggaggacgagtttatgtctcaggccaccgaagaggtagaggcggcttattacaagcagaagtgtgatgaggctgaggctaaggatgagctattctcccaagctgcatatgaagcagaagacaattattacaagagaactgctgaaaagtgtgatgcaggacaatgcagcaagtggaacgaggttgtcgttgaggattgcgcgacggatgactctgaagatgagttac

SEQ ID NO: 128723 - DNA, 280 bp, Zea Mays
cacaagtgccctcccttttatagtccaagggggcacgttacaagggacatgggccccgacaggtgggcccaggagttactataatactaagcgtgaggcatcgggtacagatggcggtgctagatcttctcggcgcgtatcttctcttggtcatcgtgctggctcctggcatcctatcccccaacttcgtataatggaggcactggcctagtccttggtgtatgttgcggtgtagcctgatacgagatctgggagcctctcctccctctctcgactattt

SEQ ID NO: 128724 - DNA, 454 bp, Zea Mays
gattctacatgttgtaggtcaaaactgacgaggcccatactaatgtgaagggattgtgagacctaaagggagagcggggatgaattagacaatttaaaatctacttgttaaactaatgcatctcatttttaacctagtcaaaaacctatgcaataaataagctatcacaacgtgcaactaagatttttgctaatgctccgtttggatgtatgcattgagccttggaattaagaattgtcattgagaccccgaatactagctgtttggatgtcctagaatttggaattagaaatggactccaatgccaaccggaattcatcagtcactctaccacttccttcaataccgagccctcctcgtccgcatttgctggaatctcccttgcctctcttgatctatacgtcgccatgatggaacaagaaagcaaatgtacacccaaacaacaaattgaatt

SEQ ID NO: 128725 - DNA, 292 bp, Zea Mays
caagaaagaatattgagaagaaatctgcacagtatgcaaagcacgcaaacaaaggtaagaagaaggttacaattcagccaggagatcttgtattattgcatctacgaaaggatcgctttccccaacagcgtaagagtaagttatctccccggggtgatggtccgttcaaggttctccaaaagataaatgataatgcttacaaaattgagctgccacctgaatattccaatgtgagtacaacattcaatgtcaaagacttgcttccatttgttggtgagcctgagtcgaggac

SEQ ID NO: 128726 - DNA, 379 bp, Zea Mays
ctgatgtaggagcagagacaaactgactcaaaatgtgaaccgcatgagcaatatctggcctggtgacagtaatgtaaactaagctgccaacaagatgtctatatcgagatggatcctccaaaggtgccccatcagtcggacgaagaaataagtgaagatccataggcgtggcaacagtgcgagtatcactaagaccagaacgatcaagaaggtcttggatgtacttggcctgagagagataaataccattttgagtctgcaaaacctcaatgcccaagaaatagctgagtgcccccaagtcagacatttgaaattccttactcagatacgccttcacatgagcaatatggtctggatcatcgcctgtaatcaacatgtc

SEQ ID NO: 128727 - DNA, 478 bp, Zea Mays
gcaactttttgctcgaatagttgatgtgtctattggacgcctttgcacacttcttgtgtgtatccgactgcacccttaggcgaatttttgctagatagttgttcgtgtcaaacacgacggctgacttggttacttgccgttgcggtgactactttgttgtcgaatagggtaggctagcttggtggccgcttttcaacatgctcgggctatgctctctctttttttgttggggaggggatttcctgcttgttttactacatggcgctgcctcgttaaaaacctcgcccccagcaaggaaaagattacgggcctgagaagcaatgtatcggttgtttttacaaaggcacgatgggcctgatagtgtgatgtgctataggaagcactttctcatgttgtctacattccaagaatacttgaggtctgcccctgtctgatctacgagcctatatgaatttggggatgtcttcttaacgataaa

SEQ ID NO: 128728 - DNA, 417 bp, Zea Mays
ttcgaatcttgtctatagaattaatcacccacttagggattttcatggcaatgagaagatagaccgggatggctgaaagcacaaagcgcaccatagctgttctgccagcaagaataagcaaccgagccttccaattaggaagtcggtcggctactttctcgacccaaaccatgagatcatattttctgagcttcttgtctgaaatcggcagccccgaataagtgcaaggaaaagaggaagaagtgcactgaagaatattgcagcccatctgcaccgcctgattattacacctgattggaataacaaagcttttttgcaaaatagataccaatcccgtggttgaaccaaagcaatccaattatcgttttgacacattgaaagtcctcaaacggctgaacaaaaaggaccacatcatca

SEQ ID NO: 128729 - DNA, 418 bp, Zea Mays
ctggctccaggactgcgggttgaatccgcagaaacggaggggctcttttgaaagaagtgcacggcaaaggggtaccgttgattcagagccgtccgatcctagatccagggaccagattagaaccccgactcggtacgcgcctgatttaatctctaccgcttgttttcaatccgaaggcccgagttctattactatgggatcccatctccatcgcccaactacaatcgaacggtcagcatccatcttcttcctccagccacacccaccgatcgcggcgcccagacaacggtggcaattcgccggcgagcacacacaccgacgctctaacgctccaacacacgttctgccaggttctatacgctaagggggaaaacacgaatcttccagtggagttcttaccgtagggattgacatcggt

SEQ ID NO: 128730 - DNA, 487 bp, Zea Mays
tagtgtacgaggatatggctccggtatacaagggtattacatttaggatccaagagacggatttaggatccaagagacggagctttataatcgtttgaatttttgtaaaatagagcctatgttgaactatgtttttgctgttatattttaaagagatgctctaacacattacgccgcagatcaaatacgagatctatattaaataaaaaaaggtagacgttgttcaagtacctccgcaaattcagatttttcatatggcagccttttttactcgtttatcagttaccagtgcctcccgcctgctaaaagcaaagcaattaaaatgataagttattttgctgcgcttttgctacatctgtttggtttctgtcgcctctttctaccagtataaacttcgtcatgtttcagaaaatacccatcatgtgataatttatttgtcctcgtattatgatgttagagttcaaccttttatctactctggttcaac

SEQ ID NO: 128731 - DNA, 554 bp, Zea Mays
gctcgtagcttgcttgttgctggtggccacaggcaagcgtgctattgaagtgcaagcaaagacacactcctcgcatggctgttggctacatatatttccccaaagagcttttgttgtttgtagttggctccatatattttcccttacaagcttgagatgttttgagtccggatgaactgatccttgtttcaaagttgtagtctgcccgctccggcgccatggctgcggcctccgaccgtggtgaggtcgacactgcacggcccttccggtccgtcaaggaggccgtagccgtgttcggacaccgcatacttgtcggcaacaaccattccagtcacagcagcactgcggccgccgccattgccagcccaagcgctagtgccaatgccactggcgttgctgccaccccgagtgccaagcatgaagcaagcagtagcagcagcaccatgaccttctctcccacaccaatggccgagagcgaggcggagattatacctgccactgtgcccttgtactcggcgccatcctcgccgccatctctcgcgtcgtcaccttcg

SEQ ID NO: 128732 - DNA, 421 bp, Zea Mays
aacacgggtcaccatctgaagcactgaagaacggagcgtgggtgagggggggtgagatttgatgccactgttgtcgagctcgcccgcaccggtccacggatggggtatcgccatgctaggcactgctcggatgggcgcgtcgtcggcggggccatggccacatcaccttggagcttcttcggccactgcgaactcgccctctgttctccttgccacagaatttgtgatcgatgacctgtccaccgtcgcgtgcggtatgagcctcggcagtttgcagaacaccaggggtgggttcaagcccgatgccatttccgtctatgcctccctcgccggggtgttgccgtcttcgaccgctggatcccctccatgcccacatccacgcattcaattgcttgttcgtccactcggcgacgttcacgcc

SEQ ID NO: 128733 - DNA, 783 bp, Zea Mays
gggctacacattaatgtctatggcggcctaggttcgtctcagctgcgccatgctccggcatgctttctaattaacgaccgtgcaatattgaccacggaagcgtgacgaacaactccttgtggtaccaaaaaatggtgtgcggatggggggtgcacgggaagagcagttgcacgtacgtgcgtgtggacgcagcactgatccggggactcgttggcggccatgcatgcttgaaaggaaaggaccggtgaggccgactcttttatctgtaacactttgtactgtaatctgtactgttcgtagagtgaggtttaaatataggtataaatatgtgcgtgaatataggtataagtaagtgctctgagaagtttctccctcgaacagtagctgtgtgatgcaagaaaaacagtacacgtctctctctctggcagggccgtgttgcaaaagacacgacggtacgtgagcgagccctcaaatgatgagccgtatactagctagtaggtagcctaagctaggtgcacaggaggaggcatacatgttatgctcttgtacctaacaatctagacgcttttgaggaccgcgaagctgctgctctatatatctaaagtcgctcagcaggtcgttgaagctgactgactgacccggcgggaccgaggctcctgccgcagttagccggccggtccctcgctcctctcgatcggtcggtcctccatgtactggcgccctcttcagctcgaccactaccagagagtggttgtgttgtgtagcccgcccgcataaatatag

SEQ ID NO: 128734 - DNA, 421 bp, Zea Mays
cacttagtaccctacaaaaaatagaaagagagtgaccccaaaaagatttcagaaaaaccccaaaaaggtcaccaaagaggagaacataaaagaaaaatcaggtttttcttaagttcaaaaccaaccctctttcaaagatcacacatgttcatctttttcccaacctcaaaaccttatggcccaattgacaaaatggcgcctaaagacctctagaacaccctggaaaagtttgaacccaaccctaagtcgtttggcacgacttgacatggcttttgtctcggtgtggacagctcggacagagccaacttctcacccccatatctctatactccgaccatatctttgcttggaactcacatggaaaaggtaggatttgatgcagaaaagagaccgtacatgggtgttttgctaagctctgcac

SEQ ID NO: 128735 - DNA, 417 bp, Zea Mays
gatacatttatattccagttacatttcagtaacaactaatttattattatatgttccaaatgtagataacccccccactacctcaatgcctccaacaaatgctccagtatcctcaccacctgttccaacacctgataaacagcaacatgatcaggaaattcatgttcctactgatcatatcaaagtatcagatcatgtaagtttttttcatacaaactatatatacaatgcatatattatatttagcatacaatttactgtttactcaaatctcagttgtttccattacagattgtcagtgggaacgtctgtaaaacagatgaagttatggatgcccctatatttgacaagactccaaaatcaaatgtttgacttccttatatcacaattattattatttcatttacaatgtatgca

SEQ ID NO: 128736 - DNA, 951 bp, Zea Mays
gttgctacaccttcacatatcggtcggatgcccggtaccctgtcttagcataccgaaacaaatgtccaacttcttggacgagacaatggttttacatgaaaaatgacttaaagaagagggaagatatcaaggaaatcattcagaggcccattgtgtctcgctttggtataaacaggccagtagttgtaatgactgaagaagctcaagcttgtctggtggcctttaacgccgtgtgtagctacattggtactagggtctagtccaagaacacatagcgtttagggtatgccccttgtgaatgagtgggaaatgccaaagattcaagaggacaacccatctaagcaaggggcggagaagggtggtttggtgaatttaaaatatacataccattgcagaagtcagttcggtgaaccagatgacgaatggctagaggcccttgaattgatatgtaatgaaattttgggaaattatacgaagaaggaatatgatgctttgaccgttgcttttggtgcttgagggaagagaaggttgaaccaagtttttgatgctattcgctttgtttatcctgattactccttcccagctcaaggtaaggggaagaagaggaaaagcactttgaaatcggccatgctgaagaaaagcaaagtaaaaattttggtgaatcgaccaaaagcttattatgaagagagagcaacggtgttgcttgcgcttaggacttctactaaggaagctattacctagactacaccaattgttgagccgaatattcactctcttgtactgacaaaggtaatgattacttggctttttgatagcttggataaaattttttgggatgtttttataatggttttatttgtgatgtaggaggatgagaaagatgaagaagtaaccgaggtaataattcaggatgaggtgcctctagccagcttgcaaccggaagcacgaccg

SEQ ID NO: 128737 - DNA, 402 bp, Zea Mays
gagcttttggactcacgttgagcgattaaattgtatagtgggtactcggacatgtcgatcaggctccattatgaatcgactgagttatgacatcggctatgcattggctgcgccctagcaacacgacgcagtaattgtgtcgtacgaacttggttccatcatgtgattgctatgtagcactctcgtttattcggacaactcccgttgagtcgaactgcatcactgtgtcgtgtatttttcgtatgccctgtaggtactatctgtctgccgtgatcattaagccacaattgtgcctgtcgcgcacgttgcgtggacttatcgtgtaccccgactattgagccataattgtgcctgttgcgcttattacgaaggcttgttgtgttgtcgtagccctgatggccg

SEQ ID NO: 128738 - DNA, 460 bp, Zea Mays
ctgggatttactttggtgatgccatcagtgccgattaggtgtttgatgaattgccttaaggtattgtcagccgtaacctgtaacctcatgagtcatgagcatgtgctaaccccggtccatcctgcccgatttgtccctctgcacctgaatgagtacaccgagagaaggtgcctccaaacttactaatcgattagtatgtcttcattgttctactattgtctactgtattcttgtgcgttgagatgttaggtttttgttactcagttgtggggtttcattattcttgtgcattgagaatgctggtggcctcatgctcatgtggggtttctagatttgttatctgtcactttgttcatctgagagaatgttggttgcctcatgctcatgcgggatttccagagtttgttgtctgtcacttttgttcgtctgtttgaagtgttacattatctattacactctc

SEQ ID NO: 128739 - DNA, 816 bp, Zea Mays
tctttcgccggatcgaaaatgtactaaataaggagcggtaacctttaagctggagggagaagtagatggcctgactggcaccgctaagatcacattgcacacccgaaaccaggtagggttcatgaacacgagtccacttccgacatgccatgctctctggagccacgcgggacctagtccaagaaggctcgcacactgcacaagcggaaccacctctcaccaaagaaaaaacagtgggatgggcgggaccctacctcgtgtggcggatggaggttaccgaggcctgtcccttctccctatagggtgtagtgtagcagaccgatgccgcgctgatgggcacgacaacgagtgacgagggccgatgacgaggtgggggcataggggagtgatctatgggttagagtttgggagtcatcacgcgatggatggacgaacgatcgagggttggggggaggggggcaaatcaaatcgggtcatgggcaacaactgaataacaatgtccagttgaggcttattttcaagagagggcgaggatctctgctacgaacagtggcacacgtgtcagcaaagcgacgcctcacggtacacgtggaatgcgaacgtggaagcagtggttgaagttttaagaaaaagagatgggtcctaatgttgatgctatgaaggatgtgactaatgcatactaaaaagtatttgtagggctataaatatgcaacatgtcaacctctggcacgtgcaatgaacttatctctactacatattaagccaatagtgttgacgaggatctagcgacggttccggcttgccgaggatgctgga

SEQ ID NO: 128740 - DNA, 530 bp, Zea Mays
gcatacttgatctgaatgcttttttgctcgtagaagtcgaagaattctgaacttgtgaagttagatccaaggtcagttatgatcctgtttggtatcccgaatctgaatattatgtcttgtatgaattccacggccttagctgaggtcaaagaggcaatgggtttgaattctatccatttagtgaatttgtcgattgctaccagtacatgagtgtatcctccctgagccttcttgaaaggtccgatcatatccagtccccagcacgtgaagggccaagtcactggtatggtctgcagttgttgtgctggtaaaagttgttgttttgacaagtactggcaagcttcgcacctctgaactaagtcggctgcatcaccttttgtcgttggccaatagaatcctgacctgaaaaccttcccgactaacgccttggatgccgcatgtattccacattgcccagcatggacctcttccagaagtcgcttcccagtagatgagagaatgcacttcatgaggacgcctgatgcacccct

SEQ ID NO: 128741 - DNA, 392 bp, Zea Mays
gatatgatatgtgctttagaaatttcaacttttgacggtgtatgatctacttgagttagataaagttaaaccttacttatgtaagacccttgggtggtatacttgataaattgggtcaaactttagctaagataagtggtaggtttatttttggggttccactgaattctttttaagccttagtgagaattgataagtactcaagctagacttattggagtgaggtttatttcttcttcccttttcttttattctctttaatgttttggagtgggtttgaactacaggttgcttaaataaaattctaaaaattctgtaaaaattacagtggcttggtactggtgtatattgttttgcctcaaaatttgggggtcagaaggtgaatatttttc

SEQ ID NO: 128742 - DNA, 700 bp, Zea Mays
agaaggtctgaccctggggttcgggtgaccaaaggaatttctaggggtgtagaggggatgccatgcttttccacaaacttagtggctataaatgaatgggatgctcctgaatcaaaaagcacagtagcgggagtaaattcaacaaggaactcaccaagcactactcctggagcttgctgggcctcttgagcgtcgacgtggttgactcttgctctgccctggtactgggtcctgctctgctgactgttggagggaggtgccttggaggtaggtgccgagggaatcttggggccattcactgagttggagtaggtaggtctgggtgccttcaactgggggcagttattcttgaagtgactcgggtctccgcagtgccaacagacatttgctggcggttggttgcttgcaacagagggggcctgaagggagctctgactctgctgactatagcgtgatggagtgggtccagctggtctattgaagcttggtcccctgggtggaagcccaaagggtcgagctctctggtgacgatcttgctgctgagctcggagaacctggaatttcctcttgaggtgccctttttcttcctcttttgccctttccacttggatggctttgttggagaggtgagagaagttgaggaagtcttggctgacgaggatggtcttaagctcgggtcttagccctttcagaaaacggg

SEQ ID NO: 128743 - DNA, 349 bp, Zea Mays
gaaaaggaaaaggccaaaactctgtttgggccggctaaatcccattcagcccacctccacatttcctctcccgccagcccaacgcaaccgcgcctggactctcttacgcgtggggcccggctgccagtcgctgcccgcttgtcctgctcacgcccgcttccttcgttactgctgctggcgcgtgggcccgggaccgtgcgcgcctgctagttcaccgactgatgggaccgctttggcaggatggatcttcttcttccccaaccggtgcagcgaccgcggcggtaggaaatctcaacaaaccaagcgattctctcgcttctagccggactcggcctccagggtatttaag

SEQ ID NO: 128744 - DNA, 295 bp, Zea Mays
caagttacaggtatggtttgcagttgctgtgctggtaaatgctgctgttttgataagtactgacaagcctcgcatctctggactaactcggctgcatcactctttgccgttggccagtagaaaccagacctgaagaccttcccaactagagtcctggatgctgcgtgtatcccgcattgcccagcatggaccttgtctagcagttgcttcccagtagccgaaagaatgcatttcatgaggactcctgtcgtgccccttctgtatagtgtttccccaatgagagtgtagtgagctg

SEQ ID NO: 128745 - DNA, 315 bp, Zea Mays
aaatttgctagggacaactcttgcagaccaacgagagcagacaaagctggagaaggaatatcactactctccccactgactaggtagcgccgactgtttttccgaattaaggggatttcctcctcttcttcctcatcctcgtcaataatacgaacaacacacccagtggggtcagcatcagcagggtcacacccattgggattagcattagcagggtcacacccattgggatcagcatcatcaaggtcacacccattggggtcagccccagtaaaaagttccactggtacttcttcagcagcaggaatagaaggg

SEQ ID NO: 128746 - DNA, 523 bp, Zea Mays
gttgggtcatgtatgtgtccaagttcctgtcatggggtacacctctacaatcagtgcgggtatttttccttgtagttttctccctcttgcttctagattgtttagctctgttgacttttttcacctaagtcagagtgattgggtaatgagccatcagagtcctttgcattgttcctgctcctatcttgcgctagaggcatgtgctaaaaagttagagggtcacaaatggtgtagccttatatgatcccttttattctgctcagtctgtaagggaagtgtgacgagtctaggaagtgcgactagcctaggagaaactcgactggcatgttcaagcttgggattgactagtcgaggatggaatcgatttgggaggatctgggtcatgagggaccttggccatggttgagtttgatttggtcggggtaaccaatttggttctagcatggtgagaaggtctatgtcgggggaattttagtcgggttgctactactgggatttggttgagatgacatgaccaaggaca

SEQ ID NO: 128747 - DNA, 486 bp, Zea Mays
gtgcctgcgttgcgtggtctcgtcggggtttgggcatggcggtcggaaggatgcttattacacctgcatcattgcatgtttgcactgaatgaacaggtgaacatcatgtccctgattgggcctcacaccaccatgtgaacatcacgcacgccgagcgaatctcttctccccttcttaatttaactagtagtactaacagacgacgatgatgatgccatgtttaataagcgataagctccggccggcgacgattctctcgcacgagtggttattgtcgacaagggcggttgcgtctggtctaccaatactatatataaaaaacagatgccctgcttcgtgctttgacgcatcgatactctctagtataattggattggaaccaacttagctttgcatgcatgcctctccgtgtcagcttgttcaagtggcccccaccccactgcactgatagcaacctcaatgtctgcaaaaaaagaacggttttca

SEQ ID NO: 128748 - DNA, 580 bp, Zea Mays
attacttccttcatatacaagggaaccagctctaaagatgaattggtggtcttcatgggaataaagtgcgtagacttgatcaagcgatccactaccacccatatagcatccctgcctcgaggagaacgaggtaagcccaccacaaaatccatggtgatatgctcccacttccactccggaatttccaatggcttcagtaaacctacaggcctcttatgctcggccttcacgcgctgacatacttcacaggcggccacatacttagaaacgtcaaccttcatccgcttccaccagaagttttgcttcaaatctctatacattttggtttcgctagggtgaacggtgtaaggcgttttatgagcttctctcaagatatccatcttcacctctgatttctgaggcacacaaagatggcccctgaaacaaaccaaatcattctcattaatggtgaactcctagggtttaccatcgccaaccctctttcgagcttccagcaataaacgatcctgctgctgagccacacgcactctctccatgagggaggattgaataagcattcgagtctcctcactagcggtgc

SEQ ID NO: 128749 - DNA, 357 bp, Zea Mays
atcgtggttttggtgacgtagttgatatcgagtccgttgagctcgaggcaccactttgagatgcgcccgaacacgtcccgattctggacaatatcatcaaggggtgccgtagacaccaccgataaggggtgttggtcaaagtagtggatccacttccgcttggagatgtggaacgcatagagaagtttttgtatcagagggtatcgtgccttgcactccatcaacacctcactgacgaagtacacatgcttttgtaccttgagtacatgtccctcactttctctttccaccactagtgcagcgctaaccacctaggtggtggctgcaatgtaaaggagaaggtttcgcctagttcgg

SEQ ID NO: 128750 - DNA, 457 bp, Zea Mays
tagcctacgttcgacgacgcttaagtactgtgttttgttcgacgggcctaacagcaactattacatacatgtcacgacttacatactccatcgtggcccatagtatttttggtttggaatacgatctcgtgctccacgactttccttggcgctcttgcttccttccgtggcgtgctccttcgtcggcagcaccgtatcagcatcgttgccaacatttcctctcttgaaacccagcttgtccccaagctggagctactggaaattttgctcgaagtgcggttgtatcctcccaggtggccaattcaggtgccatcccggaccagcggaccttgacctgagcaatatgttcacctccacgtgcaaccatgcagcgatggaggacctgcataggaatttgcataggcaagtcattagttggtaagtgagacactagaacttgtccacgccccacaaccaa

SEQ ID NO: 128751 - DNA, 412 bp, Zea Mays
ccggggtctcttatgtaaatgatgtggacgaaggggtacggcggtatctgggtcgcacgattgcaaatgaacggtgcggattaggtccagattaacttcgaaccggcaccgcatcgaggccgtcagatatgggaatcacggttcggatttaatgacatgaagggatacgccagatttgatctaggccattccctgcacgatcgacggttgagggccaactttcccctagatctaatctaagccgtcgagtacgcgatcaatggtcacgatctcacaagcgaaaaggggtatgcaggggtgatcctggcccctgatccataaatccatggctcaaaacctcacacgcctgcatctaatcccaaccgcatgatggatatccaacggccccacgcatcatcttcttctcccatga

SEQ ID NO: 128752 - DNA, 429 bp, Zea Mays
ccaccaccgtgatcgccttcgtctcaaattggcgaagcacgtagccggctcctttaaattgagcactaccctcgctctgcatctctgttacgcgctcataccaccctcagttagtctctctcgtgcaccgtagcccctagtcaccagatttcccccaaatcgggtcactcacgccgccgtgagacatcctgccatgatcaaccgttcctaggtctgttcatacctctctatgccttgttttagcattcttgaatgttaacgaagctcgtcgtctcaaccgattgaacactaccgcgacagggcatcgagaacatcacctcgccgtcacagaacactttcgagagagcactcacatcgacccactctcccatgcccgctccgtccaaattcacacgtgtacccgacctctggtaagtcagtgaaactcac

SEQ ID NO: 128753 - DNA, 931 bp, Zea Mays
aaacaagcagcaacagccaggacccaagagcgagccagccagcttccacctctagttgtccaacccaactgagagcataggcatagcagcacatcacatctagtgccagttctagcttaattaatccttttcttttaacagtaccgcttccccctcccccgtgggctgagcctcgccccgcctcaactccacctccgcctccaaatccgatcgatctccgaggcctccagatccccggcggccggaagacggcgagctcaaggcggtggacacccctcgcagcgctcgtctcctctcgctctcccaatccccttaccaggttcgtgccattcatgctgtgtttccttttttttttcttcttctcgctattgccctgcctggctgctccctgcattgagcttggttgcatggaagttggaggtttccgtgcgatttggagcgcgctggtttgggtgtaaagcttcgatctttacgtaagaaccggtttccggtgctggcgctgtgggttagcttgcgctggctggggctggttcctgcgggtggtgctgaccggatcgactggcaatgcggttgtttggcttggtcagagcttgactattcgtcactcgccagccgccgccgtggactcggcccggccgctgtccttttttgggggcgaatcggctgctttgggcattgtagaccacctacctcgacacattttctggacggtcgaacaacttaccaagctttggacgaagtggtgctctttcaatgttcgtagctttcgtcaggattttccaggacagatcgtgactgaatggcatactagtcagtgcttcgcaacgtgtactagaacaaccactactagggtggactcctcggttgtacaattgtagggacaaatcttggtgacttgacttgaatgtgtcactataaaagcatatggaag

SEQ ID NO: 128754 - DNA, 371 bp, Zea Mays
ccatcagtctgagggtgatagattgcactaaaattcaacttcgtatccatattctcatgaaaacttttccaaaatctggaggtaaactgtgatcctctattcgaaacgatcttcttcggtacaccgtgtagagacataatctgagccatatatactctgccaattgagatcccttataagtagtcttgaccagaatgaaatgagcaactttggtcaatctatccacaatcacccatatatcatcatatcctttctgggtgcgaggcaatccaataataaaatccttaccaatctcttcccacttccactcgggtatcttaaatgggtacaatagtccagctagcctctggtgttcagccttaactctttga

SEQ ID NO: 128755 - DNA, 606 bp, Zea Mays
cttttagagaaaaggtgtaatgtgagttatgtatgtgcacaacatttatgtttgaaccgattgttctgtgggtagggtgctgaaaaacacctgtggcactgtaagagaaatatttcttttttcgaagtactcccgatttgagttgactattttgctactagggtatagtgatcaccctaaatcatgtgagcatgagcatgtcacactgacttaaggcatttccgacttaagccgattgctccgttagtagggcatagtggtcaccctgagtcatgtaagcgtgagcatgtcgcaccgacttaaggtgtttccgacttaagacgattgcttcgttagtagggtatagttatcaccctaagtcatgtaagtgtgagcatgtcgcaccaacttaaggtgtttccgacttaagccgattgctccgctagtagggcctagtgatcaccctaagtcaagtaagcatgagcatgtcgcaccgacttaaggcgttcttgacttaagccgattgttccgttagtagggcatagtgatcaccctaagtcatgtcatgccgatttcgagtcgagcccaatctaagtcacttgtcaatcaagagtttgaacgcctttg

SEQ ID NO: 128756 - DNA, 281 bp, Zea Mays
caaaccatagaattcccttactgtcctgtcggaaacatttgtatttttctgccttttgcttgatcatatccttgataacctgaacacccttatcctcaacttgagcccttatgatctgctcctgcaacgtgggttctaccgagatataacttaggtcacctgaagaaacaacttccaggtttaatctgcacaactcatcacacagggtggtcattcccacatccatgctcatacaattacactgggcctttctgctcaaggcatctgccacaacattggcc

SEQ ID NO: 128757 - DNA, 1003 bp, Zea Mays
attctggttccgtggacacgcgaagcgtcatccgcacatccagaccatctgatcaagaccagagggttaggatcgggcgctagggactttgccttctccgaccggctaggagcggcgctgttcacggtcacggcggcgctgctactggagatgaggcagactggggtttctaggggtgctaggggtggtctaggtaaccagggaggttagggaggactcggcgagcactatggcaggatcgggatagcaggaaagggggtgaggcaactggacggcgggggggagtcctcggcggaccggggaacactccgacgagcaattgcgttcgactaagtgcaagacacgggaaaataagggcagggttaggatggttaccttgagggaagactcaggggctcacgaacggtgttcgggcgctgcgaggacacgggtagacggcggtggaactgcggtagtgaactggtgagtgcagatcaggctaaccaaaggggaaggggcgaaccaaggggcgtcccgggttgtgggttataaggcggagcttaccgaggcaacggacacggcgagggctcgacggcagcgatagaacgagcgtgagaccatggcgagcggcagtggaactctctaggcgcgcgcgcagagcgagagagagggcgagagtgcttggctgagggcgcaattgagcgggggaggccgggagagcgagtgaacgagggcggggtccagaaaaggctcgggcgcgtggaggcgtggccggaaatcacgcggtcgtgggtgcgtccacggtggagagcgcgagcggttcagaggggaagggtctgacagacaggccccacgggtcagagagggagcgagcgagcgaacaggtttctgcactgacgagctggacccacggattagcgagagaggacaaccgcgtgcggatgggtttggcgccgacaagtcgaccccaccaggcagcgagagggagagagagaagagagagcgggcgcgagacgacgctgac

SEQ ID NO: 128758 - DNA, 336 bp, Zea Mays
gattgattatacaactcatcatgactctacgggttggattagctcttatgctcacggttgagttggtctaatgcactaatttaggtttaagtgcatgaggggaaaacaaggtatataggagtaggatccagtttatttcactagtgttaacttgttaagtgttgtccttaggttagctcaacttaaggttagacttcatcaggttagattaacttattaggttggatcagatctagaataaatcgatatgactattttagactagataagatctaaataaattttggattagctcatggttgttattcaagagtgggataaatatgctaattaggg

SEQ ID NO: 128759 - DNA, 933 bp, Zea Mays
caaggttctaacttaattaaacgggtcagtgatcatccatagcaagtaagaacgtcgaaacaagcacgcagaggacaagtgtggacctgaattgggctgaccgcggcgaggcttgtttcacggtggcggagactggatttggggaggattagaaattcgcgcgtgctggtggaggattgagggtgggagcgggtgctatagcttcgggatggcttggcgcagctgcccaggggctcaatttatagtgttcgcgggcggtggtgctcaatttggatgaagatgagcggcggccggagatagggaagaacgcaggtgcggtgaattcgtggctactgccgtggcaagctccccggcgacgatgggacgggtagagggagtcatggcgacgcggtggaaaggcttggacacgcggcatatggccgggaagcggcggtcgacggcgagcactttaccgcgggcggtgagccaaggggaggggtgtcgtggccgatcggggtagcttccagtccagcggtgacgacgatcttttaactccacggcgctatccacaagtccggtgcacgaatccaaacgccggtgacccgaatcacggcggaggaatccgtcggcggtgagcaagccgtgctggcgttctaatcctttcaggttactgtaccatggcgcatctgcttcagtcgcctgacagacaaggtttaggaccaaatctctctaaagtttctctagtaactcactccactctctgtagcaaagtttcaaagctacaaaccagctacaattcgactatagggattgaactcatttgagcactggatcaaggtcaaactggctctcaaacttgggtctaagccactgttagtctgaaattcagacaatactagcctgacagcctgacttcaggcttgattatctccaaaattttcttaacaactgtgc

SEQ ID NO: 128760 - DNA, 317 bp, Zea Mays
gtgaaaagtatatcgaattacccgagtagtttcacaaacgggcgggctacaccgttatagaaaatcttgtgcttcactttcgctgctgttatggcgtgttcgctacaatataataatgctcaaaacaatactgacaattcacggtacagcgagaaccacaccccggccagttcaaaacccaacctgatcaacggaagaatcccgaattggatgcaatatataagttgtctctcggtgggccgcaaaataggttgctcccgtctcctcagcaactggaccgatcgggccgggctgcgtacggcccaaactgagaactc

SEQ ID NO: 128761 - DNA, 458 bp, Zea Mays
gattggcggcgatctaattgaattgggtgggtcggtgagcatcacaaacgaatgagactgcttaaacgagggagcagaaggtttgcactgacctgaatcgagctagccacgatgagatgttcttcgcagtgtattcgaaccggtttggggaaaatgcaaaattcgagctcgctggtgatcggctgggggcaatactgggtgtcggggtacttgagtaccttacggagcttgcggtggcttcaatttatagagctagtgggcggtggccgcaaatttgaagaaggacgcgcgacggtcggaggaagggaagagcactggcgcagtagcttggtgtcctacgccgtggcgattactccagtgatcaacggagagtgagagtaggctacggtgatgcggtggaaaggtagagacacgtggcggacgccggtgatggcttaacggcggtgagaaccttatcc

SEQ ID NO: 128762 - DNA, 337 bp, Zea Mays
ctaacatgtggtcgtaaccatggtcacttttggtgactcctatcaagtcaaactcgtgtggtttcccccacggagtcgatcttttgattgtttcctcagatcaacccaacaagattttgaggctttcggatggtttggggtctgaaatgagagcagaccatggttgttaaggtggtaaggcgaactacggtggtctaggacctttttaccttttaagcgcctaaggcgcaaggcgaggcgacttcatagacatataagtaaggcgactaagtcatttaagaaaataaataagtaaatagatagaacatagatattataagacatacaagtcctaatg

SEQ ID NO: 128763 - DNA, 541 bp, Zea Mays
ctcatagtcatatgaagagaagtataggaacgagctcacctctagattcaattgtcgtgctcgagctctagtgattggaccttggacattcagcgaaggattgttgtttgtatctataggagtgatgtcctcatcacttcggacagtgtttattgatgtcaatataatcaatgcacatgcgccaatctacctttttacttttagtacaagaatgtggtttccaagcatgtctatgggcttccacgcaaacatatcctagttatcctgcaaaaaccggaccagcgtgtgcttcctatttggcatagagggtggaattgatggtcgttgttttggacgtgttggggaggctgaggcctaccttcttggtttcttcaatcagtcatatcgccacgaccgaagttgcttctagggccgaaataaacaattcgtcctttgggagtgcgtccgcttccaccgcaagctgcttttgtgcaataaaggtcctcacggagtgggccatcttgactactttcatatggcactctgtggagctctggaagac

SEQ ID NO: 128764 - DNA, 622 bp, Zea Mays
gtgcctggctgtgctcgcgatatcctccgtcgccggctttgtgtcaaatactgacgagcttgaactgcgacagagggccaatggagttggtcggggacgagctagatctgcgacggagcacccgatgtacacctcgccctccttccttgtggctgccgttttctcgtccctgcgaccttggccagcttccacggtccctcctgcttgctcgagagcttcagccccggcaccatggatgagagctttgcaagcaccagcagcagcaggaagcttcagccccagcgcgcggagtcgaaaaaggtcgtttagcggatgcccgagatctgctagctttagcgtgtatgaggacatgctctaaatttaccgaatgttttagcgtgcgttgctggacccatagaggaggtagttgtccgctaaatttaacgtacaggaccatttaccggtcgttgttggacacagccttagaggtaacggttgtggatagcctaagagaatcagtgttaaacatgcaggtgtaaatatctgcaatcaaacacgctgaatagagataatgcgaacgcggcctaaatacgtttatctcgtccaaacgcggcctaaatataaggtaaaaaaacacgctccg

SEQ ID NO: 128765 - DNA, 317 bp, Zea Mays
agcctgcgaatccggttgtgatattaggggccaaatacctggatgcttgtttctccggctagtatagttgtagttgtgccaaaaacgagcctttgtaccatcccctaaattaattgtagttcggttaaataatagtcggtcagcatcatggaagggaagatccattcctactcctacccaaggtttggagtctttcgtccaatcttgccacaaccagcatagtctgaggacatggccaaacctattgacactaggcacccctaactcatttaaaagcatttagaccattagttgagttttagtgattaatgacaaga

SEQ ID NO: 128766 - DNA, 507 bp, Zea Mays
attggcaccaagcttgccttcgcctcagtgtaccacccacaatccaacggcgtcatggagcgcgccaacggcaagattttcacggcaatcaagaaaatgctcctcgatgacaagaagggcaaatgggtcgacctgctacctgaagcagtctaggcactgaacacgaccaagtgtcgggcgaccagattcactccctttcgcctactatacggatcggaggccatgaccccgcaggaaatcaaacatgggtccccgcggacaagtgcttcagcagtacccgacgtcgacgagccaacttccaaagacctcattgacgaagaccgtgtcttctccctgcaggccctcgacaaatatcaagcccaaatgaaggcctggcgcaactacgcagtcgtcccaagagaattcaacgaaggggacctcgtacttgtccgcacaacccagacagagtcacggggtaagctggaaccaaagtgggaaggaccatttatcgtcaagacgaagtcgtct

SEQ ID NO: 128767 - DNA, 419 bp, Zea Mays
agggagcagcatgtttcttttctctctctatttctctttttcatatcactagaaatctaaagtggcatcacttgcctatgtcatcacttgcctatgtctcttctttttttataattaattaatgtactaactcatatgtatcacagaagtaataagaataaaaaaatactttaaaattgtcattggaactggccttattaattatacaccacaagtatagcttatactacaacataaaactaacctgcggttcttcctacgtactcagctgcattcctgcaaaatctgcgtacgagaaaaggagaggttgagataatgccttttgcttgtcttcttctgccacggcatttctcatagagcatctccttttgtgacatgtatgtatagtaaaccgagctgccttctttcgtggagtcatg

SEQ ID NO: 128768 - DNA, 665 bp, Zea Mays
caattatctcgttgcacatggtctcaatcatctctagccattcgttgcaaggtttcttgatttgtttctcaaatttaaagcgataggggagccgtacaaggtcatgcttttccccccttcttttttcttcggcatcccccaaccgctggaagatggaaatgtcttgtttgccaaatattcttgtactaggtccctagtactaatttggcagctatcactctaaactcaacttcggctacctggcatggggagccaagttacatatggcacaagggcctggtcattccgaagcttagtttcatgggattcatgaccatagtcattaatttctcccttttcttctcgtctgctttcacataaaaccattcatttgtccacccggttggccatttagtgcgatagccaattactggagccttcgtatctttcctatatgcaaagttgtaacagccaaagttcttatgaagaccatctgctctggcctttgtctgatagtgcagttcatgcacccggcaaaaagctttggcattagcgtccataccctggcttcggagagcccatataaaaacactgagcctaacaatagcattgggtgtcaattgatgaaggtatatctcaaagttctttaaaacttcccctatcatgtcatttaaggggaaccgaag

SEQ ID NO: 128769 - DNA, 474 bp, Zea Mays
ggatttcagctctagtattggtttgcaagctcccatttggcggtgtttggtctctccattatcttttcaaatgttcccaggcttaaggagttcttcctagttgcttcttttggatgttgcaagcttcaccttaatgccaactctattggcttgatgttacaagcctcccttggcggcataattatcgggtttaatgtctacatgattggagagtgtgtctttagattctcgatttcctccaagttggttggattcttccttgtcaaccttcaaagtatcacatgtgccgactatctgattttattccacctttgaagtgatagaggtcctaattgggttaaagaatacataaattttcttgaagaagaatatcgttcttggtcttttgtctctagtctacatcgtcctccgccttctactaatgtacgtcatgccccttttatgagaaaagtcctacccttgattagtcctcca

SEQ ID NO: 128770 - DNA, 690 bp, Zea Mays
ccggctacaggaagcttcagcaattcagccagttcttccctggggatggcaggagcaagtcgttctgcctcaaaagtggaagatgtcccttcaccaagcttcagcactgtggccgtttcaatgtatctaggccgatgcgttaaaaccttgatcttttttcccttcggcacaacagaaatggccaaagtagcagcttttcttttctttccctgctttcacgagggatagctataatcagggtatacgaaaccaatgacgtcaaaaactctattcaaccttttctggcctcagccttcgaaggccaaggtcattgcatcatctttggcccttgtataggccctaagtaattcgtcactagttgcctcaatactgctccaccactcatcatttggctcatcaaactcgcctctatatctgaaagtatactttagatagattaggccaccctgactagacccgacagcagcttccttcggcatctcccactcattcacgagcggccatactctgtaggcgatatgctcttgaaccaagtctcttgtgccaaaaaagtacacacagtgttgaagcttctctagcatgcttctatatcattcccaagggtagtggctggcctcctgataccgaagcgagaccaaatggggcactgaataatccattttatatcttccctctcaactaagttattct

SEQ ID NO: 128771 - DNA, 594 bp, Zea Mays
agtaactagagcacaagtagactcactagagctcctaaacatactagtgaaaaagcagtaaacaccaatcacaagctcaacaagtcagcacaatatattgcaaggaagtaaattactattgagatatgcaaaccacatcatagaggatgacacaagatattttttccatggtttagtggcttgttaatcattgagtctatgttaatgtgtgagttataaggttaccattactcttgttagctcaaagcccgaaatttatggatacccatcaaggtaggacccaaattgagcactaagctttgagtcgaatgaatcaactaaacacacacaactttagattctactagagattctcttcgccttcctttaatggagatgagctaaatagtccctcacaaagccttctctaaagcaccacataatattatttcatgctttagagataaaatcaccatgccacctaggaacttacaagctctaatggtaacaagcaaccataccagtattatgacaacctagtgcgacacacaatccctcaaacaatgaaccacattagtggcacacactcaatctccaaaggttggcctcaagcaa

SEQ ID NO: 128772 - DNA, 321 bp, Zea Mays
tgtctcaactctttactctgaaccaaacaaccttatttgaggaacatttcatgtcgcctcgtcctgtctttgcaaccaaacacatccctgatctcctgatacagaattacagacttttaaatcagtgcctggacaccatagcccaacatttatagggcccattccagcccactaacgtgacacttcgacgccggctatgcttgcctggtttgtagtgcgacttgctgtgactttatttcggctgggactgcgacttcgactgctgcagctgcggttgcttgttgactgcgatcgggaggggaaaagaaaaggatagccgtt

SEQ ID NO: 128773 - DNA, 506 bp, Zea Mays
ataaaattcagctcctaattacttcaaaaattgccgcgttctagagacttcaaccagtctaacactttatcatctgttagagttaaatcaatcaaattaggaccaataagtagacttactagttttatacaagttatttcgcgcgttagaattaccgtacacaatcaacaaaattcaccacaataatcaaacccggtataaatgtgtatatcgattgcgcccttcacacactaatttgcatttttacttagacatcacatgaacaccactaattttacccgcgaccataaccatacgcatttggactacaacaagcaatttatcgcgattacgtgcttaaccagaccatctgtcaggtcggctaactggagcaacgacatagcccgctaaataacatacacgtcggtttgcctgtcactacatacattacaacatctttataaacacacatattcacaagtattttcgcacattgaccaatctatatgaatcgtaaaccactgatc

SEQ ID NO: 128774 - DNA, 599 bp, Zea Mays
caaacgaaacaatgtcaccaaagtgtatataatcggcaatcattctagcatcagcccaaaatatatttgcaatcttctcttcagcatccatttgtgtcgcatattggaacgtcggattctctgccattttatcctggaaatatttgagcatgcttccagcttgaccatataccatctctcgttgtcgcttgccacacaaatagtttttatggtcacgaatggtgtaactcaaattaagcggcccacccacttggcgacatgctaattcatgtgatgcttttggtcctattcccgagtcatcagctgtttcaatttcaaaagcttgcaaatctgtttcctttgtgacaccatcaagtggaatgtttctggcaagtgaaggttatggttgtgttctaaattcaaatcataaactttgtatccaccaaactctttatcttttacaagtcccatacgcacttcacaatctgttctagtttcagctcgatgacactttacttcatacccctttttatctttccctcgatgaccttgattagcacaaacaaatctacatgacgtgacatttccatcaatcttacttgtatttgagtacctttttc

SEQ ID NO: 128775 - DNA, 702 bp, Zea Mays
gatgctggcggtggagcgattgatagggaagatggagaagctagagtatgcgcatcaacagctctcaggacaggttggtttagctacagagatggcaaggcaggctggtgacgaacgagctatgatcaagcatcagtgggaggaaacagggaggagtttggcttgtctgcgccttgagatgacggacatgaaatagtttctaaggaggctaaagcaacggggtgaagaggaggcactcaacctagtggcagtagtaacataagtaatgaagttcctagaggaggccaggagcgatcaacgtttgatagagatcaactacaacaacatataccaaaattggtgtccccaaagttcaatggagtggatcttgctatctggaaaaccaagtgtgaagattacttcaacatgtaccaggtttcagatgttatgaaggtgactgcagtctctatgaatatggaagaaaacgttgctcaatggttgcaggtttacaggttgaagaatgggttaggagattgggcaagtctgtcctcagccatattggctaagtttggtactgatgaatatccgagggtaatgagaaggctgatgagtttgatgtagaaagggggagtagaggagtatgtgtaataatttgaaaaggttaggtatgcaatcgcggttcataatccaatgctggatgagatttttttgtgacccattgtt

SEQ ID NO: 128776 - DNA, 1010 bp, Zea Mays
gtgagtcactgcaacttgggccccactggtcaccccgtccaacgcgacggtaacaacccaggcgacttgcgcggcgagattcgctccccctcggcgcgagctggcgtcccgcgtgtccgcgtctctagggataaaaacggatctccctccgacgaccctctcctcgtacaccactattcgcgccccatcccaccattggtacttccgcgcctggccatcgtccacacctccgggaagaaaaccgagagccgtgtgccgccgcgagtgaccatctgcataccgtcgacccggtcctcggtggagtgaccctgggatccatcttgtcggagggaaggtgtccatggcggcactgctcgggaacccaggaccagcgcggcggaattgctcgccgttgctcaggcttcgtggcggagaggcgtcatcacgtggagcggagcccctacgctgccatccttcggtaaaaagcatctccgaagctccgccttcatctctagattgcgtagccgtggtcaatttggaagtcggggcaccggggtgccaggtactcttcgcgccggcgaggtccggccgctggggttcgtagcgccgccgtagcttgtggtcgggggatagggtcgagttcatgaccactgattcccgaatgggcggtcgggattagatcttgaagccgattcagtaaattagattcagacggttggaccgcgatccagtggctggcatctgataccggttcacataaggttaaaacctaagttgcaccgttagatttagatcgggcggctctcgcgccgcgataccccttcgcgagctcgttttgcacaagacaccctagctttaactacaatcaacccgcgctccacttgcactgtttgttgtgcctggggatttttacacctgggcccctgacttctctggaaatcgaggcccagtccagaggagattaaaaacagagaaataatattagaaattcgtttttaatacaaaaacaaatctagaaacttgtaaaattc

SEQ ID NO: 128777 - DNA, 284 bp, Zea Mays
gcgcatgtgaggaagcacctcagctgtgggggcggcacttgaagattgggttcaattcaagatatcagacagttcctcgacagctttaccgtctcttcaattcgcggtacagacgtacagtacagtctacctgatcaagcctgtccagcggcccagacaagttgctcgacagctttatcggctcatcaattcagtgcctgcagctggatcggtagcacgtcatgtgagctctatttcgcagcatggcattgccatcttcatctgatcgagacactcggccaaga

SEQ ID NO: 128778 - DNA, 543 bp, Zea Mays
tcttgctttctctcgtcatccgccacctcatcgggagcatatcttgatagctgaatgaatctgtcacggtactcgctgactgacatgttgccttgcttcaatgatagaaattccttctttttaatcttcatcagtccagcaggaatgtggtagtttttgaactatgtggtgaattccgcccaagtgatagtgtcagtagcgtcatgggcaacaacataagaatcccaccaatcagcagtaggaccagtcagatgactagaagcatagagaaccttctcccggttagagcattgggcaatatttagcatcttctctattgacttcaaccaatcattagcatgtaatagatctggtgagctggcgaaggcaggcggcttgtggctcatcaattctcggtgcttgtcctgaggtggaagtggtggtggaggtggtggcaatggagcttgctgttgtcgccccatcctctcctaacgcatatccttctgcatatcttgcctttcctggtgcatctcttggcgttcctgccgcatctgcgcatacatc

SEQ ID NO: 128779 - DNA, 556 bp, Zea Mays
cgaggccatgaccgagcctgctctagggcatgcagtcatgcagggaacagttaaaggagtggcctcctatgggattcgtggggagttgttgccggggcagttggttgaagccaggctcaggcgagacgaagttttctctgaggctgaggctgaatgcaggcgaggcggagtttcctcccgagggtgagaccatgcccttacgtacacatgccccgtttggagttgtctgagtttagtagaggacgtggaggagcagtggccgttattctcgggcatgcgtcatcgtagttggtgaaagcagaggggaccgcggtcctgtcactcctgtttgactgcggcgtcacgtggggtaggtattcacattgaatgctcatgtcttcgtggttcccgtgacctttgactgagggcggactcagggttgtcctcctgtccaagatgagctcaggcaagacggaaacaaccattccgtgaagaggggacctcgggcgggacgaggatttcctagagtgcaggctgagacgaggtgaagttttgagcgaccgccgagtggggtttc

SEQ ID NO: 128780 - DNA, 440 bp, Zea Mays
tggaaagcaaggaaatcaagtggttgattgcctgatggatgtatcatgggcattttgttggtccagtcttagttggcccccctgtgtgtgccagttcgtgggtcgcctctgctacgcatttttccagggggaccatctcttatatctgctgcatcctcatcttggtagctttcaatctcgtgatggttacttctagtgccccaccatcatggcatttccatgtgtattctttctttggtagccccatgttttgcatccatgcagcgattctgcaatgaaactgctaggttgaacatcaaaaggtaaaagttgaagatttctatgaatatcttacatggatgacgtgattaaactgtactttgtagttgggaccctttgatatatttttttcttttcctcggtatgtgttaagtaggttgggtctactttatcattatggc

SEQ ID NO: 128781 - DNA, 576 bp, Zea Mays
cctcgactagttcttaactacaggagctacagcagcctcttcttttgtacttgttctgctgtctcctctattcacctagttttctctgtattacctctcaggcgattaatctaaattccatggcaaccccttccttccctgtgctgttcactagatgcctatcctgatttgatgagatcttccatatactcacatccttgtttgttctctcctttcttagcttagcttgtgccatctttttataccccatcaattcttaccaacacaacttccaaggcgatttcaatatcaggatttggaatttctggcatatttgcttttgtttgtaaattagatgtacactgttgctgtcaactatactaaaaactttgtatgccattgtgagtttgtgacatctattaacattaaaatattctgcataaaaacatttgcccttttgtttatgatggcaccatcaaacatgggaagcacttctaattatccaggagttttgatacaacacagcacatattccacatgcaattcatgatcttatgttttatacgtgtacctgaaagaatataatcatcttattgt

SEQ ID NO: 128782 - DNA, 1229 bp, Zea Mays
cattagtggacaagatgaaaaggacgctcagacgctgactcactagaatgataaggaaggtgaatctgcttgcccagttgaaaaccctaacactgagctaaggactcatgacttgaaaccgaacctaggagaccacaatgaatcaagtagacagatgagtgccacaaagatgacctagacaatgatgctactgagcaaaagacgacgtggacaaagcagctaatgcagagctgatagagctggcaagtgcagcagaaggaaaagatgaagccagtcaagatcccaaaggtgctgagagtcagtacccaacccagcgacccgtggaacgatcctgaacataacagaaatcatgattaagaataacacgacattcatgatcagtaagctgatcgatagaaaaactctacatgtccatcctgtccgcaatgatcacaatgaaaaccactaccctttccatgtgcagaaggagaagatgccgatgacatctacaacgacgggggagcaatatactaggaaggcgaagatgaagaccgagcatccaaaatgaaatcgaagaagacaataaactagctgaacaaagacgagtctcattgctaacatcagcaagagcatccaccagattcacacaagggtgacgaatgatgtctgggaaggtgaagacagagaccaagtagccaaaacgaaaccgaagaagacaataaaccacctgtacgaagatgagtctcgttgcgaacatcgacaagggcatccaccagagatacaaaagggcgacgagcaagtaactgggcatgaagaggctcaaactcatcacacaaacaggtcaagaagtcatttgtgcgaagaaactcatggtcactcttctgacggagacaaaactcacatgtgctaggagacactagtacaatgcctgtgcgttgccgtatctcaaattctttgcaaacaaccaatacaaaactgaactcaattcggaatccagagcgctgcctcctcaacataaatatctcaaattctttgcaaacaaccaatacaaaacaccactcaactcgagatctagagcgcctcctctccctcggttgttcagtcacgcatcggcggcgatgacgctttgccgtcctctcccttggttgttcctaccctgttgcctctagaagcgcatggcgacgaagagtcacgtcaatggtttgatacgcttgtcgatggggaaggtaaaggcggcgccacgagtgggg

SEQ ID NO: 128783 - DNA, 478 bp, Zea Mays
cacgtcctcctgttctttggtgtgataatttgggagccacatacttaagcgccaatcctgtttttcatggtcgaataaagcatgttgaggtggattttcattttgttagggagaaagtggctcttggagcattgcaggtccggcttatatcatctggagatcagatcgctgatatatttactaagcctgcaaccaaacagatgttggagcgcagtcgtttcaatcttaaccttgtgtccaccggttaagattgcagggggatgttagcattctgttgtatagcgtagccaaggttgttagcatctatgctagattaactcctagattagctcctagacggttttagttttgtatctatcctgtgcacatgctatctatataaagaaacaaagcaagcaccgaggtgctgtgccaccaattatattcttcctattgcattgttcaactgacttgtccgcctcccaaccactgatccaat

SEQ ID NO: 128784 - DNA, 494 bp, Zea Mays
ctccgtatattattattttcccttataattgcttctttgttgcatggacatgtagacttgtagagcacctatcaacctccagatggcctagttatagttgggcctgtacgatctttgtggatgatatctatggtcagtttttcatatgcatatattctccaaagatcaagagtgtatgtttaaagctccaagaggtagcctcccctgcatggcgccttgccggggcttggccaaagcttcacgatgtgtcatttcatgttcaacgatacttctctgagtggtgagcacgtagacgtagaaagattctttggatcaacatcacaatgcagcagtacgaaacctggggaggtagagtcaggtcgttagaagtctttttttcttctctttatttgcttttccttgacagcagttgaggtatggagcacttcactcttcacctttgattgaaaactattctgtggacttgttccataagaccctacctggttcatgtt

SEQ ID NO: 128785 - DNA, 571 bp, Zea Mays
ctgcccaccgctcaagcacgctataaattgaatgcaccctcggctccgctaggtagtcaagcacctaatccagcaactcgtgcctcaaatcatccaccagagctcgccaattcgagatttcccccaaatcggtttccgccaccgtgaaagagccctcgccgtggttaacgtgtttcaggtccgttcatgttctctggtttctcattttagtatccttaggtgctcttgatactctccgacccatccaattgagctagaatccattggatcatcggaaacatctcggtcggtccattcctcgcgttgtatccgtgaacagagttatgtagagctcgaatccagcaattaagtgaggggaaatagttgcgtagggtgaattcggtgtccagaaaaggggagggctagccgttgcgtagtttggctagtataggttcgccggagttcggtctggcgctgctcgccgtcgtggacctggcgttgttgagaaaacaaaagtccggggggatttttgtaactgttagtgagatatgggaatagcgccgcgaccccttttccagttattcaaatcagc

SEQ ID NO: 128786 - DNA, 494 bp, Zea Mays
aagcacaacgaatgtgatccctcgcgcgtgagcgaaccaccgatattcccccacgcctcagcacgacgacacctacacgacggtctcctcatcctccccacagtggtattagaatggcacgacaatgcctgggccgtgtggctcgacgtctatatatccggtgtaggtggtgggtccagtttgttgggatccaatcgctaggctggattcttgttgggatatgcacaatttgttgcaccaattggaggtttgttacggtcgtaatcggcacaagcgctcgtggctaggtgaagaagatgactgatgaggggccccacgcgtcggtgacagtggtcatcatcgtgagctgcgcgcggtaaaggaagaggttgggccggcattgggaatgggccgagtgggatggttttggcccaagtaaaggtgaggctttccttttcctttctctagttcttttaaattctagatcattttgaattgcaaactcaagctcaaat

SEQ ID NO: 128787 - DNA, 645 bp, Zea Mays
cacaacggtgccccatatggtgcatgtcaaatcgcggtaggcttctctctctccctccagatgaagttgggctctaccaagcggtcgccaacttcgctctgtctcccgcgttcatgtcgaggttggcaacgaatgtattcgggcaacgctcgaggcgacgatagtctcccccaccgctcggaccttccaaggagttcctggagcatagtgtcttcatcccacatcactattgtcatcctagatcctcactagcttccgcttcttccctcagtcaccctcggcacgtaatgacggcgacgctgatacttgggcgctcagcaatggcagggcagtcctagactccacgtatgcctcagtggctctcccacacttgtcttgccaaccgcctcacgcctttgcctctggtcatccgcacatcggccgacgactctacgtgtcgtcctcctgctcccctcctcccactggtggaccatcaaccgcgcccggctctagcgtctgcactatgcgccacatgcaatcgttgggtagcagaagctagcagcccgctttgaatgacctagatcatatgaagaagatgccccagatgctactcgactacaaggtttatgtttctcaggtgactaaatacatgatgtgctgatgtta

SEQ ID NO: 128788 - DNA, 302 bp, Zea Mays
aaagaaaccaagaagatggcccgtttcttgaagggaatgagaccagaactcaagactatcctcgctagccaagattttctcagcttctcgcacctctcaaacaaggccatacaagtggaaagggctagagaagaagaaaagggtcacctcaagaggaagttccaagtcctccgagctcagcagcaggacagacaccagagagttcaatcttttgggtttcctcccaagggaccaagcttcaacaagctagcagggtacactccgtcacgtttcagccagcagggtcaaagttccctccatgc

SEQ ID NO: 128789 - DNA, 336 bp, Zea Mays
cccctctagcaaatgggccccacccgtcaaccctttctcctcgcccgtgacctcactgacgcaatccccaccgaccgccaccctccgtctctctccaccattactcctgctcctgtggagttaggcaccgcttcacccccctgtgcactatgctcgcaccctcacacggcagcccgccctgagccgtctcatccccggcgctgtgcgccatcatcgtcgccgttgtgcacctcgccggcgccagctggttttcggttgtttccctccccgggcgcttataaaagggaccgcccgagctccacctctcctcgcaccggtctcggccacttcccctcc

SEQ ID NO: 128790 - DNA, 514 bp, Zea Mays
ggggatcaacaaattcaatctaatttgcaaagaaaggctatgactaagttgatggggcttcaatttcaaattgtgtataagggtacagaaaatgtggttgcagatgctttatcaaggatggggcacttgatggttatttatgtagtctctaaggttagacatgtttggattcataaggtcttaaattcttatttcactgatctagaggcttagaagttgttgactcaactaatcatcaagaatctagatgaaaatgggttttggctgcaacatgaaatttttaggaaggacagatctgaattggttcaaattctgccttgagcaccaagttgcttgcggctctacaggatagtgctttaaggggtcattcaggcttccatgccacttatcacagagtaaaaagggtgttttggtagaaagggttgaatgttgatgttgaacactttattaagcaatgtccaacatgtcaacaagctaagagtgagagagtgcatcttgtaggtctcctccaacc

SEQ ID NO: 128791 - DNA, 1161 bp, Zea Mays
atgtacggatcctggccatcctgtgacaataaatgtgaacctcatatcgaagtcacaaacgaccattacattctgtgatgtgtaaccgtgccgtccaatatatttggcttgctccgaggccgggactgccgctggaaagtgactaccatcaattgctcctatgcaatccttgaagtgtggccaaaatctcgcctctcgcaaacgaggatgaatctcgatgaaatatgggtctttgggcttaattatgtcagatgacatcttaaacagtgcaccgacctctcaactatttttcttggtgccccagtttacacaggaagggtcattctgctaactgcccaataattaaccgaaatgtcattttatgaacattggtagagcatatccatgagttcccaaaaatcatccccccacaaaacaattgatgtagcagttgacccctaccattgagattacttctcatatcctaaccgtggactcattgtttaggtgtagtgagtttatgaactaaaacaaggccatcggcccacgttcttggaactcttaaactgcatcaatgctgacaaataagtaaaccacaaattgatattcacgttaccttagcttcagtggaggttggtaccgaagtcctagaatcctagttgatggggtaatctgtatgagaaatagggacaataaattcgttagtatctccatcgaaacccgatgtgatgtacgcaatagactccacattacgacttatgcgaagaggatgaaccgtaaacactacggggaacggggtctagggaaaacacacggaaagcggcgccggctgcagaaggatccggaaggaggcgagcctacctgctcagacgacgacgtgacggggagaaggcttgaggacggagcagcaacggcggcattcgtgcggcaaccctagggaaacagaaacgctcaagggtgcgacaaccagacgggaacgagacgcggcgggggaggagaatactcggatggaggagatcgaggaggtgttcgcccgtacctgagaagccgccggtgtggggaggagagggagcgacggtgtggggaggagcgggagcgatggtggctcgttgggagcgcgacaaccctagcgcctttttctagcgttgcgtagaagccaactgatggccgcttcgcgggcgc

SEQ ID NO: 128792 - DNA, 861 bp, Zea Mays
tgaaaaatatgccggtgcaactacatcctatggagtagacaccaactggtacatggactctggcgccacagacagcattactagcaacctggagaaactgtcagttcatgacaggtacaagggccatgatcagatacacacggcgagtgggccaggtatggaaattagttgcattggtcgttctattgttacaacccctagtcgtgatattcatctaaaaaatgtcctctatgttcctaaagccaacaaaaatcttgtctctgttcatcgcctcacctctgacaattcagcttttatagaatttcaccatgatttctttttaattaaggatcaggcaacgaagaaacttctgcttagaggacggtgtgatcatgggctctatcctcttcctgctgggtgccaaataaagcaagcctatagtgctgcaaaagtttcctttgatagatggcatcatcgtttaggtcatccggccactccgatcgtggagaaagtcattagacaatttaatcttcctgttttgttggatttaaacaaacattcggtgtgtgatgcatgtcagaaggctaaaagccatcagttgccttttcctaattatagtactgtttcacagcatcctttagaacttatttattctgatgtgtgggggccagcgccaaactctattggtggacacaaatactatgtgagtttcattgatgattatagtaagttcacctggatatatctccttaagtttaaatctgaagtcttttcaaggtttcgagaatttcaatcccttgttgagcgcctctttaaccgaaaaatcatcactatgcaggcagattgggggggtgagtatcagaaactccatcctttctttgc

SEQ ID NO: 128793 - DNA, 898 bp, Zea Mays
atcccagacaccgaatacaccactgtttcccatttatagcgatcgtttcttaggcgagtgccaaaaatttgttttcttcgtaaaatttcagaccaagctcacacttcactcatatatatctatctgtgaagtatcgactcaatcccacgacttttcatgcctcttttcaaatttcaaacctcctatggcacaattcgtcgttatcgagtcatttgacccccgtttctccaaatcgcccagtttttgtgtcttcactccatgtgtatgtatttattcacatttcatatacttatgactatatgactaatacgtgctcacctcttttgtcatttcagtgatctcgcctgcccgtgttcccgtctcctgttctgcctagatcttctctctctcgtgtgatttccaggtagctatcacttcatttaagattctatcggctgctctctcgcatgcttagcttttcactctatcgtgcagccgccaggtcaggatggtgcggatgaagaatgtctcatcgtcagggggaggagacgatgaggaccctcctcgccccttcaggtaggtcaaggggaagacagtttaccttgagcagtaggagggcaggaagaagtgatgtttggacagagccgctcgggtagcacttgcagtggtagcagcattagagcaggctgaacagggaggatatatgcagatctcctcagatcagatagcctatcgggttcgtcgcctcgcatctcggcctcgctccactactccctccacaccttccaccactgtctctactccacctcccacttcactagctcctgtcgctctagagccatccaccacttccgctgtacccaccacctccaccactccaacttccactgctcccctcccgctcccatttcctctccgc

SEQ ID NO: 128794 - DNA, 508 bp, Zea Mays
tttacattgtgtataggattgttatcgtgtttgaatcataagataatacgactgctactctgttttggatcctcaggatcgactccgtgatctatggcattgaggttatatggctcaacatcatagatcatcgcatcgagatatcacattactagtggtatggatatcactatagtcctgaatagcaatatctcggcgtcgtaggttgtgatgccatagtactgtttaaacggtcacaaccaatgctctattcgagaccgatctcatttgtttctcatatctctcttcccaatcatttcgatcttctccaatctattgattcacccatataatcaccttgtttgggaccccaaaagtgagatacaatgttcctgagaaacttgatagtagagtgattgtcagtcttggtgacagccgctgccctcagccactttgtgaatttatcaatggctactaaaggtactcagccaccaacagtctaggggaagggctaagatgtccatggtcc

SEQ ID NO: 128795 - DNA, 736 bp, Zea Mays
cctggtttagtgacaacaatagagatttcagggattttttttggaggttactcgtccattatgtcatcaatcttgtcccccttagtcctttacgcttgtgaagtttggaggaaagtagctgctttttcgcccgcccgctcaactcaatcccgtgccggccgttcacgggactggacacggttggtcacctctccggtctccattgtgtggtggtgggctaatcgttggccacagctctccttcattcacctgcagtgtgggctaatcgatcatgcatatagcatgcccaatctacacaagacaaacaggttgatattaatttattgctgatcgctttgatagataacaagttgacatggaggcgtagacgctcaggctcagcgtcggcgagctcagcatccgacaaggacgccaccgtcgccatcggatggggtcggcgcctcccgcccggaggccggactactacacatacacatgcacttgtgtacaacaacttgcagtgcagtgcagtactacagagggaatcctcgtcctccacacgcggtttcatgttccacgacggccggcgacgccacctgacaccaaccctctgagatctgtggctgcttgcctcttccttggattggatcattgattaagtagtataccagtggcattaggattttgtggtgcgtgcaagaacacaggtgctaccttccgccgccatgatcgggatggcgagatgcggactgcatgc

SEQ ID NO: 128796 - DNA, 1146 bp, Zea Mays
gtggccgactccttccctttttatgtctctccctctctcctcttcccttctcagactcattttccagccgccgccaccctcttgttctcctctctctcaccttcacactcctcgtcaaaaactttctcgagccctcactcttttggaagagtggttggagatccgttcttcccggcgtgtttccaccatcttcctccatctcattgggagatcttgaccaaatcttcggatcgaggtattgctctatattatttccttgtactcgatcctacgcgttcttgattatcatatgtatcattcattgggtacattttagtttaagtgattgcaacacttagattatcttcattttgtcacaaacattgttagggattagcgatttgatattgttcgttgtagttgaaccgctcatatgaacggttgaagtgcatgctcaatatcttatgcgtttcttctcaaacgtgtttgatccttgctcatcataggttctatttcttatttcttatttcttagaatggtgcgtcgaatgaacccgtcggtggtcgaatccgactcctcggatgaccaggaaatccacggagataccccacctcgctctcgatccaagcgagggcgcggaagcggcaatgtcatgccgggtgctgaggcctccgggtctcaaagtgctcgcggtcgaacatcccggaatccttccggacggtctcgacctgcgacgaatctgcaggcgtgggagcctacaagtgatgatgatggcgggaaggacgatgaagtcgatcttcccccggcccacgctcctgtgattcgcggcttggtcctccaccgggcagaggctcggcgtgctggcaatgagccagtcactgactttactgccagtggaggctctgctcttctccaggatcttcgtttccaaaatcctgtattgcgtattcgcgatgccaggatcgatggaaatcgcttttggactcttcaccacgtggatttctataattccgtcattctacccaagaagcatcaacccatcctgcatcaacgatatattaactgggaaggttgtgaagcgattggggacccagaaatgtcacaggcactgagggcctgtgaaaggaaacaaatgaagaatatcatgacattccaatatgattggaa

SEQ ID NO: 128797 - DNA, 676 bp, Zea Mays
agaaggtcctcatcacgtcttcctcgaacgaggagtccctagggggctcatcacccgcagaaaaaacagatgccgaagatgtacgatgatgaagaggaggtggagggtggtgatggtaaccagagccggatggccgcgggtcaccaggaatgggtctcggacccgggtagggaggaggaggatagtgactagagccggatggcctagggtcaccgggagtggatccctgacccgagtagggaggcggagggtgagaggatgattgacccggatccccatggtagggaggcggggcaaactgctcgcgatcatcaacgtaggcttcttcttcttcttcttcgtcgtctactgacataaatggcacctcgtaggcctgccggtgccactcattgatcttcaggggaggaggatggagaggcacgtcaggcgagcgaggggcaaagggcatacccatagtggaagcttgacgacgaagattgtcgtcagtctcccactgacgccttgccagctcatgtacatcagcagaaatgtttcggcacatagaaaaaatgccgcaatcccatggaccaagcgagcacccatccctcggccacgacctcgaccacgaccacgaccacgtggcatgggagatccgccgccaggagagggacgcgaggcagcggcggcgcgagaggag

SEQ ID NO: 128798 - DNA, 284 bp, Zea Mays
caacacttagttgagcttgctgcgctcgccaaaacacaattcagctctcccataaaatgttttcaggctgacaacggggctgaattcatcaacactgccaccaccaaattcttcgctgctcaaggcactcacctccgctcctcctgtccctacacatcaccccaaaatagcaaagccgaacgcatcatccgcacactcaacaattccattcgcaccatgcttctccatgcctccctatcccccgcatattcggccgagggactcctgacggcctgctaccttca

SEQ ID NO: 128799 - DNA, 583 bp, Zea Mays
ccctgaccctagtgatctacggacgcgttccttgactcctggcgacacgccctgtgccagctgcagagcccctgcctaccgcaagggtcgaaatcaacaccggcgacgattctcaccgagggtcactctcctcacggatttcttgcaggatggtggcgcaaggcattggtgtgcgtggccgaggcttcccctccctatttgtatgcatggagccacgactacaagggccagctgatgccagggagtctggaggagcagttgcggtcacgatgatttcaggaaaacggagacaagcttcaagcggaactcgcgcgcggcatgcacaatgactaatgggcgccactggtcagtcgtgggacgtgcgtccacgcgcatagggaataaccccgaccaccgggccccacacattagtgagcggaagaaggagcgccaggcaggtgggaccgaagtgtcagcgcacaagtgtgggtgaggagcagtcgctgatggcgcatccccacgtgtcggcacgcgaatccctcagttgggctgcgcggaggaaaggagagaatgggccgcaaccaaggattggacccatgcgtgg

SEQ ID NO: 128800 - DNA, 336 bp, Zea Mays
ttccacatgtcgcctccgattctcgtcgaaaccgtgctccatattttaaggacaaacccacaaaaccataccaaactaccacatatagtgtactccatatacaacccatatgttctagacacgttccaccagccctcaattgtgtcgacgacatgatttgctctgctatgtccttgtgggggtcggtatccataggtgttagccattgcaggtagtcgcccgacttctacagtggtttgatcaagcctcgacgctcctccttcaccgctctcgatttattggcacaaacccgcatgatctttactttcgtcgtcgaccactgcctttgaactacac

SEQ ID NO: 128801 - DNA, 628 bp, Zea Mays
tgagcgaagctggagggaatccctaatcacccgtgcacgcaggaggaagttacaaccaaaaacctaacaccgaagccctaatctctggttgtgtttgatggaatcagaatgagatgcaaaaggcaaaacctaacacggagaacacatagccagagaagtctttgtacctacatggatcatcggcacgttgaggattgggtgcactggagatggtagcacacgtcggaaacaccacacggcggccgtaagtaacagtgtggttgctgatggggaatgcgacactccctttcccctgtcgagggcacgatttgttactagaagaatcacatggtgtagtgaagagcgtaaacacgtggagaaggatggacaatgaggcacgcaccagaaacaggatcgtcgtcgctagcgtacggagcagacacatgcggggaaggaggaggagcgatgtgcagtatgttcgctacccacatctccacccatagagaagccagtgggccaccattttccttttgactaggtgaacctggcagcattatctagaagcatcccgtggtgtggggattctcatgctcaagtgttgcatcgtggacgtgcacggcgaatcggacgacagagagaaattttagag

SEQ ID NO: 128802 - DNA, 367 bp, Zea Mays
atttcacttttatgaaaattgattttgagaccagacatctgttcaaataaacagagaatgaacttaagatttctggctccctccagatcatctttgagcaaaaaaatggtatcatcagcatactgcaagcaacaacagccattaggaattatatgtggaatgagcccactgataataccttcatatttagccttttgaaccatacaaacaagcccatcggcagcaatattaaaaagcaagggggagaaagggtcaccttgtctaactcctttgtgagtggtaaaatagggacccactctatcattggtcttgatggccactttaccacccctaacagttctcataacccaatcacaccatttgtcac

SEQ ID NO: 128803 - DNA, 1030 bp, Zea Mays
attcggtttgccttctaaaaccgggtgtgacacccacacatcagcgctcctcttccacctccgtagcggacgccggacttaacggaagctcgcgccgagtcgtaggaccgttgggaccgatttcgtgctttcctgcgcataaagcctctactgtggccctaaccttcgccgccatagcttagaaaccatcacggcagccgccgagagaaagagagaacaaacgcctgggcgctcccatcgcgtggatcaaccttcggaccgtgagcgtcggtcccatcttcaccccctccgcgacggtatgttccgtgcccctcctctgtagcgtgataggaagcgcgagacgtcttagcctaggcactggcgtggatgcggtggggcaatgctccaggcgctgtcgaggggatgacttgccactggatggcacgtagtctcgagcagtccgtagatgaaggcttggcgccgagctagacgggtagtgggaggcgaagaacattccgcgccgtataacggggactcgaacggcggactcgggtcgtcgctgccggatccttggcgcttggtcgcggcgaagtggactggagagagaaaagagagaagggagagaacccggtgatgaagaagacgcccgacatcacttgatcatgccttggacggtaaggattaaagggatagggatgaagaaaccgggaccgtaggatggtgagtggagggggtagatttatctcgcgtactcgccgttcaccactaatcgcacggctttgattagaagcaggaaataccccttcatcccaaccgttatccaccatagaccggcaatctgacgactaaagcgaaatagtggggatcgtgcgctgtgagccgtcgatctcagatccgacgatgactcgggaatcaggatttatacccatcgccggtctaatctggacgctcggggttggatcggacggtccaaacatcactgtacctcttcggccaggcactttttcataagagagcctctgtttatttgaaaacaacccgccatcctcgg

SEQ ID NO: 128804 - DNA, 376 bp, Zea Mays
cgcctaagggtgcagccggactagcacaacaagtgcgaaaaaacacgaagtctatcatgaagactatccgcgcagaagtcgcccaagggtgcagccggactagcacaacaagtgcggaaaaaccagagtctatcgcgaagcctccacgcagaagtcgcccaagggtgcagccggaccagcacaacaaatgcgcaaaaaccaaagtctgccacgaagactatccgctcggaagtcgcctaacaaaggcagaaacgacaacatcaaaccgtccgcgccaagaccaactataatcacatcagcgcaacagaacaaaccaaagtacacaacgccttcgcacacatatacaagcgagggcacacaacttcatcatacaagc

SEQ ID NO: 128805 - DNA, 344 bp, Zea Mays
gagccaacaggatgatacttgatgcactcaggaaaaaggtgttcgataagagcgaaaagtgtgcaggaaagtggatcaaagaactatcatatgtagtttggagcctgcgaacccaaccaagccaagccatgcatggaaacaccccgttcttcatggtatacggatcagtgttgccagtggattgatctttggggcacccaggctaacatttgaaagtatagctgaagcagaagcaaccagactggaagatgtcgatatattagaagaagaacgtctgaacgttgtcatttaatcggctaggtaccagcaaactctgaggctctaccatgacaaagcagtgtggc

SEQ ID NO: 128806 - DNA, 343 bp, Zea Mays
ttgcaatgttgcatgccctgccatctaccgagttgtactagaatcagatgctttcaatgtgtcacacactgctgccgcatagctgctgaagggcagcaagtacgagcagtgctgaatttggggcggtgaaacaagcagatggctaggcagctgactgcgcttctgagcagagagaagtcccttcttcaccttcctcttctgtagcctgtaactaggagaactgaattcggtgcttgcattgcactgcatgaattggattggatccctggtatggtagcggcaatgttgttgatgctgccgtttcattcaccaaatgtaatgtaaataataatggtaagaagtt

SEQ ID NO: 128807 - DNA, 531 bp, Zea Mays
gggcttgtctgtatgtgccttggtcatctgggttcttctggccttgctctttaaggatggcagcataggtggcaaagagctctggatcatcattgtcatctttgtgccacatcgacccctggcctccgtagcctaggtcttggtgtggctcgtcgcattgcaggtcctatagaggatcaatgcacttaggcctagggttgataggtcatgagtgggtcgcaggtctagggcccttaggtcatgagtggaaggaggaccaactctcgcatagtggctcgatgccaggcgcagttaatgcggtcggccacttacaacgggtcagtcctaggttaggcgcggaatccactcaaatggcttcctcctgattcaccttacccccttctggccttgcctcgctcgagcccgagcttggtgcctaggaccatccaggggcaggtgcttctagggtggacctttctcgtgtccttctattgattagtgggccccagagaccttttcctcgacacataccaaaacataccaggagcatca

SEQ ID NO: 128808 - DNA, 400 bp, Zea Mays
gcagcgtattagtgatcagtcaggatggtgaggaccaagaatgtcaccccagtagggggagacgatgattaggaccctcctcgcccattcagatagcataagggcaaggatgtataccttgagcagcaggcaggaaagatgaaaaggaagttggatagagctactcgagcagcagtagcagcaccagctgagagagcagagcaaggtgggcgttgaggattggctcagatcagatcgcctttcgtgtcagtcacctctcgtatcgaactctcttcactctagctcggttcgacccctctactcccgccaccactaccagtctaccactccaccttcctccaccacaccagcttctgccgctccaatgccttccaccacactcgctacgcctacagcctcc

SEQ ID NO: 128809 - DNA, 388 bp, Zea Mays
caagaaaacaaatgaatcgcaaagctgacacccgaaagctcaaaattgctcaaaacaatgactcctcaacttgtttccgaaagcccaaatcaaaactccaaaagacaaaattggtccaaacataccggcgacaacatgattcactctatcatgccctcgcacatatcggtgtccacgtatgtcatccaccacagttagtcacttgacttctccattctctcaattaaatcctagcgctcatccttcgccgccctcaatccataggcacgaacccgcgtgacattcacctttgacattaaccaccgaattcggatttcacatatgcacatcacaagctaagagacatgttgtacacatccatgtcccgactagtccacaaacccaaaac

SEQ ID NO: 128810 - DNA, 398 bp, Zea Mays
cccgttggaatcccttgatatcccttattggtcctatgttcgtggttgccaagaccttttctaggttggcttcgattccacgttccaacatgatgaaccccagaagcatgccttggaggaccctgaagacacacttctcgggattaagcctaacgctcttggcctggaggcaagagaaagcagttttgaggtcagagatgaggtcgcaggccttccttgtcttgaatacaatatcaccgacgtaagcttcgatcgtcgcaccaatgtggtcaccgaacacatggttcgtgcaacgctgatatgtagccctagtgttacgcaacccgaagggcatggtcatgtaacaatacatgccctaaggggtgatgaaagatgtcgcgagctggtcggtctctttc

SEQ ID NO: 128811 - DNA, 498 bp, Zea Mays
tagggtctccaactatgatgggtgttttgatgacttgtcttgatgaacaagatgaagagatggtattgtttatttgttgctttaatgacttgcattgaagaccctgactcgagctgttgaggattgtttttattattttgcaggatgaacatgaatcaacaattgttgattaaccatttgagatgaacctgcttgttggacctagatgcttgctgctacaaactgcttgctgtctgttgggtgctgctagcctgctacaaactgtttgctatagactgtcatgtactcatgttgtgagagacatatatgtatgttgtatgaagtatgaaaatgactaaatgtaatatgtatgctgctacaaactgcttgatgctacaaactgtttgctattgactgtcatgttggccttgtttacttgctattgactaaatgtaatatgtatgttgtagcctttcatcatttcatgccctcttttttctgatgaagtatgaatgtatg

SEQ ID NO: 128812 - DNA, 321 bp, Zea Mays
ggatcgatagagacatgttgtgttgtttgatctcatcggaagatgctttaacttcctctcctagggtcattttgcctttcggtgcctgaagaagactagatgcttccgctaccatggcccaggacatctctcctataattatgtgaagactaaagatttagtatggcagagaatcactactgctgtgtcactccgtgtgtgtggattcttagtctggaggagggtcaaactaccggcagacaactcagtcagtgacaacaattggggtggtagttctcgacctgaggcaagagcttcggtctagaggagaatcacccaggc

SEQ ID NO: 128813 - DNA, 400 bp, Zea Mays
gatcaatccaacgacgaccgtgcatcggcaccttacccaccgcgtcgagcgatggagcattgccacacgacgacgaccatggccggagacggccatcccggtgcggaacaccctaaccctcgattagaatggtgctacacattgagaagggcaaggcaggtgacaaggaggtagtcttaccggcaagggtgtagtggtgggaacggtccacggcgagctgcaaatccgcgtccgagtattgctctagcgagcaattagtccacccccggaggacatcctctcccggaaggaacatggagaagtgcgggtaacacaagtgagcatccccaaccactcatcagggacccgacgaccaccaacacgtgaatcatccgctgcggcgcgggtaacatcggcgaca

SEQ ID NO: 128814 - DNA, 418 bp, Zea Mays
atggaatatcaaataactatctactgattctatgcaattgcatgtttcaagtttctaatgctgccttgtaatactggaacattggtattataagaaagtaaattcaaacttcaatattgttatgtggttttctattgaacctggtgaaaatgtgataattatgtccatatccttgcaagcagttcagtcatttaagtttaatctaggctacttagcagtgtgattttcctgtagcctcttgatttgcatagccgcacagcccgtgcttgaaagtaacatttttatcctcattgctgacattaggatatgtattgtattattggtgtgaaattcaaagaatcagatagatgcaagatatctgtttgtgggataggatcagaacccaatcctgtgtgtgcagatatagataaaaatcatc

SEQ ID NO: 128815 - DNA, 343 bp, Zea Mays
gtagataatggtacccatgctacgctctggacattggacattgtatgttgttaatcttcagattggacgcatacatgtgttagattcgaacccatatggaccagagatgggtgggactatctggaaaaattaccattgtatacctatggatatgggtgataggaaggtttcatgggccaggttaataatgactaggctcaatctagccatacaaaattctcgaccaagatcagccctccctgcttttttgaagtaccctattgaactcttgaataactgcccaacaatgaaattggggtctaatgattgtggattctttgttatgagatatatgcagcactac

SEQ ID NO: 128816 - DNA, 558 bp, Zea Mays
gcaccgtcttaagtcatcaccgacttaagccgattgctctattagtagggtatagtggtcaccccgagttaagtaagcgtgagcatgttgcaccgtcttaagtcatcgccgacttaagtcgattgctccgttagtagggtatagtggtcaccctgagttaagtaagcgtgagcatgttgcaccgtcttaagtcatcgccgacttaagccgattgctccattagtagggtacagtggtcaccctgagttaagtaagcgtgagcatgttgcaccgtcttaagtcaccaccgacttaagctggttgctccgttaatagggtatagtggtcaccccgagttaagtaagtgtgagcatgttgcaccgtcttaagtcatcgccgacttaagccgattgctccgttagtagggtatagtggtcaccctgatttgagcaagaacgcaaaacgaagaattctcgaagcctctttattgatgatgtgtttcccggtttacagaatacattgtcgccccaatagcttttgaaatgtagctaaggataaaacttcctgagatgttctatg

SEQ ID NO: 128817 - DNA, 525 bp, Zea Mays
atcgacgtgatttactcgtgcccttccttggtacggagccttgttctgctggctgacggcggagggcgccttgggggcggatgccgaggtattcttggggccattcaccgagttggagtaggcgggtcctggtggctttagctgcggacaattgttcttgaagtgactgggatcaccacagtgccaacatgcatttgccgggggttggttgcttgccactgagggggaatggaaagagctctgactttgctggctgaatcgtgacggagtgggtccagctggtctactgaagtttggtcccttgggtggaaacccaaatgatcgagtcttctggtgccggtcctgctgctgtgcccggagaacctagaacttccttttgagatgccccttttcttcctcctttgcctttcaacttgcatggccttgttggaaaggtgagagaaattgaggaagtcttggctagccagaattgtcttgagttctggcctgagtcccttcaggaaatgggccatcttcttgccctcg

SEQ ID NO: 128818 - DNA, 366 bp, Zea Mays
cggtggaaggcctggaagctctactggaaatacgtcagcaaagtcacacaccacccgaatgtcctgcacccgcaaggcagcctcaccctccaccaccatggagaaaaagattcccgacttccgtgaccggcgatccggaagcaattgcgccaacaaggataacgtgaactttggggaacttcccaagaataccacctccttacccgacggcgcctgcaataacactgtcttccaaaaacaggatataactgcgtgatactgagataaccaatccatacccaagataacatcgaatgcccccaaggaaatcacaacaagattggccgaaaagacctcatcaacaagaatgaaggaacacccctgaca

SEQ ID NO: 128819 - DNA, 729 bp, Zea Mays
atcaaaagcacatagggatgccaaaacaagagggaggagggcatgatcggacccatggagagctgaccatggtgagctcactcagtacggtgttctggaccgatttgggggaagtctcaaattggggctctctggtggataatcggaggcacaggtgggtgcgttgggtgcttgactaaataaaggggccgatggcacgctcaatttataggattcgagggcggtggcgttcaatttgaagagattgcgctggcggttggagagggaagaagctactagcgcaagtgatttgtggactttaccgtggcaagacccccagcgatgaacgggtgggctaaggcagctcactatgatgtggttaaagggtcagggcgtgtcgcgatcacggcaggcgacgtatacctcgacgatggtctcttggccacgttgccggcgcaagtggatggacgatagagcggccaaagtgtcctgagctcatcagtgacaaagatctttgcacagccaagcgtaatccacttacccgaggcacgaatcgcagtgaccgacgcgaatccgagcgcacggttcaccagcggcaaggggagctgcacctaggatctatgttggttactgtatcattagaatgtaattcagaacacctgatagagcagattgcagcgcccaatcctcaaaattccatgtaatcacttgctaatccacctttaacaaagatgtagtcccatagtccag

SEQ ID NO: 128820 - DNA, 589 bp, Zea Mays
gggtggtggaattgatttgcctcctaatcaacacactcgaaggatttatagacaacctcagccacagccagtagggatgaatcctcctaatcctccgccaggtggagttgatccactggttgctgctcagatggcggtgatgcagcaaatggcggacactatggctgatatgcgtgcccagatgcagcaagaacgccaggagatgcgtcaggaaagagaagacatacgacatgagttaagccaggagcgagaggaaatacaccaggaaaggagggcacaacaacagcagatgcaacaaatgcaacagcaacaacagcagcaacagtagcaacaagtaccactgcctccaccaccaccaccagtcccaccccgagacaagcatagagagttcatgagtcataagccacctacatttgcaagttcgccagatccacttgatgcagacgattggttgaagttaattgagaagatgctgaacattgcacaatgcactgaccgggagaaggttttatatgcttctggacgtctgactggtcctgctgctgactggtgggattcttatactgctgcccacgatgctgctgatact

SEQ ID NO: 128821 - DNA, 400 bp, Zea Mays
ttatattttagtttcgaagctcgaccgagacatgctattccgttgtacctcagctcgatcgccaatccgaggcaagtttttgctgtattatgtacatcttttttaagatttatgaaacaaatggattaagagtgtggtgatggattcttactatttttctgaacaaccagccgaagtgcaggaccaacatttttgatgctccgcgcccgacccctactcctcgacccacctttaacatccaacttccatcgatcaaggatatgatgtcaagtaagatcaaccagctcccacctcgtcaccatactaaattcacagagaaacttgctggatatgacttggaggttgacaaggcatgcttagccataaaagacagccttaacaaaattgttgagaagcaata

SEQ ID NO: 128822 - DNA, 824 bp, Zea Mays
tccaccagcaacctttgtaactgctcagggactactgcttctttcttatccaccacttgctccagcataaccaaagcccaaaccacattgcctttcaaccatttattcacttgtagaatggaaatttgtggaacttccttatgctgacccgcatctcctcttagctgaacaatcactcccttgtccacaaatgtgagcacattctgcagccaatcacattgcataggactatgcttttttagccaatcaaaacccaaaattaggtcatacatatccaactccaataccctcagagtagtagtataggtatgacccccaaaccaccactccagatcaaccaccttcttgtcactcctcatcttttctccattagccaccttcacctccactcctgcgcacttttgcacaggcaagcccattttatccactaagttttgactgacaaaactcagagaactgctagagtctatcagaaccaccaacatctggttatgcataaaaccttgcaccctcatacatccatcactttccattccactgatagcatttagagacagtttatacaattcttcaacctccttgtcttcggactccagatgctccaacataggatcagtcaacaccatgcccatgtcttccacagttaaggcgtgcaactgagtcaccaccctcttgggacacttcccttggtgacctggctcaaacttttcacctcaagtgaaacaaagttcattagctcttctaaactccctgagttgcctctcctttgttagatcacccaaaataaatcctcccttattgtcagtcttcatattactacccac

SEQ ID NO: 128823 - DNA, 1009 bp, Zea Mays
gggaggttctactctctcgctctaccgcgtgtttggtcgtagttttttttttcctttttctttttttactttttcaagacaaacaagatgggtattcagtatcaaacacacgtcgtctcctgcgttggatcaagctctggtccaaactccacggagcgatgtggaatgtaaacacgcgttattggccttgattcggacttgtgaatcctaatctaataacaaacattaagggccggttaggtgattagggaattgaaagagaatgagagagaagatcctctctaatttccttgtcaccaaactagtcctaaattgttgtctaaatctgggttgtatgggtttacctaaccaaagaaagccgcatgtgaaaagttcggttcagcatgatacaaccctagtattcatatcataaatacagtttagagataatataaatagagaatcacgtagagatagactattcgcgaagagtgccccacttaatatttttcacaactaacctatagaaactcctcaatggatggggttgtagaagccttaacctagtctttatctctgactgcggagctgacaccataatcggtgtggattagggcgtctcccgcggttgtcaaagtactcaaatagatagtctaggtgaaattcaattggacgcgaagggctgagagcagcgcgctagcggttgacagagggaacactcggtagcgtcgagaagcttccaagggaatacccagcgctctgcagtatgatgtcgtttttctgcacctgacgtcgccggcgatttcttcctcaccgttgaggacgcctaagcatgtctccttttgctgccgacccagcgaccctaggcgctaggtatgaacccgtagtgggctgagagaaagaagaaaagtcgacgctagatatttcgtacaagtatatatcacctacagtcgggtgaaagatgcataagggcatgtttggtcccagaagctaaatcaaattaactaaagtttagttactgtaacggcta

SEQ ID NO: 128824 - DNA, 419 bp, Zea Mays
cgtcgatcggtttttagacggtcgcgattagatgcagcttaacgcttcggccaaagcaatctcggccggtgatcagctagtgtgcggccgagaggtgttggggcatgagagattttgggccgtcgatcaaagatccagtggctgttactccgtaccagtccagttatgtttcgatctaatccgagtggtcggtttgtgatccagcggcccacatctaaggataccccttcgcgacacatttttattaaagaacccttacagttttagggaatagaacccgcagtccatggaccctattctctgagtctggggattcttaccccagaacccctggtttttctgaaaattgatgcccagtccagaacctgtttaaaatgaataaatgaattagtaaatatattgttaatgcaaaaacaatt

SEQ ID NO: 128825 - DNA, 312 bp, Zea Mays
aaaatagtgttgacaaacacaaactagccctaagtcctgataaagcccaaaagaaaagaagcgtgaagcccacctgtgacacacgcttcttctccaatcttcctgtccctgcaagccttcccttccacaattccatccccctttcccttctggaactctcccgctgctccgcattccgtcgcttcacttcccgtagcagtcctcaccgccgccttcttctccaaatcccctgcagcccaagccctccactcccgttccccgcacgcgggcgagaccggatgaggcgctctaccagcgacgcgacgccgacgg

SEQ ID NO: 128826 - DNA, 392 bp, Zea Mays
ggatgttgatgtactcgaagaagaacggctgaacacggtaattcaatcagcatggtaccagcaaaccctgaggcgctatcacaataagaccatgagacatcgatccttcgcagtgggagatcttgtcctccgccgaattctaacgggggaggggcggcacaagttgtcacctctatgggaaggaccattcatagtagcagaagtcactcggccgggatcatatcgtctcactcagatggatggcacggagatcgggaactcatggaacatagaacacctcaagaagttttacccctagctgtattccaaaagctattgggacgacaatgtactctgtaaactgggaaatatatcatcaataagaagacttcgagagcgctcaaattgttcat

SEQ ID NO: 128827 - DNA, 577 bp, Zea Mays
ggggacggtgggttgttttctggaaattgtaggggctctttaagaaaagtgcccaacttaaggggtacgcgtgaatcacgaccgttcgatcagatatcaacgcgcccgattagattagttctcgtctgaattggtatacgatccgggccactcatcaggcgatcaacggcacgcactcgacggacgaaagggtacgcatcatttaatcgggagcgcttgctctgaaatcaacggccaaggttgcaccatcctggatctaatcacagccctcgcctaaagatcccacggtcctagccaaaccgtgacgcttgatcccatctcagtcgttggttgcacaatctatggccacagtgtgcctccccttccccggtggccaaacaccaccgtgaacagggcatcacggcggagctttgccggagccaggcgatctgaggcactgatgtgtaattcccttaaccgaatatacctaaacgacacgggtgggcatacgaataaaataatagctaactcaccggcgacattgacgtcgaggaggccgaccacgatgggttgcagtttccatggtggcgctacagcg

SEQ ID NO: 128828 - DNA, 361 bp, Zea Mays
cagaggaggattcttcactacctgaatgtaagaatgagactggacaggggctgcgggagaagtaggactggttggcgtgggaagagatgaggtcctcccaagttcccctttaaggacaggacaagaagccgcctggtgcccttccaagagacatctccagcatttggttgcgttattgcaattcaaagccctgtggttggtagcgaaacagttgcagcatttaccctcgacgtgcttcaggaacttctttcttctttcctcgcgtgatgaattggagctcgggcaaggcctaggcttgttcttcctccaccaatacggaggtctgaccacttcccagccatccgcgtcaccatcaatgagc

SEQ ID NO: 128829 - DNA, 1008 bp, Zea Mays
gccgcgcgtggacgcatggcgtgggtcgccggcatccccggcctggagagcgacgccgacgcggtcgaccagccgcttccttgggcacacgcttttcggcgcgcggccggcgagatctcgacacgcacgcgaggctccaacggaacacggtcgtgtacgtgttaggtgtaacagtgggttggtgaccgtgatccttccttcctgctgcccgattgaccgcgcactcgagatctcatctaatgcgccgtcaaatcctgagacttttcgagctccggctgatgaagctacggcggcctactacgagccgaaaagcctgagacggagcgtggagcgggaggggacagcacggctctgtgtccatccgacccgatcgaccgagggacaccagctgccagcgggatggcacgcgaacgaccatctcgtcctgtaccagtaccactccgcttctagttgtatgcctacttattggctctgtgctccgcgtgtcatctgacgacaagattggtccaacacgagtcaatggactgttcccaggagtcgaagctgtcctggtgtgggtggtgacaatgacttggccctgactcccgagcgagcgagcgagtgatcggccacacgacaccgccggctgcatcggtcggtgtcatctcggttgttttcgccatcacacgagagacacatgctccggtagagaaacctaatcaaaagttatatccaccaggaaatcgcacacgacgacgtacatgcatatctttctttcgtctgctattcataaaacctttttttcttcctttttttttaacgacaggacttcacgaggtcgtctcacatgccctgagacgcgacggtctccagcttcattcaggtcaggtccgggccatcgtttctgttcgcacaaactccgttctcgtactgccagccgatcagggaaccgtgccttgaccatccgggattgactcgaaactctgctccaatttgcgccctggacacgcgacatcgaagcccggaaac

SEQ ID NO: 128830 - DNA, 417 bp, Zea Mays
tctagaatagtactgttaactatccgagcttcagactcctctcttgtatcacgctattgttggacttgacacttcccttgaggctgctgattatgggatgaaattggagctaatacaggtgttgtggtaagaccaacccagctagagagtgacttgtcgaagccaccgaagctgtaggttgtgagaatggctgttggttacctacatactctgggatgtatggagagtaacatgaagcagtgtgaagaacttgctttggttgattatggcgtgcttcggccttagctatctccttctgtttttgtatcataacttgacaggttcttgttgtatgccccctgtcctctccgcagaataagcaggacagtcttcttggttgagagttgtatcttcctccgaagctacgtcctcctctgc

SEQ ID NO: 128831 - DNA, 1377 bp, Zea Mays
ctaaccacccttaacaatctttcaatcatttaacttgtacgtctgcacttaggaatagagtatttgacatgttgccatattggatacgatttatcccatgtttaagttgtgcataatgcctaaccactgaatgtatagaccttggaaacatcttgtctctttatgtttggccagttcctttgcctgccaatatcttgaaagttatcatctcgaagcctataaatacttgtcctgtaaatatacttaggcaccctgggcatcctgatcgtctatgattgagttcaattgtgttaaactgacccttagactcggaatatggagaaaggaaaacacatccagccaccaacttatggcaaccttgtaactattctttctatcgatggtggagggattcgaggaatcattccagctgttgttctcacctttctggaatcagagttgcaggtaaatctgtagaagcaaactcttcaatgtgttttcatatatcgtatgattgcctaggcaacacttagtaagagatatgatattttagaactccatattgcatatgttgctcgcatgagggtgataattgcattagagtaaaaaaaagtgtttgctagttcagaatacaaaccatttagaactaaacccaattcacaactatatcccattgtgtgtgatagttctggagaagcattgttaacttaaacctgaatagattatgactttcataaaacctgagttaatctttaaagcctacggcaatttgaattgcattcagaatgaggagtggcatcctatttttcatacgcgaaatgctctcctgattgattcttatgtaaaactgttattaattgataaagaaactcgatggagaggaagccaggttagcagattactttgatgtcattgctggaacaagcacaggggggcttgtgacctcaatgctggttgcaccaaacaacacaaacaggccactttttgcagccaaggatattcaagcattttatatgaaccatgctcccaagattttcccacagcagaggtgaatactaaatacatttcttattgttcttgttaattggattgcaaacctttctggtcaacattttttttctttctttaggggtccatttggtagggtaatgaggatattccgatcactgtcaggaccttcctatgatggtaagtaccttcatgatgttgtcagaaagaagctaggaatcaccaggctgcatgagactttaacagatgttgtaataccaactttcgacatcaagcggctacaacctattattttctcatcttatgaggtgtggctctctctcaccccctaccctatccattactctcaagcctgtgaagagtggtgattcatatcgtaacacattgtat

SEQ ID NO: 128832 - DNA, 313 bp, Zea Mays
agcaaacgcaatagaaaacaacgtaacaaccaccactggcatataacccggttcaaaagtactccgaacagacaacgacatcgagatagtcacacggacaacacttgattcaggtgtgctgtggcaaagatagaagcacgtcaggctaactatccagaaaagtttaaccacaattattaggtctagttctaaacctgataacccacgaaactaaaaaccaacccacgcttcatcaagatagcaacaactgttctcacgcgatacaaacgaatcaaccatcttgccgctactctacccacgaagcctatcaaag

SEQ ID NO: 128833 - DNA, 587 bp, Zea Mays
ccatcattcccctaggttatgaagccttcgcaagtcactagtcactgctagggatgcccatcccagatgacaatgaagacctaatagaaggcaaagacctaggcatcaacatagaagaccagctgaagctatgtagccttcacatgaaaaatagccaactcaagaaacagagggaagtccttgtggctagaagacaatgagccaccatgcagactagaatcaggcagctaatttaagacgaggaagaaaaatcaagagcactacagcaagaaatagctgagctacaccacgaatacccccctgccgacagccgctcagtttagctcatcatcagaacatcaactaatacatcaggcacaccctagcactaggtgcattccaaggcctcaactatctcgacgagcgaagccctatttccccacaactccaagccacgccatgtccacttaattacaaggtaggcaccacccaaagtacaatggcagcaccgacccatcacaatacataatgagctaccaagttttcgtcacaaaatcagggggacgatcacaccatggccaagtcattcatcattgccctcgaaggcc

SEQ ID NO: 128834 - DNA, 536 bp, Zea Mays
aaatctattctgacatgccataaacacagtttgtgaattatttttggaaatacaattctcagagcaattggcattgcaggatcttgatctgcaattgctcacaaactattatttgattatcacaataaattatttgacgtattagcataacaaattcacatatcacatacctgtcagcataactctcggaccctcgcctcccatacatgttttgaatgaattgaaagcccattcaaaagtctgaactgtttcatctcccaacaacacaaatccaaacactgtacactgcagatggctgttagctccaataaacatgcctagtggtttatcatatatattcgtcttgtgtgttatatcaaatgtcacagcatcaccataatctgcatattccccctgcatacttacgtgtgacaaaaaaatactcactattttcccatcattgtctagctaaaaatcacaaaaaaattgtggattctgtttcttgcaatccgtaaagaaagacaaaagtttggctacatcatttgcgtagttttctc

SEQ ID NO: 128835 - DNA, 414 bp, Zea Mays
cgacataataaaggggctagaccaagtgcgcaccgcccctatggacatagccggatgcgcgaaggcacacaacctcatcatacaaactatagttacacacgtacagcgagggcatcacaccttacataggttcaaccttcggaatgattcccatctccctatagttaaatagcattatcctaagctcctcaccctcaaaaagacttcgcaactccccctcacctacactcgccccaaccgacgaggacaacaattcccgcttgccagccctgcccacacgaagtcgaccgccatccacttcactcactctacgcttcgccacctcccttcgccacctacgcccagcactcggactaggcaaaacttcagcatccgtaacacgcggagaagcctccgcagcagccacatccaagg

SEQ ID NO: 128836 - DNA, 465 bp, Zea Mays
gaaggatgaagaatcgaagacgaagcaccacgtcgacgatggatggatttgatgagttgttgctacttgttagttggagggtacccttcgctcgcctagctaggaagacgagtagaaaaatacactccctgcgcatgcggatcgtcgattgatggatgcatgcatgtccatgcatgcgtgtagcagacacacggcgccaagcctggccaaacgaacgcgagaggtgctcctgcgtcctgcctgcctgccctgtagactagagtatactccattctggttggtaggctttgcacatcagtccaatttccatgcaaccaaacatgccggccttctatccttttccttttgcatgcattaccttacttgaattcggacgctttaattttaccagtatttcttctttttttttcctccaccccaaagacggcaaaagcttttgcccctaattttagcaggagaaaataa

SEQ ID NO: 128837 - DNA, 731 bp, Zea Mays
cagcagaagcttgaagacgtccgtctacgtcgtcgcgctggttgtcgccgttctgtcatacatcggcctccaggttctggtgttcttctgcaagcctgtggagacctgggtgcacaacgtccaaggcacgctgcaaaggtacctgaaactggagtcgtcatcatcacaggacccccgggcccggcttcgtgcagtgcaggaaaccgccgaggccgaccagcttctccgcaagtctcgcatgtacctgcttctgctcgggatccttgcggcgagcgtcacgtaccaagccgggctcaacccgccgggcggcttctggcaagcaagggccgccgacggtgtgcaccactacctgcccggcgacccagtgcttcacaacacctaccccgggagatacctcgccttcttctactgcaacgccacggcgttcgtcgcgtccttggtcatactcatcctgctgctaagcaacgtgttcagcacccaagggatcaagtactgcgcgctgcaggtcgccatgatcatggacctcctcgggctcatcggcgcctacgccgccggaagctgcaggcaagtgtccaaatccgtctacgtctcggtgctcgtcattccagtcttcctctacgtcggcgtccatgtcatggtcttcatgctccaagtcttcccaaacatcgggacgtggaggagaaccgtgagggacaggctggaggaagctgtacccagatgcctcaagaagc

SEQ ID NO: 128838 - DNA, 443 bp, Zea Mays
agataggtggcttgattgcttagtttggatcttgcaccttcacgccgaggactggaaagacttcggctgaagtgatcgagattgttccgtatgcgaagaataagtggggtaactggtgggagttctggttttatgtggtgcctggcgcgttgaagggttacctagtttaccccctgctatcttgtgctctcgttgttatgtagcgtttccacagtttaacgtgatgaaaggggatcaggacgagcaagcccttcgctgcgcagcccgtctaagcagtggccgtgatttggtcgaagagttcatcgcttgcggagtgtggcctttggggcacgggtgggtgttaggcgaaattatacctcgccggatgccaaccctggaggataagctggtgcaaagcgcagccttcgctatggacttgcgtgggcgggatgtggccgctttcg

SEQ ID NO: 128839 - DNA, 272 bp, Zea Mays
agcaagcacgagcaaacctggtgatggtgtttagtcccacaccgcttagcctagaggggattaaccaacaagcacacgtcttatacagcggcagctgaagctgatgaacccaagcagctgcgtggtgagcacaaagcgaactattctttcgccttttactaaagaatatcgtgtgcatgcacaataagcagcatactctaatttttggagggtgttttctccttaggggaaatgctcaacaagacaaattcataacattgttaatgttcgac

SEQ ID NO: 128840 - DNA, 636 bp, Zea Mays
tcttgatagtacgactatctagcctactaacccggtcaattatcaacctctaagcaccttttgactggtaaaacaaaaacctattgttatacctttgtcttgagcattcatttccatctccttaaatgatgaacaatgggcatccataagtgtagccaaccatgataccttttaccatttgtccatagcatgaagttccttcaccatcatcatcaagccacttgatcaatagcccagaccaacacatggcatgataattctataatgatatgatccactccatgttatcccatggccttcttggttcatcaatctcaacatagcttgctcttcaccattgctttatgtccatcggtgctaagtccttgctctagcttcaccgccatgtggtccatcacacatgagactttgacttgcccttcacactagccactcagtccatcgaaatcaagccatattcttgatcttctccatatagccacatgacaccatgtcatgtcttcatatgcaatgagctcctttatcacactagttgagcatctcaatatcaccaagccacatcaccaccatggcttaaataactcaaactagtgtacctgtggactaatcacatgtgtatctcaacataaacactta

SEQ ID NO: 128841 - DNA, 322 bp, Zea Mays
tgacttgttattgtgttggtcctccttgacagtgcttccggcatccgttatatacaagctgctaaacaaattctgccgcattggaacattggttgccttattgaagatatatcctagaccttgtatattcatataagttgacttgttattgtgttggtctttgtttgatggctaatggatcaatggatgagcgagatcgattgtttgatgtgggaaatcagatgtctattttgcacttgataatttgaaatagaaagagtacgccggccggaagtatcgaaaagagcccaaaaccacccggccacctgcgcttggtctcggg

SEQ ID NO: 128842 - DNA, 734 bp, Zea Mays
gctttgtcagcatgatcagtaaacacattatctccagaaatcagctttgccacaaagttcttttttctctatctagcgtgcatatggaatagcttggtgttagcatctccctctctgagccaactgattcttgatctagatcgtgcaatggtgcgcttaaagaaggaaagggctaaggagtgctttttcagtccacatctcagccaatcctccaaaggggacaaaagtcttaaatcttgggctatttcaagcctgtgaagaatctctcttgctaaagctaactgtgaggccacatgcccaatcttttttccactccatttctgcaaagatctagcagtggcttttaatctcctgtcaaagtttagaactgggcagactccatcgatagacaaccatgcttcactgacagcttcctggaatccatccaactttggccaaaagggttcaaaatggaaccgcctcttgccaaagcagttgctctgcagaccaagcacaagatggtcacacttgctacgtccaccatgacacctgctacgtccacccgatggtcacactccgctcgatcggtgttctctgaccagtagactgttggtgctcacaacctccactactccggctctatcgcttgatcactccttcgtctgtatcgcgctcgctgatccccactaacgtcgtgctatggaggagtatgaggccctgctggcctaccacacctaggacttggtgccatgtcc

SEQ ID NO: 128843 - DNA, 492 bp, Zea Mays
gtcgccggacctctacgtgccggtgaactatgccgccctggagctccacttttgaccgctcggatgtagggagaaagaagaaagggctctggccgttgattctctaactagcggccaggattggtcgggttaacggttcggctaggtagattagggccatagatcatagatcatggggctgtgagagaatcatgtttcattaaattgggtccatcggatctaatccaacggctccagtgtgccgataccccttcggctggagaagtatgcaaaagagtcctcggtttcttagataatcaacccgcagtcctgcttgtgggaatcctgagtctcatgaatttttgtgtaataacgcctgtgtctctctgttatttgcgcccagtccggaagcttaggaaatttagaaaaataatttagaaaagggtttttgtgtataaaaatatatccagaacttatataattcatagaaaattcatcttagctcctttttaa

SEQ ID NO: 128844 - DNA, 452 bp, Zea Mays
gtggcttcggggtagtttcttctccaccaaagcgaatcagccttttctcatctttgctaaagtagcccgacttcaccatcttaggaaaatcagccttagagatggttgactttccgaagtccaggtggctaggcttgcttggtactgcgatactgtgatcaccttcagaatcagtctcttcaatatctgcttgttctgcttcagcagcaggggtgtcttccgatgtcatcaacccagatcgcttcattgcttccgagataggaacagtttccacagcttcggcttcgtctccttcgcgctcaactctagcagtagaacgcactctggctatttgattttgaatttcttgaaaatttcttggaaattaataacctttcttccgaagctcttcttctgacgaagcaggcaccaaactggagcttcgtttgaatgcgaaagtcaagcttcgacta

SEQ ID NO: 128845 - DNA, 425 bp, Zea Mays
caatttttcaaagacaagatacaatacgttgcaaaacacaaacaagatcacaaggggtcaagactagatgctatcgaccttttgggctagatgcaatagtaatagaaggcacaacaatatctagtactacttattaaggctgtaaaggtagcctgccttttctcgttctgccattctacgatctcaaccattcgttctacaattctataatcccagccgtccgatcctacgtttcagtctagctccccgatcccgcacaggcgcacaccgatcctgctcctatcgcgccccaaaaccctctcgtatggaaaccgtcgcccccgacctcccatctcctccccgaaaccctctccttgccctcaacgccgtccctcctgcaatcccgcccccgcccgcgccgtcgcttccctccatcctgcccccgc

SEQ ID NO: 128846 - DNA, 396 bp, Zea Mays
tgcttccatcaggacagcaagggagttctatggtttgaatatcgtttggtggttcctaaaaatccagaactcaggaagaaaatattggatgaagctcatctttccagattttccatgcaccccggcagtaacaaaatgtatcatgatctcagatccttgtactagtggaccagaatgaagagggaaattgctaagtatgtatctgaatgcgacacttgccagagagtcaaagctagtcatttgaaggtagccggtaccttacagcctcttcccttaccagcttggaaatgggaggatatttgcatggattttattgtgggtttacccaacacatcccgacaccacgattctatttgggtcattgtggataggttgaccaagacagctcatttcttg

SEQ ID NO: 128847 - DNA, 436 bp, Zea Mays
tttgtgtttggtcaaccaatccatccctaagatcacatcaatcccttgggatggcaagacggttaagtctgccaagaacactaccccacttaaaaggattctgacttgggagcatttgagctgacatagaaggtctgaccctggggttcgggtgaccaagggaatctctagaggggtagagggaatgccatgcttttccacataactagtggctatgaaagaatgagatgctcctgaatcgaaaattacggtagcgggagtaaattcaacaaggaactccccgagcactactctcggagtttgctgagcctcctgagcatcgacgtgagtaactcgtgcccttccttgatactgggtcttgttctgctggctgatggaggagggcgccttgggggtggatgcggaggtattcttggggccattcaccgagttggag

SEQ ID NO: 128848 - DNA, 496 bp, Zea Mays
gctcttttggaactttttttttgctaaagaaaaggttcatgtttgcattggacatgaaatattcacatctaatttttcgttgcatttttcttaattcttacatgaaggtgttgattttttttgtcacttggagtaaataaattttgagcatattgcatgtgacaaattatatggaagatcataaaaataactaaatggtctttagtgggacatatggaaggatagggttacatcattgttaacatcagctcatttctataggctgcacgcctcaatacagtaactggtgagtgaggagggaatgctgaacaagatctgtttggcgcctgcttccccaagattggcccttaagactcagggatctagtatactgtagagttgggcccaactgtttggcacttgcttcccaaaggtcgggcctctcagatcgaatggctgtggttgtggaaaaccagtgaggaccgatcatgattgtgtttggaatccctagttcagc

SEQ ID NO: 128849 - DNA, 672 bp, Zea Mays
atgatcttataagaaattgggagaaaaacccaattaaagttggactgtcaggctgtttaagttctgaatctcagacaagcagtgcaactacaggcactttgggcatgaattaatacatgatcgagcaagtatttgcctaggattgctatatcaagattatagctggatcctagggctacaactttgctaaagagtgtcgatcatgttgatatataaaatcaagagaaaaccatgctccaaaaggctctgtcaggctgtctgacgaacactagccatggtacagtaactcaattggggatcagatcgccgcgtcaaaaatctcaccgccgacgacctcttcgccggttttcgtgccgcgggcgtggggagttcgctcaccatgaaaagatctagttacgaatgtgtatgaactattgtggcctcgctgttccctgcccttcgcaccggcgacgtggccgtatggccgtcatcggagttgtcgtgcctcaccgcggttgtgccatgccccaagcttctcaccacgtcgtcactagccgcaccagctcaccgatggccgccgtagctcctcaaccggtgatcaccggaggaagcaccacggtggaagccacccatcccttgctccagtgtccatgttccctctccgaccgccagcaccccttgaccaaattcgtc

SEQ ID NO: 128850 - DNA, 618 bp, Zea Mays
accacacctgagacctggtgcctcacccctctgacgccaatgtggtcaccaggaagtggatcttcaagcagaagctaaatgcagatggttccttggaccagtacaaggctcgctaggtacttcgaagcttcacctagcgtctcagggttgactatgacgagactttcagccccatggtgaagcttgccaccgtccggatcgttctgactctagctctctcaccggcttggccgatacatcaggtcgacgtcaaaaatgtcttcctccatgggactctggcggagacgatgtattgcactcagccggttggttttgtgtacttcgctcaccccaacatggtctgcaagctcaaccaatccctctacggcctcaagtaggcgcctcgagctttgtacagtcattccttgctcgcacaaggtttagtcgaggtcaaggcggacacctccctgttcatctttcgttgtggcctgaacacggtgcacctcctttacgtcaacgatatcgttctcacggctttctccctgagctcttgcgacacatcatctcctctctccagcaggagttcacgatgaaggaggagctgcggttgggagagaagctgctccgctgctaggagag

SEQ ID NO: 128851 - DNA, 637 bp, Zea Mays
taaaatatagggatttagtaacttgaagttacttcgcactattcagatttgttatagtgtactctcttcttattcctcagactctctgcatttcctttgggcagcacaactctcatggttgtagcctccagatatatgatcttcttggtttatgttctattttttttggccaagtcatgttcttccacttttgttttttccaattcggtcataggacaggttctcttctcttattttttcttttccccattttcccttctcccttcttttataagatttccttagatcagaatttgcggacaaagcaccagaaaagaaacatgcaaacaagtcattgacacaaacaaaggtgagctttggaagaatcaatttgtacactttctcaaagcatcagatctaacataccttgtgaatttattgtataaatgatacacaaaggatttcatttgtgttttgaattcttagtggcagtttcgttttggaatgacactgactggtaaccttgctccttaaggactacacgagtgaggtgattatttcttacattatcctattttctagacaagtaaaatgcagtagtcggctgcatgttatgttcaccttaatttttttatttcccccaaaacttcctttcccc

SEQ ID NO: 128852 - DNA, 455 bp, Zea Mays
tttagcaattcgcacccgcgaaggggtatgaagttggctgcaccgttcgattagatctacacggcccagaatagatcaagtggaggctgggctggggatagatctgagccgtaggatcaagatcaacggctaaaatcaatcgcgcgaaagggctatgtgttatttaatcctagctgtctgggaggagatcaacggctagcactactcgatccccaacttctaatcacagccgttgatcgcgaaatgtgcggtttagggaccttcttcctcaaaacacggaccatagcaatggcctggccattacggcggcgccctgttcccccaccgcagagctcgccatccgagcccccgataaacggcgcagaaccttcttcgccccaactccctgtctaggtcgtctcctagccatcttctaccgactgcacgagactgcgcgccttccagcggtaagcccg

SEQ ID NO: 128853 - DNA, 341 bp, Zea Mays
ttcagctttcagcatactgctgtacattcttgattcccattaaccgagaatatagaggtcgaagctaacacataatttaacacttcccagacccagaaagtacagctgacattagagttgcttcggtaggctttctgttagactgttactggttttggatcgctagcttgttgagcaatttcagcatcacctgtggcagactaaaacgacgcctttaggtaaacacctactatatatctgtacatggatatgataagagtgaggtgaaagggctaatggttaaggctctcgtttagcgcctttaggtcccggttcgatcccccttggaagcgaatctcggg

SEQ ID NO: 128854 - DNA, 484 bp, Zea Mays
tgtagaccccacacctgctggtttttacgaagcaatggaaaggaccaacgttgaaaaatcactaatgagatgttggctgggctatctggggattccagtgacagtgatagctttgatgtggaaattggtaatgaggatgccaaagatcggccgtggaggccaagccatgttgttttcgggaaatcaaatgtcaaacaaggacaaattgaagcgatgaagggcaaatatttccatggtatatctatagtgagggatgggggagaaagcattgttcctcttcccgaagcagatgaagtaggctggggtgcgttttcctttgcacagaatgctgattgtagtgttaaagacatttgaaatataccttctttgtaacactaggtgaactcagtttgtacacttgtcacacaagcttgtgagccaagtgtcctactttataacactcaaggcaataacaaatacttcagcaccatactggacatatgag

SEQ ID NO: 128855 - DNA, 538 bp, Zea Mays
ggaatgtccatctagtgtaatgcctcaatattctataaaacacacaaaagccaaactgaacttgtagtttagtgtgtactcctgtgtataaggagtttgccagaaatcattgaggattaaccatattggttcgaatgcttctaactgatgtagatgtggatatacctgggattaatatcatatccacatttgacttattggcatttgatctattccgcggggatgcctgcgaatatgatccatcagtcttaatcaaagcatatgttctgattgcagattcacgtggtctgtgataactctcctccgattaattcaccctgatggtgatttgcctcactgagaggttcatcttgatgacgaaatttctagcaatgcgcgcaatatcattgtgctaggaatacagagcaatgaatcttttgtttttgggaaatgacgaagatcattattaaatgtgggagacaaatatgtcaacacctatcttgcctctatagattgcaaagggatccaaaacaaagtcctaggcatgagtgctttaagc

SEQ ID NO: 128856 - DNA, 847 bp, Zea Mays
gagagatagtccaagaagatgaggctgcaacaacaagtaaagctcagacagtagtcagatgggccacaggtgcaaaagtctcatcatagtcaataccctgagtctgttgaaaacctctggccacaagacgagctttatattgctcaataaacccatcagatttggttttaaccttgagggcccatttgcacgtgataggtacaacaccagcaggtaaaggaacaacatcccatgtacatgtgcgatgaaggacattcaattcatcagtcatagcaaggtaccactcaggtataccagaagcctttttataagatgatggtttagcaatgactgcaccagcacggggaaacccataacgttctggagctgcaatagtgccacggtcgcgaagatgatacccctgagtaaaaacaacatgagagtcatcattgttagtacaattatcagcaacaggatcatcatcaggactagccgtgggagtagagcgaggacgacaaatgtaagtctaagtgacatgtggtttggaagtgtaagactgaggtggtgtggaagtggaaggtggtgtgatgggaataagaacatctggggtagaaacagtagatggtggtggtactgatgaagtttcagaaatgggaggaaggctcatgaaggaggtagactctgtgaaataaaaagaagaatgagtggaagagttgtaaaagaagggtcggttttcattaaagctcacatctcgagaaatacacatgcgactagtagatggatcataacaccgataacctttatgttcagggctgtatccaagaaaaacacactcaacagattgagcagtcaatttagttcgttcaag

SEQ ID NO: 128857 - DNA, 1682 bp, Zea Mays
gtccaggcggttgttcattgtggccaactgtcccagaatacggtccagcttctcggagtcagtcatcttcccaagaccttcgtcgctgccggacatagatgtcgctgcagctttggaatctgataccaaattgttgtgaacccggctgcgatgcgcaggacggggaggagtgcaccgcgaagggtgggatatcaaggtggattgggtggaagagcgcagggaatagggtatcctgtgtggcggctggggacttaggtcacctgatggcggaaggtctgccagggtgatcaagcagccgcacccacaggtacaacttctttttgatgatctcctagtacaatctaaggccacctttatagcttaggtgcctaaccatattacagattttctaggggataagataactcttccgggaggataagcctccttaattattgtctaacttttagtacttcttaacaaactaaatctagcacctagcataatgccttcccacaaaagaatctacaacaatttgcctttcatatgctacaacagtaataaaagtatagtatttttacaccaacctcaacataataactgaaggcgagcttgcatataagcagcaggatccagaacgtagtatacctggttttatttaaacaaaaatagtattagatacagaatgataagaatggaaagaataggtgacaagaaaatgtgatgtttacttaagaagtgagcaagtgtcttcatacatgcctcgagcaacatataactttggctgattaggaaaaaagatttgtgagatgttatgtataaacagttctgctaagaacttatgtaaacaaaaccttacctgtgtccaccataaaaggaacctaataatgcgagaatttgagcgctctaaggcccgtcgaattggtagaaacatgaaaaacagggcactgaatatgtttggtaacatgtaaagggcaacagcataattataaattgattcattctgcaaattttgaatccaattgctgagaaacttcacaaggcctgtgggattttgaatagagcttgagtacgtagtaggaagaattatcaaccaggcaacagctacagcaaattttaggatatatcttatcctttgtgagcactccaggctcttccaagctttccagttgagaattaactctagcgtggctgaaaaggtttaaagaccaatttcagaaatcgtattgcatttgaagcaagggccacagcagcaacagatagtattaagactccgcatacaagtcaagattaataaaaacttggttaaataatgcagtatgagaaaaaaagtaagataacaaatgcataaagcccctggagtcagtctgtaccttgaaggaagttcagaaatgccgctgttataaagattgtcaatacatttttgaaaacatttggttcaaatatagaagaaagtgacccagaagggctccaggcaatgattaccatggcctgcaagagaagaaaaacagattatgtggcacacactggaaaaatgaacacaaaaacttctgtgcagggacaaatgccaccattacctggaaccccaatataaagaaggcccacatacgatcaaaacttctgaacatatgcaaaaatgtacgaacttcaacaaaatttgtttttgatgcccttcttctcctaatcacgtgaccatgttgctg

SEQ ID NO: 128858 - DNA, 328 bp, Zea Mays
ggccttggtatctctgatattcaatgttcaaattgggccttgcggtttagatggatatggcttcaaaaaaccgacacatccaagccttgggctaatttgcctatccagtcaaaccgattttttgagtgcttactctaagttgcattggcttccgaggtgggggatgggcgatccactcttttttggcaagatagatggctcttgggtcagagaatggaagacttggcccctcctgtattcagtttggttcctaacagattgatgaaaagaatgatagtggttgatgctctctattgttcatcttggattggcgatttgagaggcatgg

SEQ ID NO: 128859 - DNA, 405 bp, Zea Mays
ttgtctcgtcttgctcgctcgtcccctaaatcatgtctgcgtcgccccctccatttcacgagtttgctcgcgttggccgggggacgggggtccggagcctcgtgccgcactccatcagagaccctgcaacctttccgcgagcgctgttgttcctgctcctgccggcggccttgctaccaacccgagcgtgcgtgtgttggtggagccaggcaattccagtgcacggcgtggattcagttttcgatcagtgaattgcacatacagctacccttgagtcaaattgattgtatccgcttgtttctaacatctcccttccacagttccacttcggcgaccggtgtgacgaagcaggttagtctgtaagttgttgagctgtggagcaatcgtttcctaatgggaaattcg

SEQ ID NO: 128860 - DNA, 1412 bp, Zea Mays
gccgtcggagccttccgcggggcgtccgtacacggagagtgagaagggggggggggggggtattccgtgaatggttgaaggaggcataaaccaaactcttcaactgacacgttcatgagacataatagtatggtataataaatcttgcttcctcgtcaagcaacttaactaatatccaaatagtgctgattctctgttatcttcatctctacttcattaacttgaaccattgtatcatgtgccattcactgaagttgaatgtaggagtagttgcctcccaccttctccttctacctcctctgcgcgttgtcctacactctgacaacacccattctgttccatggctttctgtagacccacttactcaacttcactgttttgtgttttgcctcgctgaccctgcaatcctggctgctaccacagtatgcatcccatgaaacttatatccagtttggagtgatctgtgccctctctatttctgatctctctgactatgtttaatccatatctaatacaaccatcagatcaccaaccactctcaatagccatactcgtagctgctaatcctattctctcatatttcttaaccaagttctgtcgcttgcatcagctttttttgtctgtttcctattctatccagctgaacttggtcacttcactagtggcagggataatatttggataaatagattttgatttgccgaacagtacaaattattggagtgctagctgaagcaaggtggattagctatctacctctattatgagctggtgcaaaacattattatatgttttagaaactggttgggaaatagcgccaagagaacaatttcctttcttcggaccatatgctgtaattcttcttgatcttccagtttaatttgaactatgggtaccctattatataaatttggtttctgatcgagttaatgaaatgtttgtggcagtacatatgccctgatgtgcatttgaagcagaaaataggtgcattttgaaatacgttctgatattatattttatgatgaaaacaatactcagaacataaattttatacatctggaaagccatgaaggatgtaactggtgttttctctctcttgaacacgcaggagagatgcaagcatatatagaagagagttaaaccccacttccacaaaagggaaacagattaaattcatgcctgtaaaactgtaaaagggtgacccaacatagtaacttaatgggctgtgatgtaaaagggcgacccaacctagtgggttgtgatggccccttagttcttgtcatactgcagagctgggagctgggaatcctcactagcaagggacaaggccggtgcagagcctcattataactccattaaaacaccgtcatcctcgtgtttccatagaattcttgcacccaagatgattaggg

SEQ ID NO: 128861 - DNA, 374 bp, Zea Mays
ccctcaacatgtcttccaaaatctgattcaccctttctgtctgaccatctgtttgaggatggtatgctgagcttcttattacatgggtcccaagtgactcttgcaattgctcccaaaatcgtgccacgaacggtgctcctctgtcaaatactatagtccttggtattccatgcaagcgaattatctggtcaatgtaaatttcgacatacttttcagtcctgtgggtggtgtgtaccggcaagaaatgagctgtcttggtcaatctgtccacaatgacccaaatggaatcatggtgccggaaggtattgggcaatcccacgataaaatccatgcaaatatcctcccatttccaagatggtatggggaaggattgc

SEQ ID NO: 128862 - DNA, 503 bp, Zea Mays
caggtacactagggtgtaattgcgagtatagtacatgaacttcctcatgcaacgtattgcaatagacctgcaggtcgtcgacggttgagctaagttccttaattcgggcctgagcccttgcttccttagcacatgctagcaaacgagactgtactgcccagtcaagtgctaagtcccgatcagcaagctgatcctgcaggtgacggatgtcccttcttagttcatttattctatctccgtctgcgacccaagcatcggtcctgtgttgcagcgctgcttgaagtcgactcactcgggcttcaagatctcctatggggtcattactcccactgctactgctttcatgtcgaggggccagttgatgccggggcacaccgattggtccagttgacttgcgtgccgttagccttgtgcgtggcggcatctttctaaggggaaaatgttattagtataattcttagcatgatgcatgtgtaagtacagaatcaaccttagtcgattca

SEQ ID NO: 128863 - DNA, 461 bp, Zea Mays
cgtggggccacctcgtcggatgaatcttcttcgttctgttaggattgtgccgcaaatccccattgccgaacgacgaagcaggatctccctggctctagggtatatataccggtggcactcccctccttgaaccccaagtctcgatggttagtatctacgcctcgccatgacctccgagcatgaggaaacgttggtgggagatcgaacgggaagcagagaatgggatgaacgggggagtctcggattgggggaggagaccgtagcatcgtggcctggatcatgacttgagcttatgggatcatccgtgtcgtgccgcacgttcctagcggtttgccggccgaggtcaacccctggagcttcatggcgcgtgccggagttggcggtcggcgtcacgccgtggaccgggtcgatcagcccccttttgcatcggtgagcccctttaacgtgttcaccatcttcta

SEQ ID NO: 128864 - DNA, 414 bp, Zea Mays
gagaaagccatgattagagccaatgtatatgaagatgaagagcaaaccattgcacgtttcatggctgggttacaccgcaacattcagcgtattgttgagtttcagccataccaaagtcttattgatttggtacatcaagccaccaaagctgaacgccagctgcaacaagatgctaagagcaccaagtccttgtcatatggtgcacgaaccatgactggaggaagcaaatcaatctaatggtttactgttgcatcctcagtgacaaaaggttcaattggaggcttgcgatccaatattcaaggcaattctagtggaaagaacggtactgctccaaacacgagttataaaccagcagcatccacttcaacatcagtaggatcaacaaccaagagtagtggtattcagtgcttcaag

SEQ ID NO: 128865 - DNA, 304 bp, Zea Mays
tggacgtcaatcacaaaaatcgattataggaaatgtgtttggcccatttccctttcagatgcctaggccgctgatgtgtgggacacgccggtcagtcctcatgtctgatctcgcgcgctcacttctaaccttgggtgtttgttcccaatcggatggtcgagaagcccggataccctttcactgtggtcgatttgcttaagaccccctcggtttcctgagaatggaacccgcagtccttagatctctcatccatgcccctgagttattgcagaaaggaccctgagctcatatctaatttcagatt

SEQ ID NO: 128866 - DNA, 821 bp, Zea Mays
ggcagccaaggtgcagagtggtggcactggtggggctcgctggagtaacgcgacggcgaggctgcaagctgggcggaagcacaactgaagtcggcatggcatgcagaggagcagcgtggctggggcagggtgcactcgtgaggagaccggcacggctgggcaagcagaggatagggactggcttcatcgggcaatggtggctcgccggacagatcacacggcctggccggctacgggccgccgcgctggggaactcatcggggcgcagggacaggggcggctcggccgcgcccaggctgcaggggagcttgccgaggcacgggaggtgagcggctgtcctgcagggggcgaactcgcccaggtcacgtagggatgggctagcttcggccatggccggacggccgtacggaggggtggtcgagggcttgagcaggggccggacgaaggccatgccgcagggaaagaggctgaggcgtcgtcaggctgggcgcagggggcatcgaggcgagagtagagctcgacggggagcacagcagctgttcgaccatggcgctgggaggagatatctacggactcgggtgaaggaagaactcaaacagagaatggaggataaaaaaactcaccagagatgaagaagatagtcgaggtggtgcggttgaggatagagcgaggcgcagcaacagcagggacggctccaactcttccttctcggttgctacagagatgaaaacatcgtctcggtaactgacatacggaggaaaagggaggagaaatatggagcactctagaaactctctcgagacaacgggagggaaattata

SEQ ID NO: 128867 - DNA, 687 bp, Zea Mays
gccaaaatggagggaagcctctagccgaggaggccactaacaacttcgaaaaattgctcgaggtcccatgcccaaaccattgctacccggtttgacatgcaaggattacaggtttcttaggaattcctaagcaaagttacaccacccagaaaaggcccgaaccccgtaaggacggtgagcaggagagaaggggtcccactttccctaacaaaaccggatgcctactgatctttagtgggtccgactactacgcaaggcactgaaagcttgagcgacgtgagacatttagcgttcggccaccgatcccagcgttcctcgaatggtctgaccatgctattaccttcaactgtttcgaccaccccgagcatgtccctcggccggggcgatatccgatgttgatacgactgccaaaagttctcatgtatgggggcagtgggattaatatcatctactcagccacgttcgacgccatgggcctcgactaggattggctcaggccgatggggggctcatttcatggtgtcatacccaggaggcaggcgaccccgctcggatgaatcgacctgccagtgacctttgggacaccagccaacttcaggaccgagactctgccctctgaggtggttgggttcaaaggaacctatcacgctatccttggaaggctgtgctactcaaaattcatggtcg

SEQ ID NO: 128868 - DNA, 334 bp, Zea Mays
ctcaagtctgattcccaggaatcacaaaccacgtttacaagagtagccaggctagaaacccaacactagaaaaatatcatgatacagtccgaaggatggaaggatctttcgaagggttttctataaaaagtataccaagagcaggtaatgaacatgcggacttgttagccaagtcagtggatcagggcctccccttacccctggaggtgttccttgaatctgtgaaggcaccttcgatagaattgacggaaagagctatgctaacaatttctgtcacacatagtaaagactagagaacataaatcatatattttctctaaggaaactacccact

SEQ ID NO: 128869 - DNA, 636 bp, Zea Mays
atgctcgaccctggtcggcacatcgatggtcgcccaacccgcgcacacgctcgcccccgcgcacggtcaagtccacagcgcgccctcctcgcgcccgctcctataaaggccaacagcccctgcaagtccttgcctcaccttcgcacactcaccacgctcaatcaccagagcattggccgtgaaccgagagctcctctgcctaccaagccgcccgagcttcggccactgcggccagctcaccccagctgtccctagtccacgccagcagtccggttagcttcaccagagacccgtgaagctccccgagccctcagacccagtgcaacctcaccggaaaccccaaatcaccctcgccggacttcttccgctcaccgaagaacgtggaccaggtaagtcactacaccatttctcaattcctcgcgtataccgcctctacgtcacttggtaaagctcaccgagccaaccaattgaactatcccgccgtgagcaggccggaacactcgtcgtcgatgaactccctcgcctgcgcacaaggaccggccgactccggccatctctgacgccgacccgcacctcgacgtgaccaccgtaacctcctcgacatccctggacacctcaccggagctagatcaccac

SEQ ID NO: 128870 - DNA, 781 bp, Zea Mays
ctcggtctccctggcagccgcggcggcccgcacatcctccatcttctcggtgtatatcttggcggcggtgggcgacacccgcaccagcggcctctgtcccctgaattccgctggggcgcctggatctagatgttgcgccgtggaggcggggcacgacggcgatgcgattgcgaggaggagcaggaaacgtggcagcgtgatgaagttgatgacagtggtgttgttcctatgcgggctgcctcctcagctctgccttcttccttccctgatctcttcgacgaccgtgggcagcgtgtgcgacgacagacccggctcggatccatacgctgacgtttatctagatgggaaaatggggaacagatctcaggagctcttggttttgtgcgggcggacgaagcgctaatgacggaaggagtgaggcgagtggaagttgcacagccaacgacaagtgcgagaggacgtgagggcttgaggcgcaaggctgcatagctagcggagggcaggggcaggcttcaccagatggtggacgccctcttcagctgagagttatggaaaaataccacatgcccatttgtaaaccacggaaaacacaacctacatgaactttatcactcaacaacccatttgtaaaccatgaaaaaactaagccgtaacctaacaaccttactaaactgaaatttggaattatgtctttatgaaacgaccactgatgcagcaaagttcctcatgatataagtaggcaaccctaaagctattattcgactatacatcccaacttaag

SEQ ID NO: 128871 - DNA, 450 bp, Zea Mays
gcgacggagtcctcgccgcgggtggaggttggcgaggtggctgatcttcctagtgcgaggaccaagtgccggcgacgaagggtggtgttgaagcatagcgtgggcgaggtttcgcaaagtggtaggcaccgtcgaatggggatggagcaggaccgtcttcgagtagaccggtttggtaaacaagagctattgtcttcgccgattgggacgagcattggtgagggggatctgcagaatctttttgagggtgagtaattgaaaataatgttgttcaattatagggaggcgggcatcatcccgaaggttgagccgatttagtatgtggttccttcgctgagtgtatgtaactgcaacttgtattgtaatgtggcctgttggccgttttcgcgcacttgtgctaatccggctgcacccttaggcgacttttgcgtggagtgtcgattgacacac

SEQ ID NO: 128872 - DNA, 604 bp, Zea Mays
ggggtatcagacgatctcaaccatcggatcaaagatcgacggataggattagatccatgggcgagggcaagcgcacgctggtgagcgaggcgctgacaagcgagctagcggcgtcagtgaccggggggagcgcactgaccggtcggacccagcgccaggggcgcaggtgctgaccgatgggcccggacacaggttgcgcgggcgcgaagcggtatcccgcgatctcggccgtgtgatcaagatcgaacgggggagatcaaagccgggagggctggttagctacgggcagcgccagtcctcttcacagcggtgaggtcgccggagttggggcaggtgcgtgctacggtggttctggggtcgccggagttggctagaaatgaaggggatgactcagtgaactcgctggcggggttgtggccacgagaccggggccagagaggggagaacggtggggaaaatgttccgggcgggtcgggacaattccgatgaggaattccggtagctaggagaggcaatcaaccgcgatagggctcggtctagttctagtggaggtggggaagcactatgggccaacgtcggggcactggacggggttgggttggcc

SEQ ID NO: 128873 - DNA, 505 bp, Zea Mays
gtgctctcgtcagttgtcctcccccttgtcattgggccgaccctccccttttatagactaaggagagggcgtttacaagtggcatctcgtggaaggagttattgtgtcgtggtagaacgaagcattctacctatggtagaaacttgtctatcagtattcactctagtcgtctgagctctccggtcgggccctttaagtcggctgggatgacgtgagtgggtggtgggggacttaggcatcatcattactcctccagtgtcgcgctaacccttggccttcgtagcatgagtctcggtgttcctcatcgtgttgtgggccctgtagatcatcaggggactcagacctaggctcggtaggccataaatgaattatagatctatgacatcataggtcatgagtggggcactggtccaggttcgcaagtcatgaatggaaggaggatcgactctttttatcgtggctcggcgccaagcatatttaatgcggccagtcatttctgacggag

SEQ ID NO: 128874 - DNA, 500 bp, Zea Mays
ggaggttcccgtgcctgatttcactgacgccgaccccaatgggtgtgctccatctactcctgatcccaatgggtgtgccccatccgatgctgatcccaatgggtgtgccccatccgatgctgatcccaatgggtgtgccgcttatgttgttgatgaaaacgacggggaggaagaagatgaggtccctctgactcggaagaacagtcggcagtatattgctagtggggagagtagtgggttccttctcctgctttttcagccctcgttggcctacaggagttatctctggcaaattttgatcagaccctagaggatatggttccagaggaccttttgttagagccagcggatgacggtgtgatggaggtttgtgctgatgtgctcgatgctgggttgaggtcatcccgcgcctcatcgaccttagagcgcggtcttgagggccaagagactaacttggatcatctcggtcccatggaagcaacggaggggccttcagcctt

SEQ ID NO: 128875 - DNA, 379 bp, Zea Mays
gaggccgacgcgttagccaaagccgcagccagaggcgaagcccagccctccgacgtgttctaccacgtcatcagcacgccagccgtccgcagtccagagggcctacaaataaccaacgacaccgagggccatcgcatagtcaacctcatcatggccgaagattggcgggccccaatcaccctgttcctgcagggatattaccatccaagcaacgtcaacgaggccaagcgcctcaagcaccaaagccgggacttcacaatcattaagggccagctttacaagaagggagccagtcaacctatgcttaaatgcatcaccgaaaccgaaggcgtccagatcctgcgcgaagtccacagcggaacttgtggctctcattcgg

SEQ ID NO: 128876 - DNA, 578 bp, Zea Mays
caggtgtttgtcgtgttcctgcatgcacgcagcacatgtggatctcttcgcccgccacggagctagattaagtcagggccacgtgtgcgtaactcgatctccagtagtgcatttttttcttcggtttggagttctcttctaccccggccggcttctacgttgacaagctccaaccggccggccggccggcttccagaaaagcagtacgtgaacgtgacgttcggtaggtgtacttgttatttgtttgtgtcgtcctccttggtgtctggagatcgagtcgattagccagacagaccagacgtagccgcgcacggtcggcttgcttgtgcatggtgagacacgttttctcttttttgttcatacatgcatgtagtactgtgcgcatttaatttgtggccatgcttatgagtcgtctcacactagtactgtacgcatttttaatttgtgcgttggtggattttttttctccccatatatcacgacacgacgcacaaacatttgtctatagtccaactttgcgcgtgacgtaagtcggtcggtcgtcgtacaaagtttggacggccggataccctgcatcg

SEQ ID NO: 128877 - DNA, 554 bp, Zea Mays
cgaaattcaaagtgaacttggaaaaagaggaaggagaatagattataaaacagaaaagaataaaagacttcctgggccgaccgacctcctatttggcccactatctcattcagccgcaagcccagttccactcccacgccgactggcgggacccgctcgtcaggcgtttctcacgcagcaggctgcatgcacctggcttgtgggaccactgagcagcgtcatccgcacaccgggacaccacgtccttgctagtgggcccgtctcgtcataggaccatctagcgtgtcgcttacatgtgggtcccggccacctgcctttcttcctcctccaccacggctggtgctgttggaatcaaacgaaatctccgctaccagaaatctacgaactccccaaccgaacgccgcgagattcaagccgacgagcgcggacttcgggaccgggtcggccaagctcggactccgctgctatgctataaaaccgaggccgatcccccttgcaacagctcccatggctgcgcggccgctctccctgttccccatggcgagctccctcca

SEQ ID NO: 128878 - DNA, 1287 bp, Zea Mays
cgcgctcctgcgcctccttctctcgccagcgcccacgctcccggcctccgaccccacggccgccatcctcttccagaccctacctcccttccttcagtcccaggcgctctccttcctcgtctcctctgctggcctcctcgatccgcacctcctccgtaccctcgcagcccgtgtcctctccgctccacatggcctgtatggactatgggtcctccgcggcgcccgtcatctgatcgacggattgcctgaagaggaaggcgtccctggtgttgcctccgaggagtttatcgatgggtttcacgatccgccaacgtggcttcaagaagcgggcgcgcgggcgcatccggtcttgccgtggctccctgttgattgccggagcttgatgggtagcgggtgcgggacccgtgctggtcgtggcggtgagtatggttcggacgggattgggttggagaacttggtgttggtgcaaaacgaggacgtggagatgcaggaggctggacgtgttcttcctcctcaagctcctccgcttgaggactcaatcatgcagagagtcgtggctctgcagaaggagattgtgacagtggaatctgtcttggcggcccggcgggtggcgaaggatttgcaggacctttgcgttgagtccaggaatgctgcaggagtgcttagcttagtacagccgtgggaagctgacgatgacactctgagggtcttgctttccaatttagtgcttgaggaagatggggtggatggaaaaggaccagcacttgttctgtgttctgttttcttaccacagttactggagcttcaaagaccagcttcatccgttctcctttccactgcattgggtctctgcaagcgccacccagctgcagcactggaagctgtactctttccactggttcttagaaagggcggcctaaatgttccccagtgtgatgtgttaacacgtattatcaaggaatgcatgcatccactgcaagttactgctttctgccataggctgctttcaggaaaggagcaagagaggaaaccaatctgtatgcctcagcatatggagaatatcggtactcatttggtgtggacggaatctctgtttgcactattttacaacattcttagtcaagatatttacttgacaccaagcaccgttaatgagctaatttctgtgattgatgaccgggcatcagagttcccgaggtcattgaaatttggcaactttctgctgtgcttcttatcaaagtgttggcatgaatgtaagcatcagagggttttacttgagagagctgc

SEQ ID NO: 128879 - DNA, 1058 bp, Zea Mays
ttgtgaaatagattagaccctctccacatgttttaacttagttcaccctacataaagaatgagagaccaacccaaccaatagagtcttgatggattgcatgatctacctatccccacctaacatcaaacaaacttttgacctacatcatgtagtctatctcatccataaccatcttaaccatattcccccaactccgctgagatacactaatctcgaaccaatgagaccaagaccagagaagaacaagctcaacctcgtcaaggaaggagagaagtcaaactcgaccttcaactgcattgccactcaacacgaaattctttctcaccataaactttcttaccctaggttattcttgccctaacctacccatcttttattctacataataaaatggctatacatagaaacacacatgctttcctaatcactttctaattaaaaacttcttattcttaaactaattagaatctaaaagtaaactataaataaggctttttcacccttttcttacaaatctcgagggcgagatttttgttaaggggggtaggatttgtaatacccaaaatcttattttgtgaagttataaaacaatgtccgaataatttgagataaaataatttctataaatgtttttaatccttcataaaacataaccctttaattttaataaataaaaaaaaacaaaggtggaattatgggagaacctttaaacttacatccaaaatggtatttctcaacaatatgtttacttcacatttgaaatatatatttctaaataactgaataaaatattccctacaaatataacttgaatatcatgctggagttttcactgtgcatttaaaagttgaactcaaaccttgagtgtgaattgcaaactaaatttgaattaggaatagaaaagaaaaaaagggaaaatggacaaactggatttgggctgaattccctccccctcagcccaacctggctcacatccatgcggcccatgtgcaacctgctagcccaattcacatcccgcacacacacactgtcaccgacttgtggggccctgtgggcg

SEQ ID NO: 128880 - DNA, 406 bp, Zea Mays
cactcaactgtactgtgtacagtctgttcccagtgcgaggtgcactaaccaacaggttatactctggatcaaatactttcagtctaccagcaaatagtctgatgtcacaacctgcttcctctagttgtccaagactaattatgttgcttttcaattgtggaatgtagtacacactagtgagtaccttgtggtcaccttgtctggttttcatcaccaccgaacctagtccgcagattttgacagtagacccatcaccaaacttcactgacccactgacagtgtcatcaagttgagtaagtgtagatttggtgcctgtcatgtggttactagctccagtgtctaatacccagacttcatctgaacagactgcaggcactactttttcttcagacaggtgtatttcttc

SEQ ID NO: 128881 - DNA, 324 bp, Zea Mays
catgaacgtcgttattctgacttggatcaacggcaccatcaccgacaacctcgccgatacgatctccgagcgtggcgcctctactcacgtcctgtggcttgccatcgagtcccaatttctcgggaaccgcacgacgcgcaccctctacgccgaccaagccttccgctccttcactcatggcgatctttctgctgctgagtactatcgtcgctacaaaaagcttgccgaagattttcgcgaccttggcgagccggtctccaacaagactcttgtcctcaacatcatccacggcctcaacgaacgctttcaagcgctcggtcttca

SEQ ID NO: 128882 - DNA, 481 bp, Zea Mays
ctctggagggggagaaagctcggttgtaccatagtataagtgttcgttacttccaaagctaaaagaatttacaaagctaaattacgacaagtatatctataagtctttcatgctccgcaggtgcttcagctttcctttcctcttccaaggcagcatgagactccttattttttctgatagcttcgtcggctatctctcggccacctttcaaccagacttcggaataaaattttccactcaacgcagtggtttcggctaaaggattcttagtgtcactagctgagatcgagaattctagctaaattacagcctttgcgtgctcacaaccagctttctcgaggagtgagacggctccccgggcaccggcgaaggtgcaaaagtctcctctatcgctgagtatctcatcaaaagcttcagcttcgccgctaatccaccggataaccccctcaggatcactacggataaagttctgcttcaaaga

SEQ ID NO: 128883 - DNA, 327 bp, Zea Mays
cacgtcaacgatattgaatttaccagcgtcaacagtaccgccgtcgtgcaggacaagagaacgtcgtcactgtatcccctgcgccaaggaccagacgaaagagataatgattgaatagtactacgtgccgggtacttgcggtggagattacgagtggacaggaggagaaacccatcatcatcgctctgaagaaatccagtaggggtacggcgtcgatcagcgaccgtgtagtgtagtagactcccgtagtggacgccgcacttgactgattttacacgatcagcagcagcagcagtagtgtcactaaaaatttaaaaactagggctg

SEQ ID NO: 128884 - DNA, 533 bp, Zea Mays
cacaattgggaatgaagtgcaagcatgcctaatggctttcaataccgtatgcacctacatcagtactagagatttagttcaagaacacatcgctttcaaagtatggcctcttgcaaatgaatgggaaatgctaaaggaagttgccactggctccaggcaaggtggcttggtttatcttaagtacaccttctagtacataagccaatttgatgagccaaatgatgactggctagacgctatagaagcaacgagtgatgagctacttggagcccactcgaggacagaagacgaagccatgacagttgccttcagcgctcatgggaaaaagaggctgaacagggtcttcgatgttattgggtttgtttacccagactactgttttgtcgtccgaaggcatgggggataaaggaaaattgctgcttcaacctcttctagcgcaccaaagagagccaaggtcttgacacgtagggcaaagcctattgggacggtccatgtgctgaagctcattgaaagtgcagaggctgcccccttac

SEQ ID NO: 128885 - DNA, 609 bp, Zea Mays
catggcggagctataggagaagttctcaccggctgttgaggaggttgcgagctcgcccacgctgcgcggcggctcggccgcgagagtcggagtgcggcgacaaattcgtgggatccccgtcgaattggtggccgaagtagttcccacgctagggagggaaaagggaaagccgagtgtggccatggggaggcggcggagaagcccgggcgcaggagggagctcgccaaggaggactggccgagcggacctggcagggagccacccgccacgccatttatattcgggtgcagggagaggaagaggattacggaacccagctggcgcgaggatcggtaggtagttcgggcaggtcgttaccgctgcgaggaatcggggaagaagatccacagggcgcgcttggatggaacgacgaggaggtgaggccgagttcatattgccgcgaggtgacggctgattcgcgcaagctccgggcagggtcgttgaacccgcgcggtttttttgcggagggtttgttagcgaggaggattgcgacggagatcttgagcggcttgcaacgaaccgagcaaagtgacggatccgacgagatagccccaccactcagggtcagcg

SEQ ID NO: 128886 - DNA, 413 bp, Zea Mays
tttgcagtctttcaagcaagagaagaagtctgtcacagagtatgaagtgggcttcaacaagatggtccgctttgtccctcatgtggcttttaatgagatggagaaggcgagccagttccgtcagggcctgaaaccttctatcaggcatgccttgggtgcctttccgttggtggacttccgtactatagtggagcagtcactgggtgtggagatgcagcatcagtataccatggagtcgcagaagtcttcgggtgttgatgagccacgtggccaggacgcgaggaggggcaacactggaggtccatcccacaagaggggcaagtctcagcatcagcgccaccatccttaccgtggcaaatcttctgactcgggtacttcgggaggaagtactcagaggtttcgggctgttccta

SEQ ID NO: 128887 - DNA, 301 bp, Zea Mays
ggacgctcctaggctcctgcgcgtgagcacaaaccataccatgttttacgcggtgaagacgtcaaacattccacaaaagacttctgcaccacaaaagaagacaaagaaagaatggagtccaaaataatagctagggcattacccaaacaaatagtgaaggctgtaacccacacatatcagccacattacacacaacactaccgaaaaatgctacccccatacacataatgtcaaccaaactaccaaccccaccccatccaacaagaaaggctaccactcccgccgccaccccaactattac

SEQ ID NO: 128888 - DNA, 456 bp, Zea Mays
tatcgcgcagttatatcctatttttggaagatagtgttattgcaggcgccatcgggtagggaggtggtattcttgggaagttccccaaagttcacgttatctttgttggcgcaattgcttccggatcgccggtcaaggaagtcaggaatctttttctccatggtggtggagggtgaggctgccttgcgggtgcaggacatctgggtggtgtgtgactttgccgacgtttttctggcagagcttccaggcattcctccggagcgcgatgcagcttttgagatcaagatgattccgggtatgcagcctattcataaggccccgtatcggatggccccaaaggagcaggttgaattaaagcggcaattggatgatttgctggctaagggtttcattaggcctagcaggtctccatgggcttccacagtattgtttgttgagaagaaggataaaagcaag

SEQ ID NO: 128889 - DNA, 538 bp, Zea Mays
tttgaatccagcaaaattagtgtggctaaatttggttgaatttaactcaagttataaatttcctaagttctctgctgaatttaaaaagaataacagaaaatggataaaggaaaaggggttttgcactggggtccccggtgaaaggttttaagtgtattatagacaggtccccggttcactattcatctgagtctatgactctacagaaaactccctagggtttcacaaaatcgaacccccgatccttcccctaatggaacagtgaccgcgtcgaaagaaaagggcgaaggggcttaccggtggcgaggttgctccgatgaggggtcgggtgaggtccgggagtctctggcgatcacgtcgaggtgcggatcgtcggttgtggtggtcggagtaggtcgatccgcgtgcgcaggcgggggagcttgtcggcggcgaggaattcggcctgctcacggcaccataatccgattgaatgggtcagggagcttcaccagaggtcaaggaaggtatgtgcacgaagaatttgagaatggttccc

SEQ ID NO: 128890 - DNA, 576 bp, Zea Mays
gctggagaggcttggttttgggcctatatggcgcgatgtgcttagtaggctgctcatgacatcctctactcagatcctcaatggggtgcctggtgatttcattacccataggagagggctgcggcagggggaccctttgtccccattactgtttgtgctggtcatggacattctcaatgcgcttattgtcaaggcagcggatgatggtctactccaacctctatcttcgggttctatcaagcattgaatctctctatatgctgatgacatggtactctttctaagaccagtggccaatgaccttaatattgttgctcagattttggatctttttggagatgctactggtttgaaaaccaacattcagaagagtagagtggtgccaattcagtgttctcctgctcatctctagacggtccaggaatgttttcctagcggtttgaatgtgtttccatccatgtacttgggtttacctcttacccctaagaagctcagtaaggctcaattgcaacccataattgacaaactaactgacctccttcctggttggaaggccaatttgatgactagggctgg

SEQ ID NO: 128891 - DNA, 487 bp, Zea Mays
ggcacggggaggaagaagacggccatggtccgttgggtgagagatagccagtgtctgggccgttggattcacatggggtggcggtgatctggttggtgcgaatcatttccgggcgcccatccgagctgttgattgagtgacgggtggtagagattagatcccgggggtgtcagcaccgcatccgtagatctgggatcggccggtccacaatgcatactggttcgcagttatgccgatctaatcaggaacgttcattcgtgatccattggccgaagctaaaccataccgtttcgacccccactttgcagaagaacccctgggtttattgagattcaacccgcagtccatgtagcagtaatctgagtctcaggaaatcttataagttagcccctgacctctctggtttttatgcgcccagtccagaactcatttaaaatgaataaatgaattagtaaatgcaattttaatacaaaacaaattctagaaa

SEQ ID NO: 128892 - DNA, 1088 bp, Zea Mays
caggattaaaccggccattgcgaccccagccacgcgggccagaaccaccacgaccatgacgggcagcaacattagtcgatggctgggatcctccatacagcaaagccatcctactctcaaaattgaggagttgcgagtatgcctccccaactgagacggaatccttctatgcaacaatggcagagaccacatggttgtattcttcatctagtcccacagggatgtaggagactagttcttcttcatcaatgggcttccgagcagatgccatctcatctgcaagtgccttcatttttgtaacatactcagaaattgacaagttacctttccaagtcatggccaatgcaatcctcgtgttgactgttcttgtcgggactgcactgcataggtctgttccagcatgctccacacctcctagggcatggtgtaggatgatacctgacccatgacttctttggacatggaggtgatgaggaagccaaggacctgctgctccaaggcagcccactggatgtactccgggttgctttccttcactgtcttgtcgtcgttcttgatgtcgatctactcttcaggcgccttggcagagccatcaatgtagctctgcagttgtgcgccacgaaggatgggaagaacctgcgccttctagagcgcatagtttgacttggttagattctcagctatagtttgccctagcaaaggtgtaggtatagccatggaggatgagcttgccatgagatctcttggcgtctgctatgagctgggggtggctagggtttgaaggaggtggctttgataccatgaaagaacaccaggttgggaagtgtttgttacctactacagtaggctgcctgtatgtatttataggagatggaataccatcatcggattacaaaggggctggcgccagtaatcaatcaaatcaatcaaaatagattatgattgattggattctatctataacaaatctgatggattgcctcagattatatctataactgaacagatcctttcctatctttacataggcacatcaccctttccttactttacagatacattcttaatattatctaataggcctttct

SEQ ID NO: 128893 - DNA, 640 bp, Zea Mays
agacaatttctaccatcgactaagagtcgtaagcattaaataccttactactttatatgcacaaataaacttcaacttaacacaactgacacagatagaatttttactaaactcatcatacgcataaccctgtctcgcatacaaccatattatggcgtgcactcgagacacttcaataaatgtggcgcgaccactaatataaatgaacttcgacactcatgtcttaatgatacatcctccacgcaaactagcatttgctaaactactcatcacatcaaccattataactcctatataatcatgaatcccatcacattgcgtagtatttgcacttcaatctcgacttatctgcacgcctcatactcgtctattcaaaaattcttcgcctaaccaatacactacactctacatacgtaggatccatttaacacactcaacgtatacacttaatagaacgtttttcatacgacctataaaatcaatctagccttttcatcgcactacatgtctctttccctatttcgaatgcaaccatactcgggatgcattcaaaatacctcaaaagactctatcacaatcactattataatacatcgacatacatgttcaataatacacctacacacaacctacaatcttt

SEQ ID NO: 128894 - DNA, 487 bp, Zea Mays
cggctgacctgtgagccctcgtggccagtgtctgcttgtgcctgcgtctcataccgtgccgccctcgcacgcacgcattggcccactgtcctgcgggccccacctgcctgcctctccctctggtcacgcggttttggccagcacccgcgtatggtggagttcaagccgctgacgccgtggggcctgcacgcctgtgagtctcacccgtggcgggattcctggggtcaccgcctaggcggtggggtcagtccgtcagatctaatcccatccttgttccaccgtagaaatcccaacagaccccgtaacgaaccccgtaccgtgtggagaccctcctaaccgccatgaagtgctagctcgcgctaaccggactatgattccgtgtcccatctcaccctcccctgtgcctataaagctcaagtcactgcctcctgtcgtcccagcagatcaccgaaatcagatttcatcgacaggttacccgcgtcgtggc

SEQ ID NO: 128895 - DNA, 437 bp, Zea Mays
cggtaattccagacggtatgctgcgggtcccaccctgccaatgatgggatagggacctattaatcgcggggctagctttccttttacttggaacctcctgacaccacgcattggagaaaccttgaggtagacgaagtctccttcctcaaatctgagctccctccgcctgttgtctgcataactcttctgccgactctgagcttcaagtaaccttctgcggatcagtgcaactttctcttccgcctctttgacaaaggcatgtccttctagtgctttttaccctacgttggaccacatgagaggggtctggcattttcgtccatacagtgctttgaatggcgacatcttgatgctggcctggtagctattgttgtatgagaactctacgtagggtagactagattcccaacttctatcaaaagctagcacacatgctc

SEQ ID NO: 128896 - DNA, 619 bp, Zea Mays
aacccctccttgtacgactacatgccctgaggcaggctcgacctaggccttgggaggaacctccatctcgctcgagcctagcctcggcgtagataacatcgaccaaaggacgccaccaactcctccatgaaggctgctgacaacgggatggctacatgaccgacgtcaagtttgctttacgccatacggggacaattgccatgcgctttttaccatacttatcactgtttcaacaactacgactcggacaacacctccattagatatgctcaggtacgcatccgagccctagatcctagacacacaccactaattcactcgttggtaagacccttgggtcaaacaccgacacaacctctccctctcttgtaccagtaatttttccagtcatccgttgaccaaggttcaataaatgcactcaaataaaaggaatgtgatcccccacttgcagattggatcctaaaggctatactactatataaaatgtagaacatgtgtgcatcagtcagtgccaaaactacaaactcatcaagagtgggacgaaaatagtttgatcctagtcaagtaattggtgtttgcaacaattggattcacaaaccttttcaaggggcataatcac

SEQ ID NO: 128897 - DNA, 479 bp, Zea Mays
gggattgaatgtgtattatgtgcgccaacagttctaagtactatctacatattacttgtctaccagtcgaaaaaattagtttggccatgggacagcgggaacaaccacgtctcccggcggccctcctctttcgtctaattttgacggatagctggagacaacattgggatggtactgtcacgatccttagcctaaaaacaaacttatataagggattgttctgtaccgtctcgtcattgtaacaaaaaatactaacattgactcgttatatctaaagttctgaacatatgttgagtcctccaccgagctttgtcaaaataagagctagcatagacagctacacatagatatgtcaatagagaattctccgtcagggtttagacacctcatacccattcccataaagctatattcctctccatccccatactcatcatgggtataagattcatcatatatccataccctttcgggtatcg

SEQ ID NO: 128898 - DNA, 493 bp, Zea Mays
tgaggccatgtattggagttgctttggagtatatggattacaaatgagatgcgatggtgctcagagatcatggatgagtgctagtgtgtgatgggatgagatgtgatgttttcgtaggggtacccccttggacttatatagatgactagaggggtatccctttacaagttgtgatcactatctactctacttatctcctttatcacgacatgtcgtcctgtttatccggagttcaaacgcttcctcagccgagttaatgctgattgtatagctcttcaggtgcgtgcaacttctttatccaagatatcagagtttcggtctacgcctaacctggacgtccagtccttgccttcttggatcgaattcgcccaacctagccgtggcctgatgactcgtccctgaaagcaaaccatcgaggggccctttaggcggtccatgatatgtttctatgtttgtgaggacccgaaggatatctatcccccatacaaggggc

SEQ ID NO: 128899 - DNA, 773 bp, Zea Mays
cttctcatgtataacttttccaacacttgtatcatatacatacaagtaaatgcagcaaaaatagtaaagatttctagcggcatgagagtggacaggttgcatcacaataaacaacattattgaaattaataatggtttttgcatcacaataatggttttgtatcacatagcttagttttttatctctccaaaatcaattattcgtcacaataaacaacaacatcacttaaatcaaagaccccaaaaatcaattacttcatcacaataaacaacaacatcactgaattcaattacttcatcattgaatttatcacaataaactaaattataccaaggttggcggcatggaggctccgggcatgacgatggcaactccgggcatgacgatggcaactccgggcgcggcgtggagactcctggcagtggcagctccaggcggtgatcgatgccgccggtgggcggagaggaggtcggtgccaacgggcgaagaggagaccagcggcgacgtgcgcgagcagagagatgagccagaaaaagaagggaataggaggagccagcgacgcgcggtttcttaaaacgactaagaatgtcggctagggcaaggccgacgtttttaaagctttaacaatgtcgatcgggttgaagccgacaaacttaaacttaggtatgtctgttgatgttttatatagtagagatatcacaattagacatggcaacaaatagataacacaattaaaaacaatgaaatattttttttacctgtttcatgtgga

SEQ ID NO: 128900 - DNA, 278 bp, Zea Mays
tgaattttggagtgggcgcactattacagaggaagacaggggcctcggcataattcttcctaagacacagaaggctacggcgcggactgcgggtttattatgtaattcattaggggttcttatgtaaaactacgtagccgaaggggtacgcagagatccaggccgcacgatcagatattaagggtcgggattagatccaaacccacaacccacctgagccatggatctcgagatcgacgcccaatccgtccacacccgagctaggctacaaagatcca

SEQ ID NO: 128901 - DNA, 289 bp, Zea Mays
aaggtatgtgaagtacagcttcaacgcttgctcttcatgtccaagctatattagccattatacatgcatcctgcagcccagaaaagagagaaaattaggagcatccattctgccgcaagaaacgttgtgaatgagtctttcatgtgtggcactgatgccaacaagaagactcttaataggcaaataaagctagcacttattttcttttctaacatcatcgatccatcacagtacatgggtcgatcatatctgtttgttgaagcaagaccacattcctgcccagctaaaa

SEQ ID NO: 128902 - DNA, 385 bp, Zea Mays
cgaaggcacaaaaaagttttgcggcaactcccaagagaagatggatggctaatgtactagatgtgctagaaacagtaaagactttgaactcgactccttcaaagaaaattgtcgaagcctcgaaggcgcaaactgaagttgaaacagagcagaccgaaattgaaactgcagtaattcaagctaatgccaaagctgggccttcatagtccactgaaataaatcctgcggtaattgaagaaaaagcaagagaagaaaaaaccacagagcaaattacgcctgaaaaggttgccactcctgctcccgaagctttgaaagagagcattgatccgtcatgcttcgggaaaggtactttctaagaaagaagaacgagaagctcaacattatg

SEQ ID NO: 128903 - DNA, 409 bp, Zea Mays
ctcacccgggagtccgtatgctatctgctatatgctaggctggctgtgggtgtctatgtatgtatcctcctcctccgttgaaacaacgtagcgtacgacactgctgcatgtgtggccttgaagatatgagtatctatgcatgatgcggatgctgtacatgtgcattgcatcgctcttctctctccctgcggtggtgtgtacgagacggtgggtacgtacgctaacgctagcagctgcctcccgcgtgacgccaggggcagcccggccggacgcggtgtttcgttccatgaccatgaggcgtgatctcagtcatggcccaactacgccaggggcttgcattgcccgcgcgcgtagactttgcacctgcgcatgtatgtatgtacatcctgcagcgcacagcagactgagc

SEQ ID NO: 128904 - DNA, 522 bp, Zea Mays
gcagaattgatctacctgccaacccattcaacggaagggtacttagacagcaacaacaacaagccgagatgaatcctccgaatcctccaaatcctccacccaccagaactgatccagcagttgcagcccagatgcggataatgcaacagatggctgatactatggcagatatgcacgggcagatacgataggagcgtcaggagatgcgccaagagagagaagagatgcgccaagagcgaagggtgcaacagcagcaagcaccactgccaccacctctaccaccacttccaccccggtacaagcaccgagaattcatgagccataagtcgcctaccttcgccagctctccagatcctctgcacgccgatgactggttgaagtcagtggagaagatgttgaatattgcacaatgttctgaccggaagaaggtttttatgctttgactggccctgctactgattggtgggattcctacactgctgcccacgatgctgctgatactatcacatgggcggaatttgc

SEQ ID NO: 128905 - DNA, 582 bp, Zea Mays
ttctagcatgatgagtgactgctgtttggggtagttcaccttgtttacctgtgactggcacttagttgatttcctgcttactatatgcttagtgctgtctttgtggtgaacacctctttgaaatgcttaaaactgaatcaaaatgcttacacttcacatattttgtgcatatgatcagtttgagcatctgctagcacgtgcatttattgctacacacatagcacagcaccacttagaacatttttacactctgactggtatactcctgaagctcctgcattttctccatttcctactctctgttacatttctgcatcttctcagggggagttctcttgtcgaggggaagtttttctttctacccttgtttgtgcttgatgagttcacttgtcaacaagggggagagattttgagatttcccggttcctctatcaagggggagaaatttggtcttttgggcttcctctcatccaagggggggaaatgtgttatttggagttgttggtctctgggagagatttttgggagtattgtgatagggggaggagaattgagccttttggagcttttgctagttgtgtg

SEQ ID NO: 128906 - DNA, 491 bp, Zea Mays
aaaactagccattatgggaaaattgtctcctttctgcgcacttgcaaacagtccacgccctagatctagaatggatcaacattttggaaaatcaccttatatgcaacatgtgacgtggacttgatgtatgtatagtacaacccagacgtgagtgatggaattttctcgcatatatgtttgtcatatttgttcagcttggtcaaaaagagaaactcttcttgattttcatcatgggtttcaacatagatctcattctaccggatatctctgaaacttaggagggtatgagtggaatcaggatacaacaatgcatcctcgataacgatttcagtacccatggggaggataatagttgctcgtctagagccaactatcactgcatcgcatccagcgatggtcaaaacttttacatctctctttttaagagtctaaaaatatttgatatccttgagtatagagtttgtggtacaactattcacaaggcataattc

SEQ ID NO: 128907 - DNA, 605 bp, Zea Mays
ggaggcagtacaagaaatcatcttcattagtgtcgttaaacactaaggcccccttaggatattttaatttttgggcatagtgtctggcttccaggacttcttctttggataaatttttccccgaagcatgtcgaaaaatgtaatcaatatcttcaactagggcttcggggatagaaggttttgctttttctgccatacttcgccctgaagtttgctgatcagccttgtcctcaggcatgacagccttcgtctcaatgggcactgagggcccagcttcggcttcggcttggtctttggcagctttagcaattttcttagtaggggcggggcttaaggcctttgtggtctccagcagcatccaacatgctggccatcctcctcttgggagttgcggcaggggccttttgcaccttcggcagttttgcctctgatggaggtctcacaatttctagcgttttcattgtttcttccacctttggctcttcggccttatcatccttagcttcgatcggcctgactgtaggcatcttcggcactacagttggctcttcaatgctctgcacaattggagcagattgtcctacttcggcagttgaagaggcccc

SEQ ID NO: 128908 - DNA, 481 bp, Zea Mays
cccattggggtcagcttcaacatgattacacccattggggtcagcttcagcaggatcacacccattggggtcagctggtgcacggatacattcgttggggttagttggtgcacggtcacacccattggggtcaacttcagcaggtacaccaccagtgggatcaactccagtaaagacctctactggtacttcttcacaaacaggagcagaaggcccaacatcctggtccaagcatgacaaccgctaaagccgtctctttttcttcttcttcccttcagcaggtgcagttgggcggctgacctggcgaagacgctttgggcgagtaccctcaggctttcggatgtccactattctgtcaagctctggtataactgcaacaaccattgtttcagcaggggccgagtcagaagattctccagccaacatatcgagcacaacattcatctctgcatcatctggactcgctggcatctcaaaatga

SEQ ID NO: 128909 - DNA, 471 bp, Zea Mays
tgcctccgaaccatagaccataaagaagggagtgtttccatgcaaagctcggctaggttgagttattaggctccagaccacatacgacaactctctgatccagtttcctgcgaacttttcattcttgtcgaagactttctttctgagtgcttccaatatcattccattagctctttctacctgaccgttggctcttgggtgtgctactgatgcatatttgatctggatgcttctttgttcgcagaaatcaaagaactctgaactagtgaaattggatctcaggttagttatgatgctattcggtattccgaacctgaatattatatcttgtatgaattccactgccttagctgaagtcagggaagcaatgggtttgtactctatccatttagtgaatttgtcaatagcaactagtacatgagtgtatcctccttgagctttcttgaagggtccaatcatgtccagtcccca

SEQ ID NO: 128910 - DNA, 383 bp, Zea Mays
ggcatctaccatgactggtgcgagtccttcagcgcctacccgagatcaaagaggtcagtggccagcaccaccagtctgtctgttttcttcacatctttctagcttgatgacgcacatggccgtcttcttcagatgcgcggttctgccatggtggtggaggtggacaggcacaggatcgtcaggccaggggtcagcatcgtcgtgcgcgacaaggccagcgccgtcggcgaggtggacaagctcctgagatcgctccacttggacgcgcggctgaaggacgacgaaggcgtgatgtacgcagagaagcccgattggcggccggagctcgaagaagagccgttgtaatggccaccatttcagagtggcgagcagtagggttcttt

SEQ ID NO: 128911 - DNA, 354 bp, Zea Mays
gtaaatagatgtaatttatgagatctagatatggccctcttctaccttccttctctctgtgtgcttctgcggtagtgcctggagttcggcgaaggattctcggcttgaaatcacggtggctccgaacttctttcacgctcgacgatgctgtgtaggcctctatggcatcatcgacatctaggtaccggtgtggacaactagattgcgatggctctctctcaatatcattgttttcctcacagacgctaatggcgagctctccgcgtcctgttgcccctccgacgacttcgatggatatgcgatgtgcttggagctttttatgcccaagcggagtggtccgcacgccgtatcagc

SEQ ID NO: 128912 - DNA, 469 bp, Zea Mays
gttattctcgaagattgatctcagatcgggttatcatcaaattcagggaaacacatttactcaaggccatcagcacaactcccaatcatcatggacacagcaaagctccttcaagccactagctccaagaggcagaggaggtagaagcttcagtggaagattcagctcgcaaccaagaaggttgttttggctattctatggagaagataaggggcatacaataaggacatgccaaatcacaattcagaagcaaaaggaaatagttgaggccgaagcacggcagaatcagccaaagcaggtactgcatattgcttcgtgctattccccatacattctcgagtatgtggacaaccaacaacccacattattagttgcttcggcaagccactccccagctgcttgggccctgccaccaccgccaccactcatggctccaacttcgtctcacaatcaacagccagaagggcac

SEQ ID NO: 128913 - DNA, 409 bp, Zea Mays
ggaagtttctgaagtatacaaagctatttatagtcatggccaaatcttgaatatgctagcatagtagcattgctgttatattggcccagatagcaaatagacacagaaacacaggtgaagcaaaagacatacagaagcatgtggcagtacagtgaccaagtgttttgcattagctaataaacgtgatagagagccagagatcccaactaggagtccctctgtttgcttatggaatttggaaacaacacagatatctaatttgagttgccgcgccctttttcagaggaaaacttctatttccactgcttcagaactatcagcattatccacttttcatactaacaaaaaccatgagcccaggacttcgctagaaagattagcagattagagtgtcgttgctggatcttgg

SEQ ID NO: 128914 - DNA, 291 bp, Zea Mays
agcaaataatcatgcttcagatacataaaggtcatgtttaaaacctgttttaagatgaccaaaaaagggaagacagtcatgaatacaagacgattttgcacatagcaagaacaggagcgatagtcagaaaacactggtttgggagtgagagcgatagatgacgaggtgtcacagataggcagagctacgagggactgcaagaatatactgactacaacagacagaaattgataagcaggttacatttgaaaggagcagttcatcaataaaactaacagaatcccatacacg

SEQ ID NO: 128915 - DNA, 271 bp, Zea Mays
agtggattgatagagagtgatggaggagctgcatcctatgtgcaataatcaaaggtagcatggttggctacacccgtggatcatcattgttcatcgtttggtgaatataaaaagttggatgcttgtgtgacatcaccaatggaggagtctataccaccataattggtcattcgagacgtgtgagagttgaggaagatatcaagtgagttaagactcatacacaatagctctagacacccaagtgcttgcaaaatcacttagtcattagtgt

SEQ ID NO: 128916 - DNA, 552 bp, Zea Mays
tatggcctgacgttgtctgtcattcaatatgtgaatgcttgcaatcacatcttgtgggttgcatctgacattgagcctctgttataaaatatagatccaaaaacaattgtgttattatcaaaaaaatgagaatcttacgaatatgatattgtttgttgagtatgcataaaactaacctgtcgggaaagatcctccgcttttatcctctttgtcacaacttttcttaaaactcttgtatggctttcagaaacattacgcttcttaacagctggcataaagtcatcgtcatcagaatccacctctattgtttctttgatcaaagtttgactgtcaacatttggaggatttcccacaatttgacttggattggactgttctgcgcacggaatgtcaacgctgaaacactcctggcttgactgaattgttatacgtttgggattattcggaggacggtccacgtgcttcatgttttttagtcaaaattgcatgcataatacacagaactctaaacattaatctgttggatatgcggatgtattgattgtgtggtat

SEQ ID NO: 128917 - DNA, 724 bp, Zea Mays
gtcagaacggctgaatgccaattgccatggtacagtgcctgtgcagatcagaacgccagcgcggcaatctcaccgccgaagaccgatctccgccgcgattcacgtcgccgccgttgagatttacgccaccagtgaccagataaggccgccaggtaaaagccatgcgcctaaggataactccggtgactcgccgccgtgcctcccccttgctcaccgaacccgtggataagaattctcaccgccgttaagccatcaccggcgtccgccgcgtggctctaactttccaccgcatcgccgtaagccttagtggctccccgttgatcgccggagcaattgccacgacgctggacaccaagccactgcgccagtactcttcttcctcctccgaccgccgcgcgtccccactaaaattcccggccaccgccgttgatccctataaaattgaagcccccaccagccctgcaaggtcatcacacacccagccaccaaaaatcactagcaatcgttcgtcagagagcttgaattttagttttcccccaaactggtctccgccaccgcaaagcgcaccctcaccgtggccagccctccacaggtctgatcatgccctctttgttcttgttttagcatctttgtatgctggtgatgctcaccaactcgcccaattgagctaagatcccatgagtcaccgggaacgtgtagattgttagttcatccgcgcgctcac

SEQ ID NO: 128918 - DNA, 544 bp, Zea Mays
ctgtgtttctctaggcagtgccacccccttttgtatcaaattcaaatcttgtgaattcctgtgaaatccagtgcaaccaagttgtgaaatgtgttcccttgtgtccattgagtgtccttgcaggttcctagctccttcgggagggttttcccacctcaaatagccgtttcaccgaaaccctagaactccgcacgtcacgtgctcggtgaaatgcccaaaccagccaaaaatgatccaatcgaacccaaatttttcaggcacattcacaacacctccagttacatattcgccaaatttcacgccaatccgagattccaggcttaattttcaccaaatttcccgtttcgagcgatcgtttccgagccgagtgcccaaatccttttttcttcgcctaaattcaaaccaagcacacacttcactcatattcacctatataaacctattcgtgaagtatcggctcaattccctgtcgttttgtgcctcaattcaaattccaaacctcctatggcactatttatcgttcaaacgtcgttttcacgccgtt

SEQ ID NO: 128919 - DNA, 377 bp, Zea Mays
gggtgaggcagacgtggagctccaaactgagatggcataggagtagtcggtgcaggagtaggcgcagccagatactaaggaaaaccctgcatcggcacaagtcccaggcacataaaactgctgtggaggaagtggaactgaaaattgctgctcagcgcttgacatcatgtggacagtgccctgagaagaggaggaagtcactggctcccatctgagcttcccattgggattcctcctacacaccacatccttgtggtcttgactgcagattaaacacctgccactccactagcactctgcacggcgatgcgcatcaccacaacaaaaacacaccagccccagcccgggcttaggaacagcccgaaacctttgagtac

SEQ ID NO: 128920 - DNA, 706 bp, Zea Mays
cgtcatatggcaacattatagatggtataatgctctacaggtttgttgcagagcttgacttatgttgccatttgaaattaagagaaaatcaagcttcaacttggtctgtcagacaagctatttactgaattgggcgcactgttcatcggttttcagtaacatcgccgtggataaggattggctcgccggtgataaggacgtcgccgtggctcgggtaagacgtcggcagccacggcaaaggttaccggcgacgtgtcaaagcctccctgaggtggcaggcctcggttgaacggcggccaccgtgccatccccaggttccgccgcgcggcgagctcacctgcgcaatcaaatgtctgcggttctcatccgattccggccggtaggctataaattgaccacggacgctgcttcttctccacatcccgtgccgcagcaactaagcacttgactcgagctcaccggaaaacccacgtaattcccaaatctccctctcctctgttcttgctccgccgcgaagaaaccccccgtggccagccatccccgggtgagtacctattcattgttccatgtttttgcttgctgttagcctcctattgcccccagtatcaatcaatcgaactacgaccgaagcctttcaccagaacgtatgcttgctctgaagagcaccgccgcagaccgcctgcacgtcgacccgctactctgtctg

SEQ ID NO: 128921 - DNA, 323 bp, Zea Mays
ggtggtttggttcgactaaaatacaccttcagatttggagaccagtttgacgagccagacgatgattggctgaagagtgtcgaagctacaagtgatgaactgcttgggccatactcgaaaatagaagataatgcactatcagcggccttcggaagctggaaaaagaagaggctcaacagagttttcgatgctattgggttcatgtatcctgactaccgctacccgttatgggggcaaaaaagaaaaggtgcaacttccggtaaagatgatgcttcagctgctccaagcgagcctgcgccgaagaggaaaaaggtgaaggtcct

SEQ ID NO: 128922 - DNA, 493 bp, Zea Mays
gggtgttagagttattgtgtgtgtgctctgtgtgcttgtattctaatggtcctaggcccacccaactctattatttaatacatcacccagcctagtttagggttaaggattcattctccaacaaggatgttgtttatgagtcataaatcctaggtttgatgggtagtcagtgctcaatgagtgttggatccttctcacacgtggacaggtgggcccaacactcgagagacaagagagttcaggtgcacaatgagacagtagacagggaactgtagcatcttgttatatgtgtctcatccgtgtacatcataggggtatttataggtaaccgagaggggcagtgggtccctaagtactgttatacccctggttacctgctacattcctggaatattccccttaatgtggtcattacagtgggcagagtacaataattcagacatgctacgaaatctaccatgcaatggggcttacaagtgggcctagatgacta

SEQ ID NO: 128923 - DNA, 1040 bp, Zea Mays
actactgcggcgacgtcgagagcgtcgtcagcgactcggccgagtgctgccgccgcgacaggtgagcgctgcgccgctgcgccctgcgcgctcctcctgaattcctgcgcattattatattcaacgttcttgccgctttttttcttcttcttacgcttattactatttccccatggatatgataataatcttcgttcgtgattcaggaggagggagacgacgccgtcgagccaggcacgggtagatcgtccctgcagcgacgaggagtgcagccaggccgcagacggcccaacgcgccaccgtcggcgacggaaggctttggcggccaccgcgacagccgcggtcgcttgcagagcgagggcgacgccaccggcagaagagatcgagcagttcttcgcggccgcggagaaggcccaggccgagcgcttcgcagccaagtaagtgagaataacaactcactgcacactgtcgtcgtcgtccgatccgcctcgtgcgcgcttgcaattcatccgttcgtggtggtggttggtggtcgacgtcgagagagactcccacaagctagcacaccaccgggggccggcggcagcgtggtcgctaacttcgggctcggtctcttctctctcccacgcaggtacaatttcgacgtcgcacgcgggctgccgctcggcgccggccggtacgaatggaccccggtagccagcggttggtgacgacgcacgtgcgcgtgcgcgccggccggaaagctagcggcggtggcgcagaagaatgagtagctaggaggaaggagacgccactgggaaagtgggacgagcgtacagacgataaaaggactgaaggagagcagagacagagcattttcacagcagtagctgtagctccccccctgttttgttcagaattctgctggtgagtgtaactcctgcttctgcacagccggcattcaatatgtccagtacagttccacatcagctgacgccgccacgacagttttaccacaccgtcaccttgtttttgctgacaacgcctcggtacctcgcagt

SEQ ID NO: 128924 - DNA, 445 bp, Zea Mays
aaaggcctgggcgaaggggtacaggaggacatcagccgcacgatccagaatcgagggctaggattagatttctttctaaacgaaacggtacgcaatatcagccacacgatcatggatccgcgatccagatcagatcgcacgaagggataagtcatggctaaatctcggccactcgtgcacagatctacggtcacccagtgacttccccccaaatctaatcggggacgttgcacaacgatccaacggtcacggttttctctcttacctccggtcaaagccacggtgatggcgcacacggcacggcggcgccatggccggggtctctcaatccccactctctgtgtttaaactccgatctagatgcggaaatacgtagagaataacggtaaggagtcgttgagggattactcacagcgattcacgcgacgccaatacccttcccacg

SEQ ID NO: 128925 - DNA, 537 bp, Zea Mays
acacttttttggtgtgcgcatgtttcgtggcatccgggcccacgaaaagatcgtgtccccgcaatctgggcagccgtactagtccccacataaatattgatattacgatgtcttatgcttccatttatgatacagtaatccacgtgtcggtccatgggccttcgcgttgatttcgccagcagtttacgtgtatcgggcccacgaatccagcaaccgagcacgcattttttcagctcacctcacatgtaacgctcgcagcggccgaaccctagctcaatcgccgtcgtctgcttcttctccaccgcgcccgccgaaccctagattaatcgccgtcgtgagcttcttctctaccacggccgccgaacacatagagattctccccccgtcgttccaccgccgtcacattcaccttctccgccgcagagacccggaatcgccttctccgtcgcagagacgccgtcgccttattctacctcaccgggaagggacccggaatcgcggaggcggtggtgtcgccccctcgttcttctccaccgc

SEQ ID NO: 128926 - DNA, 349 bp, Zea Mays
ggtagtgggggtgacacgcgcatgatccgggaacgtggggcggtcgcacgttggggtgagccatgtttatggaattgtaacacaataggcaggtattcataacgtgtcgttcacgtaaatctcgcgacatgcagactgcgcagaaaatcgcggaggatattagatcatgccatgaatataggtcagagcggtttaggcgagtataggagattagctggaaaaaacgggctacacacagctgcagacgtttttgttcagagctctgggagagttagggcatacacaatggagacggccaggggatcggagaagtgtggagaagctacggcgacgacgacaccctgtacaa

SEQ ID NO: 128927 - DNA, 446 bp, Zea Mays
acagaatgggaaaagatagggggatggcccctcatgaactccgcccgcttgtccctgggcatctgtggcatctgcacttgcatctaaggttgaggtggggttgttgttgctgcacctgctgcattactgctaaagtctgaccaattgcttggactgcttgggtttgcatcaagaacatatgctccatggtcatcggggtggcggtggcaactgttgctgagctgtctcctcctggggtgctgctactcctactaagcacgccttccacctttgcgcctattctcagacatctgtagaaagcacatacacatcagatctgactctacagcctttcagcataagaaaagatatatggaaatcttcatgacactgaacaattgatcatcttcactgactcccaaaatagccaaacatagcttctcagataaagaggaaagtggaaaaat

SEQ ID NO: 128928 - DNA, 461 bp, Zea Mays
gatggcctactttttgaaagggctcataccaaaactcaagaccatcctcgccggccaagatttccttagcttctctcacctctcaaacaaagctatacaagtggaaagggcaagggaagaagaaaaaggtcacctcaagaggaaattccaagtcctctgagctcagcagcaagaccggcaccagagaactcgatcctttgggcttccacctaagggaccaagcttcaatagactagctggacccactccgtcacgttttagtcagtagagtcagagcttcttttaggccccctcagtcacaagcaaccaaccgccagctaatgcctgttggcactgtggagaccccagtcacttcaagaataactgcccccagttgaaggcatcaggacctacttactccaactcggtgaatggccccaaaaatgcccctgcgcccgcgtccaaggcaccctcctccatca

SEQ ID NO: 128929 - DNA, 429 bp, Zea Mays
ggggagcagtggacgccggagctgcagcggacgcaggagcagaacaccggccgaccggggagcagtggagaaccgaagctagacgcaggagcagaactctggagtccggacggggagcagtggagaaatggagtggaacaccggatggggagcagtggacgccggacgcaggagcgacgagccggacgcaggagcgacgagcgagtagctctaggcggcggccggacggggagcgtctagctctagggttgcctggtcgccggtcggagtggcggctgtggactcaagtctcaggaagcctgggcggactgggccgtcagctattttttattgggctgattgctgtgtgtagcctacgtaggtatatttcggtttttttagtctattcgggttacacgctataaaacccgaacccttacccgataaccg

SEQ ID NO: 128930 - DNA, 1947 bp, Zea Mays
cggcaacgtcttgggcatccgtgtgggagaccttcagtgtggcatcggctgtcagctccaccggcgtcgctcactgcgactgagagtcgctctctgaagaagaattcagtgtggcaacagctgtcagctccaccggcgccgctctctgtgactgagggtcgctctctgaagaagaaatcagtgtgggtgaggattacccctgccggtgaagccccgatggagaaaggtctgcaggaacctagtggtcattcccagcgctctctctgcaacaagaagaaaaaaagaagacgttccaaaggtggcagaggtgctctaggcagtgacaaggctgtttcacattctctgtcagcgtctgaagtcattcctgaagtttcaccaccgcatttaacatctcgggttttggccttctcggatggtatggcaagggaagaattaaacttgagaagggccttgcttgttaccgttactggtacaaggccggaggtccttggttcagaggtattagaagaagtggcacattgtttcagcattaagttggaagacatgacaatccattctgcaaagcctgaggattttcttctattctttcctaatgaagagactgcagtgagggttcttaatgatggtaaagtgctccgaggacctcggttcagcttggtttttaaaagatggtccagattttctcatgcctcttcctcaatcatgtcgagcttggtggatgttgagattaccggaatcccggtgcatgcttggtgccgctcaacagctgaattcatattgggggattcttgtttcattgaggaagttcatccagacactctgttgcagaaaactcttccatcctttgtagcaagggcttggtgcttccaaccgaaacaattgcaccgtgacatgattctgcatattctggagccaggcccacaaaactctgaacgaagatgcttagcctataacataagcgtgagggtacttgcaatctgccatgatggtattagaggtccctcgctgctgactccaccggaggatggcgatcagactgatggttcggacgacatggatgaccagaggaatgatgagcctcggcgtttgggcagtcccttgccccagcgacggtctgttcaccttcgccttgggcctcccccgccgtctggacatggaaggacttcacatacatctaggggacatgaacagccactctttgacgcaccggagttacagcagatggcctcggataatgggatgatactccttaatgagttgtctgcagagaagccaaacagtctccatgatgaggcccctactgacagctggacatgcactattgggccgctgaactccacccagccgttttcgcctcagtccaaagtgactgggtcgctggaaatgacagggctgagttcgcccctcccggtgttgtctaggcttgggcccctcgggtcgctgaccccagccaggccggtttcgcctcagtccgtgaggaatgagacgcagaaatcagctaggattggatcgcccctttctctggcccgtgttcaaccctgcatttcttctgggtcgctggccatatcgaatctgaaagtctattcaagaaggaaaaagactactccgctgcttccaactgaggaacatgtccaacctgttccggaacaggacagtctatccattgccaagtttttcagcaaaatctgcaagaagtcggatgccctactaccaactccaataacccccctggtggctacacccatttctggagtgcaggcccccagacgcagcaggcggcttgctggtattggtgtcgagttcgacttgcacagagagaaatccaacttgcacaaagagaaatccaggccggtcaggaaagctatggtggcccttaaatgcatatcagaaaacgaagaaatcaacaacgaagccttacaagaatatgctgcattatttaatcgctgc

SEQ ID NO: 128931 - DNA, 772 bp, Zea Mays
gctgcttctcgctctacaggccacgaccgggtcatcctcgcctccacccgactgcttctcctcgctccacacacccgcgagttctcctcgtgaacaccaaactcccgctgtcatgctgcccccagatccttgctggtcccacctgcagttgctttcgtcgaggttttggggctgcacgtggtagcctcctggtccctcgctttgtccagtccgtcgggggcactgtctccacagcgaaggcacgttgtggcggcagtaccgctgcatgggcgtcagtgcgggatggccataaggagtatcgagtgttccttttttacctcctctctcattttcctcttctccgcctgacgtttcgtggcgtccgtctacggtttacctttcttcgtcttcctcggtcctacagatctaattttctcactcatgttgtgtgtcgtccgcaggagatcaaatttggtttactcacgccgggtgccgtccacaggagattgtctaggtttgttctcatgccattcgtgaactagatcgtgtggaggcattcatgggtgcatgtttgtttaccattcagtttgcaggtatggcctctttagagaactctagaatcttcatatttttattttgattagtgcccttcttttcaatattcatggtgtctttttcgtataaaattacattcatgtcgtttcttttatttttcaattattttttgaactataaatctatatatgcagtaaatgactgatgagtgcattttgcttgttggttgtctgtatac

SEQ ID NO: 128932 - DNA, 951 bp, Zea Mays
catcaaccttgtgttcgcaatctcccccttgatgagtgcattgtcaacaccaccatatgagcatatgaaagcagaaagaggaagaagaagagaaactcactcaaatgaccaaaagccagataaaagccaaatcaagtcatttagagtaagcaaagcttggtccccaaagaaatgggcaacggctcaacacgaccaagcaggaaaaggctagccctcaataagaggcaaaaacagggctcaacaccactagccagcagccaaaaactcatcagaacttaaaaagcttcatcggagcatacgaaccaaatcagagcataaaatcagcacaaaagctaaaatcaaagctagttcctccagaaagaggcaaacggctcaacacaactatcaacagctccaaaaggctcaattctcttccccctgtcacaatactcccaaaatctctcccagaagaccaacaactcctagtaccacatctctcccccttggatgagaggaagcccgaaagaccaaatttctcccccttgaaagaggaaccgggaaatcttaaaatctctcccccttgttgacaagtgaactcatcaagcacaaacaagggtagaaagaaaaacttcccctcgacaagagaaccccccctgagaaaatgcagaaatgcaacagagagtaggaaatggagaaaatgcaggagcttcaggagtataccagtcagagtgtaaaaatgttctaagtgatgttgtgctaagtgtgcagcaataaatgcacgtgctagcagatgctcaaactgatcatatgcacaagatatgtgaagtgtaagcattttgattcagttttaagcatttcaaagaggtgttcaccataaagacaacactaagcatatagtaagcaggaaatcaactaagtgccaatcacaggtaaacaaggtgaactaccccagacagcggtcactcatcatgc

SEQ ID NO: 128933 - DNA, 306 bp, Zea Mays
agcatatcaattggagttaccggatcatcttgcggatgttcatgatgtatttcatgtatctcagctgaagaaatgtctcagggtgcctgaagaacaattaccaatggaagaccttaatgttcaagatgacctgacttatgctgagtaccccatcaagattcttgatacattgactcgagtaacaagaaataaggttataaagatgtgcaaagttcaatggagtcaccacggtgaagatgaagctacttgggaaagagaagaagagcttcgcatagattttccccaccttttccctagatcttccta

SEQ ID NO: 128934 - DNA, 539 bp, Zea Mays
aattagtgcattagaccaactcaaccgtgagcataagagctaacccaaccaatagtgtcatggtggattgcataatctgtctaccccacctaacatcaaacaagtttttgaccaacatcatgtagtctatctcacctatatctaccttaaccatactccccacttcgataatatacactaatgtcgaatcagtaagaccaagactggagaagaaaagatcaacatcaaatcaagcatggaaggataagattcaagctagatcttcaaaagaatcaagagccacaatcttggatggagtcttttcttatcctactctttcttacccaaacctataaatgctttaaagatatcttttatcctgcataataaagtggctatactcatatatacccatgcttttctaatcacctgataatttgcgataaaaaaagagaagagttttggtattaaaatcaattagaaactaacccatagacaacaaacaatttcttctacatcctcttacaaatctcgaggacgagattcttgttaagggggta

SEQ ID NO: 128935 - DNA, 444 bp, Zea Mays
actcacgccatttgaagtgttgtatggttaccctccacgccatcttggggtggatttcagaacagcatgcgaagtgccctccttgcaatcttggcttgatgaaagaaagatggtaattcaactggtccaacagcaactcgttcgagctcaactccgtcagaaggcacaggctgacaaaaatcgcactgaacgcacctttcagattggtgactgggtctacctcaaactgcagccttatgttcaggcatccttggtccgtcgcgcgaaccacaaactggcattcaaatttttcggcccttacccagtgatcgaaaaggttggctctgttgcttacaaactacgcttgccagaatcttgccacattcatccagtattccatgtctcgcttctcaagaaggcattgggacctcacgtccaggtgagtcctacactaccatctgtttc

SEQ ID NO: 128936 - DNA, 450 bp, Zea Mays
ggggaaaccctgctccaaccctggaggcggtaggcgtggttttatccgaagccatctgccagggggaagagagtcactattatgcacatgccaattatttacaaacaagttattttattcattacaccagtacattacaagcatatggctacggtaagtggtactacacgcgagcgttccctgaggtactaccgaattctttttctagagtgtccccaaattccttaagaagatcatcaaggctagcgagggacatgtcctcgatatcggacaaattctctatcctggcgggagctggtgctgggggagctttcttcttcctctccgtctggcatccttggctcgtggttttcttccggattttctttgtgggggcgagcttcttaagcttcttatcatagtccatctttaaggtccgataggcttcacgggtgttggcctcctcgcctt

SEQ ID NO: 128937 - DNA, 465 bp, Zea Mays
ggccaacacaatgaggactactgcatgtgacatctgtgataatggttgctctcgagaatgtacttgtgacatgtgtttgatacatcataatgcatagtagcggaaatgatgtctgttttcttcttcgaggtttgtcaagtatgacatatttggatctgaatacttcctttcaactggtatgcttgcacagctacacttcatttcagctcttgcttactcaaattcatgatcatctcatctgttacaccgaactaaatctttaactgcaattactatgttgctctctttgcacaggttacattcgaaagggacctgggatattgccgtacatttattaaccgaaaaactttgttacttacggatttttgtttggtaaccgacctgcatacactacattgctcgctccaatacaacaccaattctttgggtatctgcatcaggtatgtgaatcccacatccattgca

SEQ ID NO: 128938 - DNA, 308 bp, Zea Mays
ggggtattgtaggcgaattttggaacaccaggtctggggtcgcggtactgcggcaagctcgccggagtttgggggagagcggtgtcgccgttctgttgtgcatggaaggcaatggctcaggtgccgttgatctcaagactaacgaccaggatcagatagggatgtgaaaagtttaggaccatgggattgacgttcggcaggtgagatcataggtagcgtaccccttcgatccgagaaatgtgtgccctagatctcaaatccagcggtcagtttcacacctcggtttatcatgtaagcgtctgatctgg

SEQ ID NO: 128939 - DNA, 362 bp, Zea Mays
tggcgtgtatgtctcctatgtcctatcgaagtatggctgcatgcagtgctgcagatgaagtgtagggcaaggcaacgtcgacctcgaaaggatcctgcaccaaatccccatcattgggaggttgatctggctacaaatttgttctcaacaactcgcctctgcattctgcccaaatttcccccctgttccatccatgataagctcaaggaaagccttcattattggtgtaattgggatgcctccgatccgaaccaatcagctgcagttcagaggctacaatcgcagccccaatcatttgatttggttgcttaacaaatgatctttttattattttctcaagggccctgagtgtcgcccttaat

SEQ ID NO: 128940 - DNA, 342 bp, Zea Mays
cgcaattattcctaagactcggcgcactgttaaacttgactgcgagttgttttatgataagcgcaggctctcttacgcaaagatccccaaccgaatctgtatcgtggatatcttatcgtcggagaagtaatggactgccacgattagatctgtgatcgtctaaccggtacgcaaggcggaccactggatctgcaatcaatggcctaaaatctcccatactccgactccatccggtcacccgatcaccgatcctacagttgaaatggatctcgcgaacgggtacgtacgtcagctaatcacaacccttcgaagagaatcggacggtgccgaagtcgtctcctc

SEQ ID NO: 128941 - DNA, 530 bp, Zea Mays
ccgccgtccgtccacgccgccctcgttccccgcggtgagcctccctgtctcccttcttccacgcctgcaattttgtgttctgaaattatgtgtttggtccaaattcagagttctatccatagagttttggttaatgatcattatgctactagaagaaaaagtaacccaataactgggtggcagaggtctgaatttttagactagaaatagtaaccagaagaaactgaacttcagtgttggtgcttagtggagatttggcgacaactgctactttcctgtgcccctatcctacgtggtggccatgcaatagaagtgtggaacatgtaaccttgtacttctttgtgaggttcccatttaacccagaaactccacccctttttagctgcttgtcatggtgagatatggcacaaaactgcacttcctatgtcatagttgattccctgatcatctcaccgtgtcacaccattcccacgcacctagtttaagttgtcaacctccaagaaactgaagcgtgctaaagcagtcgtgcg

SEQ ID NO: 128942 - DNA, 686 bp, Zea Mays
cccgttaggaaaaacagccttgtaaacacgcccaagcgagccctcgcctaggagagagtcttggcagaagctgttcgtagcgacttggagagcagcaactgtgtaggaactcactgtcgtcacagtaacctgctgctttggccttttggcggtacaaccgtttggaccatgcgctctgtcgtccggagtcatctttccagcaggctggatcagttggaggtctgaagttgccacagcagcgttgtcatggctactgtccatgacttccctgctagacgctgcagcaacagaacacatgtacaattaaggaatgtaacaatatgaatgcatggtccaacagcaacgccatgcatgattcttatctgatgaaattatgagtcactagtcactactagatgcgaacccgcaatacctttcgcttcactgctcccatcatcgggttttttccgtgcgttgtggaggcacaacaccagcgcgaaaagaacgcacgaggcagcagctattgagccaacagctatccctacaagaggtcccgtttgcatcttcttgtcgtccgggtcaatgggagtctccgggacagttggagcgctggttggtccccgacgatcgtctggccggccacgtggattcggaggtggcgtcagagcttgtggcggggaggcaggcatattgacaaatgagtttcc

SEQ ID NO: 128943 - DNA, 312 bp, Zea Mays
tttggcactttgcctctgaggatcatctcatgtcggctcaccaagtctgcagagggaattcttctgttggtaacccgagttgagtcggctaggcctcgatacagataagctgggtatgccctgtccttcaacggctgaatattcttgaagacaaagtcagtaaccacagcttcagcagtcagacctctctctttcagtagtccaacttcagctagcaacgcacctgcctcagctacctcctgatctgtgggagactcggttcagctaggagtgcgaacatccggctgtcttcccgaccgaggggggagagag

SEQ ID NO: 128944 - DNA, 282 bp, Zea Mays
gtgggggcagtggtaggacgaatgaaatcaggctgtttgaacagataggagggtggatgaggcaaagaacgattctgattgaaaggtcggattaccaacctggttcgcttctcaggtccctgattggacctgtcacctccaaatccctttgattttccttggcatgtattcttggcttctactgccagcgctgtgctgatagctctgctgtatgtaagatctagacaggtggccattttccgttgtagctggtcgttgagtcctctcatgaagaagttcttc

SEQ ID NO: 128945 - DNA, 471 bp, Zea Mays
cgttagtagggtatagtggtcacctcgagttaagtatgtgtgagcatgtcgcaccgccttaagtcattactgacttaagccgattgctccgttagtagggcatagtggtcaccccgagttaagtatgcgtgagcatgtcacaccacttaagccgattgctccgttagtagggcatagtggtcaccccgagttaagtatgcgtgagcatgtcgcaccgccttaagtcattgccgacttaagccgattgctccattagtagggcatagtggccaccccgagttaagtaagcgtgccaattgacagtgaacaatctgagtgcctttgaaacctttttattgatgatatttttctcaatttacagaatacatcatcgttccgagagcctccatgatgtagctacgggtagaacttcctgagatgttctatgttccatgagttcccaatttctgttccgtccatctgagtgaggcg

SEQ ID NO: 128946 - DNA, 468 bp, Zea Mays
gggaaatcctcttccatttttcctcttctatgagaggaggctactacctgccggccggcttgatggatcaggcccatgccaggttgcaggccggtcggccctatctccaacacagctggcctgggccacctcacggtccctggcgatcacgcaagataaaatcccagccatcgccatcagccgatcagttgtgagctaggtacatggggatctgaattaggtgaacaacagttcgtatctacagtgcaaaattgcaacctacctctctgacaatgtccacgttgttgccgttgtcttcgtttgctttgatcggaagcaaacaggcacaatcgtccaatctttctaatacctgcactgaccaattggttctacatatgaagacaggaatgacagtgatgctatgtgagaagaagtttagcttatgcagctcttgtaaccgtttgacctgtactctgcaatcatgtggtc

SEQ ID NO: 128947 - DNA, 336 bp, Zea Mays
ccctcctctacttgtagccaccacccaggtggtcagcactatgctagtggtggaaggggagaatgagggccacgtgcttaagatacataggcccatttacttagtcagtgagatgctggctgagtccaaggcacgataccctcagatctagaaatttctctatgcggtcctcatcgccaagcggaagttaatccactactttgaccgacaccctatgctaccagtgtccacagcaccccttggtgagatcattcataatcgagatgcgtccggacacatcagaaaatggtccctcgagctcaacggtctcgacatcagtgacgtccctagaactgc

SEQ ID NO: 128948 - DNA, 452 bp, Zea Mays
agatcccatctgaacgaccaggattacatcttgctacaatagaattggcatggatcccaaaccatccaattccgatcctatgcttcggatttaatgaggccaagacccgactccgatcgccgattgacggacggacgatcacgatctacatccctcccacaaccatcaacctggatttgatccccatcgtgtatcgcaagatcgacggccaaccatacatcctggccgagccgtaccctaggccaaatcttcactgtcaccctagaatccgagggccacgagctcatcacctacctcccgacagacaacgaacggcgatctccattggagatcgttgagcggtccgctggcccagacgcaacccatcctatgtactatgacgtgatgcaatgcttgatgaaggcggatctacaggggatagtccataccatgaatctggtgacagcctgtcc

SEQ ID NO: 128949 - DNA, 357 bp, Zea Mays
tgagctcattgattcgcggtgactgcatatcatcgggggtgggggaatgtggttaagatagatttggatgagataggctacatgatgtaggtctaaagttcatttgatgttaggtgggaatagacagatttatgcaatccatcatgacactattggttgggttagctcttatgttcacggttgagttggtctaatgcactaattttaggtttaagtgcatgaggagagaacaagatttataggagtaggatccagtttatttgactagtgttaacttgttaagggctgtccttaggttagctcaacttaaggttagacttcatcaggttagattaacctattaggttggatcagatc

SEQ ID NO: 128950 - DNA, 329 bp, Zea Mays
gtaattcctttggaataagtgaaaatattttggcgaagaaaaacaagagaaaaagataagtgcagttgtctagggtgcacaccggataagtgcagttgtctggggtaaatgacaaaatagccctgctactattaacattcatgaggaagcaagaagatctttaccttgatatgtttggtttagggttcattttaagaatctcatttttagaatcacaaacaatttgtattgtacattagattttgtgtccaaaatcttacaatcttcccataagctgataatcacatttgcattagatttggtgtaatatcttagaaactaaaaacgac

SEQ ID NO: 128951 - DNA, 892 bp, Zea Mays
atctttttcctccttggccaatcgtttctccctccacgttttcttagggataaccatcgggctatcctcattaaaccatctatcacgctcctcctctttcatcttttctgtcatttccatagtcctcaaccgctagacatgacgcttctgcgtacggcttaacccaggtggacaccatctcagtgctggttttgtaccgggcgcaactgaaccatgattttttcgccccccacgtccagtacactaccagctgaagctcgaccagcaggacctacattctgggcgacaccaatcaacacatttctctcgcctgcatcaatccatcctctaatcggcactcttgttgtttgcttattactgcaacctggttgtttggcccacgtgtgatcctctcccctatagtggccatccatcacaacactgggaccgactatgcgctgattcgcaatcattttagtcctacgttccttctcccagctagcagaattactcagttgtcgtgtatccactacatcaagcctcatacgcttgcttctcatctcttgaccaccaccactttgtggcctgctcacctgtaatttgtttgtcccaacagcagctacgtgcccatgtcctatgtttggcttggctgtcacttcttcaccgttctttatgtaattttttgtgacagccacctgaccattctgctttgccacctctgcctgggaaccttctgcagcatttaatatgtcgcactccactgttcccactatgatttttgagcagcttttgcccagcggctcattttgcccatcaacaataatgcccccttctatttttttcccatacatagccctctcgcatttgctgggttgcatggagaccatttcttttgcatctgcgagcacaactc

SEQ ID NO: 128952 - DNA, 596 bp, Zea Mays
ctcaatgtatagttttctgtggattgcgggttcatttgctaattcttcaaggtctcttttgcaaaaaaggctggccgaaggtgtattccccaacctcagccgctagattcacaacctgcggccgagattagatctcaataacaattgaatcaataggctacaataacaattgaatcaataggctatgtgggctgccagattggtgatccacggcccgcacgcacgaatgacctggaccgccagattcgccctgagcagccagatttcccccaatcgaacaggtacaccataggttgatctggactgttgcgcacatatccacgaccgcgaccctgtcttctaccttccaccagccaatcccggcgacgcacaggcccgcaatggagccccgcgtcggtgagcgccaaccacgcccccaggctcccctgaccgccgccaacaaaaatacgatgcgcgaggaaccaagaatacgatagggaagtccttaccgggtaactcgcagccgcaatccttggccacggcagggtggtgccccacggtagagcaatgctcccagtaagaaattgggccgaagatcgtggccaatccagcccgac

SEQ ID NO: 128953 - DNA, 691 bp, Zea Mays
gagatatttgggttttaccttctcgtgtttggccatgagacaaatgtgagaaggaccatcatcatcggataggtttttgaatagcctcaatttattggaagattcttttatcgctatggttgtaacgttttcatcctcttcacttgagctatctttggatgaatcccattgttgaccaatatgtgcctctcctatatacttcctatttttgtcaaacccttttcttccttatttcttgtattgcttgttttctttcttttcatgtggacatagagaaataaagtgtttcatgcttccacaattgtagcaacttctctttcttcttgttaggaaatcttctcttcactaccttgtatccctctttctttagtcccttgtgatacttgacaaacaaggcaatgtcacctatttcttcatgtgactcgtcttcactctcactctaactagaggaggatgaaatcaccaccttttcttttgtatttttgcttgttttcactttgatgggaggttcattcttgctgaaatttgtattgcttgaatgagaatttttggttgtcttgttagcctttagtgcaatatccttaatcttcattccatccaacttggcttgtaattctccaatttcccttctttccgaagcctcttccctttgcatgtcaaaggtcaatattctaccaagaacatcactagg

SEQ ID NO: 128954 - DNA, 344 bp, Zea Mays
aactgggttcctctgtctgacactatctttcttggaatgccatggagtctgactatctctttgagataaattcgggcaagggtggctcctccaaaggtagttttcactgggatgaaatggctaccttggtaagacagtctattattacccagatagagtcatttcctttttgcgtccggggtagtccggttacaaaatccatgcctatttcttcccacttccattcaggcactgggaggggttgcaataggcctgcaggcttctagtgctcggccttcgttcgttggcaggtgtcacaccgggccacatactgtgctatctatttcttcatccctctccaccag

SEQ ID NO: 128955 - DNA, 355 bp, Zea Mays
ctctgaggtagagtcatcaccggtgtccttgttgccgctgtccaccatgtcctcaccaagtgccatggtgcagaggcctcctagtatatcggtgaggaaggagagtatgttcagcttgtccttgacccacctctcatgctcgtcatcgttcgaggaagaagatgagtcatcagagttgtggttgaggtcactgagggatgagaggaaggcacacaccttaaccttaaacttgggcttgctagaggtgtactcgtgcttgcctttgtgccaaccagcctctggctttcctgggcaactagcgatgaagtggttgggatcgatgtagttgtagcatccatccttggacatgccacac

SEQ ID NO: 128956 - DNA, 471 bp, Zea Mays
cgcgttagcaggtgtattcacccggcgtagtcggtcgcggaatgagctgggaaagggacgaacggaattctcggatttcggctgagatttccccctctcccgcgtatataacttggtgccgatcttctccaccgattaacgagcccgcagatctacaattcgtcacagcgagaggagaagagaaccctagttggccgcgccgtgagggagaaaacgggtcttggcctatcttcgtcgcgccatcaaccgggctcttgtattgtgccttggcgcttcccctagcttgtgggagggtgtccgaagccgcgccctctggaatccttgcccgcgtcttcggaattgctcgccgttgccaatgcgccgccgcgaaaccggtgtctactgtgggcaaggcagggcactactcgaccctcggtgagttctcccttgttaggtctgcctcggcctcgacttcgtgtagcataatttctc

SEQ ID NO: 128957 - DNA, 292 bp, Zea Mays
gcacgcatgcatcagaatgtgaagcgggcgtggaaaggttcgggctcagggttttcccaggggtcgactaaacgccagaaggtggtgatcagaattgctggtcctgccaatgcttcttatcgcccagcagcctatcctgtcaaaactcacatttacatccgccccaacaacatgccaaaccagcttccactagcaaatagtcaagttcctcgcttgcctgctcccattgattcaaaatatccttgttacaactgtgggaaggcggggcactttattaaagattgcctctata

SEQ ID NO: 128958 - DNA, 285 bp, Zea Mays
agcgttctgcagaccaaacagcgtcatgacctagcagaatgtgctgaagggggtaatgaaggtggtggcgtattggttagactccttcatgatgatttggtgatagcccgagtatgcatctagtaaggaaaggaactcacacccatcggtcgaatctacgacttgatcaatacgttgtacagaaaaagggtccttggggcaccgcttattgagccatgtgtagtcgacacacatcctccaactcccattcttcttcttgacaagcacgggatttgcgatccacac

SEQ ID NO: 128959 - DNA, 591 bp, Zea Mays
gtgaacgcagacaaccgaagacccgtaggtgagagaccgtcgacttgcgcccatggcaaacctcgtacgtcgtcattcccttgagcaccttggtggacgagcggttgaggatgtagaccgctgtcacagaagacagccgacattcccctcttctcgaggagagcccgagccatccccacaactcgctggttgcgtcgctcgacggcgtcgttctgctgcgggttaaacagagcgagtagtggcgcagaacaccctcatccgcgcagtacgacgcgaactcaaccactgtgaactcgccgtcgttgttgtcggtgcgcaacacgtgcaacttgcgactgtactctgtctccacaatgacttgcacgcctgatggcgttcacagccggtgagcagcctgtgccggcgcccttgatctctacgccggaggcgtccccaaacttgatggagccttagacactagaatcaagctcggtgaactcccgtcgaccggtcatgtgatgagtggcgccagtgtcgaggcaccatccttcgatcatgtccttgttggagccattgctgaggaaagcgtgtgcttttgactcatcaagttgg

SEQ ID NO: 128960 - DNA, 447 bp, Zea Mays
ccagcgcagaactctcaccgccgacgaccgatcctccgtcgcgattcgtgtcactggcgtctggattcgtgctcgtggcagatggataacatcacggggtaggaaaatcttcgccgccggtgagctggacgccactccggctagccacggtacctctccccttgctcaccacccctcggacaaggattctcaccgccattgagctgtcaccattgtttgccgcgtgtctaaccctttccaccgcatcgccataacctgctctcgctctccgttgatcaccggagcgattgccatggcgttggacaccaagccattgcgccagtgacctctccctcctccgaccgccgcgcgtcctccaaattcacggccaccgctcactaggcctataaattgagcccgccgtcagctccgcaaggtcatccagcacccagccaccaagtattgtcc

SEQ ID NO: 128961 - DNA, 349 bp, Zea Mays
ttgatggtgatgctccccgatcccttcaattgaaccggaccgccagggatcgccgggaacacgcaccattttcttcctcatccgcggttcacgtgggcagaaccggatagtttacttaatgagaaattaagttgggggaatcagttggggagggttcaatccggggtacgtcgctcgggggcaccggtcgttgcgtaaatccgccagtgcaacctcaccggagttcattctccgtgctaccgtcgtcgtggacttttccctgcgaagaaataggaatcggaggtcttttctgcaaacagtcagcgacccagagcaacagtgaccgaactcacttctatttagtccaaac

SEQ ID NO: 128962 - DNA, 609 bp, Zea Mays
gtcaacgccaccttcatcgcgtaatcaggtaagaaaaccctcccgtgtgttcgaatcgacctcaattacgcaccgggaagtcgaaattagggcataggattgcggctcggtggcgaattacgtctggaggggtcactgccgccgtgaatcggagctccaccgtggttcggggactgggagcatcgttttagccatgtgattcgtagtagtcgtgtgtttatggaaaccgagtcgggtgcgtgaatcgggtggggattcaccgtggggcgcgttgccggatttctccgtcgccttgggtgcgcgccgccgtgttccagggggaaggatgttgaagaagagtcgtcgtccgttgatcctctaatgggcggccatgattagatatagggtcgcagtagtgagaaccataggatctagatcctgtggacatcatggcgtaccatttcataatatgttaggtctaatcctgcgcgctggaatcagatcggacagctaggaatcgttaataccccttcgccaggacaattttgttaagaaacccctgaaaaatatagaaaccaacccgccgtcctcggcgactgttccctgagtctaggaagctttaccctgtgg

SEQ ID NO: 128963 - DNA, 394 bp, Zea Mays
cgagaagttcggtgcctcgaacacaagttcttcggcctagagctcaatcatgtcgtgcagcggtacaacgaggttgcagacgaactagcaaaaatcgcttcaggatggaccactgtcccctcgaacgtctttgctagggacatctacaaaccctcgatgacacccaaggaggcgcccgaacctgacccctacaacgacacacccccagccaatgggcctgatgccatgtagattgacgaagacaacgacagggccgccctagccgtatactggaagaagccatacctagagtacctcctctgaggggagctccctatagggaaggccaaggctcgatgccttccccaccgagcaaaaaccttcgtgctaataggagaagaggagttgtatcgac

SEQ ID NO: 128964 - DNA, 418 bp, Zea Mays
ctgctacggtgaaagccactaaccccaagtgccagtaacattcttcctctccgaccgccagcgcatcgtcgtgaaaatggacgccaccgctcaatcctgctataaattgccgaccccgcctgctccgctaggtagttgtgcaaccagtgaagcaacccgtgcctcgaatcatcccctagaactccccaatttgggatttcccccaaatcactcaagaacaccgagcggtttgacctcgccctggccagcgcatctcaggttcgttcatgtcctctgagtcctcgtttcagtatccttggatgctcctgatactctctgacccatccaattgagctagagtccctaggattgccgggaacgtgttcggttacccgtgcccgtggtgtctgctgtcaccgtgaacagagcgtgttagggt

SEQ ID NO: 128965 - DNA, 717 bp, Zea Mays
attgcgtccactttgggggcagcttcccaatctacaaccacatcatagagaatgggacagagcaaattcgaacaaagaattcattcgcttgaacaatattcaagagtaaacgcgcatcataagatgatttgagtaaaacctctccggctcgtttggtggagaagcgaacaatctgtgctagagccagcgccttcttggcagtcatctttaacccgtcatagatcttctcttatgaaggaaaggcgaaatggacaatctccttggcatccaatctcctcctcgcacgattggtggatagcccgggcacataggacttgccgacgagcatccagtcgcactccacagtgaagttgacaaactcaccgttcggcggcgccaccaccatccttatgtgagtcactgggacagacgcaaccaccctgaggggccatggctgcaaccgatgctctcacatcttgacgtcgacgggcggcggtcatgtcgcctgttggtacatctcgatgaccatgggtgaccatgcaggtagggtggtccagtaagtcagcttagccctatcatatgaactcacagctcaattagtttccatcacggcaccaaatttttgatccacaaatattcctacccttgagacacgaaccaatctgggcttgcccctgaaactgtgacatctctagcagcaccaatctcctcataccaaattcacagcacaaaaaaatg

SEQ ID NO: 128966 - DNA, 506 bp, Zea Mays
cttcatttgggccctgcggagcccagccactttcggtccatctgaaagttcctcgctttagccctcaaaagtctcctacccctttctctgtgccagaaaagggacgggaaggtgccaataaattgcgaggatgccgctttatctcttctcctctcccgccgccgccaagctcgccaccggcccacacgcgtccctgcaccggcggcgccagttcctcttccgagttccccaccgccccgtactctctctctccccgtctgctatttttgagcttctttctttctacttattgattggtgagctgtccgagcttggtttcttacagagccgccgcgccccactgctaacttcggcggctgagcgtccagcagggcgcaccatggctactgcggataccggagcgtccacggtgaccgattcgaggctccgaggtgggcgcttcttggtttggcactgcttgattgttactgcacttgatgaagcacagtgtgcgatcagcttatttc

SEQ ID NO: 128967 - DNA, 519 bp, Zea Mays
ctgggagacaaaggccgacgacaaaaaaggcctcaaagacaaccaattcgcccttaggctcggtgatctcctctacacccagaacccgcctgacgccgtcaccaaagtatccgagccgctgcatctccagcacgtagaccgaggaaatccttgaagtaccgaactccatggtatggcccaattgcaactccatcaccgccagatcgctcaacgtatcctcggacgacgggacggccgacgacgcacttgcagcagacgaagaagaagacattactacgtaccggcggcggcggcatgcggtctgctagatgcgggctagatttccgaagcgggagagcaaggagggtaggcgagcagtttgcaaaagctagggtttctatagcacaaacaaaatctcaaaacaggcccggccgcggtcggctttcttataggcactacgcgacgcctcgggaaacacgcggtccaacagtaacacgtccatcaacggtcacatttcaaaaacccccgcgggaccaattc

SEQ ID NO: 128968 - DNA, 411 bp, Zea Mays
cgagccagaggctcatcttttccctgccagcgcactctgtctctgtctctctggcgtctccctctctccgccggcgaccttccccccaccggcgaccctccggcgacctggtgctctcgtgcccctctccggtgagcagcacttcccccctctccttccctctatctttttctctcctgctctcggtttgagaggcagtgaggcactcagtctccaccccttgtccatttttcaaattcttgtcaaatccaatgaatccaaaaggtggaatgtgttcaattgtccccattgtgtatccctgcaggttcttagctccttcgagagggttttcactcctcaaatggccatttctccgaaaccctaatttctcgcccaccacgtgttcggtaaaatgcccaaaccagccaaaaa

SEQ ID NO: 128969 - DNA, 293 bp, Zea Mays
tggacatggtgcaatctcatcgaatgtaacctcacaaggctccataatgtggttagtctctaggttaagaacacgataagcatgagaatgtaatgcataacccagaaaaactccatcagaagaccaggactcaaacttgtccagattaccttgttttagcacaaagcatctgtagccaaataccctgaaatgactgaccttgggtggccgtccaaatcgcagctcataagaagttttgttcagaaaaggccgaagaaagatgcgattggacacatggcaagcagtgttgatcg

SEQ ID NO: 128970 - DNA, 556 bp, Zea Mays
ggtcgatggacagatcgacggtccagggcatgacacggtgtagaagtaatctgggccactggattgatcatagttggtgcatctggccgtctgttccgcagtgatcgcgtaggattaggtctgggtggcgttttgcccgtgaccattagatatcgatcggacggtgcgggatggatcaagcttcataaaatcatggtcgtcagtttccgatcctgtggcttcccttgcgtaccggttcgcaagatggccgatctattctgatccgtggatgtatgatccaacggcccaaatccctccttaccccttcggccgtgacctttttactaaagagaccccaaactttcgcagaatcaacctgcagtacccctcgggtgtggctgtgtctgggcgattttgcatgttaaaccccgagctccctggttattgtgtgcgcagtccagagctcagagaaaataggaaaaatgaatttagaaaatgaattttcaatgtaaaaagaattctagaacctatttaatgcatagaaaattcattttagctcctttttaatccattccag

SEQ ID NO: 128971 - DNA, 356 bp, Zea Mays
caaacaacgatatctcctaaattataactccgaattgagcgcataagtactcgttggaaaggtatgacaaagctctacatgattatcatattgattatcactaatttcccaggaaaaatccacagaatctgctaatactaatgctgttcgcccacctgcggaaatctgttttttggacagcaacatacccggattcaaacagcgatatctcctaaattataactccgaatcgagcgcataagtactcgttggaaaggtatgacaaagctctacatgattatcatagtgattacagctaataaccgccacaaaaaccccagaaactgcccacaatacttctgtccgcctgccaccca

SEQ ID NO: 128972 - DNA, 443 bp, Zea Mays
cgaaggggtatggaaagacttcggccgctcgatcgagtattgagggtcaggattagattaaaacctgtcttcacacccgagccgtggatcgcgagatcaacggctaccgacccacgccagcgctggaatggctggttccaatcgcagtcgttcgctgcatgatcgacggccgaggacctacacatatcagatctaatcctatgcgtccctttcccatccaacggctgggtgcaggcactacacatccgcgtacaaacgcggcggcgcagctcgggttcgcggcggaccatcgccggaaacacgagttcctgatccccagcgcacgattgcccccaagacacggtgcaaaacaatcctacggatccagtgaacacggaaagaggccaattaccgcgggtcaggggaggagacgcctccggccacacgagcggtgaagtcgcgac

SEQ ID NO: 128973 - DNA, 675 bp, Zea Mays
gggcgagcgaggtgccccggctttataccccgaagccgaggaaagcggagttcgcgatggaggagatcccggcagcgttgactggagaattcgacacaggcacgcgcagtgcgtgttggaagcgggatcctcgctactcacgtggggtgaaaggaagataggccatggcgcgcttggcgcaacagaagcgcaacagaccgccctacatgtccggccggaagagagacaaggggaaaaaagacaggcgagatccacgggtggaaggtcggcatctagttgagatttggggcagagtccgtgaggttgaagaccgacctgaaggagtggcccacgcgtaagtgatgaggagggagaatggcgagatggccccacgcgtaagtgactcagagaaaaagataagggcgctgatgggccagtggggtgcgattcagtcttgggccaagcaggaaaatagggcccatagctcagtttcttatcccttttttctttccttttatccattcttttccaaatttaaaacttcaattcaaatttaaatccggtttgaacattggctttctgaatatacccaataagaatcctaataattctaaggaatgctctaatatttatccttatataatacctattaacctaaataaaggataatttatataagaatccctttattgaatc

SEQ ID NO: 128974 - DNA, 346 bp, Zea Mays
gggcgagcaggccggtcgggtggggtgctgcgcgccaggtggacggatgaccgacaggaagaccgcacgtgccaggcaggcggacggctggcgggtgagaagaactgcgtggggtggatgtgctgcaccgcgacaagtggctgctctgcagcatggcgagcggctgctgttcagcgcctacagatgcgccctgcagcacaagccggtgtcgattggcggcagacagaacaaagtgtgtaggaaagattagagagaagagaaaaaataatcctaaaatctaccttggattaccataataccatgttatgaatagcacatgaggccctaaggccagtatatatacacg

SEQ ID NO: 128975 - DNA, 326 bp, Zea Mays
gtcgccttaaaagcgacagcttgtggttcgtttgcgataaggttcccattggcgacgtcatcgatgtactttgcattcttaaccatcatttgatggctaacgaacttgcccagcacctcctcaggactcatctttgtatacttggggttttcgcgaactagagagacaaggttagcataaaaaatggtaaatgaccttaacatgagttgtacgacttcatggtctgtccatcgtgtgctcccgtagttgcaaacttggttcaccaaggacttgagcctgttgaacatttcctgtggctcttcgcccctcttcatggcaaacctccc

SEQ ID NO: 128976 - DNA, 879 bp, Zea Mays
ggccaccctattctccctccccctcgcccttgtgcaccccggtagccacgcagccatgccgccattgctgagaggagagaaaacagagagagagcgaggcgggatcatttcgtcgctgacgatttccacttccgtcgctgtggttgaactcggtatcgatcggagaagctttagagggtctctatagtggtggccgaagaatcggattggaagaaggatttggggcggcaccggaattccacgctggagctcggtgtctgctgctgctcgtggttggcctcggctacttcttgattcccggtaagaaaaccctagatcagttcgaggtcgcctctgaatcgtttaggattaaatgtactggagtttggtgcctcgttgggccgctttgcgtgcgccgatgatggcgccgccgcatcacggcgggtctcgccgcccagctcgttcggagggaagaagaaccctgtgaaccatcggatccgagatggagggtggagagtagatgggcgataacggttcgatcatggcgtgcgtggatcgtgagccgacggctatgatcggatccttagtgtttaaaataggcaccgttaaatcttgatccaacgcgcgcgatctgttaccaactcaagttcttttggttgccgtccagatctaatcctacggtcgaaaaccctagatacctcttcggccgacaactttacaaaagagcccttaaactttatcgaaatcaacccgccatccttatgcgggaatctcgagtcttggggagatttgcgagttagcccctgcagtttttaataattgtgcgcccagtccagtaaatagaaaacccaggaaaataaatagaaaagagatttttaatataaaaataagtactagaac

SEQ ID NO: 128977 - DNA, 587 bp, Zea Mays
cgcattccgaacgacgatggaggcgaggttccatggcgcactgcggcatggcggctccgcccaatcaatggagtgtgattcctcgcagatcgatcgtagccccgcacggtgcagagttgggcatcatcagcgtgccacggagatccgcccagcctgtactttgaggcccgggcgacagtgagataccccgtgtccgtgcagtggctctttcctcctcgatctctgctctcggctcgatttgttttgacgatatggcgtaggggctcgatgacgtggtccagtggtcgacgatgcctggctttatatgcacgacagagacccaaccgtggggcactcgattgagggaggtcgcacggcgattctgtttgcaacgtccgccgcgaatgatggaatttgttacggtttggttaaggatggtgctgacaaaaggggcccacacagaagtgagtggtgcgggcgcgcggatgtggtatgaagctgtcgcacgaggtctgcctatcggtgccggcgcgcgcgaggcaaggttgggccacctggtgggttgggtgaagtggcaataggctggttggttaggccgagcaggtgag

SEQ ID NO: 128978 - DNA, 571 bp, Zea Mays
aagaactatcacaatttagcaagtggatgctcgatgttggggaaggcaaaatagacgctacatcacaagaaggtgaagataagccaacatggatagagattccacaagacttgctcctaatgcctcaaggcgacaaaatcgcttgtatagttcatactatttatgaaaaactcaatgaaaattatatgagacttgagtatctaaaaagtcgtgccatattgactccaacaaatgatacagttgactcgataaatgagtacattgtctctcttaaccctaaagacgcaaaagagtatctaagttgtgacaagataatcaaagcacctaatactcatgaatcatatgatcttttatatcctgttgaatttttaaatacattgaatgggaacagccttccacagcatcgattaattctcaaaaaaggtaaaccagtcatgcttctcagaaatttgaaccaatcagaaggtctatgcaatggtacaagattgctcataacttccttgtgtaacaaagtgattgaaggtcaaattatgacaggtattcacaggtcaaaaaatgtgcttattccctg

SEQ ID NO: 128979 - DNA, 633 bp, Zea Mays
tcaacgcgccagatcgattcactcaaaacgttaatcctatccattcattgaagatctgacggtcgccagccctttcttccccacggcaatctgcaagcggcggcgccgccacgcccgcccgatggagcatcaccggcgagacccccccccagccataccaacggccaaaccccacatacaacggtgctacacgatgaggacgacgaggcgaaccatatagggtagcgacttaccagaattcgtagcaagagctccctggtcgcggtggaatgcggacagcggcgctcttcccattccggtgagaaattcctcgagctccgaccggccgttcatcaaattggcggtcgagctagctttcctgtgtccagtcgaagcaccgcagcgaccggtgaggacgaatccgaggttctgggcgcggcgcgactgcagctcaacgcagccacccgccttcccaactttctctgtttttttctatttctgctatgacgcggttgcttgtgctcggttctaggggatgagggcatcggctcggcgcgccacagcttttatgggggaaggggagatccgagttggtcgggacgacaacggtggtgcgaggatgccgccgcggcaatctcgtccaggttgttgagg

SEQ ID NO: 128980 - DNA, 412 bp, Zea Mays
tttgagattaggaaagtagtgttgtaaaatctcgataaatgtgggacagataccgctttattctcaatgttgcggtttgaggagcattaaaataaggaaatattcttttgagactttgacgttactttgtagtagcctttcctgtacgatagcatatacgagtacacactttagcgtaaatcatagatatgttttgtacagcgaatggggccgaaaattaaggcgtggaaatcgctcacatccgactgtgtgtgttctggctcgagaagattttagcatataatgtgaaccaaaacaacgtaaatagatacaaattttagcgtaaatcatcgatctatttcgtacgacgaatggagcccaaattacagcgtgaaaataccgcgcgtacgacagtgagtggattatggccgga

SEQ ID NO: 128981 - DNA, 275 bp, Zea Mays
aacgataatacttatgaacgttggttgactcccaatactttccagactcagacaaatgaaggtccttggcttcatctcttgtgggctgccggaaatcatgaatcttgatcttgtctccagatatatcctcgtcagaaaaaccaagaatgtgagcgaatcgacgatagctcaccttgtaccaactaccttcaataaagaagttcagataggggtagttgtaatggctctcctcgtcagcaagctttatccagagagtggaataaaattgtgcaatc

SEQ ID NO: 128982 - DNA, 854 bp, Zea Mays
tgggtggcagacagatgagtgcattcccagtgatctagagctattccgtacaaattggcggttcggcaagcatcacagagcgacaagagtgctcaaacaaaggagagtgagggatgaactgacctagaaagggctggtcgcggtgaggtgagttttgcagtggcggaaactagtttgggggaaacaagaaattctcgagctctggcgaacgatcgtggctgattagtggtggctggttagctgatgaccctgcggagctggtcacgggcttaatttataggcggcttcgtcggtggccggtgaatcgggcgagacgcgcggcggtcagaggtagaagaaggcactggcgcaagcgctaggtggcttctaccgtggcggtagttccggtggtcgacgggaagctagagggagtcacggtgatgtggtggcgcggttaggacacgcggcgcagggccagaacacggcggttcaccagcgaggttatctgcccagccgcaaagtagaaaagaaagccacggtgagtcaccggagtgacctccagctcaccgccggcaaggatctttcaccgcacgtccttatccacccaccccgagcgcgagtcctaatgccggcggcacgaatcgcggcggaggagtgatcgacggcgatgaagtgttctgaacttaattcggtcactgtaccatggagcacttccttcagacaacctaacacacagacttggagcttggttttctcttaattttgaatgacaactcaactcaaactctgcatcaaagttgtaaagcaacataccatctacaatattgccatatgatgctgccacaaaaacccattggatcatgcttgaatttagg

SEQ ID NO: 128983 - DNA, 284 bp, Zea Mays
ccggcgtgttaacccgctcagccgcaaagaggataagaaagccacggtgatgtcaccggagtgacctccagctcactgtcggcgaggattcttaccccgcaacgttatcaatccaccccgcacatgaatcttaaggccggcgacgcgaatcacggtggaggggtcaccggcggtgggattcttttgttgcgctggcggtctgatctgcacgagcactgtaccatggccaactccatcagacagcctgacagagcattttggagcttcattttctccaattttta

SEQ ID NO: 128984 - DNA, 339 bp, Zea Mays
tgcaaaacatgcggtcgaaggggtattggtgaatccaggccattggatccgcagccgagggcacggattagatcgctatttccaccgaagcggtacccaaccggatccatcggattgctaatctacggcaaggattttatgtggtccgaattagccagtaaccgttggatccaaatccacggcacagatcaatctgacccaagggtttttctcccttctaatctgcaccgcccaaagggagatcaacggcagacagccatcttcctatacgtcgccggactgaggcggcgccgccccgaccccgcggcgtaggacgcatcaccgcccaacggtccggcc

SEQ ID NO: 128985 - DNA, 679 bp, Zea Mays
taagttctgtagcttccctttataatgaaagtgatttcgctccacttctgtgtgcgttatgttgctttctcgctgttcgccaatcttatcactgcacgaggagtatttgtgatcatcgaatcacatttctgattgccttatttgtaatgatggcgctttggtggttgcggccgagtcatccgaaatcctgtcgttgctttaagaatgacggtcgagttatggcgggccgtgtcggtgttttagagataacggtcgaacggttactaatgataccagcgttttagaagtaacggccgaatcctttggagctaccttaccgatttagtgatagcggccgagtgatggatgtgacatcgatgttttagaggtaatcagccgagtgactaatggcaatgtcggcgttttagaggtaacaaccgagtgattgacggcaacgtcggcgtttttagaggtaacgaccgaatgactgattgtgacgtcggtgttttagaggtaacagccgagtgactgatggtgacgtcggcgttttagaggtaacagccgagtgactgattgtgacgtcggcgttttagaggtaacagccgagtgactgatggtgacgtcggcgttttagaggtaacagccgagttagaacgggccgcgtcggccgttttggaaataacggccgagtgatgacatg

SEQ ID NO: 128986 - DNA, 731 bp, Zea Mays
ttgtgaataatgtgatgtactgctatgttaggaactataagaaatgttttacctcacgtcggattggtaagtattgttaggtcgtgttatgtgtttctcttgtcttgctatctaggaggtattgtaattgttcaaccctttttacaaaaaaatgttgtctgttctgttcataaaaagaccccaatccaaacaaccttgagtttagcaagtgaaacctcttaaaaaatcatgacggtgttggtgttttctagccctcgtgtgtttacccttgaatttacacctgcacagcttagagaaccccatagctggaccgctagtcgaacctaaagcttccttgtgcacttgtttatgttaaaaaaaatatataaaactttggatggtgtctattgcgcagaataatatccagtcccaaattcttcttggaaaaccttgtcccaaaatcctcattaaattctcttctgctcaacctagaagccatctgggttgatgacttctcttttcacctggatctggtaatcttttacttgtgaatcatgttgtgactttatcatccgaatctctggatcattcatcgagatctaccccgtcatattgttatcttctataacccactctcaagtattaaatatggatcagtctaatatctcattatgatcgttctcatactcttctctgaggatcatgacgctgttttatcgattctatctctaagcagtgtatccatttggttc

SEQ ID NO: 128987 - DNA, 456 bp, Zea Mays
tgctttccagttaggcaaccttgcagcaatcttatcaacccaaacaatgaggtcacttcttcgcagtttcttgttggagattggcaagcccaaataagtgcatgggaaggcagcaggcacacactgcagggtgctgcagcattcatgcacaacaggcgcagcacaacagatagggattgcacaacttttatttatgttggcaatcagcccagatgcctctccaaagcagtcaaggatcaacttggtacaaaccagatcatcatccagaggcttgacaaagagaactacatcatctgcgtacatggagagcctggacctgacatttgcagcccccaagctatgcagcagccctctagattccgcatgcctgaataagctgccaagcacgtccatcacaatgataaaaagcataggggacaaaggatccccctgacgcaaacctcgccgatgccaaat

SEQ ID NO: 128988 - DNA, 423 bp, Zea Mays
ttcgcatgccctgtaggcactgttgtctgtcgtgatcatcgagccacaattgcgcctgttgcgcatattgcgtggacttatcatgtacccccgattaccgagccataattgtgcctgctgcgcttattacgaaggcttgctgtgttgtcgtagccctgatggccgcacacgcgttgacaccagacgctagagcttgtactcgcgtggattgtgctgggttgttgaagcccctaaagtcatattatgtgcaacattcataaatatttttgtttggctctatattttatttgactgtgttgtgtggcatcatatttatatatcgccaagtggccataacaactatattaagctctatagtgcttggaaatctgggaaattaaattgaattacaataaaacacacataagttaattccgtgctctc

SEQ ID NO: 128989 - DNA, 618 bp, Zea Mays
cagaacccaggggtggccctcatagaggggtagatgggacaatcatagacattcagcttcctttgatctctgttcgtaacaaacgctaaaggagatgggtggcccatgcaaatgaatgacccttaggtaaagctggtgagactgtgaaacgtctatgcctcgacggctaaggcatcgctcatcgaacaggaccagggttggaaggcgctgactgcgctcctcaaaactcgacaatcgcaaagaacaagaaatcattcgaatgagaaacaaacaacaatcacatttacattttccatgaatgtcagcggaaccacacccacgtttatataagttttgaaacttcctagctccttgtaggaagagcgccataagcgaggatatctgcaaggcgatgagacaaccgctccaacgcatcggtcatgtccgcaagctccgcgtcggtccattctgtggaataccctagacttagggtgtctgtcagtaccctaaatcaggggtaccctctcctacagcatgaagacaccgtacccatgagacgtctcctagccacgcggaggaccgcgcctgaccccaccggatgggcaggccaaagggcgccacgtggcaaggaaagacacc

SEQ ID NO: 128990 - DNA, 790 bp, Zea Mays
tgtggcaaagttaaagattaactatagctctgtaactttggtgcagagagatgaccaagtcgtaatgcaaaattttgagaaaaatggccctaaaccgtggctgtcaggtgcctttgactgaattttcccatggtacagtgcacagattaggacgccagcgcggacagctcaacgccggtgaccccttcgccgtgatttgcgtcgccggctttcagattcgtgtgcggggtggaatgataacgctgcggggtaagaatcctcgccggcggtgagctggaggtcactccggtgacatcaccgtggctctcttatcctctttgcggccgggcggattaacacgccggtgatcgccgcctccgggtcatgcgccgcgtggctctcgctttccaccgcaccaccgcgacttaccctcgccctccgtggctcaccagagtaactgccacggcagtagacaccaagccgctgcgccagtgctcttcttcccttccggccgccgcgcgtcttgctctaaattcgtggccaccgcccgctggcactataaattgacctcgcccgtagctgcgccatgtcgtcgtgaagctgtagcacccgctcccaccctcgatcacccaccagcacacacgaatttccaatttcccccaactccgttctccgccaccgtgaaacgagcctcaccgtcgctagccgtactctggtcagtccccgtcctctgctcccttgtttaagcgttctcatgcatctgtgatgctcaccgacccacccaattgaaccgggctgccagggatcaccg

SEQ ID NO: 128991 - DNA, 860 bp, Zea Mays
gtgaccgggcgcgagcccacggagggggagggcggcgtggacctggaggcctgggtgcgccgcgcgttcaaggaggagcggccgctgtcggaggtggtcgaccccacgctgctcggcgaggtgcacgccaagaagcaggtcctggccgtcttccacgtcgcgctcgggtgcacggagcccgaccccgagatgcgcccgcgcatgcgcgccgtcgccgagagcctcgaccggatcggctgacttccagcgcgacggcgtccggccggccgccggttactgatcatcaactacgtaggtgcaatccaacgcataaaagagactcgcagtcctgttcatgtagattagcgcagttaagcattgtggatttcagagacggtaaacgcaggtaaaaacaatcatcatccgctccatctgtgaatgacgaaggtgaatcactcgacgtagcaggctataggctagcagccgtgctaatattttgtggcaccccttgatccattccaaagcgaactctgttgggagttttctatcgttttgccactgcctacaactgtgcggcgctttgcccaaaagcttgcgatgcgttccttggggacctgggactctgggaggcagagagagcagacaggcttttggccctaggctgtgcggttcacctttggcttggtcgaattgactctgaaaagatgcgacaatgacacaaggtgtgctgcacccttctggtcagtgcactgtcctcttgcctgtgctgctgtgcagtgcaggagcagcatgcttttgcaagtttgcatgcgtaggagtaagtgacaaacaaccaacaggacgccagcgtcaagaggtgtcgattggtcattggagaaggg

SEQ ID NO: 128992 - DNA, 757 bp, Zea Mays
attgagggaaatccgaaattagagctcggtggtagacgatctgaggcacgagcgggtgcactggcttcatcacaacccaacggagctagtagtacccccaatttatagtgtccaagagtggtggcggctattttttgcgatggcgtgttggcggccggagaggagaagtcactagcgcgagtgctatcgtggctttcaccgtggcaaggcctccggcgatggacgggcttgctacaagggttcactgcgacgtgttaaacctcccaggcacgtggcgcacgattggtaagcggccaacgccggtgaagatcattccggccggccgtagaccaagtgggtatggtgaactcaatagtgaccgagtccgagccaatccgggcgctaagatcttttattcccctcagttatccactttgcgcggggcacgaatcgcggcgaggtggaacgcacctaagatctacttcagttactgtataatggccatcttcatcagtgtgtctgtcagagtgaattgagaggcttcattctgcatttttcatgtggtgagctattaatccatctgcaccaaagttgtagctctataaaccagctacacttcgattatagaaaccttgatcatttaattattccatcgagcttgaatcgagtccaaagttcatcaaaactcactgtcagaccaatatcagacttcattggtgactgacaaccatactttgagcccatttaactccaatttttgtacaacacaacactaatg

SEQ ID NO: 128993 - DNA, 462 bp, Zea Mays
cccgactgcacaccacggggttccccacgtgatgcctttgagtaggacgacgtcgttgattgcgactcgatggtacgtgcggatgcacgtcgaatcacacaagggtttatacaggttcagtccgctagaatgtgtaacaccctacgtcctgtcgaggctgagtatttgagtattactggtgtacacgtgttacagataagctatggcggtggagggtgagttctcctatcgatctggtagtggtgtagttgctatgagaggactgatgagctatgaggtggtgatgggatgtgtcgatatgagatcatatgagatatgcattcgtaggggtaccccctcagccttatatagatgactatccatttacaagttgtgatgactatctaactctttctgaatctgtccacgccatgcattctcgcttatccggagttcagttgcccttcatccgggttatctccg

SEQ ID NO: 128994 - DNA, 519 bp, Zea Mays
atatttttttgcattcttttttgttcagatttactatcttgatcacttacatcaccctgcatcacctgataacaaatatggtactccccgcattaagttttttgataatgagaccataagagatttggctaggggtgacagacgtccccccgtaaaactggtgaaccattcggtcatgcagaggttagacataaacattttttgtcctgttatgcagatgttacaattccaataactgctaaaagttgtaacttggctttatacagtttcatagccgttcagaaacatgttatgtcattgcaccagaacggcccgtttctgacgttttcaacatatatgtgccacgcatcaagcatttgattggcaacaagctgaaatgtttgccctcccagcatcgaccaatgtttgaatcaatgtttgatgctcatgacaaggaggtggataagtactgtgactctcttcagctgagccatcagatgattgtttctaagcagattgaactatctgagacctttggtg

SEQ ID NO: 128995 - DNA, 491 bp, Zea Mays
gaaggatattgtgtgctccaaccatcggtaagggcctggagcgttgttcgtggccactagaacttgtcgatcactgagtttctgttgcctttctgcctctacccccctcctactgctgaggcttcctaggctcattaggctctcctcgaggtgggtgaggcgatagcggctggaatggtcggccatgcccgatggagtttttgaaatccctgcagttacgcagggtgtgccacatgtccttgtggtacgagcactgggagttgaggatctcatccagtgcccttaccccttcacggggtgcgctgcgggctcgagttgcaggtgacccggcggtgtgtacttcctcccggggcctcttctcccagcgtttatctagttgctggttcacgtcccttcgcggtgctggtggtatgggctttgtgcctccaatgaggtcttgagcccgttcatccgcggtgatgtagacgtccgcctccttgaatagttgttca

SEQ ID NO: 128996 - DNA, 446 bp, Zea Mays
ctgacggaggaagttcgttgtgagagccaatcggtacgaacgcgagaagcgggaggctggctggggcgtgtcgtgcggagggtgcgggaggcgacacgggtgttggcgagcgtgcacgagcctggggtgtggagtcatggtctgcttgtgtacgatagaggtgagttggtgtgtgttttggtgcgggtggagaagcgggctggagtatgttgtggagtgggcgggtgggacgtgacaactgacatggcatggaggttgcagatggcgtgaagacttgcggctggcgtgaagacttgtgactggcgtggaggtcatggtttgcgggcggaggtagttcgttgcgagagccaatcagagtaaacacgagaagcgagaggctggctggggcgtgtcgtgcggagggtgcaggaggcgacacgggtgttggcgagcgtgtgcgggcctag

SEQ ID NO: 128997 - DNA, 360 bp, Zea Mays
ctttttatccactatcaatttttcatccactaataattcatcgcgggcccacaacacagtgccaaacagtgtaagggcgcatgaacagtgaaccgccaggagtggagggagagagaagcgctcccctcggtagagggctccgtagaggcaaccgttgcgcgggtgggaggacttctgtacacggcatgcaaggggagaggaaagtatagcggcgacccgtgcagacagtctaagtggagtagcaaactcttcaatgcctaccccctcctcctatccatacagatgtttaggagctccttgctctacattggtaacccctacaccctcccgtgcacgcggggagcacgccagatgtgagag

SEQ ID NO: 128998 - DNA, 367 bp, Zea Mays
tggacggcgaggtcctccggctcctgatgaaggaaggaggaaggggcgcttgcggttgcggatgtctctggcgtaggcaaagtgcgggaggggaactccagcgcattcaaggtggagaagtggagatcgtggagagggaagccgcgggagtggagctgtgcgagcggttgggcgcgacgtcgcggaaggcggagtttaccgaagaatgaagggagacagctggcgtccgtcgctggagtatgggctgctccaaacatagctggagtatgggccgcaccaaacattcagcccaggacaccggtactgttgtgttgttttctttacagatatggttagtaccataccggctagtaaagtaggcatagtg

SEQ ID NO: 128999 - DNA, 778 bp, Zea Mays
gagcaaggagtcctctggttcaagaaccgcctgtgtgtaccagtgggagaggcacgggaagccctgctcaatgaagcccacaactcagcttactccatccacccagggaccaccaagatgtacctagacctcaaaaccagatactggtggaaagggatgaagaaggaaatagcacagtatgtggcccggtgtgacacctgtcagcgaacaaaggccgaacatcagaagcctgcaggcctacttcaacccctcccagtacccgaatggaagtgggaagaaataggcatggatttcgtgaccggactgccccgaacacagaaaagaaatgattccatatgggtaataatcgatcgtctcaccaaggtggcccacttcgttccagtaaagaccacttttggaggagccgcccttgcccgaatataccttaaagagatagtcaggctccatggcattccgcggaagatagtatcagatagaggaacacagttcacttcaaaattttggaagggcctccagcaagccatgggcaccaagctagatttcagcaccgcttaccacccccagtcagatggtcaaatagaaagagtcaacaagatcctcgaagatttgctaagagcctgtgtgctaacattcgacagggattgggagtccagtttgccgtacgctgaattctcgtacaacaacagccatcaggccaacatcaaaatgtcaccgttcgaagcactgtacagaagaaaatgccaaactctcctaatgtggtccaatgtaggggaaagaa

SEQ ID NO: 129000 - DNA, 283 bp, Zea Mays
tcggagggatccggaccccatccaagggacccgacacgctacttgggagttccgtaccgtactcgggggtccgggtcatgcgtacaggggtccgacgcttcctcgtggaggtccggtccaactgactgcatcccgggatataccatcttttctggccacatggcgccccttgagccatccacgtggtggggtcaggtgctgttcaccacgtggctagagatcgccgcacgggcaccgtgtcttcatactgtagtaaggggtacccctgattcagggtaccgac

SEQ ID NO: 129001 - DNA, 342 bp, Zea Mays
gcttgagtcgttctatgatggcaagcactagggccacctactgtctcaccttgatccaccacccatcttggccccattgaacccatatgccccaccgctgggatgagctgcacatgccgttctacgacgtgctgggttactcgagctcgggtagtgaactccgcgctacccaacctcaaccaaacactactcacggctgccatggattattggtgtctagagacccactctttccacctttcctggagcaagatgacgatcatgctataggatgtcaccctgatctttgagttgccattgcatagacttctggccgttgagatcacggaccctaagaattgg

SEQ ID NO: 129002 - DNA, 367 bp, Zea Mays
gtcttcgccggatggtgaggtgagcctgtaagcattcggggatgttttggtcttgacgatgtagggcccctcccacttgggttcaagcttaccccgagactctgttctgatggttctggtgagtaataagtctccttctttgaattctcttgggatgacggtgttgtcgtgccatgccttagtctgtgcttggtatttgctcagtgcctctaaagcaaggacacagtctccgtcgatgaggtctttagaggttggttcgttgacgtcaggggtagttgtggggcttgctcgcggggatccatgctttagctcttgcggcatcattgcttcggatccatacatcaagtgaaaaggtgtgaacccagtc

SEQ ID NO: 129003 - DNA, 302 bp, Zea Mays
tagtgtcgatcctgtgtgggagacacagtcaggagtgccctaggtgcgctgcgtacaccgtaggggcgcaatcaccatggccaagaccacgagcgagtagttttggaaagtttcaatcatgcccacaatgtaggagatatctatatctagtgtgttagtggtagtaagttatttcaattgaagaaactttcaattattagttgggatcgggcaagagaagtccatacatgtgcatgcagctagagcgcgtgatggggaccaagtttctgatcttccatcatgttgaagataagtatcgattt

SEQ ID NO: 129004 - DNA, 486 bp, Zea Mays
ggctttcttcaccttcttcgaagttgcacgctacgcatggggatccgcaagaagcccgaatatgtctggaaggaataccgcgaaaatggaatagaaaagtgctctatggcagtctacctgggagaaagccgaaactacccaaaccaccctcccttccaaatcaccttcatcgggcaccgctttccagacacttgctagggtgttgcccgaaaagcccttaaacagctgtgccaaaactacagccgagagatctttgagacccccttcgatattttccacccagcaacaaaaatacccccacctggaggaaaagactccaggctctgtcaggaggagatcccacagaagatgaccccaccatcgtctacatggccggatacctccacaccctcgacaaccactatgatgagctctcctcccactgcacccacctaaactcccgagtggaaagcctagagcagcaggtcaaagagcttaagcaagaga

SEQ ID NO: 129005 - DNA, 401 bp, Zea Mays
gcaaggaaggggggcgaccgtaggagacacaaggtcgagatcgaggaacacatagagctcggtgagagaggcagtggaagaagtggaaaagggaaaatccaactcctcaaaaatgacgtgacgagaaatgaggactctgtgtgaggtgaggtcgagacaccggtaccccttatggtcgggggagcatctgaggaagacacaacgagtggagcggggcgctaatttatgaggagcagtggaggcgagattagggtagcaagcgcacccgaagacacgaagatgatcataggaggggtggatgccgaaaagagcgaagtaaggagtggggtgggcaaccgtctttgtgggcagacgattgaggaggtaggtggcagtggtgagggcctcagcctagtagtgag

SEQ ID NO: 129006 - DNA, 551 bp, Zea Mays
acgcatgattgcgctactgcgccgcctatgatggagtgagatacgctactcatttcttcatcaagctggatcggaaccatgtgtacactgtcattgggccatcatcaaatgcagcttccatgaaaacgtttgtaattattagattcttgtcagtatgcacacacattttgtgccatgcattggatcaacttcttctttatgtcattgtgtgtgtgtgtgttttcctagtgtcaactgtcaaccatgcctcagtaccgttctacagtccctcatatactatacctcctttatttgcgttcattaaccactaacacaggtcgtttctacttgcattgtcctttggtattgtctacgttggcattattgtatgggtattgggtagaggatcattcggttaggataaagtgatgaaaaggacatcgaaaagataagaaaagttgcatctataaaatttaggttctacataaagaagataaaaaaggaacagtagaatctggtatcctagcgattttgatggttagcgtttttcaagtttctcccttattattttt

SEQ ID NO: 129007 - DNA, 758 bp, Zea Mays
aaaaagggtagacgacgtcggagggatatctgggcgggaggagcatcatgtcataaccgaagtcaaggagcatgaactcgagactcacgaaccagatcatcataccaaagtgccaagggtgttgaggattggccatctggagtcttggtgggaatgtggtgtcaacatgtagtgttgcccctacatggcgtgccaactgtcggtgtttttactaaagggtcctaccaactagtggattagtgcaacatgcccagatctagatgggtgatgcaagaagacacaaacttttatcctgatttgagcaagagaaggccttagttctagcatagggggatgagacttatattatcttgcacctaagtgtttgtagtaggggtacaagctggccggaagcaagagtggatcccaagtccctggtggtgattgaggcaagtgccaatatcagtcgtggaggtgaaaacctgtgaagtgttctcatcttccgctttgaagccccagactccttttatagcctaaaggagggttcccaagagcgccgcaatttgtcgtgtgtgggagaggaggcgagcctgagcccctgtagccggtatggtcgacagaatgacctttgtacttgtagttgacttggatcaagaggaggatgtccggcccctatacttgtatcttgattgagtagagagccgaggccaagatctagggctcggacgcatactcgagcctgtctgatggaggtgttgtccgagtcgtagttgttgaaa

SEQ ID NO: 129008 - DNA, 626 bp, Zea Mays
cctcgccgcacacggcttcagcgcgatcgccgtcggccaccgtcctcctcctccccacctgcactcgccacatagagaagttcgacaccgcttcgtcctcgctcgctgtggtcgcgtccttgcacggcaccgccccgccgagcggtcccgtcgccaccgttgtgcaccatttactccatcgttgtgcacctcaccagcgtccacctaacaccgctgcttccctcccatcgggcgcctataaaagggccgccccgagctcctccatgacttgcactggcctcggccactcttcccccctccccgagcagcgccgcaccagctccgccgcccctccctccagtccggtaagctccttctcctcctcccccctctttggttgttcagcgagaaattcactaggctcaacagcttcaccacatcaccgcaaactcggaacaccgctcccctgcccccgatcaccacccaaacttcaccggcgacgactcccgccatggagctccgccaccccaccgtggtcagctccctcccagtgacctctggcaaaattggacccacccttaagctcgccagcctcttctcgtgctttggcacctgcccgatccccaggaatcgggtcaccggcggcg

SEQ ID NO: 129009 - DNA, 348 bp, Zea Mays
ggaaactctatatatagagaatccaacaacgtcttttaaatttagatgactgtttagaagacattgctgaaaagcgtatatgactgtttgatcctctaaatttaggatagagcacccttgttggagcccgtctaagaattcagaggtaggcttcagatatatgtcataatatatgtatgttaaaccggtaccatggccaaaaactctgcatctgtgctctctgttcctactggtgatggtcacccagcagagagacgagaggttgcagcacctgctgctagaagaagaatgccatagtgccatggatcgatgccatgctctcgtagaagtttactgcgccattctctg

SEQ ID NO: 129010 - DNA, 626 bp, Zea Mays
ccgtcgcgtgctccaagctcgagggcagcatctcgcgcgtcgtcaaccttggagggcggtcttcagtgtcaagaggttggtcaagattgcccgactcccatggaggtgatcgcggatccttcagccttagaggtggctgttgaagaaaacccagtcctcaagggtggtgctggcggttacccagccctcgagggtgttgccggtgacgatccggctcaggtgggtaacgcaagctataacccagcccccgagggtgttgtcggtagcgatccggctccgatgggtagtgcgagctacaacctagcccccgagggtgcccgagcgagctctccttcccatacctccatggatgtccacgtcgggtcgtctccaccacattctgatggagtgatagtgatgcatactcctttagcttcaagtgagggagtcgccttagtggtcggcgcaccgaatgacaagattttggtatctgctggaggagctgaatcaacccctgacgatgcttttcagattgtcccagttgatcttccttcatcgagtcataacacgacttctcatgacttgggattgccttcgttcttttctaatcttcaggtaaatcagcattttcattctgtcgttcctcc

SEQ ID NO: 129011 - DNA, 433 bp, Zea Mays
tcccagtctctattttaaattcaaagaaaaggttaccccaagtcgcttggttaaatagaggtgtgctgaatttaatttagattagatgcagtggatagtttggattgggtctgtgcatatctgaagaagttcttttttccattttccctacctacgtgtttttaggctgtagtggataagaagggcagatgtttggagatggggttgctggagaaaaatgtgctgcccaggaaaaatggacgcactgcatctgaagccaggtggagtccaggaagccggtagaaacctgtgactcagctgtgggtgcgctcccctgtccaaacaccagcaaacctttaccctttgcctcactgtagactggtcttatgtggacataggagtcgaggccgcgtgctagctcatgcaaacctcagctgaaacacatcggcgccca

SEQ ID NO: 129012 - DNA, 1402 bp, Zea Mays
tgcaaactcatttgtcaacttttggatcagtttctcagtagcagagtccgatgagctgacaattatgatgtcatccacatatattagcatgtacattgtaatatcagcttgcctgaacacaaatagggaggtgtctgcaatagatggactgaacccaagctcaattagtttccctgtcagcctagagtgccaggctcttggggcctgctttagaccatagagggctttctgcagcttgcaaatataattatctggcttagttgagtcagtgtacccaggtggttgcctcatgtagacttcctcctggagtactccatgtaagaaggcattttgaatgtcaatttgcctcatattccaaccttgactcactgctagagataggacaattcgaatggtggctggtttgattactgggcaaaatgtatcaaggtaatcaatgccatacctttgtttaaaccctttagccaccaacctggccttaagcctttcaactgcaccatcaggcttcttcttcactttaaatacccatttgctatcaatgatattgattcccttcctgggtggaacaagtgtccaggtttgattctttaacaatgctgaatattcagtgtccattgcctccttccatcctggatctgatagagcttgttcaagatcatgtggttctgttacctcaggaccagatttgacttgagcaacaaaacctcttgccttgtgagaatacttgatagtgccatccttgaactccttgggctgcacaatattattcttgagtcgagtctgcatttgatgcagttgcacaatattattcttgagtcgagtctggacatcaggcacaacaacaggttcagaggcagctggttcaggagatgcagctggttcaggttcaggttcagctgcaggttcagaaaagtgttgttgttcttgattttgtgctgctgctagttctgcccctccattttctgtacctgcaggaggcatattatgacaaagaccatcctcattagcatttggattagactgtcgatcacccatgaaggcatcatttataactggttcatctactggtgggttgtcaaggagaaagagagcatcttcagtatatgcagtgggtttaactagaataggcagaatagtaggatgattagaggatttaggatcttgtactttttctagagttttctcagcaaaagggaaaacatgctcatcaaaaattacatctctggaaatgtacaccctgccagtagtgtggtcaaaacatttgtaacctttgtgagaagaactatacccaagaaaggtgcactgttttgatctaaaactgagtttgttttgattatatggacgcaaatttggccaacaagcacacccaaacacacgaagtttagagtaatctggatttgtt

SEQ ID NO: 129013 - DNA, 387 bp, Zea Mays
tgagtatcaagtctatgccacacttcggacagccatgacgaaggacttcgccatgactactgagttaccatcatacgagaatatggtagcttcgtaactcatgaggaactgcttcgggtcagtcaggccatcatacataggcaatgtatgaggcatgtacaatggtggccatggtgtgtcctgtaattttagtgccagtgggaaagcttcatcataggggaaatgttgaacattgaattcttcatgacaaaggttgttgtgattgcaaccatcatggtcttggtccttatagttgtacatgtttctgtgtgcttcgatgttgcacatctcttcagttgcttcgttaatcttcctctggagctcagaaagacgaagcatttttttctt

SEQ ID NO: 129014 - DNA, 404 bp, Zea Mays
ataattttacaaataataatctaaaaaatggttcattcataatttcgaattgtaacaaaaaataacattccattttatgatttgtgtaattgttgttcaaaaacgtgtcacagtatttaaatcgtatgaacaaatgtttacaaattgccatgcttccaccgtaagccacgacatttattcaagaagccatcgactagcttcggctgcacgacaagggtatggcttctctccgaagcgtatcccttctataaatactcagtacctcaacacttcactcacacttcgcatacactcctccacaacaatgaacccgttcgtagattccaatatttttcttcgcatggcgcaagacatggaagatgaagaccatgagctcgaggttgcgacgtaccaacatcgtaggc

SEQ ID NO: 129015 - DNA, 963 bp, Zea Mays
cggggatgggcgaggcaaccactgtctccgaggaagggggcgcatgcgttgatggcacgcaatgtcggccgcggtgggggcgagcggggcaggtcgcaggggaggtgaatgtgcagtgaggggggaggcaggggcgaggacgtgtggtggaggccgggggcgctagggtgggggcacggtgtagccctggtggacgcccacactgaacccttatagagcagtagagatagggcaggtataataggagccctggacttcggataataggagacctggtcggtaacggggtcaggggagcgtacaggaccactggaactgaacgcgtgggtgttcgaccggaccgtgacagggaacgtgcaggttggacgtcatcgtgaagtgtgttatgggtaaaacgttggtcagaacggcaagggtgttatcatatggtagtgggcggaattatagggattagattcctcatgcagacgtggattcagttaattgtggccgcggaatttatggatcttccatggagcataaaggtggaagggatagataaaatatggaataagatgttaaaagatatggcgtaacacatatacgctataaatgttgtgtatatagtatataccatttggtataaaactttgagttaatatggcgtaaatagtgattgagggatatttggattctaggtgacttgctccattatcggtaacagtttgaaaaaagtggaaataccctggaaagggggatgcggttacacgtttagtgtagcatccatcattgtcttcatatgaaaaaacataaggcttcagactgcatcaatcgttggcggtggagatggccaactctggataatcgccggcgatggcaggagatggagttgtgattcgtcaagacactgaggcagtcgttgatggtaacttaatggttacaccacctcatgttctaatggggcctcgaatcaacgagataagc

SEQ ID NO: 129016 - DNA, 376 bp, Zea Mays
ggtggattgtaggcggctgtaggtggaagagcagctggagcctcgatgagcaagggcataacggaagcagaccagcgtggggagggagaggaagggcgtggcggaaggagatcggtcggccgttttgcaatggcgagaaaaagggctctagccggccgttttaccttggcggaatggggtcgtgcgcagagttaagaggatctgttcatctaatcggtaccttacagaagtacttttgttaaaaacatattgcttcgtcattttattgttattctttgtttagcatagtggtttgtctttattgtacttcttgcaggtgctaggttcaatccctgccattgcaccttttctttgcattttttgccaagttacaatg

SEQ ID NO: 129017 - DNA, 489 bp, Zea Mays
acggaatagagatgataaaaaacatcctctcattgataacgaacgaaagaaagacaatcaaagaagacctgccccacattgataggggtgtcaaaatgttttgggcaagttcgtcagcatgtcaaagttagggctttatcttaaatccatatcgaaacagaaagtgcaacgctacaaatggaggaggaggttatgaaccggagagcaatggatgtgaatgcaccaaagtacccctctataaggtggattcctaaaagatttttagtatcttatatattttttgaaatccaaatgactaaaatgatatcgaccgatccagactctaacacgaggatcgacatagtcgtaatacggtcagtatcgaccatgccgaccggtcgcccaaatcacatgtcatttatggtgatatcattattatccaccgcaatgtcgagccacatgagcggatggtatcacctccggttgaatcgcatctatatattcaaacgt

SEQ ID NO: 129018 - DNA, 542 bp, Zea Mays
aatttaggcaaaaaactctcaaagtgaaatcttctcctccccacgccccctctctaactctaagatttaggggacagtgatccgagacatcagtagcattactgtgaagagaacaatctagaaaaaatcctcccagccagcagtgcagaaaacatgatccaatttcacaagagtaggcacctccctctgatttgaccaagcgaatcttctgccaatcaaaggaatctcttttagctccaaagaattgacaaacccactgaagagacccatcattgacctgtttatgttggaattattcttatcttcctctcggagaattatgttaaaatccccacataaaaaccatggccccacacactcatcacgaaccgttctcaattcatggataaactcctgcttaaaaatatcctgatgaggtccatacacacctgtgaaccaccaggaagaaccagactcatcctgaaaatggacagagacaaagattcttcatgactgaagccacagagacaaaagacccgtcacgctaagcaattaacactcct

SEQ ID NO: 129019 - DNA, 316 bp, Zea Mays
ctccttgcaccaccttcccattgttattatgatgaagctaccttcgttactcttccatcgttctacactgaaggtagtctgattctgaagctcctgcaatgcttgacaaatatactgatgaccaatggttagtccgtgttttttaggaccttcggaaaatgaaggccctcaacaatagccaccttgttggctccgaattggggctaaacactagggcttgttctgcttggcgagctctttgcggtggtgtggacggtccatagcacggaatcgaacggtccacggcacagagtcggacggttcgctacactatggt

SEQ ID NO: 129020 - DNA, 547 bp, Zea Mays
catcctaaaatggaggaaacaaatcatggattagaccgagaagccaaaatcagagaaaagcctaaacccaaatttttttggggaaaaatgaggagcagagacattcggagttcctatgtcctcaaatgagttcatgcagcaatctatgagcaagaaaaatgttttgtgggtgaaataaaacacaagcaatacacgcaccctaaaatggaggagaaaaatcatggattagatcgagaagccaaaattagagaaaagcctaaaccctaaaattttggggggaaattgaggagtccaaaaaagcatgaggttctccggtacaagaaaatcttagcaaaaggatgctgagcatgattgaaagcacggatctggaaacaaatagatgtccaccgaaccaaaatggacgatgaaagataaaatatcatatctgagcaaacaatcggagccgaggaagaagccagtcgagaggaaacttcagtacagaggcggagtcaacgaggaacctaatgccgacgaaaccgaatgaacagagagaagggataagcaaaac

SEQ ID NO: 129021 - DNA, 630 bp, Zea Mays
cggcactgcagcaactacatggtacttcaatccagacattcctgaggcacaggaatactacatcaagtaagacacaataattagaaaattcagaactttaagacactccgtactttcgattttcccctccacacacgcactttaattaagtaatattattcatgtagttaactgtcccaatctaatattttaccaatattgattttttatagaaaggttataatactacaatctttttatagccacttttcctcacaaatccacatttactccataatgaaccaatagaatggaaacaaaaaaagatagagtggacagaagtttacgaacatttatctgatccaaaacgtcacattacttgaaggttacaaagaagtgatctccaaatgattaaacccacagtagcagaagaagaatttgaggtttctcaaaaaccgaatatcgaagacaagactatccaagaactacttgagatggatctagatatgttccctgtaattattgtcaaatccttttctattccaccttttaaatacataaaaaatgaacttaatgtatttataatacgatttttgtcttatatgatgcagccacagggctttaagtgcaccgccactatatcacgactca

SEQ ID NO: 129022 - DNA, 324 bp, Zea Mays
gttacaggtatggtttgcagttgctgtgctggtagatgctgctgttttgataagtattgacaagcttcacatctctggactaactcggctgcgtcgctctttgccgttggccagtagaaaccagacctgaagaccttcccaaccagagtcctggatgctgcgtgtatcctgcattgtccagcgtgaacctcttctaggagttgcatcccagtagccgaaagaatgcatttcatgaggactcctgtcgtgccccttctgtatagtgtttccccaatgagagtgtagtgagctgactgccttgcaatgcgctctgttgcatttttg

SEQ ID NO: 129023 - DNA, 1056 bp, Zea Mays
gacggcaatggctacataaattgtcatagtggtgtggtcggggtgtggttcagggttaatgcttgtataaattgacgataacaactgcatatccatctgacgcacggggtttacgatcctttacacaacaatttatgctccatatgaacacgacgtacacataacaatttatacaacgtgcggggtgtggctcggggttaatgcttgtataaacgcacagtgtttacgatcctttacacaacaatttatgctccatatgaacacgacgtacacacaacaatttatacaacgtgcggggtgtggttcagggttaatgcttgtataaaagcacagtgtttatgatcctttacacaacaatttatgctccatatgaacacgacgtacacacaacaatttatacaacgtgcagggtgtggttcggggttaatgcttgtataaacgtacaatgtttacgatcctttacacaacaatttatgctccatatgaacacgacgtacacacaacaatttatacaacgtgcggggtgtggttcggggttaatgcttgtataaacacacagtgtttacgatcctttacacaacaatttatgctccatatgaacacgacgtacacaaaacaatttatacaacgtgcggggtgtggttcggggttaatgcttgtataaaagcacaatgtttacgatcctttacacaacaatttatgctccatatggacacgacgtacacacaacaatttatacaacgtgcggggtgtggttcggggttaatgcttgtataaacgtacagtgtttatgatcctttacacaacaatatatgctccatatgaacacaccgtacacacactaaccaaccgatcgtgcacacactacgggtccccacagtcctgcgtcgcttcccgctagccgactgagccaatgtggtcaacgttcgagacccactcgtacgaacagaaccaacccacgcgtcgtggccccaccaaaaccctaataaaatatgtgccttgccgtcgccgccacccgctcctacgatcgccaacgccgagggccccaccgcccca

SEQ ID NO: 129024 - DNA, 343 bp, Zea Mays
ctgtctttgatctatgtatatatattttttagaaaacttcatcgagttttttttgaaactttgccttatttactagtgactgcaccacacatatctttgttgtaagtttcagccattttttggagtatttatggccgtacagctggagctcatgtacttggttttggctgatgaccgcataccagtgatggtcctctgcctcgctttctttaccatcatttgaaatgactgtgcttctacatgatctcttatctcgtagccattgcataccaatgaactctcttctcgtacgaatctcatctgtgattctgatgcaagcatgcaatggatgttcagttttccc

SEQ ID NO: 129025 - DNA, 414 bp, Zea Mays
ccataggaggtttggaattcgaattgaggcacaaaacgacatggaattgagccgaaacttcacgaataggtttatgtaggtgaatatgagtgaagtgtgtgcttggtttgaatttaggcgaagaaaaagagatttgggcactcggctcggaaacgatcgctcgaaacggggaatttggtgaaatttaagcctggaatctcggattggcgtgaaatttggcaagagtgtcactggaagtgttgtgaaggtgcctgaaaaatttgggttcaattggagcattttttgctggtttgggcatttcaccgagcacgtggcgtgcgaggaattagggtttcggtgaaacgactatttgaggtgggaaaaccctcccgaagaagctaagaacctgcagggatactcaatacacacagagac

SEQ ID NO: 129026 - DNA, 717 bp, Zea Mays
gccgacccttctgctcctgctgctgaggaagtgccagtgccagtttttgctgaagttgaccccaatgggtgtgacccgactgatgctgaacccaatgggtgtgaccttgatgatgttgatcccaatgggtgtaatccggccaaagttgatcccaatggctgtaccgttcgtattattgatgaagatgaggaagaggaagaggaaattcccttggttcggaagaacagccggcgctacatagccagcggggagagtagtggtgttccttctccagctttgtctgctctcattggtctgcaagaattgtctctggcaaactttgatcagactctcgaagacatggtcccagaagatctgttgtcagagccggcagatggtggaatgatggaagtttgtgctaacgtgtctgatgccaggttagaattatcccgagcagcatctcgtgccttgtcgaccttggagcgcggtcttaagagtcgagaggctgatctagattgctccgttcccatggaagttgttgaaggtccttcagccttagaggtggctgccacaaagagctcggtcctcaacaatggtgctagcgtttgcccagcccccgagggtgttgccggagatgatccggctcggatgggtagcgcgagctatgacccagcccccgagggtgtccgagtgggttctccctctcatacttccatagatgttcatgtagggtcttct

SEQ ID NO: 129027 - DNA, 528 bp, Zea Mays
cggacctgagatcggtcggccacggcgcgagatcacgcagtggtgttctaagctgatttggggaattccaaatttgggggttgtagaggctaatcagaggcgagaagtggtgttctggcttcgtaacaagctaatagagcaagtcggggcatcaatttatagtgatcaacatcggtggcgctcaatttggggaagacacgctggcggccggagcaaggtgagtcaccagagttatctattgtggcgcttacttaggcaaaggctcgggataatagtttgtcgttcatcatgacttactgcgacttggtacaacgacacatagcgtggcagactccggtaaactgcggtcacgtcggtggtggtcgcgcggccacgttgccgtgcaagttggtacggtgggtcctgaccccgctgatcttttcactcgcgcggtgatatccgcttctcactgagcacgatttgtggcaccggcgcgaatccaggcgcggggatcgccggctgcgaggtgcactgaacctggcattgggt

SEQ ID NO: 129028 - DNA, 276 bp, Zea Mays
caacaaacgcgcaaaatcgaagatttccccaaaagcacccagacacaagccgcctacgggcgcggccggatcaacgaaggcacgcagcctcatcatacaaatcatagttacacacacagcgagggcatcacacattacaacggctcaaccttcgggatgatacccatctccctatagttaaacaacattatcctcaatttctcaccctcaaaaagattccgcagctcaccctcacctacagtcggcgaagacaacaattcccgttttgcagtcccg

SEQ ID NO: 129029 - DNA, 572 bp, Zea Mays
ccaaagagaaggacataaaagaaaaatcagatttttctcactttcaaaaccaaccctctttcaaagatcaaacatgttcacctttttccaaacctcaaaaccaaagggcccaattgacaaaatggagcctaaagacccctagaacaccttggaaaaatttgaacccaaccctaagtcgtttgagacgacttgacacggtttttgtcgcggtgtggacagctcggacagagccaacttgccacccccatatctctcaaccccgaccatatctttgcttggaactcacatggaaaagataggatttggtgcagagaagagaccgtacacggggtttttgctgaggtctgcatgctaaggcgaccaaacaggccgttgaacactagcagaagtaaaccaccacgtgttagacgtgggcagacactcgggaacgcgccagagcacgcccgcacatgcacccccgcgcgccctcagccgcctttgtgcttgcgcctgtgtcgtgcccgcgaatggctataaagcccacccccatgcacggccaccttccctgttaccccctccacaccgcgcctaac

SEQ ID NO: 129030 - DNA, 457 bp, Zea Mays
ctagactttgattcacaggcgcataagtccactcaactcaattctaagctaaaaacaactcaaaaccaactacacatgggtaaaacttggaaaaagtaaagaatacctagtttcacaccttggataagttgcaaacacccctaggaacctatttaacacatctaagatggttcgaaagctcatgtttacaaaaacacactttcagagcaagtttgagctaaacaagtttctaagttagagagagcaaaaagttcaaaaacatgacttagactagttggattgtcaccacatatgtttgtctaagtctcaagaacaccctcaaagatagctaaaaggatctgaagaagatttgaagaaaggaaggaaatttggtctcctgactatcacacctagggctcactggattgttcgatgccacaccggaccattcagttagaggactaaaactcaacccgag

SEQ ID NO: 129031 - DNA, 303 bp, Zea Mays
cccaagcaaaagacacacctttctttgtgagttcgtgcaaaggggcagcgatggagctaaaatcacgcacaaaacgacggtaaaatcctacaagtccaagaaaactccgaatttgggtgaccgtcgttggtgtaggccagtcctgaatggcttcaaccttgctgctatccacctcaatgccctgcggagtaaccacataaccaagaaacgagacacgttacatgcaaaatgtgcacttttccatgttaccaaacaagagagtagcacgcaaagcatcaaaaatagcacacaaatgttctaaat

SEQ ID NO: 129032 - DNA, 561 bp, Zea Mays
gcgagtcccacaaagtgggattttggtaaggttcaaggtctggtacagattcatcttccgtcataccccttgcgtcactatcaagctcacataggtatacgcctgatatggggtattgtctcgtctttccggtgtatgggtcaccgtagggacttcggtgtcgagccctccacgactggagttgatcggccctgcgagtcagtgagggcatatctgcgggcacacacgggggtattcgatcgtgtctatctgatgccttttggtactgtaggtatgacctgatcatggtttggtgactttgtgtcttgtcacggccgtcgttggccaacattgttgcccttggttccttcctcgtggatatgctcaatgttggtcgccctgcctcgcgggcctactgggcgaggacttggtcgatcgccccgcctcgtggacttgctcggcgggaacttggtcagccgcctcgcctcgcatacctgcttgacaaggacttggtcagttgccccgcctcgtagacttgctcggcggggacttggtcgataaatgggtcagagagaggtttac

SEQ ID NO: 129033 - DNA, 277 bp, Zea Mays
gcagctccaagaggcagaggggggagaagcttcgaaggaaggtatggtaaccagcctaggagactgttctacctattatgtggggaagataagggacacaagacgaggatgtgccaagtcacgatccaaaagtagaatgaaatcgctgaagctaaagcacggcagaacccgctgaagcaggtcttgcatactgcttcatgctattctccgtatatccctgagtatgtgggaaatcaacaacctacgacatccgttgctttggcaagtcactcccaag

SEQ ID NO: 129034 - DNA, 292 bp, Zea Mays
cgctcatttccaggcttccccacgcacatctcacagaatggctatgaaacggattatgaggtacctacgtttcactcccgaatttggtctgtggtactcctcatcgtctgttccgtccttgtgcggttattctgatgctgattttgcgggttgccttttggagcgcaagtctacttctgggacttgtcagtttttgggtacttcgttggtttcatggtcttctcgaaaatagtctagtgttgccctgtctaccacagaggccgagtatattgctgccgctagccgttgttca

SEQ ID NO: 129035 - DNA, 460 bp, Zea Mays
tgatgatccaatagcccccatacggattgcaagtcaatcatcaccgtctatttcatgatctacggacaccttggcatcgtctacctcacgacaccaaggcgcagtcgtcgcgccatgcccggcactccccctctctctcctgtcggtccaccggcgttctgcccgaccaagaccagccagtggtcgccaccgccgttccccggcggcgctccaaccccacacacacgcggcatcctaacgaatccacaaggtattgcattggaggaaaccgactcaccatagatgattgcgccggtagggtctgcctgcccccgatgaccagcgtcccgccgacgacgaccccgcaaagtaccaagctccaggtacacgatcggccaagccccagacccgacaccagaggtattacgctggcgaattctcctctcaactcgcggtcttatggcgatgaggacgacaatcg

SEQ ID NO: 129036 - DNA, 676 bp, Zea Mays
ggagatcttgtatggttgcatctacgaaaggatcgctttccccaacagcgtaagagtaagttatctcctcggggtgatggtccgttcaaggttctccaaacgataaatgataatgcttacaaaattgagctgccacctgaatattccaatgtgagtacaacattcaatgtcaaagacttgcttccatttgttggtgagcctgagtcaaggatgactcctcaagagggggaggctaatgaggacacgcctagcattcactcatcttcaaatgaaactccacttgatattgttggtccaattacaaggagtagagctaaacaattgcagaaggaaattcattctcaggtgaacgctaaccttatgtttaataatcagtctatgttgaatgaacctatgcttttgagttcttgtttcaatgtcctcaggaatggtggagtgtatgaaccagcatgggatcaagatggattcaagcctctggacatctgaaccaagaagcctatggtgtgcatgaataaaatggtcgttcatcaccttagcatgggaatgcaactagaagttagatgactgacacgtggtacgaattccaagcatcaatgccaatagaatacaaggagtttgaaggtgttctataagtggatggaagcatcttcaagtctacttttcagcccatcaaacg

SEQ ID NO: 129037 - DNA, 652 bp, Zea Mays
ggtacggagggagccagggaggcaatttgcaatcgcggttgtggacttggggtttaaggaggagggcctcggatgcctatatatatactggagtcattagcaagaaaaccggacctaggtggttggctggagggctgcttcttatccgttgcgccagactcggctggaggttgcagacgaccagagggcccacaaaccagcgaccgatccaacactgcacacgagctagggagactagggaaccgggaatcacgaccgagcagttacgacgcacgaatatatcggaaccctctgttatcattcgtggtcatgaaatcttaacaataggacggcgactgtttttgcttgcttgatgtcatgtttgtgtcatgctgatgtcatgtgcgacaaggagaataaagaaaggaaaaaaacatataggtgacgcttgggctggaatgagtatatagaatggatactcgttgggctgctggtacgtggtttttttttttgcattttcttatttcttttctgtttttttacatttttcagttttaaattttctattcaaattcaaatttaagctacaaatttagatgaatgcaacaaacaacgaaatccagcatgtgataagacatatccatatttattaactactcttacttatccgggc

SEQ ID NO: 129038 - DNA, 557 bp, Zea Mays
tataacaaatacatgggtattcctttgaacttacatggctttggagaatgtgtggtgtgtcctgctcatgttcaccaattgtacgcatgggtatccgctgagttgttcccaccaaacttggatgaactgtgttgctgtcttcaagaattcctggcgccggtaacgcagccggtggagttacagcatgccggccatcggtcatacagggtgtcgtcgtcgctgtatcttctccatactgctccgatcccctggccgtctccattgtgtatgccctaactctcccagatctttgagcaaaagcggcggcgactgtgtgtctaccgttttttgcagctattctcctatactcgcctaaaccgtcatggcctatattcatggcatgatccaatatcccgagatttactgcgcagtttgcatgtcgctagatttacgtgaacgatccgttacgattacatgcctattgtgtcacatttccataaatatggctcaccccaacgtgcaaccgccccacgttcttggatgaagcgcgcgtcacccccactacccgatctgaccac

SEQ ID NO: 129039 - DNA, 645 bp, Zea Mays
ttcaatccgaattagggacttgtagttaaggaagctatgagtaggatagactctatgaggtaggtcaacgttggggatggatggactatgcattctaatactcattcttgtgaccatgactccactcgagttaggatcttgagccttatgacttggaccgtaaaactatatgatttaccatgatggattcaagtcacatccttatgtcatgatcttcaatgcaccatgcctcttctcatcttgatcaaccttgacccttgcaagaacctcttattcaccttatcttcaggtacctcagtcctcttgatcatctcccttgctctagtccctcgaagttcttcttgcctttgtccttggttcaatcaactatctccaagtcatatacattggatcccacttagcaatgtccattcttcaactttcttcatttttgatatccataattcatattcatcttagcttatttggaatatcacatttgactccatgtgtcgaaccttgtaagctttataccaagtacctgctcaaaacttaacacctagtcagtcctttcattgtgttgtcatctgagcgccaaaacccacaagggactattcaatctaccctttttggtgattgatggtaacaaaattaaagctaacaaat

SEQ ID NO: 129040 - DNA, 637 bp, Zea Mays
cgaaggcgcgggcgagaaacatggtcgtctggaggtcgggcggggcgcgcatctcgacgtcgacccgaatgtgttccgggaggccacccacgaagagctccgccttttggcgcgtggagaggtcccttgagtgcgccagcaccgtctggaagcggtccgcaaattcctggaccgtggagtggaaaggaaggcgccccaactcggccagccgcgagccgtagataggcggtccgaagcgaaggcggcaaagctccttgaagcgctcccaggacggcgtgccctcgtccaacaggagtgcgtagtaccatgtctgagcggcgccggtgaggtggtaggaggccatccacgtccgctgctccaccggagtgcgctggccccagaagaattgttcacagtgtgtgagccaattcagcgggtcgaccgagccgtcgtatgtcgcgaagtcgatcttgtaggtctgaggctggaaaggcgtcgcgccgaacgtcgcgggagccgtagccgagggcgccccgccgatcactggagctgcagtcggcgcggagcagaaagtggagccgtggagaattgtgtcgtcaacgccgcaatagagcgttcccgacgccggaacgcccccatggccgaggcccgctgtgat

SEQ ID NO: 129041 - DNA, 622 bp, Zea Mays
gtttgttcttcagtcctctcttagcattccagtaaacgggacattagcaggcaacaaccggtcagaagtcaaattcactaatcttaaattctcaatcacatatagggtggtaacgagctataaattttacactataaaattaaagatcagatcggatcaaaatcatgttttatttttattcacttttgaactaaaattaattaaagggttcaaataaattgtgaaaagacataatccattaccactcctaatcacatctcacgaaccatcaccattcaagtgcagaacgccaagatggcacttgaggagtgatgagatcacaacacgttactccccgggcccaaaagcccaataaaaccttctcatcacaacaaatccccaaattgtctccaggaattcaccagcaagggagattacaaaccaacacttggccacatgaatgaatgccctcaaggctctgtctgatgtagaggccaagcaaagcagataaaagtataaggccatgcattctagctacagctaggaagcaaggcactgacatgttagaattagaaaaatatttaacagcaataagcacaacaaatgcaggcatcattttgcttttcaggtactacaccacacg

SEQ ID NO: 129042 - DNA, 899 bp, Zea Mays
attgaattagcgcatgtatgtgtgtgtgccgtggtgtattatggtagtggtggcgtaagatatttgattgaggtgtgcgggtatatgccttaatatggttatactcgcgacgaggaaagatgtatgtattgtgtaacacgatgtttaggttgctattgtataatcgtgtgaaggatgcgcatgatggtcatgtgactaaagggtggtgtagtggcgaagcgagaaggaagttgagtttttcgaacggctagtggatagtgtctgtcggtgttgtcataatttttgttgtaggcaatgtgatgcttgctttgtcaaatattgcattccattcccattggataaataaatgtcttgttgatcgattagaggtcttatatgagcgttatcgcagcccaataattattggaagcgagtagcgttcataactcggtccttgttaaaattgaagaacgatccgataacatatgcacataagtgctttaggtccttcagtagcaaatgtaagtcttatggagtttatgccatgtgttaatgcctctgtgttagaccccctaaaatgtgctattttaggtgacttgtgtgttaactaatttaagttgatcaatggttaagaaacactgattaatctgctccaacccatgtttttgagttgcgatatcaaaaatggttcgctaagtcttatactgtgattagcaactcatgttaagtaggagttgattgcgtaagtaattgtgatatatctgttgtgtctcggattgcgataataataggcaaaccgacgtgtaggttatttagcgggctatgttgttgctctagttagccgaattgttagatggttgggttaagctcgtagtcacgatgattgcttgttgtagtctaaacgtgtatggttatggtcg

SEQ ID NO: 129043 - DNA, 511 bp, Zea Mays
acgatgtcgaggtatgtgtcgaaggtgaggtcatctggcagtgcgacgccaccgaggaggattttcaattgcgcgccacggtggcccgtcccatgccaccgtggcgatttcaacaacattgcggcgacatgcctcgatgccactgtcgtagaggcagagatgaaggccggacataaggtggtcgggtctgcgggctttgtcaggtccatagagatctacggaatgcgggaacggggtggggcggcacgagggtgatataaagacaaaagggcacgaactaggaggggagttggaggagcaaagagtaagaggaacaggaggaaaacatgcatgcgttgagctttgaccgaggcattgacccctcataaaagaaagaacaaggaacgacaacgtgggaggaggagcattttagccaaaagcgcacatgagactacttgttagacgacctaattacccaactgatcattttgacaacacagctacgctagatggacccattttgacatattcg

SEQ ID NO: 129044 - DNA, 662 bp, Zea Mays
caaagacctgacagaggctcaccactggtgctggctagaagtgaaggctcactggtgctgtcggaatatgctaattggagaacagaaactgcagaaacgaaggaaaaataatacgaggccgacaaggacctgacagaggctcaccactggtgctggctagaagccgaggctcagaaggggagatcacacagaccggaggcgcgagatggaggaggtggcggtggacgcgggggcaactagagaacagaaactgcagaaatgaaggaaaaataatatgaggtcggcaaggacctgacagaggctcaccactggtgctggctagaagccaaggctcggaaggggagatcacactgaccggaggcgcgagatggaggaggtggcggtggacgcgggggcagctagagcacgatagacgcaaccccactcgaaaccgtccctgtgcacgtcggcatcggtatagcgcatggtgaagaggacgagaaagacgggagatggatgagggcaaggtagaggactcactcgagctgcttcttcgatggcggagcgacgcgacggtcttcggcggagacggggagggcattaaagtgtcgaaccctagcctcctttctggccttttccgatggtgaagggtttgaattgagaggaggtcatatttgctgggt

SEQ ID NO: 129045 - DNA, 604 bp, Zea Mays
aggggacttacacaacaaaattgcatgatgaattgaattgcacgatgaattgcggaaggacactattaaagctctctgcaatgcagatctctctgtttgaatttttatccgtggaaaagatatttcccttccggaaacatttcttagatcaccaagaagacctctaagagatattggaggaagacagttgcacagaggactatcctgatcttctttgcagggcagatgcgttgtcgagtttgacctgtacttctcaagtattggggagacaaggatgctgatatgagaatgtataagtaggctgccacactgtactatattatataataccataaagcgtgtcaaagaaagatgatagttactataaataattgatgagtggttgtgtgcatatgtcgtctcatatctgaaggtgatcaaattgttagtgctcgtgcatgtgctgattgaaactgaaacaactgttggtggtgatgatatgatgttaagatttacctagagatagcttgttaagatttgctcttcatataagaatatctcatgtaatttgatcttctctataatctgtccctatttcactctctctttcatgcttctcctcttg

SEQ ID NO: 129046 - DNA, 460 bp, Zea Mays
caaaaatattcgttaccttaaagttagcataaagcaagcttccggcgatgtgttgtcgttgataacggcataagtccgcttccagcttcagcaagccaatgcttttggagagggttctaacaattttggcctcggtgcggttccgaaggcatcttagtttcccttcgttgaccccaccaaatagcatagcccctgatttatatccgcaagatatggcatattttttcaactcctctttttcggcgtctgttaattcttgtccgagcaaatcttgaaagttaaaatctccttcttctgaaatttcatcaatctgctgtttccccttttcagttgccgtattcactgcagccacagtagcttcttcttcagccattttaaggagtatattgtcaataacctcaagtgtggtttccaggttcgactcttcggtggccccggcttcggccccggtagcttcggc

SEQ ID NO: 129047 - DNA, 884 bp, Zea Mays
ggactgaatcccccacagacttggagataaccgaagccagggttctgtttgctgaaattggcttgttaaaggagagaggtctgactgttgaagcggtagtcgcagattttgttttcaagaatatccagccactgaaggatagagcgtaccccgcttatttgtacagtggtgttactgattctacccgggttaccaacaagaagattcctgctgtggatttggtaagccggctggagatgatccttagaggcaaggtgtcgaatattggtgctcctgttgcatattctgcctggaatctgccaccttccaagacttttttcagttttgtgtccaatcctcctgctagcgacagtggcctggctcttagagtgcgaccctctcccgaagaagtcgaggctctggttgcttcacttggtgatctccccaacgatgaaaggcaagttcaatttgagatgcctataaacccgagtgatgcagagataagtgctatgctggacatgttggctgaggattcatctgactccgtcgctgctgaaaccatagctattgtaactgtcctcgagcctgaaaagaccttgactgctctaaaatctgatggtgctcgcccaaagcgccttcgcccggccagtcatccaactactcctgccgaggggaagaagaagaaaaagaggaggcttcggcgagtgtcatgtttgaatcaggatgccggcccttctgctcctgctgctgaggaagtgccagtggaactttttactggagctgatcccaatgggtgtgaccctgctgacgctgaccccaatgggtgtgaccttgatgatgctgatcccaatgggtgcaatccgcccagagctgaccccaatgggtgtgttgtttgtattgttgac

SEQ ID NO: 129048 - DNA, 507 bp, Zea Mays
aaaagaagaacatatgatgagagagataatcgatgtccaaggattttaacgaacacgtttgagtaaagatacgtatgatattgagcatgcacttcaaccgttcatgtgagcggtttaactacaacaaacaataccaaactatttaactcaaacaatgttcgagacaaatgaaaacagtttaagtgtgccaagcacctaaactacacagtatccttgaaaagatacacaagataatcaagaacgatgttggaccgagtcaaaaaatggggaaataagacaatacctcgatctgtcgattcaaccacagaaatcccaacgaagaggaaggagttgatggaggaggccgaggggaacaagtctccaacaaactcctcaaggatttgatggctcgaaagggatttggagtgtggtgagtgagagcgagggagagagaaaaaatgaaggcgtcggcggctgtaacaagtgaaagggtaaagagagaaagaggggagggaaggagagaaaaga

SEQ ID NO: 129049 - DNA, 573 bp, Zea Mays
ggtacaatgacgtgacgaagatcgccagattcagtgtatcgccgtcggtgatctcgcaccgtgatcgtcgttgccgttacgattcgtgctcagtgaagtgcagataactatgtatggtgaaaaatctggcgctggggatgagcttgggacacagttctgccctggccgccgtacccacttgcttcacggccggtccagataacctcgccgaagttggccgcctgccgctcgggtgccacgtgcctaagcgcaataccacgtcgcagtgactcgccttagcatgtccggtcatcgccggtggtcttgccacggtgaagtgccacggtaaccctgcaccagtaactctccccctccccggtcgccagcgcgccattccaaaatcaagagccaccacccttgggcactataaattaagcatgccatcagctctgttgggtcatcacgaagccagagcacccgctcctgcctccgattagccactagagagctccaatttctttctctccccaaatcagttttccgcacgccgtgaaccaccgcgtcgtggccagccttctgcaggttagctcaagc

SEQ ID NO: 129050 - DNA, 550 bp, Zea Mays
cggaagccggaaaaagaagagactgaacagagtttttgatgctattgggtttatgtaccctgactaccgctacccgacatgggggcaaaaaagaaaaggcgcaacttccgggaaagatgatgcttcagctgctccaagcgaacccgcgccgaagagaaaaaaggtgaaagtccttactcaccgaccgcgcttcattgaaccggccatagtgcctgaatttgacggtgaaacctcttcggttactgaagccaaagaacccatgctttcacagaagaatgaagagccggctatgatgccgaaggccgataatattgaagagatagaggctgagagaacaaagacattagaagttataagcccttcgacaggaatgacagtgccaaaggcacaaaaagatctcacggtgactcccaagagaaaaaggatggtcaatgtactagatgtgctggagacaataaggtcttcaagcaccactccgaggaagattgtcgaagtgtcaaaaatgcaaattgagacaaaactatccgaagccgaagctacaaagagccag

SEQ ID NO: 129051 - DNA, 324 bp, Zea Mays
ctgaggcgctatcgatggaagctcaacccagaaaagtgtgttttcggagtactagcggaaaattactcagatttattgtcagccaccgagggattgaaggtaatacggaaaaaatcaaagccatcatgagaatggaagtgccacgatcacaaaaaaaggtgcagaggcttactagatgcatggcagccttgagcaggttcatatcaaggctaggcgagaaaggcatgccattctacaaattgctcaaaaaggtggaaaagttttagtgtaccatagaggcacaggaagttctaaaggcactgaaaaagttcctgactacaccac

SEQ ID NO: 129052 - DNA, 718 bp, Zea Mays
acgcgagcgtgcttgttggttgcgctcgccatggctctcgcgctgctcttacaggagcatgcagcaggtgcagaggctcacgaacagaagcagcaggtgcagaggctcctcaggcgcctcaacaagccacctgtcaaaacgattgaggtacggtggccgtcaaacataaaatgttacgtgtatatctgaataatataatttaaaaaagagtggaagatttattatatgatgaggcaataacaactgtcagaacaagttggtgtccattttatatatatctgaataatataatttaacagagcccagatggagacatcatagactgcgtgcacatcaccaagcagccggccttcgacaaccctcttctaaagaatcatacaatccaggttgatgatatgatgttcatctttttaactgcatgcatgctgccttcacttcagttgaatgaagactagctgtcttcaatggttatttattatttatttatttcagatgtggccttcatctcacccacgaggaggccagctgaatgaagactattccaacactgcatccagcatcacccaaacgtggcaccagaatggcagcaggtcgtgtcctgagaacaccatacccatccgtaggaccatggaggaggacgttcggagggccgactcacccaggagctatggcaagaaggagaggcggccgaaattcacccccgtcgatggcgctggac

SEQ ID NO: 129053 - DNA, 369 bp, Zea Mays
cttggacacaatggatgaactattggagatgcttgggcgtttagagccagatataggatgtgaagatgctggtggtgcaagtactggagagggcaaccatgtgggtgttcttttatataaaattgttgaacattttattcagaacttaattattgctaattgtaaaaattaaacattgcagggcgaagaggatgctgttggaaacgctgaaggtgaacatgtatcgcaatgtgataacgaggagcatgtggcagtacattcacgacaacaggtaatattatggcaaaaaacaatgtaatttatgtataatgcaaataaatgggatgatttatacattatttgtaattttgactatgatgcactaatgag

SEQ ID NO: 129054 - DNA, 486 bp, Zea Mays
agcggggtggcccaactgcggcgcggacctactccggcgagcaattgcgcgaagaccagggcagtaaacagagaaataggggcatagggaggttgctcacctcgagaggaaacactggagcatcgaggcaacgacggggacgcagggacgccttgggtcgatggtggcagagctctgactgcacgaggagaactctggtgagcatggactgggcgaaccagaggggttggggtgaaccgaggggtgtcccgggctgttgacgacaaggcagaactcactgaggcaatgggcgcggcgagggctcgacggcgaccgtagaatgggcgtgagactacgacgagcagcggtgaaactccctgggcgtgagtagagcgagagagggcggtgagagtgttcggctgggggcgcaactgagcgaggggagtgagtgagtggtcgtgggctctaaaaggaggccgagtgcgtgcggaggtggtcaggaaacgc

SEQ ID NO: 129055 - DNA, 408 bp, Zea Mays
gccgaagctgattgaggggtctgctgctatatctgagctgagttgctctatgcccgtcgaagctaggatagaaccagctgaagagccgaaactggagaaggcggcagagcagttgaaagccctaagtccaccatgcacaacggagctgccgaagccatccaggatccctgtaacaactctgaggaaaaggagaatggctagcgtgctagatgttgttatgcaatctgtgaagacatcaactgctgcttctgctgaagcgcctagcatagaaggtgaaatttcaaagaaatctgacaaggctggcatgaagcaaactatttctgaggctggaccctcagtttctgctgaagcaagaccttcggaaattacaccactaatcctagaaaaagagggtgcccctgagaaatc

SEQ ID NO: 129056 - DNA, 313 bp, Zea Mays
atttaggagtgaaacaaacagggtcgggtcttattagtgtggagcagaaaagtagcaggaactaaaagatgctttctgctgtgtactcatcgacacatatttgtgtaattatattcagaatcaaaccatacttactgacgctgtgagggagaaacacagatgctttaatgttttcagtactgctaatgtagtaatttgacctttttgagttcagtatggccttgctgatccatgatatgtgaagttgactatttggcatcaacaatgccatgcttgcatcacctcacgagtttgttttcttcatatctcaaag

SEQ ID NO: 129057 - DNA, 507 bp, Zea Mays
aagagctaggggtggtatcatctagatcactgaacttgtatgctaacattagtccgaacaagttctcttatcctgttaccccggccgcatctctcctgagcttcctatctcccttctcggtacccgccctctatctctcctgagcttccagtctcctccctcccagcttacaggcgatggcaggctgtgcttggaccagtagtaagtagcctggcatcagggaacagcgcaacaggttactgctggctaagcatttcagagaccaacagtcctttggaactgcataaacctatgattgcgcgctaagcatttcagagactgggaacagcgcttgggcagcacaggttactgctggctacagcaagaggcagcagagatacccttgacaaggggaagggatggtctgaaggtgcaacagcgcccgcctttgctttcctggtcaccgtacgtcttaagagcactgtaccaccatccacggttaaatccctactagtgtcagcaacggct

SEQ ID NO: 129058 - DNA, 435 bp, Zea Mays
tggagatgaagattctgaggatcggccctggcgaccaagccataccatctttggaaagtcaaatattaagcaaagtcatgttgatgttatgagagaaagatactttcgtgacatgtctattgtaagggttggaggagacagcaccgcccttgctcctgaagaaaatgaggtggttatttataaaagctttttgaaggcggttcttcggttcccattaagcaaattttcggttgaagtactaaagatatttcagatctttcttcatcaacttactcccgaagctataattagaatgggcttattttttgggatgtaagaagccaagggtcagaaccgagcacgaagtgtttttgcagtatgcatgaacttttgtacgagacgaaggccaccgacaaggagcagtatcacaacaacttcggttgttacggattcatt

SEQ ID NO: 129059 - DNA, 508 bp, Zea Mays
ttgaggaatgggaatggggtgcagcaaaccagcggggtgtactctttcgcctttggcctgctggcagatttggcattgttgcacaaaatcagccacatcagatttcattcccttccacacaaacaacttcttgaggcgatgataagtggcatgcatcccagaatgacccccagccgcgctgtcatgaaccgctgccactaatttagtgcgaagagcagaattctgtcccacccaaatcagacctcctttcctgatcaccccttgagataaagaataaccgtgttcatcaggattatggacacataaccgagccaggagagattgagcagcaggatcagtcacataggaatttgtaacttcttggatccaaagtggttgaacctcactgactgctgttaatgccatcactgcccccacccgagaaagtgcatctgcaaccttgttctctttaccttgcttgtaaaccactttaaactgcagacccatcagcttagccatcgcctttcgc

SEQ ID NO: 129060 - DNA, 583 bp, Zea Mays
cctaacctgggtccaaaacctggagaaaggtaagtcccttagctcctgctaaacaccatcctcgttagcagctaggagcgccactgccacattcggcgcatcccaatcaaacacacatctatttctatgtttccaaataacccaagcccctagaataacaaaggaattgaaacccttttgatgcaactctacaagttgagaacttctagtcctccaccggtcttcaaaaagttcccaatgcccaagggcaagggactgaagcccaatcggccgaagaagttgaaaccaaaattgtcgggcaaagatgcaagaagccaataggtgtttgacggattcctcttcctaatcacacaaggggcatcgctcggagtgaggcaacccacgcctggcaagcctgtcagcagtccatcatcggtcatgttcaaccaaccattgtgctattctatgtcttggccatcaactagtcgttctagtaagtagtgaccgagtagttgacctagctgtccagtcggcgccaaggtgtctaggctcgacttacttcaaaacacccctatcacaattaaggtatgaatgcattcttaga

SEQ ID NO: 129061 - DNA, 617 bp, Zea Mays
ggcagtggcaccaattatatggagctatagctagcgccaaatggtgacgcttatcgagaggaggcgaaacaacctgtgctgctgccgctcacgcatggtactctattattaattaattatattgggggcctggcatctacttactatgcatgcatgcgcatactcctacatgctagtgtgtccgtacgtgtttgtttattttctcgtgttctcgacgctcccgtcgtcttgaccgattaattaataagcggatcgatcgagaccgcgtcacgtacgctgctgcatgtcatgtcatgtcatgtggatcggataattaattgaggagacggctcttgtttttgaagctcttcaacgccggtggccgggtctggagaattaatgcacggatctatcaggaatataatggtagcgaggaggcgacgcacaaatgtcgacgtttcgcagaagcggccggagtatgtattgtatttgtattgtatggcatgggcgtatcgagatgctggctccacgatgatgttgcctccttgctacgtctaacgggcggcatgtgtccggaagatgatgaggtggagactcgtcaataagggctgtctaacagcctaccagaaccaaacgat

SEQ ID NO: 129062 - DNA, 711 bp, Zea Mays
agatttgaatcaaatagagtaaataaaaagaaaagggaaaacaaatgctagaataaaagaaaaaaaggaaagaagcccacacccccgcccccctcggcctttcggcccatctggcccatcccgcgcgcgcgccttcctcccccctcttctctctctgccctggcgggcccgcccgtcagcgcggccgccttccccgcgtccgcgcccgcttcccccgctctctctgctcgcgggcccgggctgtcagctcctccgtctccgcgtaaccgccgccccgagccgcgcgtgccgcggactccgcgcccacgtcgcgtgtggagctcgcaaccacctcgccctcggccacttgagcccggagcctagcccaccctctctccctccctcatttgcgcacctgcagacctcccttccacctccgccacgctgctcacacgccaaagcgccgccgccattaaccgccgccgtccgagcccgtttctccgtcgacgttggagccccgccgtgccctctgccacggtgagcttcgcctcgacgtccgcaacccgggacacgccccaatttcccctctccctccccaatttcctctgcccggctcacccgccgtcctctgcgcagtcgccgtggtccgccaccgtcgactcgggctaccgccgcgccttcgccgccgccgaggagtccctggagttcgccttgaggtaaggcaacctcccc

SEQ ID NO: 129063 - DNA, 515 bp, Zea Mays
gttattagcgctcggttaggacttgggagcggttgggtctcgctctccgtctctcatgatggagcaaactgtcagttagactgaaacagacaagtattaggtgctggctaagtgcccaaatcaaatggtccagagatattgaatggctagcaaatctctgaaataattgaagctggtcctcgcgttgctaccaaactggtggattaagatagcggtaccagttctgctaccaccagtgtcgctgcaaccaacggcaaaacaggcgcatctgatagaactgacgcaaactcttggtttgggaccgggaccagggaccctaattgacaccgttggtttattctctctatcggcggcactcatcgtggtcttgaaaaacaccctcaaaatgggaaggttcatttggcggttgcgctttaaacactctgatagttctgttataaacttataacatcccatcatgctagtcattttctcgtacagaaaagtaatcagccatggcatttgttattgccgat

SEQ ID NO: 129064 - DNA, 969 bp, Zea Mays
ggcttacggtcgtccgattagaaacaagtggcccagaatagcattgtgactcatcgaactaatatctaactacgtgcgttggatcggggatcagcggtgcaggtcacgatcgaagatcgcccctcagatcacacctcaacgacacggatctaatccatacgaatggaattccacatctaatcgggaccgtccatcacgatcggatggtcaggatttgagtacgggcgctttctcccaaatcctaattccggccacccgcgcacagcggcacattacccacacggcggcaccatcgtcggcattcctcagtttacgtctctagctctcagctctcggtcttcgctcggaacactactaaacaaagagaattacgttgcgaatgtgttggcgaggttcttacaggaatctgagtggtgtcccgccctgtttgtggcactcggcggaggtgttgcgacggcgaggaattccggtgtcaaccgtgcatgccccgactccaaattcctcatgacaattccacggggcccgacgaacaatgttgcacacacccggatcaccagtcaccgtcgtcgaggaggacatcgtcgcgcaaggtcaaccggtccacctgagctaccaatggcgacgcacagaaacttgctggggataggctcggggttttggtagtgcctgtgcgtggtcgagacgactcccatcatataggctctgctcgggtggttgggtcctccggcgagaatcacgtgcggcgatttcgctgtttgttacggagtgaggatgaccagttcgcggggagagctgctgacgagtggggtccttcgcttagtgccacaagtgcccaaagggactgccatccggtcccaccggtcagcgtgtctgtgtgatacttgggccgcgaagcgcgcataccgtggctgacaagagggtcccatcagtctacgatacacggatcacgcgcaagtaggtgagtttgcc

SEQ ID NO: 129065 - DNA, 293 bp, Zea Mays
cgcgcggtctctgcatttattgtggaaaggacgcgccgcctgtccaccctgctgacaggcgatgtgccctcacatcatttaatgtgtcctgtccactccactggcaggcggcgccagagccatcctgcagacggcgcatctgtcccgtccgttgtcaaacagtacgcccgtgctgcgcggcgcactgtgctcatcatcccttgtgcgagaagcttcccctgcacgccgatactacgcagatctcggatgtcagggcgcaagaagattactccagcagcaaacattagtagctc

SEQ ID NO: 129066 - DNA, 407 bp, Zea Mays
atggccttgacctgaagtactaccttcgtcgttcgaccggtagtgctggaggtgtgattttctcgcccgttggtgagggcaatcctaggctgaatagcatggtcaacttggtcgtcgtgctcaataccgagctagaccacgcccttgacgagttgggcaaggtttaggcggaggttgcagaattgcgtgctgagtgcgcggcacgccactatctagatggtggttctcccgcccctgtatggattcagcacccgtaccgttcgccgccccgtggtcacttcgattatggtacccctgactgcagaacccaaatagatttggacccctagatcgacggagtgagagtctataaaaatgcttatctcagtgtcttagtcttagttagtcttagttagagttagtttgct

SEQ ID NO: 129067 - DNA, 639 bp, Zea Mays
gactgtgggttgatttccagagaggttagggtctcttttgcaattgcgctagccgaaggggtatcacacgatttggtccatcgaattgagcgaacgaccacgattaaatcttatctccgcgcgaaccagaacataatcgcagtcgtcggatacggatccgacagtccagatctattatgactagccccagcagcctaaccgcacgatcacagatccacgacctgcatacaacagcgcgaaagggtacgcagacatctaatctgggctgtccattgagatctaacggtgcacattccttcccctaatctgacattgggcacggcggcgctcacctccgttcacggcggagaccacgccggtgagcaaacccaacccgataacaatcccccaaccaccgcgcgcaacgagagcagaaggacaacacgagcatgggataagcgtttatacctaggtttatgtcgagtcgcgccctggctccagagcagtgtggtacgcggcggactactccgtcaccatgcggcggagaaccacacccaggcctcgctggggagccgtacgtctgcagcgaggtccaacggatccgccccgtcacctggccaggaacaccagtggcatgacagggttgaagctcacggtggc

SEQ ID NO: 129068 - DNA, 889 bp, Zea Mays
cttgatcttcaattgctcacaaactattattttactttcacaataaattatttgacttttttgcataacaaattcacataccacatacctgttagcataactctcggaccctcgcatcccatacatgttttgaatgaattgaaagcccattcaaaagtctgaactgtttcatctcccaacaaaacaaatccaaacaatgtacactgcagatggttgttagctccaataaacatgcccagtggtttatcatatatatttgtcttgtgtgttgtatcaaatgtcacagcatcaccataatctgcatattccccctgcatacttgcgtgtgaccaaaaaatactcactattttcccatcattgtctagctgaaaatcacaaaaaaattgtggattctgtttcttgcattccgtaaagaaagccaaaagtttggctacattatttgcgcagttttctcgtctccttgctgccctcctacatttgtatgcacaaaaaatgattatacaaacatttactatagtaatatttatggcactcaatatatacacaggcaacataaaaatattgcttacatgttttcagattttgagcagttaccggtacgttctctggcccatcatgcatgtctgatataaaatcaactatgcaatgctgcagcactcggctatcatgcattgcatcaacaaaatttatgaactcagcatgcctacttttgttgcaacgtaaatgttgtttctctgcttcgtcagttatgaactcatggttatgctccaaattcaccagttcaatttttgcagctacaaccattttttcatcatcatatatttttttaaatttcattccagccttacattgcgtacgccccgaattcctattcctcatcctaggtgta

SEQ ID NO: 129069 - DNA, 931 bp, Zea Mays
gggaagcattgggagccgccgcggctatttttgccggggtcgcagttgggcttccatggtgcgtcacgggtgaatggtgaggttgttcctgggctcggtcgacctcaccggacgaactgtgaagttggaggccgtcagcgggggtcctcgattcgcaatccctgacgcaccgggagcggatctaggcaaggcgccgtggccgcgcactacctcaacgacgaccagacaagttgacgtcgagtcgccctccaccctcgcgctcgtggagcatcaccacagtctagttcggtagggagaagaaggtcctcagctatcgagctatagaggaggggtagcgccgtcgtgggtggaatcatggagcaccgccatttgagctcgaacccatggacagggagcctcatcagggtccttagagattttctcgtggacgtctcggtcgaggaaatcgccttggctcgccagaattgctctccggcatggattcatcggcgctgtgtcgcatcactcttcttgatgggtggttaccccgaggaccagtaagaccatcaccgtatcctctgcttcgtctttctcgttgcaatgacattcgttggttcgcggttaggtagcgggacgtcggccgagggcccactccggtgacagcgtcgccctaggtgtctccgctccgccatctggtgttaccgtggggaagaatacctaggggctgtcaactgcctggtgaacggctgggattagattgctggtatgcttgcgttcaataagatctgggacgtagaagcagatatgggcggtggttattaggcgtgggaatgcccgttggaaggatagatctgagccattgattgggatcgaacggatagagttagatttggatccattaaaatcagaccgttgagttctgatccgatggacattaggtcgtatcggttcg

SEQ ID NO: 129070 - DNA, 358 bp, Zea Mays
agcagccgaagcagcagccttcccagaagttgcaccctttcttttctgtccccgcggtgggtagcggtaatcagggtacacaaatccaatagcatcaaaaactctatttagccttttatttttttggctcccgaaggccgctgaaagtgtgttatcttcagacttggagtatgctccaagttgttcatcactagtattttcaacacacttcagccagtcatcgtctggttcgataaattggtctccaaacctgaaggtatattttaatcgaaccaaaccaccttcgctagggttagtgatggtttcctttggtatttcctagctgtctatcagtggccatatcctgtaggtcacatgc

SEQ ID NO: 129071 - DNA, 409 bp, Zea Mays
cgagaagacggggaggtgaagtgtatgaacttgtgccgtgtgcaaagaacaagtggagcaattggttcaagtcttgcttttatgttgatcttggagaaaatgtacctgttgtggctcgaccagcggccagcgttttggtcacccatgactttgttgctttccttgacttcgaagtcggggagaatgattctgatgaatgggcactgtgtcgtgtgagggtgatgagcagcgatagagatttggtcgaagagtatattgagtatcaagtgtggccactaagcggatattggacagttagtgaagttgtgtgatgaaggatgttgttgggggcctgcttctttgtcgaaggtcctctaagcagaaacaccttcgaaagatcggcatacaagcaaatatagcgcgaaggtac

SEQ ID NO: 129072 - DNA, 1018 bp, Zea Mays
ctagttctgtctgctgcctgctaagggcaaacacaacatgcatgtacagcagcaccaacaccaccatgcttgctattggctatcgctagctatagatggagtgtgtgcactctatagctttgttgcaatattgcaagcaaggaccacgctatgctactggcgtctagtgtgttgtgtgttgttggcttcattctttcatgctctcactctccctctccctccaatgataatgatggtctgacctagctccatctctgattgttccaaaatcgacatctatcctggtagtctcatgcatctctgatcatctatacataaatggagccagtcaacctgcagagccagtactattactacaccacatgaataatactaaaggtcgtgcaccatttcatcgtatatgattgattctattaactaagtagatgtatgtattgctctttgactggtagctaggtggtgctagtactatattcccagtacccagtcaggactcaggagcatggatgtcttttgcactgttattgagttgcttccatcagtcggtcaaacagatataatacattgcaattggtattttttaggtgcatagcttgttcttctcttcttcagggctcaacctctgagggtagggcagagaaaggaaaggatcaattaatgaagtgaaaaggctctagactccagctccagtttaacacaaaacaaaaaaaatcaatcaagggaaattagagagagaacaagatctttactttttttctcccctctcgaaaaattagatcttttctttaccggtcgccagttgactaagcaagagagaccaatgcaatcatctctataggagtcacccgctcatcgctcaccaattcaccatgcctttccgttcaattagttcctctacataagcaatttacagcagcgcgcaacaaataaatgggaaacagttagctacaatattcatggaagagtgagctacagaaattaaagaagagaagaccatctgtccatggatggatggatg

SEQ ID NO: 129073 - DNA, 271 bp, Zea Mays
accatgtaccccaggggatcgttcagctcaaggaagatgaatttcgggaactaactcaaggaggaagatctgtcagtgagtacgtgcacaaattcacagaattggctcgctacgcgcctgacgatgtcagcacagaagccaagagaaaagcccgttttctgaaaggactaagaccagaactcaagaccatccttgccagcccagatttccttagtttctcgcacctctccaataaagccatacaagtggaaagggcaaaggaagaagaaaa

SEQ ID NO: 129074 - DNA, 491 bp, Zea Mays
ggatacaaagaaatatgatcatctctattattatctctagggtatatttctaacagtgtctactcctctcccttagttgttattgccccgatacttgtagaggtgcatggcatcggagagtcgactgttcaaccacttgcatcggtggcggtggtgcctcctcctctccctcgggtgttcttgccccgctacctgcagatgcgcatggtggcggagagtcagctgttcagccatgcatcaccggtagaatgcctcctcctctccctcaattgttcttataccactgcctacagatgcatggcctccttctctcccttggttgttcttgtcccactacctatagaggtgcatgacctcctcctctcccttggttgttcttgtcttgctttctacagaggcgcatggcctcctcctctcccttggttgttttttcctgccgcatgcagtggtacatggaggtggagagtcacaatagtgcttcaagatgcttg

SEQ ID NO: 129075 - DNA, 656 bp, Zea Mays
ggcttattcgttgtcgtggccttgatggccacacacacgttgatgccagatacgctggagcttgtactcgcgtggaatgtggtggattattcgagcccctgaagtcacagcatagcgcaaccttcgtaaacattgttgtttaactctatattttatttgattgttttgtgtggcatcatatatttatttatattgccaagtggccataacaactaaatcaagctttatagtgcttggaaatctgggaaattaaattaaaatacaatgaaatacagataagttaattctctgctctctcctcatgcataaagttttacccgaagtaacccgaagatatataatataatgcatgaaagcctttttggcataaaagacatcacaaattgggattctattagtaagcaaaagggcttaccaaataatttaagactataaatctcagcatatattgctcaaccagatgttagcacattgctctttttgtcgctaaatgacataaagcgaactttgagataaatggctagtacctcagcaacacgaagttgcgagtataccaagaggttattttgagaatttttttcactatgttgatgtgaaaaccatagtgtgtttccgtcgaatcactttactcgttctatctagaacctctatacttg

SEQ ID NO: 129076 - DNA, 511 bp, Zea Mays
aatcactaccgcgtacacgcacagggggatgtattgaaccgactgggagaatactaaccggctctggtggaacggagagctctgcccgcgacagctagcggaaacagcggcggcgttgcgtcgacgttgagaaattgagggccggtccagccaccaccgcacttgattccaccggaaatctgtccgccacggtcccggggtactcccggaacaagaccgacgtttaccacggctttaacagctaggaacgacggtggcggcaccttctttctcaacgggcgcagcaatggcggcgtcggttggcgctggggaattagactcgcgcgaggaggtagccgaggagagcaacgggtcacgggcgcgctaatatacggcgcggttgaagtccgagggcggcctgcacaacagccagcaccggcgttctcgcggctgccgttgcgcgccagcgagcgaagaaagcggaagattctggttgaccgggcccgcacaacagtggcaggtggaattcgtg

SEQ ID NO: 129077 - DNA, 1174 bp, Zea Mays
tgaaaagtgtaattgttttaagcaatgtgatgggattcgtaattttagaggagatatttattgatgtgacgagtagtttagagaatgctagtttgtggggaggatgtatcgttaagacataagtgtcgaagttcatttatattagtggtcgcgccacattgattgaagtgtctcgagtgcacgccaccatatggttgtatacgagacaaggttatgcacatgatgagtttagtaaaaaaatccatcggtgtctctagtgttaagttgagatttatttgcgcatggaaagtaacattgtgtttaatacttagaactcttagtcgttagtagaaattgtttgggcttatgtagagatgtgatgacatgccgtaagtagtcatcacttcctctataattataagtcgagtctatacgcgttaggcgttcctaaagttgtgcttcgctaataagtgtatgattgtgtttatgacttgaatagatgtcttcgagtgaactgataggttcctaaggcaaatatgtgtaaggtgtttatagtaacactttatcccgaaaggtgttaagcctgcgcaaaaataagagataagtgtacttgttttatgcatgtgatcgatgattgggatagtcgaggcgaatgaggaatatgattaatctggttagagtcactatgctgttgatgccttgtgcgtaacctggggcacgtatgtgcgggtatatgccgtgatatggttatactcgcaacgaggaaggatgtatgccttgggtaacgcgacgcttaggtcgctgttgtataatcgaataaaggctgtattattgagcttaaaccaaaatgtgggaactagtggtatgctaggcaggcggtgttccaaataaataaatcggttgctgtggtagttgtcgtgcgtgatttattgttagtgaatagttgaattacgagttatgtgaaaagcatgttagaaactagtgtgcggcgagaaactgtgttcgtgtggtaaatgcgttaattaaatgtgtatgttagttctcacgcgtgaattaacttgtataaaaattagtgagtctacttgttagtcctcctttattgatttaactctaacaaatggtgaagtgttaggataattcaagtctctagaacgcggcgattcttgaattgtataggagctgaaatttattaatt

SEQ ID NO: 129078 - DNA, 422 bp, Zea Mays
gagcgatgtacggctgggttccgtcctcctgaagtggtcacacacgagcgacacgataaagtgaacccctagggcagtattccaagggatggtgtagcgagcggtcgacggcggcagcgcgctctctctctctctctctttccttggatacggctctggcggcgacggttttggtttcgggtgcaagagctcgcgcgagagggtagcagaagggaggaacgggtcacaggagctccaatttatctcctgggtcaccgttcgggacaagggggaggtcacccacgatcccaacaatggcggcgacgtccgtgccttcggctgcggagaaggggaggacgctggcgcacggcccccacactccagtgacaccgcacgggcgagggatgtgcctaacgatagggctccactagccagtctaatgt

SEQ ID NO: 129079 - DNA, 459 bp, Zea Mays
gttatgccacgcctcaggccattaaccacgtcacagtacattgccttagtacgtctgctcgttgccggtggtcttgccacggtagcttccacgaattgcttgcgccagtgacctcttccttctccggccgccaccgcgccatcccaaattcacaggccaccacccccggagcctataaattgagtgtgccgtcgggtccgtaaggtagtcaagcacccaatccaccaagtcgtgcttccaattgctcaccagtgctcgccaatttgagatttcccccaaatcgatcccgagcaccgcgcaaagtaatctcaccgtggccagcgcacttcaggtccgttcatgtccgttgtcctcttgttttagcacccttacttgcccctgatgcctctcgaccaaaccgattaggctagaaccccttagatcaccgggaacacttcatgatgtccattgtgtccgctg

SEQ ID NO: 129080 - DNA, 436 bp, Zea Mays
cggtcttagcgcggacggtttgatgctgtcgtttctgcttttgttgtactagttcggctgcgcccttaggcggcttctgcgtggatagtcttcgcggtagacttcggttttttcgcacttgttgtgctagtccggctgcacccttaagcgacttctgcgcggatagtcttcgcgcgagactttgggttttttcgcacttgttgtgctagtccggctgcacccttaggcgacttctgcgcggatagtcttcgcgagagacttcgggttttttcgcacttgttgtgctggtccggctgcacccttaggcgacttctgcgcggatagtcttcgcgagagacttcgggttttttcgcacttgttgtgctggtccggctacacccttgggcgacttctgcgcggatttgtcgcacgcgagggtggctagcgcttagcctcg

SEQ ID NO: 129081 - DNA, 404 bp, Zea Mays
attccccccaacccagacgcggcaacagcggtgcacgccggtcacagcggcggcatggccggaatccggtcactaagtggaatcatgctccaaacacgctagtcttaggcctacagaaggaggggaccatggcgaagtcaaccgaggtactatgggtagctgcggggcacaggtaggagccgaccgtgtaattgggcggacccgagcaggattagagttccggtgagcaatctacggtgacccatcacactaaatcgtccgaggtttgttgcatatcactgcagagacgggggcgaacgtgtgggaggggtccatacccgaattggtggcgcgaaactttcggtccacagcagcggcgtcacacggcggagttttctctccggtgagcgattaccggcgcgcag

SEQ ID NO: 129082 - DNA, 274 bp, Zea Mays
gtgtgtattatttagtgtgtgtcgcctatagggatcacggtgctgtaattaccctattacatggaatattcctcggatgtagttggtgagcaagggtaggaccatactctggaccacctactcccgaacggccctataaataccactcccttgtagttggatgggacacacataacgatatgctatagttccctaccaaacgtcttgtgcacctgagcgcatccctttcgtctttgagtgttttggcccacctgaccacgtgttagtacccaac

SEQ ID NO: 129083 - DNA, 423 bp, Zea Mays
accaaaactaccggccggggtggtgttcagggttaggccgagggtagtagactagtactagcttactgctggttgccaagtctccagaaaacacgcgacactgtcggcggcgactattattagcatatgtgaggactgatgactagttaccgcgagcgattacgcgaaatctgggttgaagtcatgaaagcgtaccggctctctcgctcgttaggttgtgcggcgatcccattcgtcgtcaagccgcgcatttacaaatcccgcccctgccccccaaaaaaaaagggtcgagtgatcgcgattgccagcttcaactgccctagctagctacaccacgtacctgccccctagctagagcttagcttagaactcctcctagcgtggagattctttaggctggtcgatcgtcaccgagatgccgcc

SEQ ID NO: 129084 - DNA, 440 bp, Zea Mays
agcttgaagcagatgaatgtgttatctttagacaattcttcactgtagggctttgttgtcctatttaggggttgttggaagagattctaagtgcatacaataccgagatgttcgatgcctaatggtcttttaaagattacactttttacttgggccatcaaatttcaagaactaactcccaatatgccttctttttattatctaaatgagatgtactgttaggttaagaaccacatcaatgaaggtgttaaagttattaactatcttggatgctacagcttcaagctacgttgaaatgcgaagaaaattgatcctaccatgaacaataagtggcatgatgactggatgaagtactgatcacaaggtacccatggttgaagaaagggaccaaaatggtaaggtgttgaagaggtgtccactagtttccaagatgggcaaca

SEQ ID NO: 129085 - DNA, 452 bp, Zea Mays
aaacaaccatgttcttttggaaaatgaaagtgcttgtagtcatccaaggagttaggctagaaggtacctcactagtagcatcactagtagcacaacaaccccattacccatcatagtcctttcaaggagacggtggcaaagagacatacatccctatcccatccttctaagcgtggtccacaataaaccagtattctcggggtcctgcttctatctatgaccaaagatttcctctttcaggtcaccatgtatcaaattgtcgcagaaacatggacgactgtcgaaggaaactacacctcggcaacaaggtcacgctccatcatttaaaagatttctatcactactaccaagaaaggtgacctctctatcatcgactatgttagcaagatgcgctccttggatgacaagctgacatccgctagcaagctgacaacgacgatgaattgatctcc

SEQ ID NO: 129086 - DNA, 449 bp, Zea Mays
attcaagtggaggtttaatggggaaatatgaaattcagatttctgaattttcaacctctaaaccaaaacatagcgcgttcaccttgatatctatctcaaaaccctaagctcccattgacaaaaatgtgcctaactaaccccctctacctcatatctgaagatggcattgggatgcgtgccctagacacgtcaaacccgggatcttctctcagtgttcagcagtgagacaaaccctacttcacccctccatatctcttgatccagtcagcaaaacccataagcctccacacaaaaacgacaaaggaatgtcaggggaagagatctctcaacgggatcatggccataatctcaaagatttggagccaatccacgcttgaacatgaccactctctgcgctgcctcgtgctcgacgtcgtgcctagacgccagagcgcgcactggcgctcgcc

SEQ ID NO: 129087 - DNA, 576 bp, Zea Mays
tagacactattatatggtaatcgtgccctgcttacagtgaaggatcaggcgcccccttcggagggccagaccgaaccccacaaacatgatggacgagattaatccgcggtgactcatggaatacgacggaattgtgtacgaatacattcacgcatgaaccggtccaatagcaattcacgagcctagcaacatgcaaggcaatgagacgtgaagacttgccgaagaattaataccatttccatgggggacaagagagagtcgatcctagtgaatcgagatgaaacctattcacggttggatatcggtgtacgtagctacatatgttggggactcgttacgacactcgcatcgcatcgacttcaaacttcagaatttgaacacaaatggactgcgccgatcaacagtttgaaaactaataaaccgtgtaaataggcttaggccgcttgaccatagaacaaaatttagacgtctcgcgaaaatagtactgctagtaattaatttcgtcccttggtcagacatatatttaggcatatggctaacgaactctataaagggaagccatcatgcatgctttcc

SEQ ID NO: 129088 - DNA, 783 bp, Zea Mays
ctcttatcgggatgggactggagcttagaagctgcaatgtggagtcctagctaagtcttggcttggcggggctccgaccttctagtccttgtcagtgctcctcttcctgttcgtccttgtgggtttgtctctgtctaaaggcgtatggttgcctctctgtcccccttgccctgagccaagcctctcccttttataggccaggaaaggggtcggccagcggtggcctctctgcgaaggagccgtaaggcaagggtaaaaccagtgttttattctaggtgagaccacgtgtactcgcgaggctagggctgactggatgtcgagtatttatcatggtggatcaaatgggggcggtgatggtcctaggcaccataattcgggctacaccgacccctggcttccgtagcctagagctcggcgtggccaatcatgtagttccttgcaggaggttgcgcactcaggcctagttcgatagaccataagtgtgtcgtaggccgaggggtgcgtaggccaataatatgtcgcagttcgggggctcgtaggtcatgagcattatgcgacctgatgagtccataggtcatgagtgggaagcggatcggcgcccacactgtggctcggtgccaggcgtgattaatgtggccagtcatttatggcgggtcagtctggggccgggtgtgggatccactcgagtggttcccttccgacacgcccatcctcccttgtcaggctccgccaagcccgacctcaagctcgatgccgcggggttcgaccgggggcagatccttc

SEQ ID NO: 129089 - DNA, 369 bp, Zea Mays
cggagacaaatttattaatcctaactaatacatgattaaaaaatgttcactatagtatagacctactcatgggccacccgatccgaactgaccaatgtaatgggcgggtacgtgctgtaataatcacgggatggtacgagacataatttttgacccacaatccgatccaacctaaaatacctgacccaacccgactcgacacgtcaaatagggtagcatgggccgatccgacactagacacgggtcggatatggaccgtgctaaatggtctttgacccgaccttaatccgatatgacgtttgaacaggtctaaggtagcataacatgaacgaatcatgactaaatagctttaatagatctgccctgtct

SEQ ID NO: 129090 - DNA, 603 bp, Zea Mays
tgcatatcttatcggattgttcttcaattttaacaaggaccgacttatgaacgctactcgcttccaataatcattgggctgcgataacgctcatataagacctctaatcgatcaacaagacatttatttatctaatgggcatggaatgcaataattgataaagcgaagcatcgatccgccatacaacaaaaatcatgataacaccgatagatgctatcaactgaccggttaaaatactgaacttatttttggctttgccactacaccaccctacagtcacatgaccatcatgagcatccttcacacgatatacaatagcaatctaaacgtcacgttacacaatacatacatctttcctcattgcgagtataaccatatctcggcatatacccgtactcctcaatcaaataacttatgcgaccactaatacaatgcaccacggcacacacacacgtccactaatttgatcctcacataacttgtatttccaaacttactcatcacattaggcaagcacgacccgctcgtttctctaatctacctacgcatccacacatatactcgttggctttccgaatgcaaacacacctacgtgtaccactt

SEQ ID NO: 129091 - DNA, 308 bp, Zea Mays
aatcagtagcaaaaaatgcagtatcaaaatacagaaatgaatgcattttaaacattgaaaacagcacagcagaagcagctaacatcacagtcaaaaaaatcaagtaataccagtccaaatacaggaagagaaatcttacacagaggaatgccgagggaagacgggaaggaaggcggtgcggtggatctcgtcgccgacaagatgaggctagtggatagatgaagaagatatggtggcatcgatagcgacctcacctgggtcaagtgtcgtggcgccgacgcaggtgcacctctaattgccggcgacat

SEQ ID NO: 129092 - DNA, 657 bp, Zea Mays
aggcagccttgctgttgatcttcttgaactgcttctgtgtcttcttggccaagcgtacgtaagattgaaccttggcctgaagagccgcgttgtctcctctcttgagaaccagctgcatctcctggacgctgaccttgagctctgcaaagttctcttgcacggcgttgcagaggtcaagcaggacaagggagcgctcgagctcctcctccactgccttcctctgctgacgttggttgccgggcaaggatgtgagctcgtcaatgcagctgtagatgctcacgatcttgttgagaccatcaaccatggtttgaatggccactgaaggtgaggagatggttgccttcaggctctgcagctgttcatcgatgctggctttgttagagcgagggctggatggcacgctcgcggatctaaggtggcaagccatggtttgaatggaggttgaatctgtgtagcttcttttttcttgaaacggggagagaaggaaagctcctgcaacggtggtcatctgggctatggctttcctctttatatagcgaaagaagtggatgcaacagcacggctgaaccagcagacagcaagaatcgttctcatgtgtaaccgagtggtgaacttcaacagaagccaccaaacccgagaagcatcacaattcacaaa

SEQ ID NO: 129093 - DNA, 502 bp, Zea Mays
cgaggggacaactttcctttaactttaaatctcctcataccccggatcggtgacaccttcagatacacgtgatcaccctccttaaactccagtagtcttctcctattatcagcatagctcttttgtcttgattgtgcaattctcaaattctcccttatcattcgaacttgttcctctgcctcttgaataagttcaggcccaaagaactgtctttctccagtttgatcccaatacagtggtgtcctgcattttctaccatatagagcttcaaatggtgacatcttcaaactggcctgatagctattattataagaaaactcagcatatggtaagctcttctcccaactgccaccatgcttgagagcacaagctcttaacatatcttccagcacttgattagttctctctgtctgtccatcagtctggggatggtaggctgagctaaaattcaactttgtatccaagctctcatgcaacttcttccaaaatcgagaagtaaact

SEQ ID NO: 129094 - DNA, 417 bp, Zea Mays
acgacaccgatcctttgtagtgggagacttggtccttcgccggattctaatgggggaaggacttcacaaattgtcaccactatgggaagggccattcattgtgtcagaggtcactcggtcgggatcataccggcttactcaaatggacgacatggaagtggggaattcatggaacatagagcatcttagaaagttttacccttagcaaggtctcgaaagctatcggagcaacattgtactctgtaattagagaatccgtcatcaataaagttttcattttcaaaagcattcaaactattgactatcaactaacttcgattcgattggacttggaatcaacacgtttacttgacttagggtgaccactataccctactaacagagcaatcggcttaagtcggtgacgacttaagacgg

SEQ ID NO: 129095 - DNA, 604 bp, Zea Mays
gtcttggaccacctgcttcatgttaggaaagtgaaagtcgcgtcgaaggcgatgcagcgtgcgctggaccccctcgtggccgtcggcgtgcacagctgccagcagctcctaaagcagcggtgaagatggcggtaagtagagtcggccagcgtactggaccatcccatcgaccaccgcccaaggtgctcgcctggtgccggcctgcacctcgtcatgcatggcaacaagggcggagtcggtgagctgcgcctgacaaagtcggtccaggatgccgaagcgcggggctgagagggctaggatagcccgtcgtctggcgtgtcgcggagggagagggcatccgccaccacattggtctacccgggcttatattcgacggagaaatcaaagcccaggagcttgcccacccagtgatgttgtggaatcgtcgcgagccgctgatccagcaggtacttgaggctgtagtggtcggttttgatgacaaaccggcgtccccaaaggtatggccgccagtgccgtacctccatgacgagcccaatgagctcccgttcgtaggccgccagcgcctaatgtcggggtgcaatagcccgactgaagaaagcgatgg

SEQ ID NO: 129096 - DNA, 533 bp, Zea Mays
agaccatcactggatgaggtttcgttttgagcgagaggatgtcactattactgccagtcagattcgccagctctttggatttcccgagtcgacggcacctctgaccctcctcgtcgccctcacggcggtgtggctccgggtacagctcacgtcgcggctctgttccgcccgcccttctcagatgggtcgcgacgttcaccggtagattttactacaacaaccaagtacttatttgagcttatcagacggactcttctgccgaggatgggatacagggaggctaccacacatattcagctctggctccttggtgccctggtctctcactctgagtttgacgtcgtagatttccttatttgtgagatcgaggacactgtattggatggtctgcgtgctcgacgccagctgccgtatgctcactacttgtgccacatttttgcgcagctgattcggcctccacagtttcagggcacacttgaggcctcacgccttgtctttgggtcctaccgtcctgcgcctgaggctcctgtgcc

SEQ ID NO: 129097 - DNA, 350 bp, Zea Mays
gatgaactggaggggtgcatgcgtgtgaacagggtcctggttctgtggattccaagttggttcagaattctgaaaatggatatccacgcactacctctgtactcagtgctccagctcggattttggggatacggtcgagtgcaaaggtgtaccaggggaggggataactcaagaaggtttcaccgccgtagtgtttggatcgagtgagctggacacctctccaaactagtgactaggttgctgatgttttgctgtcagcacaccatgaagttcccagtgcttctctgtaacttgggcctgcgtggtgccatggtttcacggccacgtgcccaagctcatgcacgctcttg

SEQ ID NO: 129098 - DNA, 573 bp, Zea Mays
cgaaccaatcagcctgatccttctgctgatgagcagaagaagaaaagaagacgcctccggcgagtatccagttttgatcaggacgctggtacctcagttcctgctactgaaggagtgcctgcgactggacttactgacgttgaccccaatgggtgtacccaatctgctgctgatcccaatgggggtgctacttgtgttgtcaacgtggataatgaggaggaagaagatgaggttcctttgactcggaaaaacagtcggcagttcatcgccagtggtgagagtagtggagttccatctcctgctttgtctgccctcattggtctgcaagaactgtcccgggccaactttgatcagactcttgaggatatggtcccagaggacttgttatcggagctagtggatgatggtgcaatggaggcttgcgttgacgtgcccgatgttgggttgaggtcatcccgtgcctcgtcgaccttagaacgcgatctcgagggtcgggaagctaacttggattgtcctggtcctatggaagtagctgagggcccgtcaaccctagaggtggttactgcggagagc

SEQ ID NO: 129099 - DNA, 392 bp, Zea Mays
gttcggaggcaaaaagtgaggctagggctcaaaacgcagaggcgtgcggcgacgtgatataaatggagttttcccgagtcagacaccgtttctaaaaagtgcttagtcaccactcggctgttatttctaaaacgccgacgtggctcgatatgactcggttgttacctctaaaacgccgacatcgccaagcaccactcggtcgttatttctacaacgctgacgtagctcagcatgactcggctgttacctctaaaacgtcgatgtcgccaagcaccactcgaccgttatttcaaaaacaccaacgtggctcagcatgactcgactgttacctctaaaacgtcaacgtcgccaagcaccactcggtcgttgcctctaaaacaccgacgcaatct

SEQ ID NO: 129100 - DNA, 286 bp, Zea Mays
gtcgtaactctcccaaccgtatttcctcgtctcctacaaaaaatagagtaagtacgggtgcaacattgcagctgatgcaaacaaaaaataaataccaacctcatcgtaatctaccatatgtccaaaaatagccaacatcaagcttggaaggaactaatccatacttagcttcaataccacatttgcagagtactggatcaaacttcaactcttccgcccactcattttttcattttcctttgcctctggctctggtcaatgggacataggaccatacaaccattct

SEQ ID NO: 129101 - DNA, 665 bp, Zea Mays
ccggttgacaccattttctggacatcatatctctcctcttgaacatgtaaaaggccatcaatggtttttatgcttacaaccagctcttttctgtatgatcgcaaataatcatcattcagaattgtccaaacactattctctatagctggaaggttacagttgaccaaacagttatttctgtacttcccctcacttagcttgttttatgaataatgccagtaaatatcacatacagcaggcaggtagctaatcagtaattgattatttgcaaatgaactacaaatgtactagtcaatgactatatcggacccttgaaaattcttcatcgccccttctttttcctttcctgccaagattgtctatatctaaagaagtccaagcatcataaagaatgcataccagtatcaacaagcaccagataaaaaaaaaccataaatctaacactatgtaattatttcatttgtttcattcagttactcagcatcttggcctaatctggctaaatcgcacattgctgctgcagataaacagaatcaaaacatgaaaaaaggtgaaacttacatggaagctaaacctgttatgtgttatgatcagattccatgtgttctgtcattttctcaatgctacgctataggtccactgaacagcataaagtaaaacataaa

SEQ ID NO: 129102 - DNA, 301 bp, Zea Mays
ggaagagtagatatggggtgttccgatgtaccagcaacatctgaattatgcacatgagtgctggtttgtggatgtatagtatccacttggtgtccatcaactagtggttggctttcatttactgatttggaggatcgaatgttcctctctttcctttgacgcttagtagaagcattatcctgcttagcagccctccccctcttcggttgagaagatggttgaatggtttttcttagtaccttcactcgactgggcgcattaacagcaggattcaaggagtttgtgacaccattatagtgag

SEQ ID NO: 129103 - DNA, 271 bp, Zea Mays
actattagagaaatccgcatcataaatttcagcaagccggaagagcttatcggtgtcaaacttggagaaattgttctttggatcaagacatgaaaagcatgttaagatctatgtagttgcttcattaaaccaatgtttcatattagcaatgatttgatcaattgtgacataaaaaagctcaacacagtagtgatggagatttgtgatcataagcctttcacgccttgagcggcttctacaaggtatctcttcatccatatttggcacggga

SEQ ID NO: 129104 - DNA, 650 bp, Zea Mays
ccggcaagccgcggcgacagcgaccacgtggcgacgagcaggacgaggaaggacgacctagcttgagccgcagccgccatgtgggagtgcgatgcaagagggtaccatgaaacgtatctgcgccggcgcgcggcggccagagcagaacgatgaacctcgtccatgtgagcgtcgctgactgactagatagctgatgagatcgagttaaataacatgacaacaggtgctaagagtgtgtggcccttgcccgtggcgacgtgaaggaagcaacaggggttgcggtgctctgttgccaaggaatcctcctgccgccctgcgggaagctgaggaaacgcatcgaattgtgctgcccgagaggaacgggggctgccatgagctttctacttacttggattggagagtcacctcctcgcgtaaaatttgataccagtttgtaacaaagaagccaccgctaggaccgatgtacatgctatctcgcaagggcctaaagaaagaaacaaggaaaattgttagcttcgagaatcgagagccttcgaccatttgaactgaaactgaaatatgactggtaataaggggcccttctattagctgttagaccttctatctagtacttcctctgtttatttttatttgacaccgattagtataaa

SEQ ID NO: 129105 - DNA, 599 bp, Zea Mays
tttggcttggcttttgtctcggtttgggctgagagacagatccgacttgacccaactttttctccaagttccaagcctatctacactcgggactcacatagaaaagataggatttggcgcagggaagataccttacaagggattcttaccaagatttgcacattagcgtgaccaaacagacacttggacaagagcagaagcaaacctccacgtgttcgatctttgctggcaacgccgagcgcacattggtcgctcccgacgcgtgctccgagcatcgatcggcccgaccccacacccatgactacgccgcacctataagatagctcgagcccttgacctttctctcccgcacgcccttcaccctcaccaaggccttgatgccggcgatcgccccagcccctctccaaggccttgatcaccgcccgcaaggtaacccaagccccggccaccatggtccaaccatcctagcccctctcaactcaatcgagctccatcatttgcttccccagaggccagtgaagcttcccaaagctccttggtcgaacgctacctcgctagagagaagcccgatcaccctcgccagactttacccacccgtc

SEQ ID NO: 129106 - DNA, 463 bp, Zea Mays
ggctgacaccgtttcttgtaacacgacacccattaggactcaagtcaactgcttggacgatatgattacacctgcggtcatgtcaagttactagtcaggggcagtttgctaaacgctcagcgcaccaagccatcccttgcctacacccattgggagggacatccaagaattttcaatagattttcccaagcagtcacatccatacagtatacacaataaatgtatcaagacagaaggaagatattgatggagatcggaggaaagccaaaaatagctgatgaagtacaagtctaatcaacaggagcattgaagcacaaagcgaaatgaagactagccatgggccatctaccggatgtcaaatctgtcgtagatcaaataaattccaaacctaaccagacatgggtagaccacattgttgatctcaaaggcaaaaccgtatgctgatctctaaagcataaggctg

SEQ ID NO: 129107 - DNA, 347 bp, Zea Mays
attacgcccttgcgcacaatcaacacttgctttaggaccccagggatcgcttcgcgggcgttgggagacgacgatggtgacgaacgactacggcgggtctcacggctcgaagtgggtcctggtggtggcgccccaggtatgctcaacagaggccgagaggggttttatatgcgtggtccgagtctcctcctgtccgcccatagcgccggtccgatagggaggtagttgcgccctccagggaggtgcggtgagctaacgccgcgagagacggggagaagaggaacagtggttccggtcccacccgccaggttcgcgcgcgcgctcatccattagaccgtgcggctgcc

SEQ ID NO: 129108 - DNA, 862 bp, Zea Mays
tgctccattggagtgctttggccaccaaaagtgcttaaggaattattagatggatagcatagtactttatgaagtgtttagggtaattagaccaccacattagtgcattgctgtagacttaggttgagtgtttaataccttttgtcactcagtgcttgtgggcgttattgttgtacactagtggcttttagtctaataatatcaccactgtgtttatggagtggttgtcttgctcatactcgagaacaaggtccatagcatttgggacagaagcttgatagtgatattactcacttgcatgtgggcaatgatccacatgctccacgaagatatctgatcaaaatcttgacccttacgacaacatccttgcaaggggtcctaatgatgactaacagaaaatgcgagattttaaatactcagaaaaaatatcattgtcaacattgccttatattaatgctgagagcaaagacgtgcttctagcatgtccacatcgacttttaatccttagtcgtccgattgtatctcaacagcaaggaacgaaagcagtggccaaaggagcttttgtgtgtatgcacatatttgcaccaatttccagatgtagtccagcatgcctgccttctcccttgcgagacctggagctgatctggaacacacagccacgtcctacccatggccggctctagtcatagagccactagggcggctgccctaggcccccaaatcctagaggtcccaactcctacagtttattatataactaatattgagagttttaaagttaagcttgcgagaatcacctatgtcttctatagagattttttagtatgtcaatttaatgaattcataccataatgttcatata

SEQ ID NO: 129109 - DNA, 365 bp, Zea Mays
taacagtactagatacgacactcatagaggtgtgcatactatgcaacttgagtggtatactcatcttttccctccccacaaccgttcccttcgctcaccccgtcgcggacacacccacatccttgcgagccccggagccaaaccatcccgccccgtgcgccccactcaccctgccctatctcattcgccctgcaacaaccactaccgcgcgctcaacctgccatgccacacactcacgccccgccatcacacgctcgttctctcatcgtcgtcgagtcttcgttgtctctcacaccccagtgagtttcacataggtatcagcaacccgggacatgcccctgtctcccctcgccctcatcggtttg

SEQ ID NO: 129110 - DNA, 443 bp, Zea Mays
ggcgagccagttccgtcagggcctgaaaccctctatcaggcatgctttgggcgcctttccgctggtggattttgtactacggtggagcaggcattgggcgtggagatgcagcatcagtacaccatgcttggaatcttagaagaccttgggggttgatcatcctcgtggccaggacgcgaggaggggcaacattgggggtttaacccacaagaggggaaagtcacaacaccagcgccaccactcctatcgtggcaaaccctctgaatcaggtactttaggagggagtactcagaggtatccggctgttcctaagcctgggttggggttggtgtgtttccgttgtggtgaagcgcatcgccgtgccgagtgtcagtggagtggcaggtgctctatctgcagccaggatcacaaggatgtggtgtgtaggaggaatcccaatggga

SEQ ID NO: 129111 - DNA, 661 bp, Zea Mays
tctatcgcaatgacaaagtcatcacgacagacatcctgtcctagagctaggtgaatacgagcgcgagcacgccgattgacatccttatccatggtaatgaactctgacgataggaaagggcgagggtccaccgagaagttagccatgagcaagaaaggcgaagacaacaagtagaaactgcaacattgttggtggcgagaggtgagaaacgagagggttttcccactacaaagagagtggagcaaccagtgtccgaatctaaaaggcgtttggaatcgggtataacaggcagaccagtaactatagccagtgaaaaggttcgacagagagggcgaggagatggcaatacacttagggaggaactaaatagttgcctcgtcagaatgcagaaagtcgcctttactagaagaatgtgtgggcccagtaaccgaaggcaaaggagccttaacaaagttaccgggagcaacttccgacgcaacttgagtaccttcgttgcttgccaccgatccattaatgcaatgtgccttagacctccagaggagttgtcataggttgagcacgcagcgcttattgttacaatatttttcaaagtgtccaagcaagaggcagcggtgacacatgaccgggctagtacaggtcctgatgaggtgggagcctgaaa

SEQ ID NO: 129112 - DNA, 405 bp, Zea Mays
ccagacgagctcgaagcaagcggcggtgagggtgtgtgatgagctggtggaaaaggatgatgatggggcgtggaggaggggtggggacggaggcacgttggaagcggagatgacatcagtatcgaaggggggagcgagagccaagataagtgcctacgggagggagacgagtagcaaacagagatagataatttttactagtgggcataaggcgagggctgctaggaaggtaacatcagattaagggccgatgaccgaggctgaccgattaacaaatgttaggtgtgattgatgaattcaagaccggtgtggccatccacgttagatacttgacagaacatgttctagaactaaaagagaactgtaaaatgaaaacataaatattttaaagatgatatatttgtt

SEQ ID NO: 129113 - DNA, 543 bp, Zea Mays
gtagtaaccaggcgtgttctctcgcagtcgcaggcagctaataaagcagtttcgctagcttcggatccgggtccgggtccgggtcctacagggccccacgaggtgcgcactgcgcagcgcagcgcagcggcagacgtgtcgggttgcgagaatggcagcggcagcgaactggtctggggccgcgggatctggagttgttgcgatggttggcaacgctcatccgcccgaccagatctcaccgagcgccagcccgggcacacctccttgtcgtccgatgctccagtactattactactttccttcacggtcattcagcctccctttttttcttcttctttttgctctcccaccaactacgcctaccaaaggtgtaggtggtacacttgtttggatagggtgttattgaaaaaataaaaacaatcagcctgtatgcttaacgactgtttctaaagtggttttgtctagatagatttcagctacaacggtctaaacaacggagctctataggagtatccatcatcaggtaaaacaacagagctgact

SEQ ID NO: 129114 - DNA, 1014 bp, Zea Mays
agaagcgaagataagccaacgaagaatcacacacttacatgttagtcggagacggttccacaaatgtaggagtagcaatagtgatctgcttaaccatgtaaccataatcccatcgaatatataatgcgggttagggacccctataaaacgattggatcctcctataggcacagtgagagcatagttctcatctactatataacctcgaactcaagagcaattccatcttagcagcacataagacatagggtattacgcatctcagtagcccaaacctgtatatatcattgactcccaacatgctacgcacgaaccatcgagctatcgtcgacttcgtcgaccgcaaaatcattatgtagtatatctcatagtgtgttgctggtgctaaacaccgagaaaagcatttgcttccaaagactctaaactatgaaatatttgaactgttaccggttaggagctcatatggagtcttcttgagaagtcgatgaaggtagagccgatttatggcacgacaagtagtgttgactgcttccaccccaaatcgatctgaagtcttgtacttatcaagtatggccttgccgcaacaattagtgtttgattcttcctttctatcgcaccattttgttgtggtgaatatagagtcggaaatccatgcttgattccttcttcaagatagtccatcacttgtgtattttttaattcatttccattgtcgctccttattttctagattctcaaattgaactaattttaagcccttttcaagaatttcttgagagttcattgggtttcacttttatcctgcaagaaaaatacccaagtgaagcgtgtataatcatatacaataatgagaccatactttttaccattaatgcttaagtaggccaccagaccaaatatccatgtgtaggagctctaatggccttgacgtcgtcatgatgttcttggtgggatgatttgacccaacttgctttcttgcttggcaagcactgcatggcatgtctttctcaaaac

SEQ ID NO: 129115 - DNA, 526 bp, Zea Mays
acaactcttgcagaccaacgagtgcagacaaggctagagaaggaatatcactactccccccactgaccaggtagcgccgactgtttttctgaattaaggggatttcctcctcctcttcctcatcctcgtcaacaatacgaacaacacacccattggggtcagcgtcggccggattgcacccattgggatcagcatcatcaaggtcacacccattggggtcagcgtcagcagggtcacacccattgggatcagctccagtaaaaagttccactggcacttcctcagtagtaggagcagaagggtcggcatcctgattcaaatatgacactcgccgaagcctcctctttttcttcttcttcccctcggcaggactagttggatgactggccgggcgaaggcgctttgggcgagcaccatcaaaattttgagcagtcaaggtcttttcaggcccggggacagttgcaatagctatggtttcagcagggatggagtcagaggaatcctcagccaacatgtccaacatagc

SEQ ID NO: 129116 - DNA, 616 bp, Zea Mays
tcgacaccggcaattggaggacgatatgctcccgcttcttgagggatcgcgccaccgaagtacaagatctctcgcatcagcttgctgtcacgaggcacttgcatgtcaagtctggacggtccattctgccgccactgcctctacttcctctaccaccaccgtcgccactgattcctctcccaccgacgccacctctgcttcctctcccaccaacgctgctctccactccaccgccaataagagcacgtagtcgaataaacgcaggaaacaactacgaagcgcgggaacgaatagaccggggaggaaatcttgtcacggaaaattgcgggatgctaggactcaaatacgggacgcgtgaatatttgggagaagataggaaaactgttggatgtggtatttctgatttctatggctaaaacgagttttggggtatgtttatgtcgctttttagacttgctctaagatagataagtctagtggagaaaaccaacgtggcacaagacggtccccacacaaccacctcggcccgacgcttctaacgacctctgtcctcctctagtgacctttgtcctccgttcaaagtactctcacaaacactggcggaagactcttatgg

SEQ ID NO: 129117 - DNA, 1220 bp, Zea Mays
tgaaatacataaaaatttgaagtgtagccgctgtgacaaggatggagatccagctttggatggtactggttttgcagccactggtcataaggcttcaatacctggagtgcaagattatgctgatattggtgggtttggtgagatatctggatgtttgcagaaaatgaatagcacacatcagcaggtaattttgatggcaccctatttatatgttgcctagctctgcagtagccagtaatctttgtttaacttgacccattggggaagactggacaaggcatttcttcagctttaaacctcaagggattcgattaattttctatgcccacttttttcagattggaagacctactgaagaagacttaggaagttggggacatcactgtgacccatcaactgtacctgatactatactgcagtgttctgctggcgaagaggtgacagcctaagaccctctgtgcatctgcatctcattggtttggttcataaatctaactctctccattccaaactacaagttttggcatttatatgtagcattacatatatttcactatgtatctggacatgatgtatatccaggtgcatagacaaagttatgcacttagaaaagccaaatcgacttataatttgaaacatagggggtacttattttaggattgtaagtctcagacccagtatctttttctctggatccacttgtttgtttctacatttatattgatacgcagctctcctgctttttcgaaaaaaaagtctgcatttgagaacaaacttttgcattacaaacaacatctatggcatctgtgctgcagattttagtttaaacttagttgttaggagataaccacgagtccacgactggtaacaatgcacatgtgcattttgcaggtttcttttgttttcaccaatcaggttgatggaaaacttgttccagttgaatctatggtgcgatcagcagctcatcaacaaaacggaatagcagccaccggagaaaaaggagtgcagatacccaattctcctagcaaacctggaaagcaatccttaaatggcaagaatttgaagatgggatttcatttaaagaattcgtctttgaaatgttcaaccaaatccagaccatcaccaaattgcttgcaagggttgatgaaaaccagcccctttttggatcaacctcaaattaaaaagcttcatgttgcttctgatatatctgacgatgattt

SEQ ID NO: 129118 - DNA, 814 bp, Zea Mays
gtcagatgattctccagccagcaaacaaagcacaacatctatctctgcatcgtttgtgctagctggcatctcaaaatgagtctgcctctcatcatccggaagactctgagtgtggcaattagagcctcaatgtcctcgggggagggccgcactctaaggcccaggctaccatcactagcaggactgcaggagggttggacacaaactcagaaaatggtctgattggtggcaggttccaagcagaataggccacgggagcgccggcgtttgaaactctgcccctcaggatcatatctagtcggctcatcagatctttatggggattttcttgtttgtaacccgggtagaatcattgatgccactatacaaataagcagggtatgccttgtcctttaaaggctggatgttctagaacacgaaatcagcgaccacagcctcagcagtcagacctttgtccttcagcaagcaaacctcgacaagcagtactttagcctctgttatctctgaagaggtcagagattctatctagctcggcgtgcggacgtctggctgcctccctgaccgaggggggagggacttgcagtggttctccacaatgaaccactcgagacgccaccccttgatgctattcttgagggggatgttgaggtactctgttttcctcccgcgacgaagttccagactcgcgccgccaacgagctggtgctgtcccccagccatcccgagccaacaatgatacaagtacttccagagaccaaaatgggggagaatcctgagataggcctcacacagatgtacaaaaatggaaacttgc

SEQ ID NO: 129119 - DNA, 342 bp, Zea Mays
gcatggtggtcctttgcatggtggtccttgcggccgtcgactttgccggacgagggtgcagcgaccttaggctgcggcggtggggtgctcgccgcagggtggtgcctagttccgtgtgcccgaccagggtggcgtccgacgtagctttgcagctgctgtggcgactggcacgtcgatgcccctctaggagggtttgcgtgggatgtctgggcaacggtgatgtcggtggtggcctggtttgttgtggggtcttggcttgacgattgtgctggggcttcttgggtgaaagcctcgatacggtgacgcctatgagtgtcgttttccctattgagggtgtcgcac

SEQ ID NO: 129120 - DNA, 592 bp, Zea Mays
gtgtgggctatcaccgcaataacattatcgcacatagggaatgaaagggaaatgcaccgagacactctacatcgtgaggggttaggtccgcgtccaaaaattcagaaaaaaatcatgttcgtgattgaaattatttttttgtttgaaaccatgattgaaattattggctctggacaagcatgattagtggggttaatcttgatctgactagtaacaactagcactgacgttgtggtattctgaattctgacctccacatgtttccaacaaccaattcatgcatcatcgttagctcaataggtggaaataataccgcaaatatttattccaggcatgtcggctccaattggggatgaaatgaagcaacaaatttcatttcactgaacaaagggtgcatacaatgggcggtcttgagcttgagatgatgaatgtaaaaaaaaattaaaacacggatcttagctctatgctcgagataaaaagacatagttgattggtgaattaaatactttaattggtgcaataaatacagtaagacacatattttaaacacacccactgtattgtatcttagtcgtgtcctgtacaatagtgc

SEQ ID NO: 129121 - DNA, 429 bp, Zea Mays
ccgatgctgctcctgctggggcgttggtagtggcgcccctcccagaggctgatacgactttggatgttcagaagcctgtcagtactcgcccgaggcgcccttgccgagccaatcagcctgatccttctgctgatgagcagaagaagaaaagaagacgcctccggcgagtatccagttttgatcaagacgctggtacctcggttcctgctactgaagaagtgcccgcgactgtacttactgatgctgaccccaatgggtgtacccaatccgctggtgatcccaatgggggtgctgcttgtgttgccaatgtggatgacgaggaggaagaaaatgagattcctttgactcggaaaaatagtcggcaactcattgccagcggtgaaagtagtggagttccctctcctgctttgtctgccctcattggtctgc

SEQ ID NO: 129122 - DNA, 272 bp, Zea Mays
gaaggagaaagagtctttcggttgtcgtggtgggccccctctcctggtcgtgtaagtagtgcttctagtatggcgccgcccgttacttccattttcctgtggtggggctgacgtccctgcgatgatgtagggtaggtcccatggtttagcccaagggctcgaagaacactgtgcgacttcctcccatcatcgtggaccctacgtagtccttccatgcatgtggatttgactatttcgtatggtgcctcatccttttgcttccgtcatactgg

SEQ ID NO: 129123 - DNA, 456 bp, Zea Mays
aagagaatcaaccttgggttcaccgatgagcgcaagactgccatcatcagttccagcctggatgacaaataggaagacgcgctcgtccattttctgcaagataaccgagacgtattcgcatggcaacctgcggatatactgggagtcccgagagaacaggccgagcacaaactgaaggtttacccccaggcaaggctgatctgacaaaaattatgtcgtttcacgcccgacaagagagaagccatccgtgcagagctggctcgcttggtcgcggtaggattcattagagaagtgttgcatcccgagtggttagcaaatcatgttcttgtactcaaaaagaataaagtggattagcgcatgtgcgtcgactatacggatctcaataaacaatgtccaaaggatcccttcggacttcccacaatagaccaggtggtagactcgactgccgggtgttct

SEQ ID NO: 129124 - DNA, 519 bp, Zea Mays
caccctagttggcctacttgcagcagagagcaagttccaacacactgtttcctgtagaggggactttagtgctgactgctgcacctaaaaaactaccctacacgtgcactgtgcaaggggagggggcagctcgccacacgcgctgcgtacagactgtaaatgacgggtataaaggatgaatataaaggacgctgctggagatagcctaattatgtcattgcacaaatgtaatgatttaaatcatttgttttgatagagttggatcatagccaaacttttgacacaagtacacattatatttcaaatatacacacattaagaaaagtaaattaagctttttctgaagtggattttcagttttttagtgatataaaatgtggaggctcccacataagggaggcaggctgttttgatcttgcgacctggtgagtcccagtggcggaggatgcactaaaattgaggtattgctaatgtaacaacgaaagaaaaattcacaacacaatctataatatttcataa

SEQ ID NO: 129125 - DNA, 555 bp, Zea Mays
cttcagagttgcttcgacaaagaaaggggattcctttctttctttatgaagcgtaaaaagaagagaaggtgttttttgcctacagctcaaaaaacggtacgtatgaagatttcacgcctcacaaagaaatatattacatcattaaatatacaaatagttgataaatgtttcttacaaaagcaaaattgtatacagagaatctaaagtcttaacaaataagctctaggcatcctcttttaaaactttatcgacagcttcgttcagtaatctattgacagcttcatcaacggcttcattatcaatactaattacatcgagcgccccctttagagatggattagcttcagggtcatatggctctggaggagaaggagaagaaagctcagttgtaccaaaatacaagtgtttgttactaccgaagctaaaataatttacgaaggtaaatcatgaaagatacctataagtctagcacgtttagcagctccttcagttcttctaacctcttccaaggcgtcatgagactctttctcattctttctaatagcttcgtcatct

SEQ ID NO: 129126 - DNA, 381 bp, Zea Mays
ttaaaaagaatctcgtcctcgagatttaggaggagcgagggaaaagatggggaaatctatgcgaagctcttcttctctttcccatgttgcttcatcttcaccgtggtgactccattggactttgcacatctttatcaccttatttctcgtaacccgagtcaaagtatccaaaatcttgatcgggtactccgtgtaagtcaaatcaccttgaacaccgagctcttccatgggtaactgttcctcgggaacacggagacacttcttcagttgagacacgtggaatacattatgcacatccgatagactagcaggtaactcgagttggtatgccatctccccaactcttctaaagatcaagaatggtccaatgtagcgagggga

SEQ ID NO: 129127 - DNA, 681 bp, Zea Mays
ttctcatctcctcggcccagcaacattctgcccacactcggctgcgcggctactcgcgtcgacgggtgggtcccagtgcccagtgactgctctcatccgtgtgtggctttatgtgtcactgcatgtggggcccacttgtaatgctcgtctccttcgtcgtcgcgaaccggggtgagcaccaacagactccgtggatctcgcgtaacaaaccccgtcactcaggtgcgcggattccgggggattctttcgccgcagcctgatctccccccgtcatgatcttcgtagaatggcctataagacccggccactgccatccctagccctatgcctagtgagcttgagccgcgctgggagttgcgtctgtcgtagctaccgataggagagagagggaaaaagggtgagggccagaggattgaaccggccgtcgaaacacgcggtgcgcgcgggaaaccaggggcggtgtcaggcggagaagcgctccgcggcgttgcccacacggtggtggtcggctcttcaccgggccggaacgccactgctgatcagtgtcggcgccaggaactctggtaagaaccactcctagctgtttctacttcatttggttgtgccggtcgtgttcctgggctatggttttaagtctggcaacgtgcgacttggtcgccggtgttagtggttgccctgggt

SEQ ID NO: 129128 - DNA, 455 bp, Zea Mays
gtgaccttcaagaatctgggggtcttcagctttcctgggttgaactgggttggatgaagtgggctcttggatccacagggctctacgttggttatgggtgaccaacttggcctccatcaacttctggacgtgctcatccttggcttgcttcagggcttcaacagcaatgacttcacgactctccaaggcagttgcacgggcttgagctgtggtgagatccacatgcagctgatggttgcgcttctctgcatcggtggtgccgagccaagaaatcatactatgcatcaagggtgagcaggtatgcagtgaggtacacgactgtggggtcgtcctcaagcagctgctgctcttccaatgcacgcatcctggccatccaagcgggacggtctctctgaaagggcggaaagaatctgagcggagtgtcggccacttcttcttcgtagatctgacacagg

SEQ ID NO: 129129 - DNA, 338 bp, Zea Mays
gtaagttcagtaacgcttcctttatgaagaatgatttcgccccacttcattgtgcattattttgcctttgggtcagtcgtcgatcgttttaatatttaccgccaatgatgttttctgtctgcaacgcttgagtagcaacttggagtcatcgggtcacgcttcagaccgctttatttgcgacgtcagtgctttggtggtagcggccgagttattattggcgatgttggcgctttttgaagtaatggctgagtgatagtgggccacgtcggtgttttagaagtaacgaccgagtggttactggtgatgtcggtgttttggaggtaacagccgaatccttt

SEQ ID NO: 129130 - DNA, 791 bp, Zea Mays
atggcgggaccactcggtcagcctgtgtcgcgtgaatcgctggccggctgactccccggacccacatgaccgctcgccgactggtggcccctattgtcatctcgccgctcgcgcaacggactccgagtttgacgtcgaccgcagcggaatcgtgtggttgggactgcgctcgctcgatcctcatgactactggacccgtgggacgttttcgagtgcttctccctctttcccctaggttataactgtggccggacaccccccgttacctagtcgccctcccggagtctctcacggaagccggtgaagtgcagacgtggggaagaagttcactgcgtcgcgtcttggtcaaagaccgggtttgggaagccatagcacctcgagtgtgtgtcgcgcaagttggtgtcgtggctgggcgtggtcggaaccgagaaccggagctcggcgttacctcggctttgtcccgcgcgagggggattggctccagtaccgcaccaccgcaggtatggccacttctgtcgtcttcgttgaccagtccttgacgtatggtgagccgcgggagagggaattatacatctgcgggttttgaattgctcgtcagagccaattgactctgtggcaccgagccacgccgtgggcagggtagtgccatcactcaaacattaaatcgggggtctcgtctgtttcgccttgcgtcaggctgtgtttttagccaccggccgcgggtgcaggcgtcggtgggtatcgaatcgaggaacgctagtgtggtcatcgccatgaacacggtggcgcgg

SEQ ID NO: 129131 - DNA, 448 bp, Zea Mays
cagtgccataggaggtttggattttgaattgaggcacgaaacgacatggaattgagccgatacttcacaaataggtttatataggtgaatatgagtgaagtgtgtgcttggtttgaatttaggcgaagaaaaaagagatttgggcactcggctcggaaacgatcgctcgaaacggagaatttggtgaaattaaagcctggaatctcggattggcgtgaaatttggcaaatatgttactggaggtggtgtgaaggtgcctgaaaaattgggttcaatcggggcatttttggctggtttgggcatttcatcgaacacatgacgtgcggtgaattaggttttcggggaaatggccatttgaggtatgaaaaccctcccgaaggagctaggaacctgcaaggatgtttaaggcacacataggaacacatatggccacttggtttcactggat

SEQ ID NO: 129132 - DNA, 701 bp, Zea Mays
cttggaccaagtctcttatgccgatataagtgcacactgtgttgaaagctgcctggcatgcttgcacgtcatttccaagtgcaatgagtggcctcctaatgccgaagacagaccatatagggcgttgaataatccctttaatatcctccctctgactcaggtcaattttcacataaaaccattcctgcatccaagagcctggccacgttttccgaaatgtcggcatgggataactgacctcagagcgaggcatgaagctgtaacagctgaagttgttgtggtattgttctttcctagtcgctttcgtctgataggataattcgtgaacattacagaagcacctggcctctggctctaacccttggctcttcatggcccatataaaaacccctactttgataaaaccttcgggcataagttgacaaagataaatttcaaaagtttttaagactttaaccaacatcttgtccagagggaaccgaagtccagctttcatgaagcttctaaaaatcaccacttcgtcagcttcgggaagaggaatggtactctcccctttggccctcacgatagaaatatcatgaaagtatctgcctttcattgcttcgatctgcccttgcttaacagtcgactttctaaacacaacatggcttggcctccatggctagtcttcggcatcttcatttctactttctatgtcaaaa

SEQ ID NO: 129133 - DNA, 538 bp, Zea Mays
gccgaagttggtagcacagtatcacctatgatagtggtcgtgcttcaagggtcggtcagcttatcaatgggctcgttcgtatccccaatatctgacggttcaccatgcagtgtagtccatccatagtgtcgtttcctatatccgtacgagaggaatgagtgcttcatggttgatttagacgtaatggatgtggatgttagtcagaataggaacaacctccattcccctccatgttgtggcgaccgttatgatgacgaaggctaatcatggagtggtcatcctcattcttttgatcgttgacccgtgtgtggtttgtttgtgcctgtgtctagtttggtcatccccttaggctaggcacgattcgcctgacccctaggttgacttagggctcgttcaaccctttttcgttttgcccaacccctaggcgtccttgcttcacatcgggactaggggcaaacattagcggtttactcatgatccagaagcagattgggccttactcgagccttttcagagtatctttactcatcacgactcg

SEQ ID NO: 129134 - DNA, 426 bp, Zea Mays
ttggagttcacgggcgggtatgttttcagtagagcccctgtgttgaggtcgtgggcactggatcgccagggcgcggtctccggtgagcgcgccgccgcgagggaagggctgcccgtcgccacgacagattcctgggttgagaagagggtcttcggaccgttagatttttgatgggtggccaggattgagaggggtgcagtggataggttcgttagagcagaaccgtggatctagcattgcacggtgggaattagatctcaggctcattaaatatggaccatctgatttagatcggatggttgtgagcgctctgtaccccttcggccctgacacattttcttaagagcccctggtaaacagaaaatcaacccgcagtccaactagcagtgctgtgtgtcttaagaacttttaccccgagccccctgc

SEQ ID NO: 129135 - DNA, 295 bp, Zea Mays
aagataaccgtgaccacatggtgaagaagcttgagacgggaacaacagtggcatgcactaaaacccttgaggaaaatgtcaaggatttaaggattgccaagaggaagaagcaaaagatgaaattcaatacatcctccaaaagcctcaaccacgcctctacaaaaggtaacatccagggtaatgatcaagccacacttcacattaagaggtgtagtgaatgctttgaaaaggggcacttgattaggtcatgtccctacattaaaaatggcttgattattaacaaggatgatagact

SEQ ID NO: 129136 - DNA, 521 bp, Zea Mays
cagtgaagcctcacctcctcttcaccctctgattgctctcatttccaattcttgtcaaaatgtgtgaatcccagtgcatggtaggttcctttgtgtcccattgaatcccctgcaggttcctagctccctttgggagggcttcaattcttaaatcaaccatttccccgcaaccctaaaacaccgcacgccacgtgctcggcgaaatgcccaaaccagtcaaaattgctccgattgaacccaaaacttttcaggcaccttcacaatacctccagtaacatattcaccaaatttcacgccaatccgatatactaggcttcaatttcacacaattccccgtttctagcgatcaattccgagccgagtgcccaaattccattttcttcgcctaaaatcaaaccaagcacacacttcactcatatttacccatataaacctattcatgaagtatcggctcaattccaaatcatttcatgcctcaattcgaatttcaaacctcctatggcacaatttcacgttcaaac

SEQ ID NO: 129137 - DNA, 633 bp, Zea Mays
ggcatattacagtggcacatccaggttacacattgcgccgtttcgtcaccaaaaaaatgaagtagcacaccgtgcagacgtagaagaaaaacaaggcgatgtcctccagcaggttgcgatgggagtcggtgaggctcgtgatcatccagagcacgatcacgacgaacagagacatcaccgacaagaacttcttgtaggtctcgtcaaccggacgcggtccccgtgaccagaacctcctgcgggcctcatcggccggagctgcttctgctgctgcagcatcgtttcctcctccgggcctggacggcgacgacgacgacgaggccgcagactccggcgagcgaagagggcggcccttgcgcggcgcatctgctccctgcggcgccttgtgcctgcagaagaagtcgctgccccgggcgtacgagaagtacggcagcctgccaggcgaacggtacgcgtagacgcgcgggatctcccggacgatgtgccagtcctcattgccgcgctcgcacctcgcgaggagctcctctccgccttccacgtccagcgtctcgatcctcgggaaatgctgctggccccccagccacgccggaagccgctgcagctggtgctcgtcgtctcgcacgtggacgtgct

SEQ ID NO: 129138 - DNA, 417 bp, Zea Mays
gcttggactggctgagtctgcattagaaacatctgctctattgtcatcgggggcgatggtggcaactgctgctgaggttcctcatcttgcggtgcttgctgctcctgctgagcatgccttcctcctctgcgtcagttgtctaacatctacggagtataatcacacatcagaactgatcttgcagcataagaaaagagtatagaattcttccacaatactgaacagataagcatcttcattgactcccaacaaaggcaaacacaacttctcagataaagaggaaagtagaataacaggcttcccaactagataactaattttattaacattaacaggtaaaccaaagtgtagggggtacccacactatggcgacaatcattacaaagatccaaatccatcatagttcatcatgacaag

SEQ ID NO: 129139 - DNA, 389 bp, Zea Mays
gttccctaaacgctcccccagctgggaggaacccttcaaggtgacggaaatgtgccgacccgggggtaaccaccttgctacagttggagcaccttttcctaacccctggagcatctctgtaagttctatccataggagcaagtctgtggggtttagtttttctcccttttgtaactaggttgcgcatacgtgtacgccagcctggtaaggtccaccctcataagcccggcctgatggcctgcacccatgcatgtcgagttataaagagaagattcaccccctcagatgcgctcctatgacagtcttatcctcctgcctccatggttctatcctgcagttcccggatattatttttatctaacccacccgtacagttcctatctgtcctg

SEQ ID NO: 129140 - DNA, 418 bp, Zea Mays
cttgattgtgacctcattcaaagctcgataatcgatgcacatcctcctagtgccatctttcttctccacgaataggacaggggtggcccaaggtgaggtgcttggccggatgtaacctttttctaacagctcatcgatctgcttcttaagttcaaccaactctggttcggatactctgtaagctctcttaaagatgggggcggttccaggaagaagctctatggcaaactcaacttttcgctcgggtggcatacctggtaagtcctttgggaacacatctgggaactcggacacaaccttgataatctcaagtggatgtgcttcactgctatcaatagccatctgataacaacttcctttccttggctcaggtgggacttactcggtcaccacttcctctcctattggggacatcaac

SEQ ID NO: 129141 - DNA, 575 bp, Zea Mays
ataagccgggtatgctctgtccttcagtggttgaatattcttaaaaacaaagtctgcaaccacagcttcagcggtcagacctctctcctttaacaaacaaatttcaacaagcagaaccttggcttctgttatctccaagtctgtcggagactcaatccaacttggagcacgaacatccggctgtctccttgatcgaggggggagggacttgccatggttttccacaatgaaccactctaaacgccatcctttaatgctatccttaagtgggatgtcaaggtattccgtttttctcccacggcgcatctccagactcgcaccacccacgagctggtgctgcccccagctatcccaggacgacaatgatacaagtacttccacaaactgaagtgaggaagaattccaaggtaggcttcgcaccgatgaacaaagacagaaatttgcagaatagagttgggattcaggtgagtcagattcagtttgtaaaagtcacggataccgcgaaagaagggagaaataggaagagcaaggccgcagataagaaaagggatgtaaacaatggactcgtgagtatc

SEQ ID NO: 129142 - DNA, 860 bp, Zea Mays
ccgtgatcgactaggactacggtgctcgcgcaaacttggacggaggcaaccaggaacaggcagtcgacatgagccatgtccactgcggtgttcccggacgacgacgcgacgttccctaagctacgttgtggtagcgttcaattggccgagaccgggagtttcactagcaccagaggatgtagaaacatggatcagagggacatgaacggacctgagaacggctagccacgacgtgatgcctcacggcggcgttccggccgatttgggggaaatctggaattcgcgagctatggtggatgatttaaggcgaggagtggtgctctgggtgcataacaagaaggcgaagcaaggagggcactcaatttaaaggggccggctgcggttgctctgaattttggacggagatgaactcacggcggggatggggtgagtcaccggagctcgtctaccgtggctctcaatggggtaaggactcagggtagtaaatggtcatctaccatcactcactgcgacatggtaagtcggcacatggtgtggcatgaccgagataaatggcggccaccaccacaacggccggatgaccacgtcacgacccaagtgggtacagcggggcaggctcaatccaacccccctctgatcttttcatcctcgcggaaatatcccttctgacccaggcacgaatcatggtggccagcctgaatcaccgcgcccgttcaccgcggtgaggtggactgcatatgtgatcttattcagacactatgtcattgcgatcccgttcagttcgtctcacagagcaacttcaaggtcatttctcttcgattttcatacaccgaactatcaactcgactataccaaagttg

SEQ ID NO: 129143 - DNA, 551 bp, Zea Mays
ttgattcaaattgcttagtttaggcgtgagatatgcttcaggtctgtctctttttcctttcttcttgatccgtgtaggcgtgaccatagagaggggggctatccggggctgacggagcattgcgaggtggccaacacagtcatggagagagagagagaagtcatggagagagagagggagcggtccggttggtgcgagaggggttgaccgaccggatggagcacttgttctaggacacgaggggctctaagggcttaccattatgtgctacgaacataaaggccatatgggcttacccattatgttcctaaggcacaaggggccttgagagcttatctcgttatgtgccccgagacgtgataggccataggggcttgtaccgttagatgccttgagatgcgaggagccacatgagcttatcccattatgtatcctgtggtgtgtgtatgtccccaagggacttttttcaagtgccctttaggcatatggagtcctagaggctagattagtaattgccacagggtacagggggctagggctttgttctctat

SEQ ID NO: 129144 - DNA, 921 bp, Zea Mays
ggggagggcagcaacttatagaaagttaaatcaattttttgttcgcaggtagcccttccactttgtgttatggcggcagttagggttgagaaggagaaaggggggtgatcggggccttgcccactgcctagcaagaaaggacttctaaatcctgcttgattaaattgatacatctctccttatatgagggtaaggaagaaaccattatccaacacaggcccaataagctcatgacatacaactctaacatatggtagcggttagggttgagagggagagaggggccagccaggggccttacctatggccaagcaaaagtgaactaattcatgtttgattagattgatacatctctccttatatagagaggatacttgacccctgaagggagaaacccttatatctatttaactctaacattaatggggtacagttacactgccaaccaggcatgataagcccatgatataaacctctaacaacgacaccccaaaaacaaataagaatttttttttgaaaggagattttactcagcttttaagaaagcaataacagaagtagctacatagagcacaccccacagcgttgaactgggataaccagttaatcagggaagctccacacatgacacccatgaccaccaaaaaaaagaacagaccctccactaagaactgagacttcatatcaccagcttaaaaacaaataagaattacctctgacatttatgtatatagcacggtgagggagttcaccaggagggcatggaaagcataaagatttagaagatccagtaacatttttgtatgttcccaaagggcattcctgcaatttatgaaaaacaattaccacagcataaagtagcactggagttacatggccactggccactccagaactaagggaaataatagttatgcagtt

SEQ ID NO: 129145 - DNA, 711 bp, Zea Mays
gcggtttccctttgtaaacttgccacatatagtgcttgcatgccggtaggctgctagacgaacggtataggagacaaaaaaatcttttggtcgagaagcagttgtacaatagaataggtatgataactaaacacattgccagcatacacatttttattttacacattggttatgtacaagtctgagtcgatcatgcactaagaagtctgtagggggtctgcatctacggcccgcaacacttcccggtaaacaacgtttcgagtctgtgatccgcaggaaccatcaggatttccaatcaaaattctaaaaccacttctagatgtaacccttgaaacaacaacgtaaagctggacatgcgtaaacacaggtctgtcaaggtagaggccaaccattgagagggtctgaccctagctcttattaatcgtcatggcatagcatgtccgtattggaaattgtcttctttgcaatgtgaagggccatttgacgtcggtagtgttaagtgcaatcctcggtatgaaaacctcttcgccgactccggagggcgttagtactacgcatttaagaacatgatgcctgatctcagttacaagcatccttgttccgttacaaagccccgcagtctggttcaagttacgtagcagcatgactgtgacgcctctttttagcacgagtttgtggcaagggaaatttgctgcattaatagagtttagg

SEQ ID NO: 129146 - DNA, 400 bp, Zea Mays
agaggaagcccaaactcgcgctcctagaaaggcacgagcatgaccacctcatcatactgagggagcgggatgtcgccttccttcttcaatgtccactgtgagatccccttgggggaggaaccctttgttctctaggccaaggaggcgactatgttggatcgagcaagcgtggaacgatgccattggcatgaagctactaggacagatgcaacaaggcgagaaccaaagaaagaaggcaacgaacacacgggtgagaaggcacggttagtggaaccgactctaaatgcctccttgtcctttttatgcgtagaaatagggacacgaagcggcacctaaagggtgggcccccacggacaacacaggggatccgccacgtcggtattcccctagctaagggcgc

SEQ ID NO: 129147 - DNA, 602 bp, Zea Mays
gtaaggcgcggtcgggggcctgggaatcaccgtgctttggtggagttcggcggcgagtaatggcgcgtccgccatgggggcggtcggctaagccgggcgggcggacggtgatgggcatcgacggcggcgccgtctggccaaggctcgccatcggccaaagcgagcagggaagagaggaaagcgtgaagggatgcccctgcttgttgatctggtattcaacggctaggattagacgacttcataccccttcgcttagatgatagcaaccgtccgattttgatccgagggccagtggcggatcgcgtggatttaaaacctgcgctgtcggatcgagatccggtggtctgcgctgcataccgcttcatagatttaatgatctaatctggtgcgtccgtagcagatctggcggccgagattgactcataccccttcgcgggtatgttttactaaagaacccctatagttttacggaattaacccgccatcccctcggggtgtttactgagtctgacgatttattgcaccaaggcccctggactttctggtaatggtgcgctcagtccagataattagaaaatcaagtaaattcattaggaaaatac

SEQ ID NO: 129148 - DNA, 498 bp, Zea Mays
ttttatagcaaacaacagtagtggacggaggaggtgtggaagaggaatggacctcgccgtcgcagatgaactggcaccactcattgtaggtcgggtgggttgagtggcgcttgtggagatgaagaagtggtcgcattcttatatcccgagaggcagcaggccgaccagcgggtcagcggggcgtacgcgcggttgttacagaggctgttcgccgccggtggggacgcgtagcgagcacttattgtggagggaggctgttgtcggtgacataggggagggggtgcgaacgctcctattggcccgtggagacgcccgaggatgacgccatgtcgcggaaacgggggaggacgcgcagcttgtgctcgatgcggaggttgttggccggcgacggcggagcggacgttcttgttggccgacggtgacggggaagacgcgtaggggaggaggcgttgggtggtggcgattcatggcacaggcacccgcgtggatctgagcgag

SEQ ID NO: 129149 - DNA, 512 bp, Zea Mays
gaaatgcgaaattgagaaccttcggaaacagctggctgaagaaaaattgaaatgtgctattgccgaagctgaccgagacgccagtgattattggaaaaaaatattgggaaaaatggttgtagaacttcgctcttcaaaagaaagatgttatgaaaaatctgtagaatgtgtggaaaagataaaaactagcttcgccaatgttggcgcatattcaagtgaagacaacttcgtacggggcgatcccgaggggccaattgagtggatcagcagcgaggccgaggcctttgaggagattttaaatgaccgtggggacgtctgcgtcttctcaggtgcgaggggaattgcggctattttggagaagtcaggttgcgatcatgtgaaagctttggcccaagccgaagctactttatctattgatgatacgaaggacccctcggccgaagcaagcttagttggtggaaaattctttactgacatctgggaaaatggcggccgagggatggcccccgaaa

SEQ ID NO: 129150 - DNA, 869 bp, Zea Mays
acgaggaggtgcggcacggtggtgcagtactccctccggcgagcaatcactggtcgctccgtcgtcgattccgcccgatagcgtcgcggaaagcctcacaacagctcggcgtaggttcctggcccgatcctaggcttcgggtgacggcggggtgcggattatgtgacagcggcaacttttctctccctctgagctcggcgatggaagtcggggtcgtgcacacagtgcgcgcaaaggcgagtttagggctgcggcgctcgattcatataacccgaggccgcggacgatggttacgcaagatttgttggagtcaacgcccggattccacgctcgaatcacgggcatgcccaacggtgcgcgcgacgatcttggttggggatgccgcgaccgggatgacagagaggtcccacgagacagtgtgccaggggacggaatggtgcgtgatgtagcggctgccagggcgggcccgcgtgatagtggcgcgagtgaggaagtggcctgcggcttggaggagaaaatgggctgagataaggaaatgggcccaggcacagattttgccactttctttcctttttctttttattttctgctcctcttttcttcaagtttatttccaattcaaatttcaattccaattcaaaatctgtagccaattcatcttcacattaaatgttcagcttgaacatggtatggtgattatttatttatttctaaattttatttggttttgtatagtagttctctttctattttatttccaattctcccaattcgcacttttgggttaaatcccaattctcaacctattattatatttttatccattttactatgttattaaatgcacaaacaaagatccaatatgatgc

SEQ ID NO: 129151 - DNA, 1074 bp, Zea Mays
tgagtcttttggaaaagacttcaattttttcgcacttgttgtgctagtccggctgcacccttaggcgacttttgcacggagagtcttttggaaaaagacttcgattttttcgcacttgttgtgctagtctggctgcacccttaggcgacttttgcgcggagtgtcgcacgcgagggaggcttcgctgctcctcgcggtgacttcgatgtggtcgaatgccgaagaccgtcgatgcggtctttttcgacattgctttaattttttgtgggggattttcgtgtgtatattacatggctccgcctcattaaaaacctcacccctcgggaggaaaagagtgcgggccggaataaaactgtttggtgaattacaagggcgtgttagccctgaggatttaaacaaaaaatttacggagattgccaatattccaggaatgttccgggtctttgctagattgtgttgttagtctgtatgcgctgggagatgacttcgtcttgacaataaatggtccttcccactttggctccagcttaccccgtgactctgtccgggttgtgcggacaagtatgaggtccccttcgttgaattctcttgggatgactgtgtgctcacgccaggccttcgtttggacttggtatttgttgagggcctggagggcgaagacacggtctccgtcgatgagatctttggaggttagctcgtcgacgtcgagtactgctgaagcgcttgtccgtggggacccatgtttcatttcctgcggggtcatggcctccgatccgtatagcaggcgaaagggagtgaatccagtcacccgacactcggtcgtgttcagtgcccagactgcttcaggtagcaggtcggcccatttacccttcttgtcgttgaggagcattttcttgattgtcgtgaagatcttgtcgttggcacgctctacgacgtcgttggattgtgggtggtacactgaggcgaaggcaagctttggtgccaatggagaagcagaagtccctgaagtcttggctgtcgaattgtttgccattgtcaactgtgagctcggacgggactccgaatcggcagaca

SEQ ID NO: 129152 - DNA, 719 bp, Zea Mays
caacaagcaattcaccatgactacaagcttaactaaagtcatctaacgggtcggctagctagagcaacgacacagcccgctagacagcatacacgtcggcttgcctattattatcaccattcgagacacaacatatataacaatcacttacgccatcaactcttacttaacatgagttggctaatgccgtataagacttagcaaaccattttagacatcgtaactcaaaatatgggttggagtcgattaaacggtgtttcttaaccgttgctcaacttaaattggataacacacgagtcacctaaaatgccacattttaggagaccctacatgtcgagcatcaattttataacataagtgactcaacctctatcacgcttgttcgaatctattggctaacatttccgaaacaccctgtctatccttcacctttctaatcatattgcacgacataaaatatttcgatacgcattcaccccgtaagtaacatcatcacacatgactctgacttaaccatagaggaagcgatgactacttcggcatgtcaccacctctttacaggccaaatcaatattaaccacatcgatcgagtcttatatcacgtaatacttataatttattatctcaaatacaaccatatcctggcatgtacttgggacactttggttcaacttacgcaatcactactacaacgcgcttcggcacacatgtttgataac

SEQ ID NO: 129153 - DNA, 640 bp, Zea Mays
gggaagacattaaagaaatcatccagcgccccatctagtctcactttggcctccgaaggccgaaggtggaaattgttgacgctgtcgaagcgtgtcagagggctttcagcactgtttgctccttcattggaacaagagatttgattcaagaacatatagccttcaaggtatggcctcttgtggaaggctgggaaatgctgaaggagaccatcgccgactctagtgagggtggtctggtccgactaaagtataccttcagatttagggagaaatttgatgagctgaacgacgactggctgaagtgcatcgaagctaccagtgatgagctgcttggagcatactccaaggctgaagataatgccctgtccgcagcctttggtggccggggcaagaaaagattaaacagggtatttgatgctattggcttcgtataccctgactaccgctacccgctgcgaggacaagagaaacagatgaagattactgcttcggtcaccccagctgagcctgtgccgaagatcaaaaagatgaaggttctgacccaccggccgcgttacatcgaaccgaccgtggtgcctgaatttggcgcagggtccactttagcagccgaagcaacacagactgcttcgattacacagag

SEQ ID NO: 129154 - DNA, 442 bp, Zea Mays
gacacgatatggttcctcaacgagtatcagttccaatctacactgaagattttaccactgaccacgtacgatatggtggtcggcatggattggttggagttgcatagtcctatgtccgttcactggttggataagtggctcaccattccctaccgaggttccatcatcaagctcttgggccttcaatcaagttcatcacagtgtgctgtactggagctttgccacattaccacgctgccagacaaagacactcagctcgttcaagaattaccggaacagctgcaacaactccttgcgcgtttctcccatgtgtttgctctgccgcaagggcttccacctgccagagactgtgatcaccacattcctcttgtgccaggtgtcagaccagtacaaatccgaccataccgttacgccccagccctcaaaacagaaatagaaaaac

SEQ ID NO: 129155 - DNA, 779 bp, Zea Mays
gctcataacatattaggccatccaaaaaaattctcaagatcggaggagacattatatgctttaattctctgcatagattgatgcaaagccacgctaaggaggagaaactgaaaggtagaagatcgattgcaagggggcaagccatcgccgaatttcagtttggttttacccccgaaaagttttttgtaaacggatagtgaggcaaccatgtaatttgtattagagagcaggtgacaatatttagagaaataaatacataatatgttggacatagctagttaaatggttaggatgacatttcactattaaaaccaacaaccagtgccatcttttgcgtagatcaaacaaccacgtcagttttgtttaagcaaactgttaactactatgaatctacctatgaggttcccaactatatagttttgtgaatcggggacatgctcggttggacgaaccatcgtgctaacgttgatgccggaggaattcaccagagcttagctgacagaagagataaagtacaatcccagtcaagcatgcgagtcaactcatcagagaatattttgctgccagtgaggccatcttgagaagcgactggcacactgaggctactggcacctccggtacgacgctgctagtaaaacttatttcaccctcctataggaaagggaagagacaatattctttcgtataagcagacatagagccaacattctttcgcataaagttctgaaccgatggctatgaactattctaaaaattgacttgctaatttgcatatggat

SEQ ID NO: 129156 - DNA, 346 bp, Zea Mays
accgggtgcgctgttggtcgtgcctggcatcacactggggaagacgtgttgatggtcgttggttcggtgatcaacggtgtagcttagttgctacacatacctgttcgcggagtgatccatgccgtttgtggatgatcggatggatccagggtgattgcgattatttaaaacatgagccgttggatctaaatccaatgctcctcattatggagctgatctaatcagtgtcgtaggtatcagatcagacggctagaaataacatatacccctttcgccctggcaatcttttaaaagaacccctatagttttatggaattaacccgccgtccatgcggctgtaactctg

SEQ ID NO: 129157 - DNA, 308 bp, Zea Mays
gtgcattgaagccacttgcgatgagttacttggggcgtattccaagaccgaggataatgctttgtccgcagccttcgggggtcggaataagaaaaggttgaacagggtatttgatgctattggcttcatgtaccctgactattgttacccgctacgagggcaaggggtaaaaaagaaagattgctgcttctggaaaggttgctgcttcggccatcacaactgagccgaagggcaagaagatgaaggttctgactcaccggccgcgttacattgaaccggccatgatacctaaatttggcgaaggggcc

SEQ ID NO: 129158 - DNA, 531 bp, Zea Mays
ctcggcacgttggatgaggtccttcacacgctggtgtagttggtcgcacaaattgtcgaggctaagcacatatccagacatagcgacaatagtggggtctttctctgtcgtggtactccccaagttacagatcctcgcagcccaagcaggacggttatgatccagtggagggaagtacttcatgggggtggaaccaaagtgccattcaaacatctggcataagtacttcaatgctttccgagccgcaagttggacgaaatcttgcatacggcttctagtggtggtgatgttccagggttgcatctccaagtacttgtcacttacgccaatgtggacagtcacctcacaactttcagtaccatgctctgtgaactcacgactcacgtattctggacgctctggaatgcccaaacggatagttgccgcataaagcaccttgggcaatccatcttcattgacgcagtaggtggtgatccaatcgttgtccatctaactttcaaggatataaggttagcataataaggatatggt

SEQ ID NO: 129159 - DNA, 589 bp, Zea Mays
ctgaaaaacgcttattggaggaaatccactccaggcaatttggggtccatgcatcatcgagaacactcatcgggaaggcattcagggccggttttactggccaactgccaagaaagacgcagccagcctagttcagagatgtgaatcctatcaattcttggccaagcaacagcatttgctagcacaacaattatagactattccagtcacctggaccatcgcatgctgggggttggacatggtcaggccattcaagaaagcttagggaggatatacacatgtgttggtagctattgtcgagtttacaaaatggatagagtacaatccaatagccactctgaccttggccaaggtggtagagttcatccacgagattatcttcaggtttgggatacccaacaacattatcacagatctaggctcaaacttcaccaatgttgaattcttcgacttctgtgaacaaaagtgtatctagctcaagtatgcttcgttagcgcactccagggccaatgggaaggtagaaagagcaaatggaatgatactagaagcactgaagagaggatctttgacaaaaaacgagaagtttgta

SEQ ID NO: 129160 - DNA, 1597 bp, Zea Mays
cattatttccatcatccttaaagatgctaaggcaaagctacatcctgggtgtgatgcattcacgaagctttcctttcttgtaaccatatttcatttgaaatgcttacatggatggactcaggagtcatttacatcacttcttggtgttctttctgccgcactccctgaagaggcgaacttaccaaaaaactaccatgcagcaaagaaaataattcgaggactaggtcttgattatgttaagattcatgcatgtccaaaggattgcatgcttttctatggtgaccaggcgaaacaagaaacttgccatatttgcaacacttcacgttgggcagaaagaaaaaagaagggtgaagcaacaaaaacaaagggatataagaagaaaccagcaaagatcttgcggtattttcctttgataccgaggctgaagaggttgtatgctaatgagcaaacagcaagcgacatgcgttggcatgatgagggtcgcacaaaggatgggctgttgaggcatccagctgatgggcaagcttggaatgattttaatttgagatatcctaatttttctgctgattcccgcaatgtgaggctcggtctttctagtgatggagtaaacccttacagaaacatgaatattagtcacagtacatggccagtactgcttattccgtacaatctacctccctggatctgcatgaagcaaacatcttttatactgtctatgatcattccaggaccagatagcccaggaaatgatattgatatatttctacaaccacttattgatgaattactacagctgtgggagggtgttgaaacttttgatgcctcttcaaggaagaagttctctctcagagcagttttgatgtggactttaaatgatttccctacattaggtaacttatatggttggagcacaaagggaaaatatgcatgtccatcttgtgctgatttgacgaggtcaatttatttgaagaagggacgcaagtgttcatatatgggtcatcgtcggtggttgcctcagtcccatccctatcgtcatagaaggaaccacttcaatggtatggaggagaaagaactagcgcctgtaacaatgagtggaagtgcagttttgaggatgatggatggtaaaacttttttgtatggcaaaggaaaggttcattcggaggaagaacaatcatcagggcacaaagctaaagccaaaaagaaaggaaacgataagaaacaaggcaaaaagaggaaacgggtccaaagggaaaaacaacaaggtatgaaagagaagaaacctgaggattggataaagaagaggtctatattctttaaacttccatactgggaacacaatctgttacgacacaatcttgatgtgatgcatatagagaaaaatgtatgcgataattttgttgggacattactaaatgtaagtggtaaaacaaaggacaatctaaaagcaaggcttgacttggaggagctcggaactcgacctgaactacatccacaattggataacaaaggaaacaaagtaatgcctgatgcaccctttaccatgtctagagatcaaaaggagattctttgctctgttattcaaaatcttaggacaccc

SEQ ID NO: 129161 - DNA, 629 bp, Zea Mays
gccgtggtgtattatattggtggtggcggaaggtatttgattgaggtgtgcgggtatatgctgtaatatggttatactcgcaacaaagaaatatgtatgtcttgttaacacaacgtttaggttgttgtcgtataaccgtgtgaagaatgctcctgatggtcatgtgactaaagtgtgatgtagtggcaagcgagaagtaagttcaatatttttaaacgattagttgatagcacctatcgacatcgtcatgatttttgttgtatggcggatcaatgccttgtcgtcatagtctcggggaattttcggaaatgtgctagtgttttacggatggggtgaatgtacttgtgatgtcttagaataactgcgtgtcatacgagtatccaaaaatggtgaaagttggtgtatgttggtgattagaaaatggtcacttcgttagccaatagcaagcttatgccgagatttaaaatatgggcaagttaaattgaaatcatgcttatctagacgtgtggttaaataataataattttggcttgtgtagtgaggtggtgacaggccgaagtagtcatcacttcctctacgtttttaagtcgagtcaaaatgcggggtactagtagtacgctaggcaggcg

SEQ ID NO: 129162 - DNA, 290 bp, Zea Mays
agccctttggttcaaaaatcgtctatgtgtaccaaaaggagaggcacgagaagtcctgctcgaagaagctcacaactcagcctactccatccacccaggaactaccaagatgtacctggacctcaaaaccagatactggtggagaggaaggaagaaagaaatagctcagtatgtagcccggtgtgacacctgccagcggacgaaggccgagcaccaaaaacctgcaggcctattacaacccctcccgatacctgaatggaagtgggaagaaataggcatggacttcgtaa

SEQ ID NO: 129163 - DNA, 557 bp, Zea Mays
ccgctatgtctcttgacaatctttatccatcactgctgacacaataacaccaatatttcttccgtaaggaaagattttcagctcacgagccaaataggacataaattagtcattgtcggtggcccggggaatagggtccttcctatgccatcgaccaccgataacctttagcatgcgcgaagatgtttctcgcagttcgggcgaagtcataaatcttagaagccttcggtccatcttttccctttctgtacctttcacatctattttcctctttcgagttgttgcgaccacaacctttcccttcgagatgccctcttcagactgggtcttcacctatttccctcggtcgtccccagcttcagcagagtccccgtctaggtaaggaccgtaccgcaagctattcaattaaagacccggttcaacctgacgttggtaccgcgtatatcctagctccttaacatctccgtcttcggcacatatttacctacaatcttcatagcctccgactccacctcccgaaagaaggcggctacatcctgccctcgtagatggatgcc

SEQ ID NO: 129164 - DNA, 330 bp, Zea Mays
cgtccatccgagttggacggtggggattaaatcaggggtagcgtttgggtggagtcaatccgtgatcgtccgttctgcgattgacggtcactattagatcgcgagtgtttaaaatccgagccgttgaatatggatcggagcgcccgtgatgcataccggtttgggtaacgccaggcctaatctaagccatccgcgcatgatcgtgcggctgagaacttatcatacccttcggtcgtgcactttttctaaagagaccccagagaaagacataataaacccgccatcctcatctacggtgctctgtgtcttgggaagtcttgcgctttaacc

SEQ ID NO: 129165 - DNA, 328 bp, Zea Mays
agagccatgtctacaagagattagtaaaaataggagcggagagaaagatagggggtaggaaaacgaggatctcgcccaaatccgaacaaacttaatcgaccacacgacgcaaacaacacaagaagaagctgacgacgggaataatattgtagggcgaacgaacacaaatcaacaatccacacaacagaagcgcaacgaaagaaaattaaacaaatcaatccaccacaataacgaaacgacgaacgcacgaatgcatatatacagcagcgcgcagcataacatccatagctagctagcagccggatcccggtttcgtcatcactgccgc

SEQ ID NO: 129166 - DNA, 423 bp, Zea Mays
cagaattctcatctccggattcttcatggttaaatccttctggatcatgatgacgtagcctttgacctcctgttgtggacagacattcattcaacatcctttccatggcccccaggagtgagtcggccatgtggtgcaattcatcccgagagacagggggctctttgtctccatggtttccaccgtgaatacttgaattggaccctgccatgttagagggaagcaagagaaagtagaatatgaaagtatttgtggaacactcaatctcacctcttacttacccgagctctttcctgatctctaggactgtgatggtgccgatgtgacagcttcgacagaggtggtagagcggtcgaaaggatcacaagtcgaacgtcccggttcaggtttttagtggagctagaggaggctgatcaaggtggg

SEQ ID NO: 129167 - DNA, 274 bp, Zea Mays
tgaaggatgatgtcagtcttgcatccgaggttacgtcagggagcgggcatttaactcgcgccaaatttctcagtggcccatttcacgagctgggaagttttgcttattgaaaccgacatggatcatactccaactccagtggttagaagatctagaggcagttcaggtgagcagctaaaggacaaaaccccgtgatttgaccacaccaatggagagccacggcctcactgaacagctctgagtttaaggctttaaaattctaccgagaaaaaat

SEQ ID NO: 129168 - DNA, 454 bp, Zea Mays
ggatcttccagaattaaatgggaaaaatgcatgaggagacgcatgcgaccgagggatcgagcaacttgcatttgtgccattgccaggacgatgcatcttgcttcctcggtgcaagctaaggcgctgcacgcgtttatccgacagactgacacacgcagacgacgtaccggtggccaaacatgagaaagactaaaagactagttaatactaactgctggatgcagcccggccggccggtagctgcttcacgctaggtgtataagcaattgctaaagtagtacacactagcatgcagttgtactgtccatgtttgactgatcagccaaaagtttcatcgtcctgtcaagatcacccacacatttctatttgttatatggcggtgattattcactgttcatgatttgagactggacccttgtttatgtgtcgaccgactgcataatctcttagctca

SEQ ID NO: 129169 - DNA, 430 bp, Zea Mays
gacacaaacagtaagattgtggaaatgctctagaagttcagccatctactttacattctcctaatcatagtcattgggatgaccgcgtccttgcctctcttcagatagctcaattacatagttaagttcctatttagccattctcatgaacacctcatacacaattgtggccttcaacatttgatatgtgtaattccatcttgttgggacatcaagcttcaataatgctttgcaatccactttgtcttcctctacaatttccttgaacttgatcaatcttgaagtcccactttttatataccgaactgcatccctaacacgttgcatagaaagatccaattctttcaatccatctagcacaattaagttcacaatatgtgttgcacacctgatgtgtaagtatttgccatctgcaatattggtattctgc

SEQ ID NO: 129170 - DNA, 312 bp, Zea Mays
gcggcattggatgtggctgcggcggaggcttctccgcgtgtgatgggtgccgaagttcttcccggtccgagtgctgggtgtaggtggcgaagggcggtggcgaagcgtagagtgagtgaggtcgtcttcgtgtggcgaagggtggtcgtcttcgtgtggacagggctggcaagcgggaattgttgtccttgccagctggggcgagtgtaggtgagggggagttgcgaagcctctttgagggtgaggaactgaggataatgctgtttaactacagggagatgggtatcatcccgaaggttgaacgaatgtaag

SEQ ID NO: 129171 - DNA, 528 bp, Zea Mays
aggtagcatctctgacggcaacattgaaggtatcccaccaggctaaggccattccgaaaagttgatgagtagccagttgaacacgctgattttccgggcatccgatggcttctagcttccttttaatcgtgcgcagccaatcatcagcatcgagggggttgctagatccgacaaacgtgggaggcttgagccttaggaaatctcctatcctgtcttgtggtcttccaccattcgggcgttgattttccagacttctagtgaggacctcgatgagtcgggtttggttggctagaacttgggctaaatctaagggtagttctggaggtgcggggaggtgggtctcactttcttctctaccggcttctctttcagctcttaggggaaaccctgctccaatcctggaggtggtaggcgtggttttatccgaagcatctgcaagtgggagagagtcactattatgcacatgccaattttttttccaaccaagttattttattcattacaccaatacattacaagcatacaact

SEQ ID NO: 129172 - DNA, 342 bp, Zea Mays
ctcaactgcattcaaaactgggtcgacctcattgacatttttgtcgaaaatttccaaggtacatacatacgccccggcatcccttgggacctaaaaaattgttgacaaagggtagttatcaaaacttgcaaaattgtaatggaactcatccaaatagcccataaatcaaagggtgcaaccctccaactttgctaaccttaccttgctcctctccctcccatttctatccccctcaccccagcctgcatcgaccatgccgctaacctcccatcactagcctcccctaatcccaatcgaatgaggaattgttgacctcattatcctcgttgcgcaccctcaact

SEQ ID NO: 129173 - DNA, 507 bp, Zea Mays
cagctccactgccccgccatgtacggtaagaccagtgatctcaagttcaccatagcctcttcttcgggtagagacttctgggataaagtatcgcgctccaagaggctgatctggtggggctcatcggtcgccgccgtgggagtttggtgccgccgcctgtgctgactgggggaggaagaagggccctcaccgtcgatccggttgcggacggctggatctgtgctttggataccgcttcgggtgggagaaacgattgtcgttgatcctagatcgtatggccgattggggcactcggggtatgaccgtggattgaaatccaatggccccaagtgcataccggttcatttaaatgataggactgatctgggacgtccagatcagatcgggtggctaggacatgttcttacccctttggccaggacgtgttacaaaagagcccccaaggatttagataataaacccgccatcctcggcgatgttcagatcattacaaccaggtccaaatat

SEQ ID NO: 129174 - DNA, 357 bp, Zea Mays
ataattcacaatctgaaggaagcccaagcccgacagaagagttacgcagacaaacgccggatactcttgtactttctagttggagattatgtctacttgaaagtttcaccaatgaagggtgtatcacgtttcggggtaaaagggaagcttgcaccccggtatattggtccctttcctatccttgaacaatgtggaccagtagcataccgacttcagttacccgaaaacttgtctacagtacataatgcgttccacgtgtctcaattgaagaagtgtctttggttcccgattgaaccattgaagtaacagatgttgccttagaaccagacttgacatattccgagcatcctgttcgag

SEQ ID NO: 129175 - DNA, 826 bp, Zea Mays
gggaagtttaccctcaccgtcgtaagggagtagaagaatatgtactcccctgcatcttctgagggtgtgcgtgggggaataatcagttaatcaccactttcacgttgttgaggcagttgtcgagatccacttaaggagcagctaaaccttatcaaatatctcctggttcagaacatgcatgctcaatgatgaatatagcatgcaaggagcaaccatagcgatggactaaactagtggatatgaacgttgtggttgcttgaggatagaagaaagaggttgtgctcgattgatgagtgtaagggaatgtgcgaactacatcacctaccaactatgccgtacttagcgacatgaactcacgtattagctattgcatgacaacatgttcaccactatgacacttacgaagcgtgtaccacttacgaatcaacaaatgcgacaagatagtagtagataagtctatgcaagatggggcccaccattctcgaataaatataacgctccacttccttatgctataaagggaggggaaaacaatattggaagcggttagggggactaaatgacttttgggttttctaagttgacctcttttaggctgaatttttccacttgttttttcacacccccatacatctatacatgaatacatccaccatatagaggatgtagagtattgtgctcatatagtacaaacctaattatatgtgttctatctatcatgatatgtgccttaatctaacttgagccatacttacgctcatttcttattattatttcgatttgttctattgttattggtaccttggtgttgcacagtcatcaccgt

SEQ ID NO: 129176 - DNA, 613 bp, Zea Mays
atggcctgtttcaattgattaaaggcttgttgagctgttggggtccatacaaattgtttagtacgaagcaaaccagtcaggggtcgagctataagaccataatgtttgatgaatttgcgatagtaaccggtgagtcccaaaaaaccccgaagttcagtaactgtagtgggaatgggccactgtaacatcgcatctgtttttgctgggtcagtagcaacgccctcctgagagataatgtggcccaaataatgcaaagaagtttggccaaaggagcatttactcactttcatatagagctgatgcagtctgagttgagccaacacttgctgcaaatgagaaatatgttgctgcatagagcaactgtaaatgaggatgtcatccaagaaaaccagcacgaacttccgaaggaatggctcgagtatggtattcataagacattggaacgtagccggggcgttggtgagtccaaatggcatgacgcggaattgaaaatgaccatggtgcgtcttaaaagctgttttgggttcatcctcaggccacatgcggacttgatggtacccagatctcatgtccaacttagtaaagaatttggtgcccgccagttcatcgagaa

SEQ ID NO: 129177 - DNA, 618 bp, Zea Mays
gatcagaccatacgtaggtaaccaatcagacgctaatagattatacctttggtattgaaggatgacgatattagggcaatcaggtagccatgatgtcatttctttcaagttcgatccccttatggacatccaatcgctgagggacataaggacgggttggttggcaactagtgaagcctctccctcggattggccaatggcggactggtgagtctgccgcgagatggcgatgatgtggcaacaacttgcgggaggtagcgagggcaggtgacgacaagggacaaccattagccattgctacattgcgacagtgtggtgggactttagtgagatagcgagggtaggctgttctatagaaccaaggcaggattccatcgatagtctgcctgcccattaatgtggactaggaggcaaattagtgtcactgcatgcagaccccgacgacgtgacgagctgacgagtgatgtggagacaagtgggatgacatctaatgggttaagtcacccactaatcgattagtcaattatcaaagaagcaagcgagccacgggtgagctagccactagaggagggaatcgaacaaatcgggtgtggaagtgggccaaatagtggagcgtta

SEQ ID NO: 129178 - DNA, 620 bp, Zea Mays
ctgccaattgagattctgagggtacatattgaaggtcaatagtcttctgctgacaatgagaccgagtaaatgatgcatcgacaccaatgtgtttagtaagttcatgcttcacaggatcatgagaaatctgtatagcactcatgttatcacataatacaggtgtaggagtgtcacaagaaacaccaagatcagccaatagccagcgcagccaaatgatttcagcagtggtagttgcaagtgcccgaagttcggcttcaacactagaacgagatatggccgcttgcttcttggatttccaggcaataggagaggatccaagaagaatacagtaacctgtagtagaacaacggtcaacagggtcacttgcccaagtggcatcagaatacgcatgtagctgaagaggactagcagaatcatagagtaaacatcttgattgtgtcccacgtaagtatcgaagcacacgaagcaaatgaccataatgaactgaggttggtttggatacaaattggctcaacatatgaacaacatgagcaatatcaggtctggtgatggtgagataaacaagactaaccacaatatgacgatatcgagtggggtctgctagaggtgtcccatcctgc

SEQ ID NO: 129179 - DNA, 602 bp, Zea Mays
ctaggaagtgagcgtatttggaaaacttgtctactacaaccaaaatacagttacccttgctggatggaggaagccctgatataaaatccatggtcactgtttgccaagcttgttcaggaataggtaatggcaaaagtagtcctgggtatttgaccctctctggttttgcctgttgacaaatctgacaaccactcacaaattcacggatgtgttgcttcatgcccggccatgcaaaactacttttgatcctccgataagtcacaggaaagccagaatgacccccaacagcactatcatgtagcgctgacataaccatctggtgtaattccttgtttgctcccagccaaatcctacccttgaaacagatgactccttgagttaaggtataatgttcccgttttgcaccagtggtcaaactctctattaatttctgggcagttgaatcctgcatatatccctgagtaacttgtcgtagccagctaggtgttatggaagacacagacaacccattcagctgcatggttactgaatcttgattcatgtctggccgtcgagacagagcatcagctaccttgttgtcactaccctgtcgatactgaatt

SEQ ID NO: 129180 - DNA, 401 bp, Zea Mays
aaatattgttatagtccttaacgttgagaccatctataatttttccttcataaaacttttgatttggaaacttgctgatggaagggtgcattctatattgaatatttagcatgtgctttgggaaatcaagtccacttaatctctcaaagaggcttcgcccaaacctgttctctttagcaatcttatcagtaaagagaaagtattagcagtctataaataattattggtaacacaaggaatcaaggatacattcaaatggtcttataagttataatgaatacacaccgtgctctttaccactgattgtagttgcttgtcatcccaacaagcaccacatgttttatcccactagttgcaaaagggattaatgattcacattcttttaagtatgctgcctcatc

SEQ ID NO: 129181 - DNA, 359 bp, Zea Mays
aatgggtatgaggtatcaggacaaaggactcccctaaccgtaggaatcgaggtagacaaccctatgcttgtttgccagcccctctagacaggagaggcaccttacacatggagaaagcctttagaatgctcacctgttgtggtgcatagaaaaatatagcatctgatggtcaaaataaaaaccacactaaagtgctagggaatggttgcaacattgtcacacctctcctacacaacaaaggacctagcagtggtaagacaaagaaaacagaagcacgcatggtggataaacactaggttagagcccagtcgatttgtatgccccatgctctcctcggtatataagtaaatgcatggact

SEQ ID NO: 129182 - DNA, 294 bp, Zea Mays
caactgccaaatgcactatggggacatgggctcccctagctcttagatcattcttgttgttagaagcactctatgatggcgccatgtgtcagcttcgattctctttagaactatgtcatcgacttttgaggcttaaacccggcgaaacatgtgaaaccgtcgctggtgggtttgatactcaaccaccaaatcttcgtagaatcgtaggtagtgtaatccatatgcattccccacatcatggacacatattccgctggtcctcaaccacatcgtcaacacaatccactgtattat

SEQ ID NO: 129183 - DNA, 640 bp, Zea Mays
agttggatctcccaccacttcgatatctgtctgccaggagctaccgaggttgaggttgagaggcatgccaggttgttgctctagcactttgtagctactttcatgttccccgatgcttctgtcaacaatatcagttgggaggtgctgcaaatccttaatcaggagtgggagaacataggtcactacagctaaggcgacaagatccaagcatggacgtactgatagctctacatagcctgtcgtcaatacacgacgaacaccaacataggtggttgtgcttacctggtttaggtgtggtgctgggagtgttggccagaaggcctaaccttcgtggtttgcctataaataattgtaatgtcactgatttttaatcacttgcatcatttgattatatatgctaacataatatgcgtgttacttgcagatctagaatcaccaagatggaacccgtttggtgtgactatagctctagaaagaggtaaaaatatgagagggaacccgcaaagatgttacagacagtacatggacttcctcgacgtcttgacagaacaataggttagcaacttgcgcttattatcatagttaacacgttgtttccctgatattatttctcattgtaagttatttggatgccttgggc

SEQ ID NO: 129184 - DNA, 549 bp, Zea Mays
aagtacagtagtagtttagggatctcgctaggctccggagcgcgcttgattggggaatcgtgtattggtaccgctggccctgcgtccgtcgtatcgggtacgatctggatccactgtgcgagcaccgacgacgcggtagcttttgtagaggagatgcggctgctttgttcggaacccagctgcgcgtttgtgacttctgatacctctccgagttgagcttacgaactgggagcaatcgaattgactggttcagggtttctgcgagggttttgatattgtgctggtttcatatttcgttggttgaaccttagttcggattgctgcaagttgtcaatctcggtgctctcttcgcgagtctcaacttttttcaagcaatgaatattctgtggttggtggttacttggttcctgactcagatagtaccatttatggctatgggttggacattgctgttctgcaatttgcaaaggtccatccttttgtttttgttcattgcatgctagtatttgcacaaaacataagataaagaaaaggaacttctagctggct

SEQ ID NO: 129185 - DNA, 578 bp, Zea Mays
gaaagctagcaccacgtttcgtcggcccctaccccatcattagccgagtgggacccgcaacatactgccttgagctaccagaatctatgtcagatattcacaatgtgtttcatgtgtctcagctccgcaagtgcctacaagtaccagaaaaccacatcgaggcagaggcaatttagattcaaaaggatctccagtaccgagaaaagccagtgaagattctcgactcagcagtccgaaggacccgcaactcagaactgagactctgtaaggttcagtggaacagagatggagaagaggaagccacctgggaaagtgaggactctctgaggaaggaataccctcaccttttctcgagccccgtttgaatctcgagggcgagattcctttaagtggggtaggtttgtaacatcccaaaattctaacccaggtttgaaaccctaattccccccttcttatcttctatcccaaaactcccttagatttttcccatcatatgcatacactttgtttgatcacaagcacctcactttgattttattttccaacacctagattatccactaaatgatttgttcaaa

SEQ ID NO: 129186 - DNA, 740 bp, Zea Mays
gtccacggggaagtggtgttttacggtggcggagaccaatttgggggaaaacccgaattgcggagctacggtgagcgagtggagatgagagtgggtgctatagcttgacgattatatggcgcaactatccccgccctcaatttataggcttcaagggcgggggccggtgaattttgaggaggacgcgcggcggccggaggtggaagagagcactggtgcacgcgagttcgtggccaacggcgtggcaacctccccggcgatgatgggatggcccaagggagtcacggcgacacggtagaaaagctaggccacgcggcggaggaccgagacacgatgattcaccggcgagcttatctgctccagccgtagggtagagggtgaggcacgggaggccgtcggagtggcgtccagctcaccggcggtgaagattatgcttatctgatggccacggcgcacgaatcacggcgagcggcaatcgacggcgacggccaccggcgatgagcaggaggggtgaatcgtgatcttcatcagtgtagatctactgtaccatggccagtttcagttttttgttacctgcctgacagagcaagttcaggccacattttctctaaattttccttagcaactcatccaaggctctgcagcaaaattgtagaccaatgttccagctataatgttgccataacaactatagccaaattccaattaaatcatacttgaatttgtgcccaaagttcctg

SEQ ID NO: 129187 - DNA, 673 bp, Zea Mays
gtccatctcgtacctggctttcttcccatctatggaacacgctgttcgtgccttggctgctggacaatccatttccataccctcccctccagctgcatcttaggtggtggtcacgtcaggcgtcggcctctggtggaggtgccctgcttgtgcttatggatgttgaacttggcgggattccagcacacctctgggggacttatacggtagagcatctactcggtggacactgcattgttcagggattgcatccggattctgttgatgggacgaacatgtcggttctgaaactgaaggcttggggtttctctatggattgcctgccttctcgctgtgatctccatgttgaagagccgacgtctattggagaagatggatcctgctttcgtcgcacattgatttactctgtttcggtgaaggtggctatttcggttgcattgttggttgaggagcagcctctattttcctccccagaagatgatgaagatcgggataacaaacatcagcgtcagaggcagcaccttccgaatcatcagttctcttcggtccggacctccgtacatgcacggttgggaccgcgtatcgctccttcttgtgggggaggtagaccagttgatgccgctcctctcccgaattcctcggttgatgagttgcaggcgcctgttccctccct

SEQ ID NO: 129188 - DNA, 970 bp, Zea Mays
tgataactcattattttttttgataagacaagtgattaaagttttaaaaaaatcaacagtgtcatatattaatgaacggatggagtataaaagatctagttttctttttttctatcatatctgtgagatttagtgttttcattgaaatcatgcagtactcggtgtccggtaggaacccataaatttttttgtgagataagcgaccctccccaatggaaagtgatatgttaacgcacacgcaaaattggtatagtatattgatctagtcgacgtccacatatcgtcgtcgaccaccagcaagtgtatgaatatcccaactttgccaatctgttcacgttttggttccatatatatatatcatgtgattacagacagttgtgcgcctatgtcatccactagagacccatgtatttgttgttgggctggatcgcacgtcgattgctcttggtccaagtgggcgatggctcctcccgcgatcaacatcttctgttgccttccctagattgaagggtttttgacatctctccctcgagatacaactcgtccccaagctaaagaggccgaaaattgttgcttgataagttattccttttcccatgtagcaagcaacgtcggtgagcccgtctaacgaatcaatagctggggcgtcaccttgtcattccaaggaagttgtggacattcttaacacaagttggtgtagggcactccttgattatatgtatctttcctagatcggtggcaatgccagctgcactcacgatatgtcccaaaaactcaagtttgtcccgtgcaagcaaacaattggattgcttcaatttaagcttgttttgactaagtaacagaaacacttgttcgagatgtgtaacatggtataccagagtggcactatacatcggcacatcatctatgaacactaccacgtatttccgcaaccaatggagacaagacatggttcatgaagtcctgaaag

SEQ ID NO: 129189 - DNA, 777 bp, Zea Mays
ctgaggtctatgagcctatcccatgtgtgtgttggtgaccaattcaacatggttttacctctcactctggacctggatggatcaacagaagctggctactaggtgacacacctaattagacgatctcatactatgtttttacatgttctattggttttgtgataagtcaaatattcctacttttgaacatcatttttaaaaattgtatatactatatatgtttaagattactattacgagaaatagtttaatagtatatagttcacatgttgtgaaactatatgggttttttttaaattgatagtcaaagttaggaacgtttgactcaggagaaacctaatacaacatttaaaaaaatggagttagtagcttgatcttgacattacgaaacttttatatagatcctaatatgtttgagatgccatgatgtttttcattttttctcttggacttgtcttccacggggcatagttttattgggagcacaacatgatggcattcctttcatgctgttgggaagaaaaacgcttgttgacgattatgaatacatcatgcttggaaagcttttcaaggtctcaaaagacagtactaaagacggtaatggcaattcatctactaaagtgtatgcgttctcttgaacttgaggaatgttacttgtatatgatgctacactatttattgtgacactggttcgtttccctgtccttctcattttttctgtttcctagattatttatgtacggacatacaaaggcgaagggtaggcataatacagcg

SEQ ID NO: 129190 - DNA, 412 bp, Zea Mays
aacctaatagaacccacagaaatgctcttcgagcctggcaaaagcttgaataaaatgcttaatcacaaattttaaccatacaattttctggcattaacatgcatatacatataagaataccctcaaatctaagaatagaaatcacacgaacaatcctagcactatagcacattggttcatctagaggcgatcgtgcccataaaaaaacactccagatatggaaaagaaaataccgtcaaattgagaagcaaaaatagcaacaattacataatgcatgagaagtcactaaatggggtaacctgttatgttaagtataatattaatacggcctaataattcagaactgcaggcggtacaaactaataacaacagagcatagacgaaattaataattccagcagcgacgagactc

SEQ ID NO: 129191 - DNA, 299 bp, Zea Mays
cttccatgcattcccatctgaagggtgcacgattaggtcatcattatcacagacaccttctttgtgccatcgcatgtgcatagcggttttttagatagaaacatccgtttcactcgagtagtttgtggcaagtagcggagctacttatgtgcaacatctgtcattgtccacattaacaacatccctcatcattaacaacttccacaaatctagattgtccacatttcagacatttttctcttccgcatgctccttcatgaaaagcatacaattatttttgcacacatcaatcttctcat

SEQ ID NO: 129192 - DNA, 697 bp, Zea Mays
ctctcactgatgttggagagcaacatgatgcaagcttcttttgtagtgtgcatttaagtttatttatttttcgggagcaaggttactgcttattgtaacatcttttgtttacctccaatagctcggagcaaggctatctttgtgtcttcttggcactcacgtcgtcactgcaggtttcgatagctccaaaccagagctaagaaacatttccataactaaacaatgggtcaaaaatatagctattttagctaaatgggttatctcgatcagatggagatcattaaaacacgatcttacaaaagcgtatgccgcactcaatctctactactctatatgttgttagtgtaggcgtccacaggcgctgttctgcccgccgcgatttctccacgcgcaatccgccgcgccccccgcgccaaatccgcgcgcaatccgctgcccgccatccgcgcgcgcaatccgcccaaatccgccgccacgcccctgctcgccgatggaaggtctccacgcgcaatcctttccatccctttcctcacggtctccgccctaatcctctccctcctggcctctcactctcccgactgcctggccgcctccctccctgtccatgccacacatgctctaacgcaccaacgatgaggggagcgccgccctccgtcgcagattgggatctccctcgcccgcccgacggcaccctcgc

SEQ ID NO: 129193 - DNA, 321 bp, Zea Mays
ccgagttcttgttaccgcgacaatggcaaacagacgctctctcagagacgcggtgggttaagtgcgcaaggggagggcgaggtcaaggatgttcatataggcgcgagaaccgggcgggggttagctgatccttcggtcagtcgttgaagtccgcccatcgagcggcgcacagcccctagaaattcaccggggtttgttggggtagccgcgccatggcggtagagacggggttgcggagggggtcccacgccgtggtgacatggcgagagcctagccacatgggcccgctagtcagcgcatgacgtgctccaagacgggcag

SEQ ID NO: 129194 - DNA, 631 bp, Zea Mays
cttaattaaggactagatcatcagtaatgaaccagggtgacaaataaatactagttttgtataagcaaaaaaaggacgagctaggcctgatgtggtgcgtaaccacccgtgtctcccggacgaatgaccagtagcctatcaaccctcctcgccctcgtcgtctgtctcatttgcccatgctattgcttacacaccgcacacctagcttctctcccatttaagtgaccgaaattgcagatgcacttgcctcttctgtcttgtcttctgatgtgtgtgtgtgagagagagagaaaagatcgagggggtgtgcaaatgcgaatgcggtgccgcgcgcaactgcatgcatcagagttagttctataaattatgcccatgtatatttggagcagaaaatgtatgcatatatgagaaaacgatggctggttgggcctgtcgccctgtctctgtcttctccgcggcgctagcaggggagtacgacacgcggcgagtcgcaggaacacagctatcatgcatgccactttcgaagagaggacgacgaagaacagaatagaatccaagggaaacagattcgtcagcttgctaggaagaaaagagggtcctatcctatcattcctccctaactcctttcaag

SEQ ID NO: 129195 - DNA, 447 bp, Zea Mays
gtgcgtgcatgtcaactgcgaaaaaggagacattgtcaccgctgttcaatggggggactataggggagattcaatcattcatgttcttgggtccattgctcccccccaccatgtgagtaagaagcaaaagcaacgaacgtctatcgtgtctgcaggcagcacgcaggtgacaccgattggggagatgcatggcaggtggcagcatagctcttgtttttggttggcatagcggtatagcacagaagggtgacactatgggtctgggacagagtggttgaagtaaaaagtctgcatgtgggggcttgtatgtaggtggcgctgtctatgatcaaatcttttgactcacaccgacgttccgcgcgtagccatctcttgagtttgaagtcgaagttaagccgcgtcttgcagcactggtggaacgtgctttagcatcttcctaaattaaaa

SEQ ID NO: 129196 - DNA, 819 bp, Zea Mays
cgagggagagctcttcattcttggtagtcatcgacataacgaaggggtcataatcagccggcagccccgcaaagagataggagagaatctcatcatctctaagaggagccccagccaccgctaattcggaggcgagacccgtgatcttgcggtaaaaatcagcaacagagaggtcgcgcttacgcgccgtggcgagttcctggcggatctgaatgacccgcgccttggaggaggaggcatacttcttctgaagggaatcccacacagccttagcagatgtggcgtcccagacatcctggagaacctcaggagtcatggacgaaagcaaaccgctgagcagctgttgctcttggccataccagcgctcgtagtcggaattgggggcatccgtcgtgccggccgacgtgataatcgacttggtcttgagagtagcggcattggatccatcgaggaaactgagaaacttcgaactgcgaagatatggcaggagttgtgcacgccaaaggagatagtttgtttttgtgagcttgatggtgacaacttggtggatgggaattggtcgagaggaggacgatggcgtggtggtcatggcaacgtacaggaagagaggcagcgagagagatggaggaggagaggaggcggtggagaaaattgtggagattgattaggatttccttggctctggtaccatgttaagataatggaaagctacaccatcttaggtacgcccaagtctctttatatagaaaaggattacatgcatggatacaaccgaaggcaacaacagtgccgagattctaggcgagataaacaaccctg

SEQ ID NO: 129197 - DNA, 299 bp, Zea Mays
gcgaatcttgaaacttcacaccctcgtcgtgccagccgttcccctccttcactgcgaaaaccgcggaattcatccgccattgccgacgccgtgggtgcttggagctcgtggggggctcgcttcgcgtctggggggcttcggcggagtccctggtggagctccgtggccgattgggtgaagccggcctctgcgttgcctggaatttgtcaccgggcacagtcttcaccgcgggcgcgcctaccatcgtggccgaggttcgtctgcgcagcgggatcccggtgagctaccctatgttgttc

SEQ ID NO: 129198 - DNA, 550 bp, Zea Mays
ttggagttgaccgcgtttatacttgcatattatgattccaacggtttcataaattgacacgtcgatgcgacttggtcggtgtggtgtagtatttgggatttatgattgtatacttcgatgttaacaactacatatcatttgggatttattatattacgtactttggcgtgggtcttgattaattattttttgtaaactttttacgatactttgcacagctatttatgcttattatgatcacgcagtaaccaaaccttcacactgactgtgcgctgactagtggacccacagtccctcgccgctcccccgtgggcccaccgagctaatatggtcaacgagccacacacaacagacccctttcaattaattcagctcgggtccacccaaaccctaaaataatcagttcctccccgtcgccgtcattcgctcctgcgatcgccatcgacgaccgcccccacctcttccaccgccgtaatctccgcggttcatcgattcaccgccgtcgttctccttccctggttcgtttcccctctcattctttcgagttccc

SEQ ID NO: 129199 - DNA, 753 bp, Zea Mays
gcgaccagaggatctcttactaaattaaatggattgtcgagcatcaccgagctatgagaagacttaaacaagggagagaagaagatgagctgaccgggagggggctggccgcggtgaggttgagttctacggtggcggaaagagaattgggggaaaactcgaattcgagctcactggtggatgattgctaacgattagcgggggctggctagctgatgactttgcagaactggtggggggctcaatttatagattccagaggcggcggccgtgaattatgagcaagacgcgcggcggtcggaggtggagaagaacactggcgcgcgtggattggtgtcccatgccgtggcaattgctccggcgatcaacggagagcgggggtaagtcgtggcgatgcggtggcgcggttaggacacgcagtggacaacggagatggcacgacgacggtgaccaactttacccgcgggcggtgagccaggggagaggcacagcggctagccggagtggtgtccagctcaccggcggcgaagatttttaaccccacgacgttatccaactatccagagcacaaagtggaccggcggtcgcacgaatcacggaggcaatcggtcgccgggggtaaggtagctgcgctggcggtctgatccttaatggactattgtaccatggtgaacacctcatcagagcagctgacagagaaacttcagagccatttttctccaaattcctagtgacaacacaagtccatccctg

SEQ ID NO: 129200 - DNA, 703 bp, Zea Mays
ggaggagcgaaggactgcacggcacgaaagcgcggatccagtctagagtccatcggagacagagaagatgatgacgactagatctgcagaggactgagcaactgcacagcacaacgtcgtagatccaatacatcgacgacttgatgtacagaggcgaggaggcacgggggaggccggaggttggaggtgaggaggcggaggaaatgaatgcaaggaggcacgacggggaaggcgagggttgaggatgtggtggcgagtaaccgtgttggccaagtcggcaccctgtgttgaggaggcgtcccaaacacacactgcacggtccgcctgctatgtcgggttgtctcgagcacgattagcctccgagtcgtgctggctcatagccttagaaaccgcgcgcggggcggctcgcttagcacggcctatccgacatctataccagataccctgtatatttagcttggttacactacatggacattcttggagaggaatagatggttaggctagtaggtccccagcagcattctgaatcaaggaagaaagccccatggtctagccttgaaatctcaaccgcacacaattacacaaatgctacatggcgaataactttccaacaaagtgtgtacgagacaaaaggcacagatattcgccgatccactcgtgcgtcgtgcgtcagcaaacggcgccagcgccacgctccgca

SEQ ID NO: 129201 - DNA, 416 bp, Zea Mays
tacgatggccagcccttggtctcatccgtggtgaagatctttttaccccgaggcgttatccgggcaccagtgggcacaaatcgcattgctggcacgaatcgcatcgtgggggtcgccggcgggaaggtgcactgcacctatgatctcattcagttcactgtaccatcagaaactctatcaggacgcctgacagagcggtttgcagtgcctagatctccatttttcatgtaataacttgtaatccacctttaacaaaagttgttgtcctataatccagctttaatcttactatagcaaccatacttcaattctcactaaatcatactcaaaatagctcccaaacttggtcctagttcactatcagtccagtttcagagttgtactcgactgacagaccaacttcaggtctgtttttc

SEQ ID NO: 129202 - DNA, 432 bp, Zea Mays
caaacttgtcgagatagtccataaacatactattcatcagattcacgaagaaggctggcgcattcgtcaagccaaaagacataactatgtactcatacaacccatacttggtaataaatgtcgtcttcgggatgtccgaaggtccgatcctgagctaatgataacatgacctaagatctatcttcgagaacacgctggctcctctcagctggttgaacagatcttctattttgggcagggggtacttgtttgtgattgtgacttcatttagagctcgataattgctgcacatccacctggtgtcgtctttcttttccatgaacaggacaggagccgaccaaagtgaggtacttggtctgatgtaacctttctctgacagctcatcttctgcttcttgatctccaccaattctggtccagataccctgcaggc

SEQ ID NO: 129203 - DNA, 394 bp, Zea Mays
tacaccgtccacattatttatcaagggtttcgtctacatatataaattgtatgtcgtctttgactttttcatgtgcatagttttttttaccgtgcatgtaaatatagtgtatacctccctctctttggtgcgcgcgtgtcggaggagagccagagcagaggtcgtagcatttagtgttgataggtaggccggtcgtaggtggcataggcggcgcccgccgcaatgtcgatggccggagcagtgtaggccatcccgcccatccgacgatccagtgcttgacttagatgcagcagcaagatatggttgggtatagctagagcgcagttggccggccagaacaatgctaggcgagagagggaagtggtggtgataggaatgtgagaggagagggatt

SEQ ID NO: 129204 - DNA, 481 bp, Zea Mays
gaaaaacactgtagcgacaccagaggagtgtcccagaccaacccagggcaggttgccaggatccaggcgagacgtcggggtggaacgatgcgtcaacttcttgttgggcaaatcgtcgagcagctagcgagcgacgcactaaggctttcatttccttcatcatccgatcaacatctgagtaggatggggtcgagctagatggggaggggtgtctctagatggacttggcacgagcctgacgaggtggaggtgcagccatgggtgatggcgagctgctgggaacggcggccgacgacgtccatggctgggggcaggggcgagtgccagggaggagagggactgggagtggctgctggcgagctgcagaggcacacagaagaagagcaccgagagggagagaccatggcggcgatgctcgagtaggagagggcgctcgacgcagggggagatggctgacggccatggaggacgaggaatggag

SEQ ID NO: 129205 - DNA, 403 bp, Zea Mays
tgataatagaagaagaccactggagtttgaggaaggtgatcatgtgtacctcaaggtgtcaccacttcgtggaatgaggagatttaaagtcaagggcaaattgtcccctcgctatattgtaccattcggagtttttaggcgagttggagagatggcctatcaactcgagctacctgataatctatctgatgtgcataatgtattccatgtgtctcaacgtaagaagtgtctccgtgtccctgaggaacagttaccaatggaggagctcagtgttcagggtgatttaacttatacggagtatccaatcaagattcttgacaccttgactcgagttacaagaaataaggcaagcacggttggaaagacaacaacgacaacaacaccctcctccactaccaccaac

SEQ ID NO: 129206 - DNA, 509 bp, Zea Mays
tactggtgaagcctcctagatccaaatgtagcccattgggtttgggagattccaagacatgttgggcactcgagtgcagtagaccatgcagaacttttgagaagatcatacataactttttcgtatgttttagctgaagcatgtgccagctgtgtcgatccatcagcgattacttcaaatatcacaactatcctcctcgactagaaaggcctgctatgtgcagaaggtgccaaaggcttagacctatcttctcatttaatgatgggatgttctccttttatttgttgtttgagcaagtgttagttctggctgtgttagcgtgttctgctgtaccgaggatcttcctcttgttttgctcttcttaatatagtgatgtgcagttccctgcgtattcgagaaaaaaagggagttgctaaaacactataaggagtatacaaaaatgtttgtgctccaacagttctctatttattggtgattaatctttaaagttgtccacgccaacaaaaaat

SEQ ID NO: 129207 - DNA, 698 bp, Zea Mays
ttcaaacttatttgtctgaaatgtggtgtcaaatgatatagcatcaccaaaacattcgtaatccatgatagactgaccatcagcccaaaagaaattagttatacggccagttggcttatctatttgaatagcataaaaaaatgcaggatcctcaatttgcttgttcttcaagtattccaacagagtctgcgcatcattagattctaaatatttctttcgctctcgaccaatctcattattgcaatccatccttgagaatggaatattttcagcaccaccataaaattgcttcatgaattcatacacttgtgatggtttcatcccggcttcccgtatttgagcaattagtagtctgtatgcttctataacacgtcgttgagatcttagcttgcacgccttatttggactagctagataatggttgtgctcgggtacaatcttttggactgtccaaaccccttctctgctgacaccaaactgaatgctagcattacaacctgtccttgtagtaccaaatcctcgtttgctacaaacaaggagttttgaatatatggtcttatctgctcgacgctttgtatcgctccttctaacactgaattcaaccttaccagcatagatattatacatctcataagcatcttcctcggactcaaacgttattccaacttcaggtataacaacaggctgcaattcttttt

SEQ ID NO: 129208 - DNA, 308 bp, Zea Mays
cccagttggactgaatcccccaaggacttggagatagctgaggctagggttctgcttgcagaggttggcttgttgaaggagaagggtctaactactgaggctatggtcgccgatttcatttttaagaacattcagccgctgaaggatagagcgtacccagcttacttgtatcgtggcgttactgattcgacccgggttaccaatagaaggattcctgctgtggacctggtaagccggcttgagatgatccttagaggcaaggtgtcgaatgttggtgctcctgttgcgtattaagcctggaatctgcc

SEQ ID NO: 129209 - DNA, 456 bp, Zea Mays
ctgtgataagaggacaatcaagttgatgtccccactaggagaggaagtggtgaccgagttagtctcacctgagccaaggaaaggaagttgtcatcagatggctattgatagcaaagagccagatccactcgagattatcaaggttgtgtcagaatttctagatgtgttttcggaagatttaccaggcatgccgcctgagcggaaagttgagtttgctatagagcttcttcctggcaccgcccccatttctaaaagagcctacagagtatctggactagagttagttgaactcaagaagcagatcgatgagctgtcagagaaaggttacattcggccaagcacctctccttgggttgcccctgtcctgttcatggaaaataaagatggcaccagaaggatgtgtattgattaccgagctttaaatgaagtcacgatcaagaacaagtaccccttgcc

SEQ ID NO: 129210 - DNA, 481 bp, Zea Mays
ggcccagagagggtatgtggttcgtcaccgtcgacgaccttgagacgacttatcgcttcttcgatcgtcatcgtggagaggtctagcagagactcgatcgagcgatctgcttgtacttctcgaggatgcaacagaagagcttctcaacagctctctcctcatcgtaggtgtcgtcaccgaactgcaccatcttctgcaatagcgtgttgaggtggagagcaaagtcatcgacatcctcacctagcttgaaggccaggttctcccactctttgcgaagtgcctgcaatgtggtcttgcgggcacggtcgctgccgatgcgggtcgcagcgatggcgtcccaggcctccttggcagtccgtttctgggagagcgaaaactgcatctcgggtgagactgcagcaatgagggcatccagcacctgtcgatcctcgtagtagtcaacgtcgtcataccgaactgcttcccacatgtggcaaacctg

SEQ ID NO: 129211 - DNA, 629 bp, Zea Mays
aattgggcggctctggtggacgatagaaggcaagagtgggtgctttggatgcgcaatgacttagcgaagctcactggggcagcaatttataggatctatcggcggtgacatccaatttggaagaaatgtgctggcggccggagagagggaggagtcaccggagtcacataacgtggcatttactagggtagaagcctcggacgatgactaactaactcacacgacaccttacgaaatggtaatagggtcagtagcgtggtggatttcggtgaagggtggtcatgacggcaatggccatgcggccacgttactgggcaagtgggtgcggtgaggccaaccatagtgcccccaaactcatccgcggggaggatcttttcactaccgagcgcaatccacttatccgaggcacaaatcgtggcagccggcgcgaatccaggcgtgaggtcaccggcggcgaggggtgatgcatctaccgatctttttcagtactgtaccatgggaactcaattcaggcgcctgacagagcaagtttcagggtcttgatctcaaatttctatgtggcaattcatcaatccctctgtaacaaagttcttgtcctataatccaacttcaattttgttataatgacc

SEQ ID NO: 129212 - DNA, 410 bp, Zea Mays
ctggcggaagaaatagctcaactctgaaagcgctagccagacatgctcagggacatagcctcgaaccatcgcaggaagagtccgttcaatccatatgtggaagtcatgacttttcatctctaagactcgcaaagtagataagttcaccactactcaggttagctgcatacccatcagggaacatcaacatcttgatccaccgaagtacttccttcctctgggccctgcttaggatgaaatcggccttagcccttctccatgtctttccaccactaggcgacttcatctcttggtttggtctatcacataatgctaccagatccactcttgcctttacgtcatcctttgacttatcaggaatgtccataattgttgcccaaactgtcttggcaacattcttttcagtgtgc

SEQ ID NO: 129213 - DNA, 506 bp, Zea Mays
gagaagcatcatcgaaaacaaagttaccatggtgaaaatcgtcgtaccattcatcttcattgattgggctttcttgacgaagctccctgtgttggggccttcggtcttggccatcctgagtgagatgatgaatttcctcagctgtttcatcaatcttcctctgaaggtcggccagtcgaagcattttttccttcttcctcagtacttgctggtgaatcgcttctaagtccctgatctcctggtccagttcctcctcatgaagtgttgggctagtagcctttctcttttggctcctagcttctcgcagggagagtgtgtcctgatttgtgtccagtggctgcagagcagcccctggctctgtagtcttcttcgcgacatgacgaaggtggatgcttgccgaaggtggtcgttcaggttcaccggaggtgggcgccaatgttggtcacagaacaaggcaacacaatcgttaaggattaaagatctccgtcttccgaagcattatctcc

SEQ ID NO: 129214 - DNA, 553 bp, Zea Mays
tccatttccttttgctgccctcccctcttgcatcatccttgttcatcgtctctccagccgcgcgcccagcagcagcgttctcgatcgatcagtcgtcgatccggccgtgtgttcttcttctgtatcactatcaccttcaccgcttcacctattcggccggccagctgctgatatcttcttcttcgctgccgcctgctgccgattaatttattcactcgacggcagcgacttcatcgtctatcataggaagctgagcaaagaagacgtagggtgcagccgtgcaggaggaatagagatagagagcttcaggtatatatagcaggcaggcaggctgtgtggttgatccggtgatctatatcgatccgtcgaggatgtgcaccaggggccactggagaccgtcggaggacgagaagctgaaggagctcgtcgcgctctacggcccgcacaactggaacgccatcgccgagaagcttcaagggagatcaggtgctgctacatcatgtatacagtatatatatgatcgtcaagactacatatatatggtcaatcatat

SEQ ID NO: 129215 - DNA, 402 bp, Zea Mays
tctttggcttcggctggcccgactataggcaccttcgacactactatcgatccttcagcgctctgagcggcgaaagcagcttcttttgcttcggcagcggaggaggtcccttcaccaaattcaggcactacgatcgtttcaatatatcgaggccggtgggttaaaacctttattttcttgcccttcggcacagcagtggtggccgaagcggcaattttcctcttttttccttgccttctcaaggggtagcagtaatcaggatatatgaagccaattgcattaaaaaccctgttcaatcattttttgccccgacccccgaaggctgaggacaaggcatcatctttggctctggtatatgtcccaagcaactcgtcatttggttcgtcaaaccggtccctgaat

SEQ ID NO: 129216 - DNA, 359 bp, Zea Mays
atgacggccacacaaatccacaaaacaaacaaatccattgccacagccggcacaaacccaagcgtagttgggagagcaaaaacataaaggctacaacttagatagtaatcatattaccaaattgccaaccctaatgagcgaagatttgcatcaccgacacttgtaacctcatgcaggcatccttcataattttggcatcgtcttcatgcttttggagtagcgtccaagaacgacaccaataaattcctctgaagagtacctgcatataagtttgtatagggcttttatcaaaaacaacatcatttctacacaaccataatgcccagcaaatggcagtagcaccaaccaaaatcaacgac

SEQ ID NO: 129217 - DNA, 414 bp, Zea Mays
gagaagcccaagcctaggtacttgttcgctgctgtggctttaattcggctatgattatgatttctatggtgctttgtagattgtagttgtagccgtccgaatagctgagagtgttcgttttggacacttatcgacgacactcagcgcttcgtcaaaggtcgaaccaatggcacaaaaattagatcttcgttctggtatgtagataaacgaacttgctccaggtcaaaaccttgggaggggctctaggtcccttgcaacaagcttgatcgcctgctgtttcaggcatccaccacggtggtgattgggaatggcatcaaagcaaagttctggcaccatggctggctggatggggaggctccacgcaacctggcaccttacctctacaagctgatcagaaggaagaataaatctgtg

SEQ ID NO: 129218 - DNA, 481 bp, Zea Mays
atttgagtaagccggtatgatcctggccgagtgacctctgatacaatgaatggcccttcccatagtggcgacaacttgtgtcgtccttcccccgttagaatttggcggaggaccaagtctcctactgcaaaggatcggtgtcacatggctttatcatggtagcgcctcaaggtctgctggtatctggccgactgaattactgtgttcaatcgctcttcttacagcacatcaatatcctctagcctggtagcttcttcttcagctatgttttcgaagaccaaccttggtgccccgaacatgaggtcggcgggtagcactgcttctgaaccataaaccatgaagaacggagtatttccatgcagagctcgactaggttgagttctcaagctccaaaccacatatagcagctctctgatctactttcctgcaagcttttcatttttgtcgaacactttcttcctgagtgcttccagtatcatcc

SEQ ID NO: 129219 - DNA, 859 bp, Zea Mays
ccgctttagcgttgacttcaatggcctacaagatatggacgaggtcgatggaggaaaatgtgcccatcagcccctcacccgaggtgatgtcgaagtgatagaggcgacccttttgcggcattgaggttgtactcgcagtccaccaccacgccgctagccacggcgagcgctagtgacgcgacggtgtagatcgtccccatccgcctgggctcctctagcactgccccgttgggcccatcaacgacgaccacgcttcctctcccttccccttccttgcagcatccggcgacgccattggcagcagtggagccacggagggggcagagctagagagcgtgaggcagagattacctaggcttggaggttgagggggtagtgggtgagcggagactgggtggacccaggcctcgcacgatctggggggaagacagcgaggcggaccaggtcgcgagcgcggcggcgggcatggttctgcggcagacggacgctcgaacatggggcccacctatcgggcgagggcagaaccgcagaaccagccgatggtagaacagggcgtgggcagactactcttactgccttaataagtattcatatatcaaataaaatttcagaattgttccacttctgccatactctagaagaaaatatgatgcacaaggtatcttaagaaaaacatcatgcttcaagctcataaatgatgcatattccgattcatgtatgaggcaaagaaataccagagttgtaagtagatatttagatttcttactgtcaactcataagtgctagcatgtcagattattatgacagaagtaactgcctatcttgtgaaacagaaactttagtgaaaataacataaagg

SEQ ID NO: 129220 - DNA, 528 bp, Zea Mays
gagaatatactgtatggaaagccagatgcaactattgcagaagttgaggctgcagcgactgcatccagatccaatgcacatagtttcatatctcttcttccgaatggttacaacacaatggtatgtctatattttttcgacatacatctaagtctggtctaataaattaaatactaatttcttcattttttccatccgcaggcaggtgagagaggcatccagctctctggtggtcagaaacaacgtatagcaatagctcgtgctatgctgaaaaccccaaagatcctgctcctggatgaggctaccagtgcattagattcagactcggaaagcattgtgcaagaagctttagaccgtttgatggttgggaggatgactgtaattgttgcccaccgtctgtcgacgataagaaacgtgaacatgatcgctgtgatccaacaaggccaagttgttgagactaggaaaataaaatgtttgcatgtcatatttacttgatatgagacaatggatatgaacgggggttgtggc

SEQ ID NO: 129221 - DNA, 485 bp, Zea Mays
tatggcagaaagtgcaggactccactgtatttggatcaaactggtgaaaggcagttatttgggcatgaaattatacaagaggcagaagaacaagtccatcaaataagggagaatttgagaactgcacagtcaaggcagaaaagctatgctgatacccggagaagattattagagtttaaagagggtgatcatgtctatttgaaggtgtcaccactccagggtatgagaagattcaaagtcaaagggaagttgtctcctcgcttcattggacccttcttaatcctaaagcgagtgggagaggtggcatatcaattggagttacctgatcatcttgcggatgtgcatgacgtctttcatgtatcccagctgaagaagtgtctcagggtacctgaagagcagctaccaatggaggaccttagtgttcaagatgatctgacttatgcagaatatcctatcaagattcttgatacactgactcgtgtcac

SEQ ID NO: 129222 - DNA, 625 bp, Zea Mays
ggtagcgtagagctggaccgtgcaagacagttgcgtcgtttatgacatggcacacttttagaatttctagagttgatgttagaggttattgctccatccattgggtgtgctagtgaagccatgttgatgcagcataataaagcgcaccaagcccctatttggaatgtcaaatgtcatcgtgttatgacaccactgtactaagagtaccagagaaaattagacacacacacacagagagagagagacataggcccaacattgttgaattgggtatcgacatggccgtaagattgcgcacggtttagatatgtttgggccgcctgagcctaatattctagtcctctgtatgcttgatggttagacacaagtgtgggtagagttcaaatgctcaaatgatgtctgagctagtgagtgaggagaccctaactgacctttgcgatgtctactcctgagccgagagcgagagctctttccatgtgctagcttgtagctgatgaggaagtgaagtccaaaaagctataccgaagccaaggtgaagttaagcgaagccttttctatatcgctctacccctcctttttatagcaaaaaagagagatacatgtatgtatgcacaacagatcttgt

SEQ ID NO: 129223 - DNA, 434 bp, Zea Mays
cttcggagtaacttcctctcccccgaagcgaatcagctcccttttgtcttcactaaaatagcctagcttcagtaacttagccatatcaccttccgtaatagtagacttcccaaactctaagtcgctgggtttagatggcattgcaccgtactcatcttcaaattcatcttcttcaacgtcagcttgttttgcttcggcggcagatgtatcctctgatgttgccagcccagaccgcctcatagcttcggaaattgggacagtttcagtagcttcggtctcatttccctcacgatcaaccctggcagtggaacgcactctagccatttgattttaaattcctagaatttttttgaaattaatgacctttttccgaagctcttcttgtgacgaagcagaatccgaggtggtgcttcgtttgagtgcaagggtcaagc

SEQ ID NO: 129224 - DNA, 283 bp, Zea Mays
gcacaatattttgcaaggaagccaccacaaaccttggagaagcttctccagaaaatggacgagtacatcagagccgacaatgactttaggcagagaagggaagaagcctacagatacttcgagatgaccaggtgaaatcataccctaggcatgttaggacgatccataatcccagctcaagcgacgacaggggaaatcatacccaagggcaacaacatagctctcaatcatcaggggcacaacaaagttccttcaggccacaagctctaagaggtagaggggg

SEQ ID NO: 129225 - DNA, 625 bp, Zea Mays
acagctcacgtcgcgactttgttctgaccgcccttctcagatgggtcgcgacgttctccagcagacttcaccacagcggccaggtttctatatcagctcatgagacggacgcttctgccacggatgggttacagggaggctgccactcatattcagctttggctccttggtgcccttatttctcactcagagtttgatgttgtggattttctcatttgtgagatcgaggacaccgtactggatggtctacgtgctcgtcgacagctgccttatgctcactatctgtatcacatctttgctcaggtgattcggcccacacagttccagggtactcttgaggcctctcgcctcatctttgggtcataacgtccagctccagaggatcctgtgccggcacctgctctagtgattgatactcaggccgaggataccaccttccatcagtttgagactccgggcgcaacagtccatgatgatgatgatgatgatgactttggggttccaccttcgcctccgcctcctatgcctccacacactcatgatcatgagactgggagttccagtgatgctgcccctgctgccattgaccctgctcttgctgcgatcctctagactcttactcagt

SEQ ID NO: 129226 - DNA, 276 bp, Zea Mays
ctcacgcttacatgacttagggtgactactataccctactaacagagcaatcggcttaaagttggaaatgccttaagtcggtgcgacatcctcacgcttacatgacttagggtgactactataccctactaacgcatcaatcggcttaagttggaaacgccttaagtcggtgcgacatgctcacgcttacatgacttagggtgactactataccctactaacagagtaatcggcttaaagtcggaaacgccttaagtcgatgcgacatgctcacgc

SEQ ID NO: 129227 - DNA, 941 bp, Zea Mays
ctctgatgtcttttgggtatttgtcgctggctcccatctagagtttggggaagacaacatcgagaacccgctaggccccaacatggagcgccaactgttgatgttttgaaccatctcgaacaagtaaatttgtttgtgcgcattctatggtccggatggtgtgcttggtgggcgcaagatttatacttgttcaggaagaacgtccctacatatactcttcgatggctcgtgctaccaacaccttgttgctcaatgctcgtagtaggggttacaaacgagcgagagagggaggaactcccaagtctcttacgcatggctataccaaaagattacaggactagtgctctctactaagccttgcattcatgacctatggggccctaggcccgcagcgcactcatgacctatcgagcctaggcctaagtgcactggatgcctacaggacccgcaacatgacgagtcgtgctgagacccaggctacgatagccaggggtcagtgcagcatagacacatcaaagattgtgccaaagctcttcaccgcccaagccacccgtcataaatagagcgaccagggaaacccagacgaccaagacagatacagacaaacacaactttactatggtagaacatcccgttttaccatggagcggtagctccttccttgggaagctactggtagtcgaccctcaccatggcctataaaatggaggaggtcggccgaacataggggtgaaggacgagggacatacatacacgcacacagacgatgagaccagaagacccggaggcttgaggcaaggagcgaaccaccacaacatctaaggtttaacaaagagcaccactcccatagtctttaggtctagctacacataaaatacttgggagctcctcctctcgtccgcttgtaacacctactatgagcattgagcaacaaggtgtca

SEQ ID NO: 129228 - DNA, 619 bp, Zea Mays
cctttctcaccatccttcgatccaggatctgctctggctctatacccccttgaaacaaatccaccacagtaggtagctctgagaaaattggagaataacagggcaaaaatggcttcagttgtgacacatgaaagaccggatgtacttgtgcatccccaggtaattccagcttgtatgccaccaccccaatcctcgatatcaccttgaaaggaccaaagtacttaaatgccaatttagggcagggtcggttcaccacagtcttttgtgcataaggttgtaatttcagcaaaaccagatcacccacttgaaactccctgggagttctgcccttgtcagcatactgcttcatgcgaagctgagctcgtgctaactgctcctttaacatgactgaaaaggcattcctttcagcaatccagtcagctatctccctatcttcaattcccaacagttttggtgtaatcagcaatggtgcttcatacccatacaacaccgaagggtgtacactccagcaccgaatgataagtagtattataccagtactcagctaaagcgatccagctcttccacttgttaggttggtcatgcacaacacacctgagatacatttccaagcactgat

SEQ ID NO: 129229 - DNA, 689 bp, Zea Mays
ctcctcctattggggcagccttggcgcggttggagacccaaccaatcaggcggctgtcgacggaagaacaagcggaacggcgtcgtctcggactatgctacaactgcaacgagaagtactcccggggccataaccgggtctatcgccgcatcttcttcgtcgacgacgtgatcatcaccgacgaggaggagacagccgctgcagaacctaactatgaaacagcggctccagtcttttctttgcaggcagtggcaggagtccccatatgcgacaccatgcaagtccgggtggatctggggacatcgacgctggtggctctcttggacacgggatccacccacaacttcatcggagaggaagctgcgcgccgcacgggcttggtcatccagcctcgttcgcgtctgacggccacagtggcgaacggggagcgcatcctctgccccggggtcattaggcaggccccgatcttcatcgccgccgaaaggttcctggtggatctcttcgtcatgcctctcgctggctatgatctggtcttggggacacagtggctcgtcaccttgagccggatcatgtgggacttcacagcacgcaccatgtcgttcacacgacacgggcgggaggtctgctggaccgatgtggcgaccgtccgcgcaccgcgtctcgcagcgaccgcggcgggcgatcccctc

SEQ ID NO: 129230 - DNA, 542 bp, Zea Mays
ggggaccagtgaggtgggctaggagttgttagtggacgactacctggtgggtggtgttacaatgtttgacgcccagaatgggctaccacctgctggtgagttggattacttgattcttcttagctgggtgattccatttttctaacttagttttgatgtaggggcggaggctgggcagctggcggtggtacagtcgactgtgcctgccggcctgatgggtacggtgaagggcaacacaaagacctcgcaggacccatggtcaaaattttgcgccatcgttggaggcggaggcaaacttgcctcggctgtcgctgctgctggcgtagctgcgtctgtcgtacagcaactgtgatttgtgagtttttgtatttatttattcatatatatgtatatttttgtgttgttgtactgagtttggatatttgatgtcaggtgacggcctttgccgagaaggttgcttcgagggcgctgacctcacagtttgtttctgagaggaaatgactcaagggtaggattgagcgccttcgaacgcagcacactga

SEQ ID NO: 129231 - DNA, 485 bp, Zea Mays
gctttctcttctttacttggtagtgtttttcttcgatgtccgaaaaactgatgcttcgggtaatgtttcaaacaattttagactcgtcagaatatggaacgtacatcagcatccggtcttccccgccaaagagtaaagccccaggcccgtagcccaaagctttgcctttgctttccaattcaaaaacttccttttcatttaactcgctgccacttataagcctcgtgaaaaatccaagttcttccatattttcaccaatggtctatgtagcttcggcttcctctatctcaagtgtagcattctgctctctttggccctttgttctctcgtgcccggaagattcgtcaccttcaacggatttagtagcactgttcttcttagaatatgatgaatcactgaaggcggcgatgccaaggcccaaaatgcgtgggctctccacttcctcgtcagaatccttcgaagttgccataaaccgattcaatgtt

SEQ ID NO: 129232 - DNA, 482 bp, Zea Mays
ttatttatttactatgctgatgttggcaataaggtgaatttaaaatgttgatgaagccctaagcactctactctcctgttgttattagttaatgttgtttttagatcaaatacataatctatgtccccagcatgagagaaagactattgtagtttatttattagctaatgatgatctattatacctttggtggcgacatcatttttcctgcttaaacatggcattgtatggatccctgtgcagagtgtgaacttacaacatgagcctttccatcaaaggggagaaagttggaagatgatgtctagccatgtaaagagaatgagaattggccaatgtccataactcttccaagagtttagccagagggcaggggtgggggtggagttaaagagttcattgctggcaaaccatttagccttaggggctggtcattgctgctaatccccaccttaatttagtagtgttcatgttaattaggctac

SEQ ID NO: 129233 - DNA, 363 bp, Zea Mays
cctgtcgatgacgttggggaaatatttgatttaaattgtgttagctagacaaaccaaaaggcaagtagccaactaaacatatttattcagaacaacccaagcaatggcgaggagtcaatcacttgggacatgtttcgacgaaccatccttctcaagctttgcatagcgctcggtgggtcaaggcatctagcgcatgacagttacagggatatttgaatacgtcttgatgtcctttggagatatggtattccccaaacactgacaacaacccatacaaccaaaatattgggatcacaattttgcagcctgaaactcttgcttgtactgtagacctgaaagcaaatgatggtgactaattcaatg

SEQ ID NO: 129234 - DNA, 955 bp, Zea Mays
aatgcagccccatacaactccacctgcatttgatcttgccacttccgattaataatagcaagcaacttcctcttcattgcctctctaccttcaaaacccgaagtgatctttgcttttgccatatccatggcagcggcaacctctggtatggctggcttttcatcaccatcaacaattcgcaacacaatgagtggacagtggttgtgatgcaagaatacaatcttggactgagttccaaaagtttgtagaaagaagtatctctgtgaccttcttttctccttttgtgcttgataacttggacctagtccaatcatcactaacagagaggcatctcaaagcttgcttatgcttatatatggactggagagttaggaaagatgtagcaaatcttgtaactgcaggtctcactaaatcaccccatatcttctccctcatggcatcaagaagtttgccatgcccatatatgaaggttgtcacttggcgagcatgggaaatgcatttcttgaactctccaattttcccaatgtcctcaagcatgaggtccaaacagtgagcagcacatagagtccaaaccatgaccaccaacaaggtgctgcttcaaccttctaacacctgcatgaacaattttgccacaaaggatgcacttcaccacatatttttgttcaaatccggccaataacaatagttccatgctggatccttcgattttgcctttctcttaggatctttgatcgtatggctgctggcttcctaactccccttgtggtcgatctgcagatgcatcttccatctcttcaaggcctcctgcagatccgatgagagggcgggggagggtgagcagaggccgggcgagcttgttgcgagggcgggagagggggagaagcactcaccaagtcactaggttcctgcagattgatgagggtggcgtgcagactgcatattgcactggaggggc

SEQ ID NO: 129235 - DNA, 683 bp, Zea Mays
tgcttcaaagttgaaatttgttaaccaaacagtcctataaaaattggaatgggttgaatgtgaatattccccggacaaccaagtcatgacactttttttcaggcagagcaaggacccatggtttctttggcgttgcacagtagcaccaacctgcaaggtgagtgatgatcggagagcatcatcgaaaagcaacggaagatgacaccaggttttggaagggcagccagcagctttctggccaccaccagaccagacgtatatgaaacaaaagcagccaccaaagggagcaagcaaatcaggtttggtgacaaacaacaccgagcaacagatgaagtctggaattcattgactgatcgtaagaggctaccagcaattgcaaacacttagaatgtaaggcacaggcgtggcaggagctaaagttctgcagataggaggtggctctcagcttctctctccgttgccttcaagtgaagcctaggcaaaaaccgggcatgaaacacgcatcgcctgcctgcccattccttgtggagtccaaaaggaccagaaccatttcacatttacagtgacagcaagtaatttgaagacacaacagtggcgacgctagtaacaatatcataaaagcatgggttggtcatccaaacagaagatcagttgataaacagagagaggaatgtgaaaaccaa

SEQ ID NO: 129236 - DNA, 572 bp, Zea Mays
cggcgctggccgcaagtccatgagccatcaccagttgcgccgctaagctttgccgccgctcagggaggagtgcttgagaagagagagagagtaggaagccaccccgcgtcctcgccatcggtcggccttggtgtcgggtctggggagcgcccaatggagcggcgctattcatcggtcaaccagatacggcctcggactgcacagtgattgccctatcattgtcgtcggtgagccacccttcttcctcgtacctctttcttctctgctcgggatgcattcgatgttgggcgttgcagtgaggatggggcgtacatgcgagtccatggtcttgtccacggctgcgctggcgtcgtctgacccttctgtccacgcccgctccgctgtactagcgcttgcgccgccgtcgtggtatgtgtcgcgggcaagaagacaagctcgcggtcgttgccttcgcgatggacggtctggatcggaacctggatagcgctgggttatatcaaatcatatccgtctgattctaatccagtggccgagatttggtactggttcggtatagataggttctaatctgg

SEQ ID NO: 129237 - DNA, 393 bp, Zea Mays
gccaacagtcaacaaattagaaactgaaaatgggaataacagaggagatgagaggagagaagcaggggacgaggaacaaaccttgggctgtctgctgtcgcgcgtacaggagagaaaccttcagcaagcagtagccgcccgcgtacaggagagaaacaagattgggaggagagaagcaagttttaccgcgtacaggagaaaagcaagcagctacaggggtcttctctaccgcgtgttttctctccttccttttctggcgtacagcttcttttactggcgtacagtccttttctgcgcgcgctagccttttctctaccgcgcgcgtcctattttctcccccgcgcgcgccattctctcctgcgcgcgtgaccttttcccacccgccattttccc

SEQ ID NO: 129238 - DNA, 333 bp, Zea Mays
gctgtgtctgctacagtggttctgaaatctgcatctttgttttgtttccctttcagatcttaggagccaaaggtcaagcatcccagttcaaactgccactattacactccacgcttgttaattgttttcctttctttatccctaatggactgctaatccaaacctgctacttgtagattcctcattggtcatgcactttttttccttgataaactggtgacatacagaagctcgtttattatagtagctttttatagacaacgaatatattagataccttagctgtgtcacaaatacgatctttcctgcctttctgtgttatcccgaaccagc

SEQ ID NO: 129239 - DNA, 498 bp, Zea Mays
agccgccatggccgaccccgccaggttgcttgacgccgtgaacagctgaatctactccgcggtcgctgccaagacccctccccaaaggttcgctttctccttcttcatgcgtagctctggtcgaagccaggttcatgtacttgcgcgtccgtgcgggtggtgcggtaatggcgccgccgtctgtgcgggcgccaccgtgcccaggtacgcgggggagaaggagatgacgccggggcgttgatcttgtgatcaacggctccgtatggttgatagcgatatgtgtgcgtggccgttagatcccggccgggcgatggggatccatttccgtttatttaaatcgcggccgtcgatcgtcgatccactagtccgcatttcataccgcttcaaaggaacctaaacctaatccgacccttgatctccgattctgcggccctcgctgcgtaccatccaccatctaatcttgatcgctcatatctgatcgggcggctcatagttaac

SEQ ID NO: 129240 - DNA, 440 bp, Zea Mays
aaacagttcacggtgcatgtaatagaagaagaaaaaatatctaactacacagtaaacaattcacagcacatgtatagaataaaaaaaatctctaactacacagtttgtaccagtaggggtgtcgaaattggaaggaaagttcacgggcgttgttgccagttactccggggaataatatccgggagatgtttcagaagttccattccatctgggtcgatcaaccgtttcttctttgtgtcgtggccatccacagggaatagcagtacgtagtcgtacagacgctttggccagccagagccagggaatgcagaacgacaaccattaaacgttaccttttgcatttgttatcgtacaaagatgtctctgccttttcctcgcttgtccgtatggaccgtatatgatgcaagtttgtcttatagatcgtgtaaaatagaaaattt

SEQ ID NO: 129241 - DNA, 306 bp, Zea Mays
gaaagactgtagtgcagtacttcttggacaaatatgactacagattgaagtatgtctcttggccttgccttcaggctggcagtgattcacgacctgtatatttgcctatggaggtactgtgtccatgatcattcagttgtacctgaattattcatgttatgttcatagtttcaataaaaatggttgtaggtttgcaagattgtagaagggcagagatactctaagaagcttaatgacagacaagtgacgaacatacttagagcaacttgtaaacgtccccaggagagagagaagagcatacgtgat

SEQ ID NO: 129242 - DNA, 377 bp, Zea Mays
cgggaatagtaccagactgtccggtccgctcgcagaccatccgactacgtaggttggaccgtccgtagcaccagaatccacctgtgatcggcctagtaccgaaggccggtataaaggaagccgaccacctaagccctaggagtcgaaaagtttcatgtcttcgagtttgtttggcctgctaaggccaaatcttcttctcgctctcacctgcactcggcataaaaggggaaagttaagttcacatttaatgttgctaagtttgataaaatatttgatgagttacttaagcatggtaatattaaattgtcacatacaattcctccggttgaagaattaaaagggcgtgtatattgtaaatggcatggatcctttcttca

SEQ ID NO: 129243 - DNA, 292 bp, Zea Mays
cgggttgaataaatgaaaacacaggggttctttaacaatattccatggccgaaggggtatggactgaccacgcccgttcgaatctaaaccgagggcttagattatatctgggccacatcgaactggtatacaactgaggtcgcacgatcccaatcctagggtcaagagagaagatcccgggtttgacgtgtccaaggcatgcgtcccgatgccatcttctgatatgaggtagagaggttagttaggcacatttttgtcaatggggtcattaggatttgagctagggatcaag

SEQ ID NO: 129244 - DNA, 791 bp, Zea Mays
tgggctttctcttgtgcaggttgagtcatctcctcttcagctgtatgcggcacatctggcatgggagcagggctcacattccccatcccttgaagtcctgtttgaccctaagcaggtgcaccaggataacactgctggagcgcttccttgtcttcccaggtagctaaatcgcgaggcagaccggcccattccaccagtacctgttgtacaaggcgagttcccttggtgatgccccgagtttgctggatgttggcagggaactggattctggtagcgacgaaggcaaggaagtagaagcagtgcccttgaaccctttagctagcttcagctgagaaacatgcacaatagggtgaatacgactggaagcaggtaagtccaggcgataagctaccttgccaacacgggccaacacacggtagggaccaaaatatttaaaactgagcttgtgatgggcgcggggcagcacagaagattgcacatatggttggagtttcatgtagacccagtcatcaatagcaaaggagcgttcagacctgtgtttgtccgcttggcgctgcatgcgagcctgagcacgcaagaggtgctgatggatgaggtcctgcatgtgggagcgctcctggagccagtccgaaatagactctgggatggcactgtctgaagaaatgcccaaggatcttggttgacgaccgtagagaacctcaaaaggtgaacatcctaagagtgtaggcttgtgttgtaccaatattcagccgctggtagccaatcaatccatttctttgggcaagcgttga

SEQ ID NO: 129245 - DNA, 659 bp, Zea Mays
ggttagaattagcaatgtcctttttaagctgggccgaaaacaatcccacctgatttcaactcttctccctcaattttcggtctggaatgagtctaggttgtctgtctcctggattggttcctgatctgaaaatggtctggtgactaggaatgagtaacaagccatgttccactttatcttaggttgacttggttaccggtctggcttggatatcggcatgttaaacggggcctaataaagaaccgtaacagaatcaaaggaacgggaattcgtgatgacacgctccaccactgaagccagaaaatagtcctgcaataatttcgaatgctacacatgaatcgcatgaatgtaatcgtgtcgtcttcacactgctagctcacacatgcagatatgataacgagtaaccgtgtttttttcacacagaaaacaattatagagggcagaagacacacgcacgtacgtcaaagaggaagcacgcatcaatcagatcgatcggtcatcaggtcggcaatgagtaagacatcgacgaccggctgacgcagcgtaaccgtaccagtcaaagatggcaatggattgggtgcatgcatgatcagagcctggacctcacctggaggtgggagcaagaaaccaatccactcggcacttccatattacgggag

SEQ ID NO: 129246 - DNA, 594 bp, Zea Mays
cgcaatcgtggcgttcaccggtgcattggttcagagagggtaagctcaattgtgccacggttactacctcgtagtaaagagtcacgctgtggcataactgaggttgccggagtgtccacgacgacaccggcggttcggccacgtcgcaacggctacaggcacggtgataagcttccccttcgaccctatctacctccccgcgagatctttcacctccccgtgaatatccacagcgtgcccggcacgaatcccggcgaccggcgcaaatccggacgtgcagatcaccagcggcgagggggactgaaccctaggatattctagtggcactgtaccatggaagatctgattcagagcgcctgaccgagcaacttgtgacgccaagttcttggatttttgcgtgagaatgtattaatctcgctacaacaaagttctagccctataatccagctacaatcttgctatggtaaccatgctcaaacacccactggattatctttgaaagggctcccaaagttcatcttatgtcagtgataatcagaatttaggctataggctgactgacagcccaactttgggctcatttttttccaattt

SEQ ID NO: 129247 - DNA, 508 bp, Zea Mays
gataaatgcgttccgatcaaccggcagcatggatgaccaaattgaagcttggggaagcttcacgggttcaccagaggttatgtacacgctagaatttagactaggcaagagtagaaaagtgggtcgacagagagggcgtcgcggcggcgttctatggagcagaggaatgttccggtgatgggactctggcaaacttcaattggtcggctctgagagcaacagaaggtggaagacaagctaaaacaggatgcaatttggtaggtactaacccaatgagtgctggccatggaggagtccttcacggcagcgcgaagaacagggcggaatggatttgtggactgtgtaagttcttctggtgaaattgagttgattgctcaagtgcttaggtgcgtgatgtgttgaagaagcagggtccgggcttaatttataggccgatggccagagttggatgaggtttacggcggtgtaaccgcgctagcgagctcacccgcgtgggcagagccacgac

SEQ ID NO: 129248 - DNA, 1455 bp, Zea Mays
ttcgatgtcttcagatctgccatcggtgacgggatttgctcttctcagtcttgactaccagatcctttacagcggattccttgctcagagaagatgaaatggtcggcagacggcccgtcgagtctgcatcagaaattcaactcctctaccgcagtgaatgcaagcagtggcctattccatccgcctgcgacgggcggcgccgattctgggccgtccggtcagctccaattcaatggccgcgagtctgcctcgatgcgattggacgatgttggttggtctgtagtaaagccaaagttctggtggcgtaaaaactttgcagatcctgggagatcctcacagattttggatgacaaggcatccagtctcttcaaattgaagcttcaagataaatgctacaactgtctctctcctagccatcttgcctttcactgctcggctccgtcgcgttgttggttctgcctacttcctgggcacggggctaggtcttgccgtcgtagaggcgctcagaggaagtcgaaatcaccttgtgccagtataaaaccagtggggctatctttgcagggtactggcagttttaattgtccgcagcagcagcacaactcctgtaccgagcctcatctacaaaagcaggagaagcagccggcttccattctcagacttcctcctcgctccctcaagaaatcctatctgcaagctttgcaagagagccctagtatggaagcccgttacccaggtgatcctcgggggaggccagcttgtgcggccttcgccatctcggcgactggaccaattcaacgacgcagggacgatctgatcagcaagacggtggtctgttccttcgatggtaacagtcatgaggttgactctctgttcgctggggatatgctgcacgaaaaattcaaccttcagcatggtcagtaccagcttatcaaacactttcctgagcagtttctgattattttctctgatccaagatccaagcggtgggctctcgaccggaggactgtttcttatcgcggtcgggtttttcattttggtgactggttagagaatagctacgctagagaatctagtttcgagttcagagtcaaagttagggtagaagggatccttatccactgttggggtgaggatgttgcagcaagagcattgggtagaagttgtggtattcacttagttcaggagagctccagacgtagagagcgcactaggtcctttgatctgtgggcctggtcctctgatccctgtgatattcctaaggaagtgtggctaactgtcaccgagccagatagtgagttaccttctgtgaacattcctttaactctggctggttcccatcttgagggcctgtctgatctgaaaaggggtcatgtgtacacgctgcacaaccatattgaggtagttgaagatctcactttcattcgtggtaggggcagcagggggggtcctcccaac

SEQ ID NO: 129249 - DNA, 634 bp, Zea Mays
aatagtgaggtatgacatgtctagttcatgagtatcattaatccgatgttctacaataaaatctgctacaacctggcctctcatagatttcagtggttcataggccaagtcatattctataagtgcataagcccacttaccaattctaccactcataattgggttatgcaacatgtatttaattacatcggcttgaccagaaacagtgcaatgactagacagtaaataacacctacacttggtgcacgcataaaaaaagaataatcataacttctcaataagagtctaccttgtttcaacatccaccaacctccgacttagataagtcaccacatgctcctttccttcagtttcttgtgtcagaacagctccaatgaccttatcttcagcggcaatgtataatcggaatggtactcctgctcgtggtgcttttaatacgggagccgaagacaagtattttttaattagatcaaatgcttcctgccgctctgccccccaagcgaattcggcctcattcttaagccgaaggataggggtgaaggcatcaatcttcccggctaggttagaaataaaccttcgtaaataattcaccttgccgagaaacctctgcacttcgactttacaggtcggaggc

SEQ ID NO: 129250 - DNA, 754 bp, Zea Mays
taaaatagctacagaaaagttgaaccctttagttcagtttctgcttttctaaagcagaatcaggttcaaaaagctgaaccaaacacacccttctcatacctcattcctaagatttcaagttgtacttttacattggttctattactgtcctttctcttccaacatttcaggcccaacacaaatgtattttcccttcttgcttgtgcaccaccttcaccactattggtttctaactaatttgatgccactacccccaacacctgaacccatatttgtaagtggattaaagagtccaggaggaaccctaggtctagcctctagatccctaatccactcgtcgatgttcaatcttattggcagtctaccttgctttacctccacttggtacccttaaggatctagtttgtttgagcttgacctccccatggtaccttctttagatcccgtctgcttgagctccaactccacaacatacccaagatcaacctcccaaccattatcctcacatagggatgacaatggatgtcatttatccgcgtacccgcggataaaaaacccgttgggcacggttttgggtacgagtctgtacccatggatatggatacggatagcacttgatatccgcggatatttttaaaacggatacgaaaaatcattatccatacccgaatacccgaatatccgttaaaattacacccatcccacaggcccatgggccacatcgccacagcccacaactccacaagcattctcg

SEQ ID NO: 129251 - DNA, 798 bp, Zea Mays
cgggccctattcgggaaatgacggggtagggaccgacgaaacgtggtgccagttttccttttatttggaaccttttgacaccatgcatcggggagaccttgagataaacgaaatctccttcctcaaatctgagttcccttcgtctgttgtctgcgtaactcttctgtcgactctgagcttcgagcaatctcctgcggatcaaggcgactttctcttcggcttccttaacaaagtcgggtccctctagtgtcctttcccccacaatggaccacattaggggagtttggcattttcttccgtacagtgcttgaaatggtgacattttgatgctggcctgatggctattgttgtacgagaattcggcgtacgacaaactagactcccaatccctgtcgaaagttaacatgcaggctctgagtaaatcttcgaggaccttgttgacgctttctgtttgaccatctgactggggatgataagcggtgctgaaatctagcttggtgcccattgcttgctggaggcccttccaaaattttgaagtgaactgcgttcctctatctgatactatcttccgtggaatgccatggaggctgactatctctttaaggtatattcgggcaagggcggctcctccaaaagtggtctttactggaacgaagtgggccaccttggtgagacgatcgattattacccatatggaatcatttcctttctgtgttcggggcagtcctgtcacgaaatccatgcctatttcttcccacttccattcgggtactgggaggggttgaagtaggcctgcgg

SEQ ID NO: 129252 - DNA, 487 bp, Zea Mays
gtcgccgccgtcctgattcgtgcccagtgaggaacggataacgccggggatggataactcgtatgtggcgccatctcccaagtccagccggagttcttcactggcggccaccgtgactcggtaactttcgccgtggtgtcactcatgccgtgatctgcctcactgtgcctcctaccgacgtggtatgcatgcgctagcaatgctatccgtggccggagatcgtctgttgggttgccgtggctataaatagcacggtggtccacgacgaggtgtgactatcacacacacattcagttgaatcgaagccgaattcgcgctacctctgccccgtcctctcaaattaagtgtgcacagtaaaactagagttctttgtgaagctgaagcaccctctcccaccctcgattagccaccataaccggagaatcaccaatttcccccaaatcggtcagccgcgccaccgagaatagcccgatcgtggccagcccgc

SEQ ID NO: 129253 - DNA, 441 bp, Zea Mays
aggatgagtgatcgattgcaaatcctagaatatcacctcaagcacaagtgagaccaacccaaggacaatacaagagataagacacgagagttaccttgtggctcagctcaccaccaaagcttacctatacccatgttgttaagaaaatcacaaaagctttgggtctcatcgaaccctattatcatctcaagtcaaacaccaaggttgagctaagggttccacagatgttccatgcaatacaaagttcccagagcactccacaaaacttggatgcgttatggatgacctctagccatttaggagcacttgctctaagagtaacaaacaccaaccttgtcaaggacggtgtacccttgactcgccgaaccgcggctacgcagttcgtagccgtcggtcatcttctccagtggggattatgcctcccaaccgcaggcttaacag

SEQ ID NO: 129254 - DNA, 337 bp, Zea Mays
cgatttttgcgcacttgttgtgctagtccggctgcacccttaggcgacttttgcacggatagtcttttgaggaagacttcgattttgtgcacttgttgtgctagtccggctgcacccttaggcggcttttgcacggatagtctttttgaggaagacttcaattttacgcacttgttgtgctagtccggctgcacccttaggcggtttttgcacggatagtctttttgaggaagacttcgattttgtgcacttgttgtgctagtccggctgcacccttaggcgacttttgcgcggattgtcgcacgcaagggcagctagcgctgctcctcgcggtgac

SEQ ID NO: 129255 - DNA, 660 bp, Zea Mays
ggaattcctaggttagttttttttatcatttacataatttcctttccatttgtatttagagggtcaaatagactttttccaatatctaaggagcgcacacatttatatgagaattacgcatggggcttattttggtcatggatccaatgctgctctttgttttatactactggagcagagctcatgtgccttaccgcaaggtaattaaattagagatgcatggtaaactgtcaagtgtgtgtttttactacaagtgcatggagagcattaatcaaagagcaacaccaagtaatctttcactattttctttgttgtaacattactactcattactagcatgatggcaaccttttgatgcaattaacatgtccatgattgaatactttgcatgtgtgacagtggggttcatgtcatcagttgcttggacaattatatcatggaagtgattgatgcgtctttgcccttgcaaggtcggctgtctccctatactactataattcacctattgtccttttttgtagcactagacattctgaaactctagcacatcacatgaaggccattacatgccaaactttgaatttgtagctaatctgtgactgttacatgccaaactaaaggataatttgattatctctagagttcatactgttcctgaat

SEQ ID NO: 129256 - DNA, 629 bp, Zea Mays
gggagattacgagaactcgcccgaccccataggactgtcatgtggattagttgattgagatagttcatcggagcacgtagaatctctcaccagagttctccctccgtcgtggaaccgtttcacgtcatggacagcgttatcatcgccgtagtcttcggtaaggtagcctctgtcgagttcgccttgttctcatctatgtaaatcatcaagccacgttcagtttcgttcgctggatcgtcgggacgctgcgtgtcggcgatgccacgctatggggtaattgttgagaaaaaagagaagcaacgcatgccattggatactagatgggcgcacatgattagaatgggtgtacccttttggctgattagatcatagtcgtatatcagtgatcgtatggttctggttaacccacatgagtcgtctaagtacattttcctaaagagaccctaggtaattgtgtaatcaatctgcagttcatggccgattaaagaacattacaaaaaggtcctatttttagcaaaatagaccctggactttctagtaatccaacctgcagtcctagcccctatattttgcaactaggcccctctatttatactagaaattatgtagaagcccttgtaattcacaaa

SEQ ID NO: 129257 - DNA, 606 bp, Zea Mays
atgatacatgtcaaaagctcaaggaagaaaatgagaggctaagaacgagcttgacacaactaaaagggaagtgcactacccaaccttctcaagataaccgtgattacatggtgaaaaagcttgagacgagaacaaccgtggcatgcacaaaatcccttgaagaaaaagtctaggacttaaggattgtcaagaggaaggaacaaaagaagaaaatcaatacctctgccaaaagcctcaaccatgcctccatacaaggtaacatccaaggtaatgatcaagccacacttcacactaagaaaagtaagaagtgtagtgaatgctttgaaaatgggcacttgattaggtcatgtccctatattaaagagaatggcttgattattaataaggatgataaacattgttttaaatgctctaagaagggacatttagttaattcatgtccctatgtaaaacaaaaaggcatagttttagaaaaaaatatttactaaccatgtagcaagcaagaaacaaggaaataagaaatcttcaaggcatgaagatcgcctttgctacacatgtcgaaagaaaggacatcaatgtaaggattgtcccattggtaactattgc

SEQ ID NO: 129258 - DNA, 557 bp, Zea Mays
caattttccaagaatccagggtctactttagaaacatttggacttaattgcaataattttacaacggttagggatggcgggtttattttataaaaatgcagggactcttttgaaaagttgctgccgcgaagaggtatctctcgatcttagccgttggattacaccgacggcctgaattagatcccgcccattatgaaccagcgagcgtgcaaaaccgtccgatcacaatccagcgtcctagatccgcagtggcgaaagggtatgcgcgatctaatcggaaccgtccaaactacgatcaacggtcgacagcttcatctaggcaaaggggtagcactttctaatctaaggcgcttataaccaatcggacggcccgtgttcatctcctacctcccgccccattcactctcctcgcaagccagccccgaaagtgaccgaggccaccacagcgtacagtccggccacgacgccgtgcccgcccaagcactagccaatctgcggccgcgcgtagaaggcatagaaaatgtcaacacagcagaaaagacactcaccgatgatgg

SEQ ID NO: 129259 - DNA, 709 bp, Zea Mays
ccattctttgcttgtattttgtcagacacttgtaagaccttggtaagatacattagagcgtgttcctgtgttccacccgagaggagcgtgtagtgagattattagggataaccttcaccgtttgttccctgtttttgtgtttcgatggcagacgacgacgaagaagcaatgatccctacatacttcgatgaatatgttagccgccaagatcttgaggcaaacaacaagctcctaaaggagcaaatggaggagacggtccacaaatcagtgcatgatgccttcattaacatggaccttggcaggacttacgagaggctggatcgatgattgtcccagatcgtcgacagacttgctgtgttggagacgcaacaacaagcaccgccaccacctcctcgtccacgtcttcccgatgatgcggtgattgatgaagaaggtaattatgatgaagcggccaccagagatttgcgcctccgtcgtcgtcttcatcaaaacatagaaggtatgccacaccgccagcaaggtaataagaatcgtgctcctgacgacccttatgctaagattaaattttctataccatatttttcgggtcattatgatgttgagggatatcttgattgggagatgacgatagaacagaaatttgttgcccaccttgtacctgaacgacatcaagttagacaagccactagtgaatttaaagattttgcta

SEQ ID NO: 129260 - DNA, 437 bp, Zea Mays
agacttgtaacaggaaaaccgttttgattcagcaatcgaaattcatagccgcggccacagcggcgacggcttctccggctcatcgtcggttaaccaacagtggttgctgacaagtggtatcagactcatcttctggtcctggcggcttctctgcactttacgagaagtgcacggatggcaggcgcgtcagatcctagcatcgcggacgcagtccaagtcaattgaggctcaatcgaagacggtggccaaccagtccaagatcctgcaacatctctgcgatcgcctggagtctcaggatcagaggtggagcggcttagaaaaagcagtcaacgccaacgcggacaacgtcgccaagttgcatgagaaaatggctgaaggggaaatccagatcgggcagtggcaagcagaccagcgcgatcgtctcgacaactttgctg

SEQ ID NO: 129261 - DNA, 435 bp, Zea Mays
cgaccatataaaacatacaaatatgcaatatacatgtacatccatcttttgcatataaatatataatatattcaacatatacatgtgcaaccataaaattaagtgaactgtaataacaagaacaaataagaggttagcgtgcttgaaattgaaccccaatggttttaatagctgcttgccagtgaaggttgacacatcttgatctggagtagttggagcagaaggaggcccttgaatagcaagacgacttcttttcttgccattagtctttttcgaacgtggttgtgggggcgcagcacacggcactgcaatgattttggtagtggttccgatagcggttcctgcactatcacatgatgtgacagaggttccaacaataattatgggagtagcagatggggttgcggctgtaacatcactggtagcatgtggtgg

SEQ ID NO: 129262 - DNA, 360 bp, Zea Mays
gcaagttctttcttgcaaaaatgacaccttgctcctactctaacctaaacaccattttcagtggcgaaaatcttatccatatcctcccagacatcggatgtgcatttcctctttctacctgtgcttgtcgtagtggaggcagtagtatctgggagagcctcgccctcggcagcgacattgtcgtcgccaaggtttatggtagggttaggggtaggggcaatggaaccaaagagatcctccagaccatcgtgcacgtcgtccacatcgtctggggtttgacccatcaacaccaaatcatgattaatggaggtaggatcatacctatgctccatcgccggcacctagtccctcacggccacg

SEQ ID NO: 129263 - DNA, 303 bp, Zea Mays
cgatgaggagccgaccacgtcggttcttcgtgtgtacagtacgcccgcttggcgtgtgatggtgacttcccccgcggtgtgagtccagctatttccctggtttcctggttgttgcgcggtgatggtctgcacaatctcccttctgcctcagtgccgatcgcgatcggtggtaatggtggtcacggtggccacgagctttctgcaggccatggagagatgagaggagaacgtggaggctagtcttatagccgaggatgatctcgcctggcggctaccatgcatggcgcttggtttgttacggag

SEQ ID NO: 129264 - DNA, 373 bp, Zea Mays
gtaatcaagagaagagttctctctccatctatcttctcatcctttgctagattggaactgatttggataatctgccaagaaagtatgtcaccactttgctagattcccatctaagtgcatggatgctgccccatcgtaacccatagagttgtaggaatgctgaaaatggcgaagtaaattgtgacacttgtcgatccaagcagcatcaaatgaagggaacggcatctttggaaggatgtggtgaggtgaagtgtctttctttgactgttcatgtgttgatttgtggcgtgtattgaagaagtttcagccttgttgacgctctcgccttttgcaagcacattggtaaacggtgcctcctcctcaaagaccactg

SEQ ID NO: 129265 - DNA, 475 bp, Zea Mays
gattttgattacaatcttgccacagattctgaagcctaatcctcagctaggggcagtgtttctttggataccgaagatgctcctcattctcacccagactacccaattgatattacaggatggacctatcctaagatgcgcttctcaatggctgagtattcttctagaaggactatagatcaattctctctacctagtgacaccaacattcagtacttccatactcagttgcagtttgatgtgttttggggcactctgatggatatcaaatttcataaacatcaagttattgactgggactacatgcagggccaaactgttatggaaggcttactagcaaaatttcaggcctgtggcttatatgagttcatgggtcaaagaactgaatttaatgaattaattgtcaagcagtttcttgccactgctgaaatcaacattgatgagcagctcattgtatggatgactggttttaaac

SEQ ID NO: 129266 - DNA, 888 bp, Zea Mays
taaatttggagtttcagcctttgtaaaaatagaaaactcaataattcgatggggtaatccaacaaactagctaaaaactgaatagttacctaggaggcccatgcgacagaaggcccacgactatagagggtcatttggcactaacacgatgggccagcccagccacgacacgaaaaaacacgcacaggcatgacccggccctactagtatagtgtcagtgtctggcatggcacggctatagtgccgtgcctgggccaccatctcgaccctactagtatagctcgccaaaggttgcgaggcgaggggatggaatgtcgagcgggattgcaagggaggagtttaccgagaccgttggaacggacttctactgattttcattttttaccattggaaaatgagttagagaggctgttggagttgctgttactaacccaacaactcagaatagttttggtattataaactattggaatagtttcagtaaataatgcacataagatccaacaactcatagcatactggaaacttaaacagttaaatcatgtaggcaaataatacacaatgccatgagtttaattggcaaaagaggtttaccataattagtattcacaaaacagggttaagaccccgggcccgagccgccccgcgtccgttcttctcctcggcgtaatggagcataaaatgattgtttcttccttcccccactctctccccattgatgccgtcgccattaatggctttgaagaaccgccggccgcctctccctctcctcggtgccctctcctctcccctgcctctctctataaataccggccgcgccatggagctctcctccctacccgagctcgccccctctctctcactctcctagctcgcccacgccgtcgc

SEQ ID NO: 129267 - DNA, 343 bp, Zea Mays
atgaggagtattggaagtctaccaacatgcataggtactacatgtaccttaatgctttgttcagaatgactcattaccaagggaggaaatcagatgaatgtattgggtgagagcaaggtgttgttaactttcatgaagcctaatgacagatccaggctaaacctttttgatatgatctggcacgagatttttcatgtctcttgcagtccaaataaggatgtttgcatgccccattcatcatgaaaatggttcaagtggtcactctaacttggtttgagaaagagtccagacattcaccttatactccctattgtattgacccaaacaacccttccagtcggat

SEQ ID NO: 129268 - DNA, 524 bp, Zea Mays
ggcttcctcttttcgttctatctggcatccttggctcttggtccacttccggatcttcttagtgggggcgagcttctttaacttcttatcgtaatccatctttagggttcggtaggcttcacgagtgttggcctcttcaccttttgctatttcgagactttcttggagggacgccttctcctcttttaatttcttgatttgttgctctaggctctccactcgggagtttaggtgggtgcagtgggagaagaggtcatcatagtggttgtcaagggtgtggagatatccggccatgtagactatggtggggtcatcttcagtaggatctcttcctaacagggcctgaagtcttttcctccaggtaggggtatttttgttgctgggtggaaaataacgaaggggtgtctcaaagacttccctgctgtagttttggcatagctggcggagggcttttcgggcaacattttggcaagtgtctgggaagcggtgtccagtgaaggtgacttggaaaggagggtgatttg

SEQ ID NO: 129269 - DNA, 489 bp, Zea Mays
atcaagttctctggtgccggtcttgctgctgagctcggaggacttggaattttctcttgaggtgacctttttcttcctcccttgctctttccacttgtatagctttgtttgagaggtgcaagaagctgaggaaatcttggctagctaggatggtcttgagttctggtctgagccccttcaaaaagcgggccatcttcttggcttctatgccgacgtcatcaggcgcgtagcgagccaattctgtgaatttgtgcacgtattcactgacagatcttccaccttgagttagttctcgaaattcatcttccttgagctgaacaatcccttggggcacatggtgctctcggaaagcagtttcaaactctgtccaggtagcatctctgacggcagtgctgaaggtatcccaccatgctagggccatcctggaaagttgatgagcagccaattgaacacgctgattctctgggcatccgatggcttctaacttcc

SEQ ID NO: 129270 - DNA, 678 bp, Zea Mays
ggatatttcacgtgtcatctagctttcgtgctgcagttgtcgttttagctttcttgttctgtgattgcaattgtttttgagctttggctttctgcagtgatcatcatcaaaatggctgaagataagaaaagtgtggatcccacactcgctggcttctacgaagccatggagaggaccaacatagaaaaaaatactaatgaaatgttagctagactatctagtgattcaagcgacagcgaaagcttcgatgttgagagtgagaatgaagatgtcgaagattggccatggagaccaagacacgttgttcttaggaaatcaactatcagacaagggcaaattgaagcgatgaaagacaaatattttcatgatgtgtccatagtgagtgctgggggagaagacaccattcccctcccagaaggtgatgaagtggtggtcttcaggagattcatgaaagttgggcttcgctttccgctccacaatatgctggttgaagttttaaagacatttgagatataccttcatcatcttacccccgaagctcttatcatagtggaggtttttatatgggccatgaggagtcaaggactggagccagatgcgagatgcttctacaatattcaggagctctcttatcagatgaaggcgaccggaaaggaacaatatcataacaactttgga

SEQ ID NO: 129271 - DNA, 962 bp, Zea Mays
ataatgcacacaagcatcgagtagtaagatgtatgcaaaccttattaaacactagtcctaaacctagagcaagcgcataagcgatggcttgattagcctaaacacttcagaaaacacctacactaattaccatgtgtatcactaagcaatatgcaagtagagatcactagaatggagcaccagcttctttgatatgttcttcagctcccacacacttcaaatggccaaccaaggggcatgggaggggggggggtatatatagcctccaaacaaaatatagctgttggagactgcacaacctttctatgtaggcacagaagagttcgatgcacccacagaacacgtccggtgcgtccatggcagctagtcgttgagcttctagccattaccaatcgttggagattgagtgtccggtgagccactaggcatgtctgatgctttatggcctttctccaatacggctgcattcctcgctgagttccctattcggtgtgggaattggtgcttcattggacccgtccagtgcacacctgcttgtcccgtgcgtctgattgcagttgcccttctttgacatagtgttgtgctattaagtgcccttctcaacattgcaccgagcatgttcgatgtcactatgcaacatccgatttattctgtttcttcgtattgagttattgcaccaaccagtttaacccaaaagcttaagttgatggagagatgaacaattcacttgtattgcaacacttcccctcacatggaggcttcctgaggtctcagatgtggaacaggagtgagcaactattacttcattgaattgctctaatcgggattgggactcgagacctttagctccgataccatattgagttgcatgtatcaatcaattcagcccaaaaggttaaactgatagaaagaggtgaacattcacttgtattccaacacactttgtatgtcttcatccaggc

SEQ ID NO: 129272 - DNA, 444 bp, Zea Mays
aaagagatggccatcgtcaatccaactttagccatgtgaccacaaccaaaagcaatggtggccaagacatcctgagctaccgaatcaaacaccggtaagctgccctcatccaatgagattatgcaccacttgaaccaatgttgtgatctctgttgttggccaaaattggggagggggattgtgctctctacttgagttgtgtcgggtgatcgatgtcaagggtttccatggagggctctagggagaggtgcatttagcagggtaaggaaggcgaggctgatgaggggtggccgacaatgaactaggatgcaaaggatatgctcaatgaaggtggagaggatggaaaaataaaataacccacatacatgtgggtccctagaagggcaaacttttcaatgataaacaagaccaacgagacttgggtgctccaccgctaaatctgaa

SEQ ID NO: 129273 - DNA, 518 bp, Zea Mays
attcctggactgcgccccaaaattaaggaaatgcaggggccctggcgctaaataactaagacacagagcacagtacaatggactgcgggttggtttcccaaacatcgaggggctctttagcaatactacacagccgaaagggtatcgatgaaccagatccgtccgatcgcccatcaatcgacgggattagatcccccctaaagtgaacaggtataacccacaacccttggatgcggcatccacggttccagacagcctcaacacgattccaccccatccactcgatcaagcgccaaaggcttggattcaatacgcgaaggggtaaatgctacttctcatcccagccgtccatctcaaatcctacggccagggacctaattcctccttccccccaacgccacgacggcaccgcgttggccacggcggcgaccttgccggagggatctcaatccggcgctccacacccccatactcaaattaaatgatgcaacacgaaattgaggacatggtttagcagt

SEQ ID NO: 129274 - DNA, 413 bp, Zea Mays
gttaggctactctaaagttgttgcaccgttgtgtctgaactttaggtgtcgttaaaaccaccaataaatcgaccgcgttttgatagtttcagagcccaaatttgggaattctctttaaccaaaacttttagtttttctcagtatcttttaatgggtatttacttgtaattgtctgttaaatagattgggtgacgtggttgtccggatataagtcgaatctccgatgtgcagtatctcaggctgagtttagttgtaggtcatgcagatttgagggctataaagataaatttgggtgcaagtttattgcaaaagtcatggacaatttccaaacttttccaacgcgtgatcgttgtagttttaagttgagtatagcaggagttataggattttgaattttagctgtccattgtttc

SEQ ID NO: 129275 - DNA, 588 bp, Zea Mays
ccggacgccagcgctcaatgtcggagcgcatttcctccagcgccacgagacggtcgtcgccgcggagagccaccacgtcgacctgctcctggatcttgtcacagcgcgtcgtgaagtgggagtggatatcctcaacacgccgttcgatgttgtcacagcgtccggcgaacttctcggagagccgcgcttccatcaggcgcatttcctcgagcacctgacggttactggcgtcggtgtactccatagctgcggtggtggcacgagtacgccgtggacagttgttactgggatccagagtgcctgagtctgataccaaattgttagcgcgtggtggagaagggagcagcagagggaagaatcagaggtagaagaagaagactggggaggaggcggcggccagaacagccagccaccagaggtagtatattatcttcttctgtttcatcatgctctcgatcgttcctagggtctgattatttataccacttcattacaatacggcccatccagccttacacggcccattccggcccagaaactctcacgttccggcgtttcacccgtggcgtccgtgtagcagctccttcc

SEQ ID NO: 129276 - DNA, 1090 bp, Zea Mays
cccggatgcattggtcccgttggtgacaaaatatggacgctatccatatcacatgttgatggtgttgaatagtaagtgagtattcagagataataaggaacaaagttggattttgtatatgtaagctgaggagtctgatattacttctaataaagcagggaggggatattcgtatgaatcgtagtagggaaaaatctaaaaatttgttataggtagtttgatgagaaatgtagatgaccctaaatagtaattcaacatttggtgaacatcaggaaatcaaaaaaaacgatcgatgaatacaaaatggagtcaaagtgagcgaagctggagggaagccctaatcactcgtgcacggaggaggaagttacaaccaaaaacctaacaccaaagccctaatatttggccgtgttcgatggaatcagaatgaaatgaaaaaggcaaaacctaacacggagaacacatagccagagaagtctctgtacaagtgtggttcgtcagcacgttgaggattgggtgcactggagatgatagcacacgtcggaaacaccacgcggtggccgtaagtaacagtgtggttgctgatggggaatgcgacactccctttcccctatcgaaggcgcgatctattaatggaagaatcgcatggcacaatgaagagcgtaaacacgtggagaaggatggacagtgaggcaccatcgccagcgtacggagcaaacaagtgtggggaaggaggaggagcggcatgcagtacgttcggtacccagatctccacccgtagagaagccagcggaccaccgttttccttttgaccggatgaacctggcagccttatcttgaagcatcccatggtgtggggattttcatgatcacgtgttgcatcgtggacgtgcacggcgaatcagatgacagagataaattttagagacgtggacacctctgcgtgccagattccctccccgctttattagataagaatgtatgactgtacatatgaccacacatttaacaatttcctgaatactatgaagaagaagtacattttagtatattcattgtcaaagtgtacctgtctttggatggaagtggcaag

SEQ ID NO: 129277 - DNA, 424 bp, Zea Mays
tgaacttattgagatactgcattacagtatatcccccttgctttaaccggatgaactcttcttgtttcatatggagcactccctctggaacataatgctcgcggaatgctagcttgaattcctcctaggtgatctgatgtccagccggttgaattgctgcaaaatttgcccaccaagtactggcaggccctctcagctgttgtgcggcaaacaatggattttgcgtctccgtgcaacgaatcaacccaaatttctgttccatcactcttagccactcatcgacttctagaggttcttctgctttaatgaagagcgggggtcgagtctcagaaaattccaagtatgtagtttcacacggtccttgaggaggagctctcccaccatgcggatgaaactaattgcccaccatttcgcgcaagaagca

SEQ ID NO: 129278 - DNA, 971 bp, Zea Mays
tgcgcgtgcaggaactatacctgcttcttcgcttcacgtgtgctgctgctcggccatgccggttgcctgtaacggcgaattcggaccagtgtccatctcaacctcggggagaaacagaagaagaaccggacgggatgcccacggggtcctgggaaattcgaacacgtctccacgagccgcgcagtgcgccaaatgattgcgtcctccgatcgggtccctcggcttcgctgctctacaccacccgcgcacgcgcccgtcacagcccgcgataaacgaaagagatcctggacagggaaagcgagcccgtgcggtgtggtcgagccagccagccagcgaacatggcacagtggaggtggcaacgacaccggtgaggcgagcctggttcctgaagaactcgctcgcctgctctgcctccctccctctcacaaaatcaccaggggttgcgggctgtggccctggagggcagggcatgcacgcgcgcgcacgaccgacgaccccctcgtgcaagctgcaaaccaccaccccacctcgcccccacgttcccttacgtgccctcccgtccagcgccgcgcggttgcccatcgaagcggccaaggcagggcgccagcgccacccggcccggccccttctcctgcttctgcttgctctggtctccctcctcctcgcgatcgagctcccgcgcttggcttggcttggctgcgcacttgtctaaagtctaaaccaaagccgctccggccatggtcgcgtcgccgtcacccacaccgtcggcaccctcgtcctcgccctgcagctgcagcagcagcagcagctgcagccccgtcacgtccggcgcggcgcaccgccgccgcctcccggacttgcccgccgcagcggaccgctccggcggggcggcgcgtgcgagggccctgttcttcgcccggagggccagcggcaagcgggcggcggccgtgctcgaccaggcctgggcgcgg

SEQ ID NO: 129279 - DNA, 1921 bp, Zea Mays
taaaaatgtgcaagccgtgacgacgacataggtcgtgtgggctgtgtttctttggcgcggcccaagtagctgccaggaggccgcacgcttcttaccctgacccagcttggctttagggtcagtctcccttgctttctctgcccagcgagccctcgccctctagctcttcctgctagcgccgtctctgtcccatgctctcctgttcatcgtcgatctccagccatctcaggagcacctgctcactcccagacgcccgcgcaaaggaatcccccatgatctccctccaaactgcccactccctccacgatctccccctctagctcatgatccctccgcccgcccccaccccccgcctgccacgcccacgggcgcaacaagccaacaacccacactcggccccgctaccccgatccgtcgccataaatccgctacctcctcctcgagtcctgcttgatcgccccatgctcgaatggtcgactggacggaagggcagccccgaccatgaccacagcgcgatgtgcgacgagtgagggcgatggcgggggttgcgaccaacgacggagagccacacaaagaagcccgtcggcgatgttttccttaaggttcgctcgctcattccttccttccttgtgctattggcgtgtgatcctagctagcgctctcttgatttcatccttatccacgtgaatcctggatcacactgcatgcagatcggattactggaaggccagaccagctgctcgcattcactggtgcacggtgtgggagctgagagctctgttcctatggccgggccccacctctcttgggcccttgtgcagatatgcagaggtagtgtcccctaatttgtttgtcatgtcccctaatttgtttgtcagagctacttgaggatgtcaatgaggtatggctccgctggttcatcagtattcagtaattacaaggcattatgagttagcatgatccctcctgctaagctagctaaatgtggttatcaggtctcaataagtatccatttttaaaagtataaattgttatagccatacatgcaagtctttattttggaaataaccaaaggttctgaacctgcattgtgctaactcgtcaatcattcctaaaatgcgattcctttttttcattcagagttcggttggacaaaataagatggattgagatcttagttgttaaggtagaagcaaaagcaccaccactgaatcctgtactttaaacggtgatagcagcagttgcggtcttcgatatcttagtgtgttacttggtgataacagcagctgcgatctccaatattctagggcatgtttgcctccctcttctaaacttagatatctaaaagctccagcatgttttagctttcttttgatgtccaaatctctaatgtaaggtgggctaaaggttaaagccaactttagaccacctgatgcatataaggaagaagggtccacatgcaccattctctgtggcatagcaaaatcgagctcgatgtccttgaagattgatcgagataatattagtcagtactaaatttaattttaatgacaagtttgtaatggtaggataataagggatatgttacaggttgttggtttcttggatgaatatgttgctgcatagggttaggcctgaaaagggaaacagaacaggattggtttttgtagctctcctccccacatctctccatgggattggaatatatataactttgtgagtttatatggaaagcaatagatattgtttatttcctctcttctcttctctcctctcctcttctctctatgccatattattgcttttaaactaaggcgacactgctgaggcactattatatgtcaagttcatatattaagaatttgaactctagcctattgatgatgataattgttcattgtctgaaattcctctatttgac

SEQ ID NO: 129280 - DNA, 589 bp, Zea Mays
aagaatgatcaaacaaacaacatatgagttcatcaagatgccaaaaggatttggctttgatggaacatctcaacagagtagaagctttgctcaagaaaacaaataacagcgcactaccaaaagctgacacaaaactcagcttttaacggaattctaagccataaagatggaaccttccattccctcaaggcatactggatcatctttggatcaagggaaggatcggtgaaaaaaaaagtgcacaaccgaatccaagattctggggttctccggctgtggccaaaatcaaacactgctgaattaccgaacaaaactaactgatgagtcactaacactgaggtgcaaacctgacaaaactaacttatacccaactaaactgaaccctccaggggataacaccctagtctttacggatcaactacgcggcatacagctcacaaagtcaaacacttggccaccaaagaaaggcaccacaagcttaactgaaatcaagaaacaacggtacgcccaactggaaaacatacgtcggagacctgatccgagtaggatcccctggtctgatgggctagacgatctacccattcgacga

SEQ ID NO: 129281 - DNA, 486 bp, Zea Mays
tttacctacaggtacataagtatgggtagtatccactcatactcgtttacctaacagttataaattcttgcccactaacatatccattggtagagaaattattctatacccactttgacatcgtgtaaaattcgtcggatttttggtttcgggtactcattgcctctaggttccaccctatagtacacgttaaagagggtggagggaggtgtgtggggtgttgttggagaaggcctcaatatacgagcatctccgcccgatctctgatagtgcaactcctatacgttattttaggcgagtagcttaaaatcaatttaggacataaaaagtttaaggggttttcactttggatgcaaatactctatccggtctttaaatacttaacttttaaggatttttgactttggatgcaaatacttgatgttaaagtatttgaaactcattttggactagtatatccgtgatctaggtggtccgcatattctc

SEQ ID NO: 129282 - DNA, 289 bp, Zea Mays
tgtaattataagaatgaatttcaattcaaggatccaccttattccaatgtatatatgttatggtgtggtgctcgttttttcatcgttctgcgaaaaaagtaaaccaacacgctctttcagttatccttatccaccacaagcagaccatctcagctctattcctttctcagccgcggtgctactgcggccgccgcccgctctgcaatgccaccggcggcggctggcgattccttcacgcaggtctcgtcggagtggtcggacaccacgttgttgcctcggctggtcacgt

SEQ ID NO: 129283 - DNA, 357 bp, Zea Mays
cggtgtaagttctgagggccggaagacatggaaaactatcagtcttacaattaagaaataccggtatgcatagcatacaccaataggtccttgttccagaataaatccataagcagaagaattggaagggccacataaccaacatgtcaagaggggaatagggcctccaatggacccgaccggcaaagtgcaaagatagtccacataacaaataaccggacctccagccatcaaaattaaccatttcaggcagcacagagtcattgactccaacatatttaattgtatcaaacaggaaagagacctcgattccatcagagtacgtttcagaaaaagcaaaaagcgccacatgcgcgc

SEQ ID NO: 129284 - DNA, 390 bp, Zea Mays
cggaattgccgaagccatcaaagatccccgcatcaactccaagaaaaaggagaatgactagtgtgctggatgctgtaatggagtctgtgaaaacatcaactcctgcttctgccgaagcacctaggacggaagccaaagtttcaaagaaatctgacgaggccggaatggcgcagactatttttgaagctggacaatcagttcctgccaaagcaagatcttcggaaatcgcaccgataatcctggaaaaagagggtgcctctgagaaatccaaatctcctggtcctggagcacctaccaaagagctgtaatttattgtgcggtatgcttcggggaagcaattatcagaaaagcaaattgtcgaagtatgcaaaaatctaaagtacccccgag

SEQ ID NO: 129285 - DNA, 449 bp, Zea Mays
gcccttatcgagggacagtgccaaagtggagtcgtccacagtacgagcagttttatgacgttgtttgtgctccggcgagcaattgatgctgccacggtggctggctgatccaccctgtctcggccacgggcaccatcctggtgatatagtgaagttcctcgggttgactttgaggcctcctttatgacgaggacgcgggtcaacggcgacggcgtggtgcgactccgccacgatgactggctctggtgtatgatgctcctgcgctctgatggatcccgagcccgactaggtacgcacgcgtgcttccgatggtctcgcgatgcacatgggctacacactgaagccagagaagtgctcatagagtagattgatggtggtggggctcccttctccctctctactctctcacgatgatggtggcttctctgattgaaggtggtgacccaaag

SEQ ID NO: 129286 - DNA, 838 bp, Zea Mays
tgtcatcgaaaaataccagaacacaggttctcaacaaggaagcaagtgtcttgttcatggctccttgaaacgttgcacgcgctccgatgagtttgaagggcatgacacaaaactcaaattgactgtgatgtgtttggaatgttgtcttgtgctggtcttgtggtgccattcttatttgatggaacccagctcgcaaatccaacgtagaaaaccaagcagcaccatgtagttcgtcgagcagttcatcaataattggcacgagaaaacgagtcttaacagtgagggcatttagatgtcgataatccacacaaaatcggtatgtgttatccttcttcttgacaagaattactagggacgagaattcactttgcctgcatttgataatgcctgaaaacaacatttctttcacttgctgttcaatttctgtctttagtgctggtgcatatttgtatggtcgaatatgtactggttgggctcccggcaacaatgaaatatgatgatcacagtctcgttgcggaggcaagccagtaggtagggccaatactgactaaaacttccgaatcaaggactgtagctcagccgacaatccatcaactatcagttggtctttgtcaggtaggttctgtatttggcaaaagtccatagcagaaggatggcctttgtagtaatgtaatcccattagttttatccaagatcccttgtaaggaaggaacaaccatttgttagaccagtgtaccatcatagggctgaacatttccaaccaatccatacctatgatcaagtcatacgtctgcaatggcaacaccggtaggttggatttgaattcatagcctgaaag

SEQ ID NO: 129287 - DNA, 389 bp, Zea Mays
gtttgagtctatcatcttctactgcgatcgtgcctactcttcttgtgtttggttgcttttctccgagttatcctcggagtaggtcgccatctagtcgcatccaagatgcgtctcagaatcccaccattcctatgtgacaaatgcacatggatagtgttctcgtgtcgtattcttcgagtttgtttcccacttggcacgtcatcttgtttctcctgatcttatttcgcctgaatgcagcccgatggcacacactgttgggcgacttatcatgggtctgtttttattcccgcaactcgcctaacaaatagggcaacgactactatgtaatcagtccttatgtacaagcgttcaatcgagcatcttgatccgttaaatcatgattcaactgt

SEQ ID NO: 129288 - DNA, 650 bp, Zea Mays
tcgtagacgcgtaagaatgcttaaacaagggagcagaggggaagagctaaccggagttgggctgaccacggcggggttgagttcacggtgttttagaaccgaattggggagaatgcgcaattcgggcgtgctggtggacgatcgagggtgggagcgggtgctacagcttcacaactacatggcgcagctacgggcgaggtcaatttatagagctagcgggcggtggccgcgaatttgagcaagacgcgcggcggccggagggaaagaagaacactggcgcaaacaaattcgtggcaaacggcgtggcaatctccccggcgacgatgggacagccttaaggtgtcacggtggtgcggtggaaaggctaagccacgcggcacatggccgggaggcggcggtcatcggcgagttaatctgcccagccgcaaagagggagagagggccacgggggtcaccggagtgatctccagctcaccgtcggcgaagatcttttaccgtgtgcccttatctgcccatcccgagcacaagtcgggccggcaacggcatgaatcacggcggaggtatcgtcggcggtgaaagttccgcgctggcagcctgatccaatccaggctactgtaccatcacgagtttcagtcaaatgaacctgacag

SEQ ID NO: 129289 - DNA, 466 bp, Zea Mays
atataataaaaaacaatctgttataactgttattacgtagagcccactgcgtcctcgctagctcatgatgattgattgaagatttgcgccgagacgatggtggctggaataacggagtatattatgcaatcatgagctccaatctgtccgtaccgggagccggccacatcggcaggtgtcccatcatcatctgctaaacaaggaaagagaggtcgcagcaggggccgcccggcagtactgtggctgctgtgacactttgatttcttttcaggaaaaaaaaataaagccctttgcagccctcgaaattgggatattggtccccatctcggggatcgtgaatatggccgcacttggcctcgacggtacgtgccttgtcacgagacataaaacaagggtcgtacagtaataaatctagagaaactacctctttccctgaataattgtatattcttacctcagatattca

SEQ ID NO: 129290 - DNA, 479 bp, Zea Mays
gtcgaatgagacattacttggtgaaacaagcacgatgccaattccttgcccttcattgcaaaccgatcctaccactgaggtatgatatgtaacagtgaggtatgataacagtgaggtatgatatgtctagtttatgagtatcattgatccgatgttctacaataaaatctgctacgacctggcctttcatacatttcaatggttcataggccaagtcatactatataagtgcataagcccatttaccaatcctaccactcataatcgggttttgcaacatgtatttaatcacatcagtttgactggcaacggtgcaatgactagacagtaaataacatctacacttggtgcatgcataaaataggcataagcataacttttcgataaaagtgtaccttgtttcagcatccaccagcctccgacttaggtaggtcagcacatgctcctttcctccagtcacttgtgtcagaacagcccca

SEQ ID NO: 129291 - DNA, 466 bp, Zea Mays
gtgggccggtgtgacctcagccgcgggcgatggccgtccgtcgtggctggctgtcggagggtagaaggagagtccttggcggtcggtttcttgatggacggctcggattcaaccagagccataccggttgggtggataattcgcagcccctggatcgtgatcctgcggctcgggatggaatcgctcgtgattaagtgcccaccgttgatctttgatcttgtggactggaatgcgtaccggttcaattggggtggggatctaatctggaccatctgggtcagatcttatggccctgtgtaacccataccccttcggcctgtgtttttataaaacgaaccctagaaaacctaggaatcaacatgtctttcaatgcagcagccctctgtgtctgtggaatcttgcgccagaccccctgcactttccagaaatcgaggcccagtccagagtggattaaaaatagtgaaat

SEQ ID NO: 129292 - DNA, 695 bp, Zea Mays
gatactaccgctgagtcaactgaaggtgggttggttcgattgaaatacaccttcaggttcagagaccagtttgatgagccaaatgacaattggctaaaaagtattgaggctattagcgacgaactacttggagcatatagcagggctgaagatgatgccttgtccgcagccttcgggggccgagggaagaaaagattaaacagagtatttgatgccattagcttcgtataccttgattatcactactcactgcaaaggcaagggaagaaaagaaaaactatcgcttcgaccattactgctgtgccaaagggcaagaaggtgaaggtcctgacccaccggccacgatacattgaaccagccgtagtgcctgaatttggcgacgaggcctcttcaactgccgaagctcgacaatctactcagattttgcagagcattgaagagccgactgtagtgctgaaggcacctacagtcggagcagccgaagctaagactgctaaggccgaagagccaccggcggaaaaatggggaaaatgcctgaaattctgagcccaccagctgaggcaagtttgtcgaaggtgcaaaaggctcctaccgcaactcccaagaggtggagaatagccaacgtgctggacgctgtcttggagactacgaaggccttgagccctagagctactaagaaagatgttgaagctacc

SEQ ID NO: 129293 - DNA, 364 bp, Zea Mays
gattaagtttgatatggccacattttgatttcctgatactatgtacttgctttgtaatgtgtaactggtaaactgattatgatcaactcatttaatctattttccccttcttttcgttggtgttttgctatttttagttacttttggtaggctgaataatcctacgataaagaatgcctggaaaagttaataagattttctccattgatctaacgggtattgcaaagatgaacagcacatgctaatgaaccaggtctacttttctgcctgaaatatgaggagtctaattttcaccatcaaggcatcaacaataaaatagcttcaaataactgcccatacttaaaaccactcatgtgacaattca

SEQ ID NO: 129294 - DNA, 1265 bp, Zea Mays
gaaggcacgcgaccgcttcagcaccccatctacttcataagtgaagtcctcgccagcatgaaaacacgctaccccaggtacaaaaactcatgtacgttgtcttaatcactaaacgaaagcttagacattatttcgaatcgcatccgatcactatggtgatgtcgttcaccctgggcttagtgacccgcaatacaaatatttctgggaggatcgccaaatgggctctcgagttgatgggatatgggatctcctacactctgtgtacaatgatcaaatcacgtgtccttatcgacttcgtcgcggaatggaccgagacctaaatggagctagcaccgactaccgagaaatgttggatcatgcattttgatgggtcactaacaaagtagggagctggcggtggcctcatttttatgtcaccatcaggagaatatctgcgatacattgtgcgactatgttttcaagtttctaacaacgtggccgagtatgaagccctcatgaagggcctacgcattgccgtagagctaagtgtccagcgtttggacgctcgggggggctctcagcttgtcgtaggataagtaatgaagaagttggagtgttgcggccccaagatggtagcgtactatcgggaggtacgacaatcagaatactagtctgatggccttgagttaaatcacatccctcggcgagataatgaagcaacagataccctcgcaaagatggcatcaggacgaccgaccgtcccacagggagtatttgccactgaccttttcaatcctcccatccgatacgagaggccggccaaagagacgagcaacccacaggcatggagccaccggtcccagaactggtcgatattgtggaagggacaaaccttccagccaaccccatagatgactagagaacgttgtatcacagtttcttaaccaatggcctacttccccaagacaaaacagaggttcaaatgcttcatcgatgggttaaattctttgtcatgattagaggagatctgtacaaaaaggggcatatcaggataagacaattgtgcatctcgatcgaacagggaagacaactcctagaagacatccacgacgagacctatggataccacgcttcccctaggagcctcgtaggaaatgccttctggtagggtttctactggcccaccatgatgttagacgcacaccaggtggtgagaacttgcgagggatgccagtactacgcatggcagacccacttgcccgcacaggcgctccagaccattctag

SEQ ID NO: 129295 - DNA, 722 bp, Zea Mays
cggaccgcaggttgaatacctataaacagaagggtttatttgaaaggttgtgtggccgaaggggtacgggcgcaagagattcatttgatcgcgatctaacgactagagatagattataaagcggtacgcgaggacaacccttggattacaatctgacgacccaggtttaatgaatcttggactacccaccgccatccgatctaaatccaacgttccacgattcttccccgaacgggcacccaccagatcgaatcacagacgctcgatgcacatccaatagtaagccataactccccctcttcccagctgaacacggcggcgcaggagcttactgcggtgaaggtacgccggcgtcggcccccgcgataaccaccgtaaaatcccacgcccgagcctgatttttcgtgggcacttgaccaccacgatttccgcccaatcgtcccccccataccgaaggcacacccaggaccccatccacggtgaggccccgcccgcgacggcgaggacatggccggctacaacaatcggccaaatcctgcccgcatattctatttcgtcgagcaaactcgcaattgagaacgaatcatacgcaattgtggggggtttctaacctgacgatgagcaggcggcgatgttatcgcagtacgcggtaactccactgcggatagcacaccttggtgctcactggtgtgcccacgacggctccgacccggacgtccttc

SEQ ID NO: 129296 - DNA, 452 bp, Zea Mays
gggagtttatctgttacagtttcaccacaccgaggataagtttgagggggtgcaaatcctatctacttggtgactcagctgctaactcttgccttgctgtcatacatgcagtgaaggtgtgttggactttccccctgtgctttcaccttatgtggtaaccatgcagtggatgtgtgaagtatgtgggctctggtttagtgttgttaaatgtcccagtgaagcaccacaagttcatttatgtttgtcttgccatagtgtgttgaacccaacaaactgtgctccattattgtgtcatgtcgattccatagcttctccgtcgtggataacctatcccctacaccttggttaagctctcaacctctccccagttctctggcttcactacaaagtcttcaactcgagttgttctgaagagtggtgaccacgcccacaaaaagagaaaccttcccctc

SEQ ID NO: 129297 - DNA, 617 bp, Zea Mays
ttctatgcgatgcttaaagaagagcgaacaacatagggtagctcaccaggtctttgctgcgcagacgacccacggccacgtgatgcggccccggttggagtccggtgaggaattgccggtgtaccgagcttcgattgcgcccaccgaggccgtgcgcacacaccggaggccgagtagaagcgtccgagttagaagttccgaccaccacggtgtcgaagtcgcgtatcgacagtagcggagacttcacccgcgcggcgagccgctctctctccctttctctctacttctcggttcgggccctaactctatcgcgaaacagaaaccccaggtgcggcacaagtgcttatatgcggggaaaggggctgggtccgcggtgcgcgagcgacggatgcgggaaggcccgttgcggacggaatcggcagaagcgcccgagcatcgcggtaacgacgagtccgacaacccggtcccacacggcagtccgtatgcgggcgcggagtggaaagacctgggtggctggcgaccgggacccgcatggaagtcaccaggcgcgcgcgcggggatggaatacgggccgcgcaaatggcattcgggagtgggccgaatatgagatacgaggc

SEQ ID NO: 129298 - DNA, 459 bp, Zea Mays
tgtttatgcacttccctcgtgatggtcactggagtctgcttaaacgcatccttcgctacctgcgaggaacactgaagaaagggattcatatctcgacgcttgattccagtcagctcatcgcatactctgatgctgattgggcagggtgtcccgatacccgtcgctcgacgtccagttattgtgtattcatgggcgacacccttctctcttggtcctctaaacgccaacacaccgtttcccgatcgagtgcagaggcggagtatcgtggcgtggccaatgcagcgtacgaatgtggttggcttcagaatcttcttcaggaacttgatgttcgcattgataaggccacaattgtgtactgtgacaacgtctcggcggtctacctatctgaaaacctggtccatcatcgacgaaccaagcatgttgaaatagacattcacttcgtccgggagagagtggctg

SEQ ID NO: 129299 - DNA, 933 bp, Zea Mays
tctggattgggcgtcaattactgaaaagtgcatgggcctctgcgcaggtattcccaagacttagacaaccccggctatggactgtgggttgaatccaaaattcctagggtctcttttgcaaaggttacaatcgaacgggtattgtgagatttgggccgtccgattacccgaggatggcacggattagatcctactcaaaatgaaccggtattctattcccgcccttagatcagaatctaaccgcccacgatcgatacacagattgcaacgcggggccggatccatccgctagtttccaaaaggacggtcacgatccgatggcgactgattgccattcacacctaatcatgctcgtccaaacaggatccaacgaccccagcctcatcaccaacctcctgccagcacatcgagcggcgccactgtcatctcaacggagtaagccccgccggagctagcaacaccatcagatacgccatacggttctaacgagcatgtccgaggaccgaccgccaagaatctgccagccaatctatatgaatcagcccgccaagactccactgcgcccaagcaaggcggcacggcaacatagcccaccactggcgagcaattcagctcccaccagaacctaatcgtgtttcctaataggcgcccgagattgcggagacgagaacggatacgatggagggtacctcaacggcgaaggaagcagtgacgttgatagcctaggaatcaattgaaccggtcgccgttcttgactccgagagtgatttcgcaaccacacctccccgtctccccttgctaggctccgattccgccccgcggactttgcgaaacgccacggccaatgccgacacactagacgacagtgtagaggatgtaccgcggcggtggcgattttcagcacaccgcacggtgctcacgacgacgtgggtc

SEQ ID NO: 129300 - DNA, 491 bp, Zea Mays
actttgcacagggggtggacgacgggttgatttacccagagtctagggtctcttaagtaaaataaccaccacaaaggggtacgcgcaattctcgaccgcacaatcggataccaacgatcgggattagatccaagtgggtttaagcacgcatcctatggatttggaatctacggtctggatttaaataacctagagccatccagatccgctcgatcagatctcaatggccttgacccacttgctcaaatcggtgtggcatgatctaatctcagccattgaaagccagatccatggcccccgcgtgttcttctaccttctaccagtcccgaaggcagcgccgctagtacactatggtggagcacccgccgaagtgacgctggatcgaccctcaaggcacgagagtcaccggcagatggtgcaatgcgaagaggatgacaatactaattgagtgaggtactcataccgagatcttagaacagaaacacccccga

SEQ ID NO: 129301 - DNA, 767 bp, Zea Mays
ctggctattgaagcaaaataggaggttgacttttgcaggtcgcacatgtcgccgccagtatggtatggttcgtttcatgccatgccaagccaatgcaagcagtgatgatggagtagtgattcctaaccaccaccaccggcagtcaagcggttgttagctttgaaatttatggatgaagaaacctggtcttgcagccaatgggagtgtcctgcagcagctacctagcccttaattaataaatgctctaaatggaatgaaaaaaaatacagtgctgggaagatgaatagcacagggtggcggacgcaggatgagaatttatggggccaaaaagtccgcatgacgaaatcaaacaagaccataaaaactagtgttgcatagaattcaagtttatatcaatacacgatagaagtttcatattaatactagattgttagggcccacctgtcgggcctgagctcccttgtatgtgcctcgcttggcctataaaagggaggcacatgcgttgcaaggggacaagctcttacaaactctctcgaactcagacatcctcagcaatacaacccacaagtggacgtagggtattacgctccagcggctcgaaccactctaaacccttgtgttcttgtgttcttgcatctccacaggtaaatcctaggtagcccctttgttcttagtattagggggtgcattccgcacacccggctggagtttactctccaacatcatctattccaagttttacccctatttggctcggtttgagctat

SEQ ID NO: 129302 - DNA, 413 bp, Zea Mays
atcaagaagacccaagacgggacatttgtgcaccaagaaaaatacatcaaggatgtcctgaagaagtttgacatgggtgaggcaaagcctctttcaatgatgatgttcaccacaatggctctagatgctggtgaggacaacaagctcatggaccaggagtataggagcatgatcggctccctcatgtacttgactgcgacgaggcccgtcatacacattgtcgtatgtttgtgagatcgattccaggcttctccatgcacttaccataggtaggctgccaaacagatcatgaggtacctatgtttcactcttgagtttggcttatggtattcctcttcatccgttctatctttgtgtggttactctgatgctgattttgtgggatgcctcttagatcgcaagtccacttctga

SEQ ID NO: 129303 - DNA, 520 bp, Zea Mays
ccttctgctgtttcaaccccacgtgtttactgaaacacagacggagacggtatggcgtatgtactttgtggtttagggtccagtagtgcatgcgtgggtggtcattgcgaaaagtggaatttgcgaaccaatgttccataactaacatcataagtagattattaggatacggagatgccattacccgctctgacattactctcttctagttctaagaaggtgacgtggtattgtgtatagggagctgatgatcagttgagatgcaccgtcacagcttgccctttgtgcatttatctgaaagcatagtagatattaaaaaatcctcattattcactattactttacgacacaattttcaactgccaactttaactaccagtttgtggactatcaacaacgtgcgtgcgtgtgctccgaatgaaagcgttattcttccctttgacgtttgacccgagctatttaatttccagttggaccaatctcttgaacagactgccgtgctgcacacatctttacacgg

SEQ ID NO: 129304 - DNA, 406 bp, Zea Mays
caaatattaaatgcaacacttaaaatggcaaaatcactataataggtatttatcgcatgcatcgatagaactaacacttagttccgattggtttaatactcggttaatcatcgtttaattatgtaacttaattgacgtgagtgattctacgcacgacacactaaagcggggtgcgcagtgcatgcgatgacgcgcgtcaacatgtgcgaacggcatgcgcaaaatgcgcgaacggcacgcgatgactttgaaagtgcaacgcgcgagcaacgatgaggtgagcgacacgaacgtgcacgcgcaggggtggtaggctactacgtcaaagggtatatcaacgggctcggcgagttgaacacgggcggggacgggaaccgatcacgctgtagtcgcgccggcagcgagc

SEQ ID NO: 129305 - DNA, 289 bp, Zea Mays
atgtctgtcagcgagtacagagacaaattcattcagttgtcaagatatgctcatgatgaggtggcagatgatgaaaggaagcaagagcacatcacagaaggactcaatgggcccctatagtatgcactggttgttcacacatttccatcatttcagagactgctggataaggctcttgctattgaacacaagtgtgttcaattaggagacttgaagaggaaggccattatccagggacagggtagcagcagtgttcgtccttgctatgttccgccacagggtaccccag

SEQ ID NO: 129306 - DNA, 642 bp, Zea Mays
gtcaaagccagcttgatgttcaaagactgaaagagggccttccagaaggtactagtgaagattttatctctatcagacactaaagattttggagttccatgcaacttcactatattgtccaaaaaactttagccacagtagcagccgaaaaaggatgttttaagggaaaaaaatgagcatacttcgtatacctatccaccaccaccagaattgtatcacatccttctgatttaggaagtccttcaataaagtccatagtcaaatcttgccaagccccttgaggaataggcaaaggttgcaataatccaggaggatgtgtccgttcccctttggcatgttgacagacatcacattgtttcacatactccagcacatcagcttttaaccccttccaccaaaaaagacgcttaaggcgatgataggtagcttgtccccctgagtgcccccccactgcactgtcatggagggctgcaataagtttcgtttttaatgcagagttgtgagcaatccaaatcaatccatcttttctaataaccccctgctgcagagaaaaacccttttcattaggactatgcacagccaactgagccaacagatcttgggcctcagcatcagtagtataagaatttagcacatcttgaa

SEQ ID NO: 129307 - DNA, 519 bp, Zea Mays
gttagaacagttgccggagtggcctcctacaggattcaccgggggttggtggctactgccaaggcagttggtcgaggccgagcttgggcggggcagagttttctctcgaggctgaagctgtctttgggcgatgcggaatcctctcctgagggtgaggctgtgcctagacgtttgcatatcccatccggagtagttcgagaatagtgaccggagtgggggagcagtgtccggtattcactagtgagcgtcatcgtagtcggtaaaagtaaatgggatcacagtcccatcgtcctccgttgactgcggtgtcgcatggagtagataatttaatcgtcgcatttaatgcgcatgtcttcatgattcccgagatatttggctgaggctaggctcgaggctgtccttcgtccaaggtgagctcgggcgagacagaaatttcttttcgtaaaggggggaattgctttttgtaaaggggcccctcgggcgagtcgaggatttctcacgggcgtggccttcgcccgt

SEQ ID NO: 129308 - DNA, 460 bp, Zea Mays
ctcagcgtcaccgatagtatccccagtcgaagtagccacgttccttgcaatggatgcttcaaattgctagtttcgacgggctaagatagcttgtcttccccacgcggcacatgatgtttacgtcttcgtggttcagtagacatatcgaatgaaccgacatcctcggtctatgttgaagctggcaggaaaggtgtcctgacgaattcagggataacccagtcgcaggcggtaactgaggatccatcaggttccgttgcatccgctgtagggtgtacaacctcaggggtatatgttgggtcctccatggcgatggacgcatgattcaaagtgtcagcctgcagtgctctacgttttctcatgtactctatctttgcatctttccgtcttggtgtctgattatacaacctaaggcgttcacgcctagactccctcacgcctatacccggttccccaatgacac

SEQ ID NO: 129309 - DNA, 958 bp, Zea Mays
cttgctaagggtaaaacttcctgagatgctctatattccatgaattccctatttccatgccatccatttgagtaagcctatatgatcctggccgagtgacctctgctactacaaatggcccttcccatagtggtgataatttgtgtcgtccttcccccgttagaatttgacgaaggaccaagtctcccactacaaaggatcgatgtcgtatggccttgtcatgatagcgcctcagggtttgctggtatctagctgactgaattactgtattcaatcgctcttcctccaatacgtcaatgtcctctaatctggtagcctctgcttcagctatgctttcgaagaccaaccttggtgccccaaaccagagatcaacaggtagcaatgcctctgaaccatagaccatgaagaaaggagtatttccatgcagagctcgactaggttgagttcttaagctccaaaccacatacgacaactctctaatccattttcctgcaaacttttcattcttgtcaaagactttcttccttagtgcttctagtatcattccattagccctttctacctgaccattagcccttggatgtgctactgatgcatatttaatctggatgcttcattgttcgcagaaatcaaagaattcagagctagtgaaattggatcccaggtcggttatgatgctattcggtatcccaaacctgaatattatatcttgtatgaactccactgccttggctgaagtcagagaaacaatgtgtttgtattctatccatttggtgaatttgtcaatggcaaccaacacgtgagtgtatcctccttgagctttcttgaaaggtccaatcatgtccaatccccagcacgcaaatggccatgtcacgggtatggtctgcagtagctgtgctggtaaatgctactgctttgataagaattggcaagcttcacacctctagactaactcggc

SEQ ID NO: 129310 - DNA, 390 bp, Zea Mays
gccgaaggagactgtcaccgagtctagcgaaggtgacctggttcgactgaaatatacattcagatatggagataaatttgatgaaccaaatgacgactggctaaaatgtatcaaagttacaagtgatgaactgcttgggccatattccaaagcagaagataatgcattatccacatccttcgggggccgaggaaaaaagagattgaacagagtttttgatgccattggttttgtttaccccgactattgctacccgctgcgaggacggggacagaagaggaaaactgctgcttcggccaaaactgctgcttcggcgactccagatgagcctgcgccgaagagcaaaaagttgaaagtccttacccaccggccacgctatattgaactggc

SEQ ID NO: 129311 - DNA, 546 bp, Zea Mays
tgcatctcttgaggtgcttaattacttgaacaaggtgcctaggggtcccttttagggatggaagtggggcaggttcgggtcaggttttggacccgtcgggtccagggtcaggtcctatttatccccacaggttttcaggtttagagtatagatgtccaaatagtgcaggctgcccgtttggcccgtgacccgacatgaatctagcccggtccaaacacggcccgacacggttggttacgggtctaggctgacacgacccgtttagtgtaccgggtatgggcagctaaggcggcccgcgtgttttggcccggcccagcacgagtaatgggctggcatgacagcggcccgcgtatttcacaagtcacccactcacccagtcaccccaccagccatctagcccatccacccacacggccacacacacaccctatccccgtctctcgcctctcggtctctggcgattcggcggcggcgccgttctcgccccatcggcttggcacctcagcgactcccgacctcgacgctaccggctctagtgctccgtcc

SEQ ID NO: 129312 - DNA, 870 bp, Zea Mays
aaagaaacaaagcaagcaccgaggtgctgtgccaccaattatattcttcctattgcattgttcaacttggtaatcagagcattcgatccattttttcccccacccggcccatcgtccatcgttgctccagtatttatggctctcaccaattccaccttcccaggcaccattgcctcctcctccccgagcctatctctttcttcccttggtcacgccatcaccgtgcgtttgactcgggagaattttttcctttggaaagcccaagcttccccggtgctgcgtgctcatcagcttttcggctatgtggatggttccatcaaggctccgtccgagttcatcactaccggatctgatgctgaagcacgtcaggtcccgaatcctgcgtatttgctttggtatactcaggatcagcttgttctgagcactcttgtctcctccatgagtgaagacatgctgggccagatgacacagtacaagaccgccgtcgatctctggacggctctgcatgagatgctttcttctcataatcgtgcacagattatgcaagttcgctatcaactctcaaataccaagaagacatcggacatgactgcttctgcttattttcagcgaatgaagagttatgtcgacaccatggcatctctgggttatccgctgaatgacgaagagattcttggttacatgctcgctggccttggtgccgagttcgagcctcttgttgctgctataactgcccgtgatgatcccataagtctcaccagttttttttcccagctcctcagtgcagaagtgtgtctctgtcggcatgctccgaccactgaaatcctgtcctccgccaacactgcaactcgtcagccatttactcgtgga

SEQ ID NO: 129313 - DNA, 517 bp, Zea Mays
cacgaacgtaagaaaaagggtctaccctaaggttggcgcttgtcctccatcggtaaaggagaggagagggcagcgtttcacttttatttttgccaatcggagacaaccgccagcattgcaagaatacattattagtacaaaccactctcagcgttgacgaagtcatcattacatgttcgcgaggcctcacaatcaaggactcgggggctcctccttcggcataagaccagcctccctatattcgcgcaacatgatctcaagctcccgtccctcgctaaataacccaagggcagacacaacatcccaagcacggctatcgctaacagccccgccaaaactcgacagggacctagattaacatcgccaagtttaatggcccttaatacgcacatcttttcctgacaagggatcaattaaattgagatattcctagcatcgacccccatctcgccttcgggtcgacggacaagaaccatccactcgcgaaggggcccctcgctcagaggcggtagcacga

SEQ ID NO: 129314 - DNA, 407 bp, Zea Mays
atagcttcatctcggaggtgatctgtagtgaacttttctcaggacagttacggaagtaatgaccttcacgtccacattgatagcaagcttttcttaaagttatttcttgactttttccatgtttccctttttgtttcttggatctgatgcgatcatgaggctgaaactgtgtgcaagtaatagtccatccatcaatgtaacactcatgtgtttcttcttggggctgggcattcttgtgatgtttcctttttagaatactatgcaattcatcaactgacagtgcattaggtatgagagaatctgttattagttgttcaggggagacatctgtctgtttatgccggaaaataaaatccggttcttatgttttgtagtttcactttcgtttgtactggtctggcgacaag

SEQ ID NO: 129315 - DNA, 624 bp, Zea Mays
gccccccatctcgcctcatagacaccagccgccgttgggagagaagagaggagggagtggaggcccagagcaccaccaacaccgtcttctgccaccaccgtcgttcggccctcgctaggaggcccagagggtccatcgtgtcgcgtgggatctaggcggaccttccctcctctgggagtcagttgggctcaccgggaatcgctcgatggagtcaactcgccacaagcatccgcgccctgccatagaccaacccctccacgacaattgctcggcggtaagatcatccccacctggtcaccttaggctcctctctatatagcaccggtttaatttcgagatactacaactaagcgaatgttggtcgtgcgacgacgagctcgccgccgtggctagctcgggcgcggccgcccagctggtcgtcggggtcgaggagggtgccctagccatcgattcgatcttgggcgactcggatttgagggtgtaccgatcgctagatatcgagcggaccgcagagattgaactgatggtgtatccctcgtagtcggttgtgcgccgtccgatctgaatctgacgcatgaaaacccatccaattctttaaaatctggagcattgatcttgatccga

SEQ ID NO: 129316 - DNA, 821 bp, Zea Mays
agcaaagtatgtagggccacaggggggatgccaccgttagccgattcttttttcttcactaactaatgaaggccagggccagcccagctgctttgcttcagttgaagcaggtcaacggtgcagtcagctggggcgtatgccattgtttttctatggctgcacccatgcttttactcctaatttatatcctccggctttatccagtacggcacggtgcgctgttggatgagctctatttttttttatcaaaaaaagacggttcttaattaagaatagaactgcaatgcagagatcagggtcatgtttggttcttctgccatgcttatccagttgtcaattgctcctgacgtcgttgacagaccactagacccaggcatggttatccttgcttgatggattgctgctgctgacagatccatttatgtcgccttagtttgttcttagtgttttgttagcttttgagcggaggaagaaggaaaaaaaacaaacaaacttgtcagtggctagctcagtgccgcgcttagaaacctggatgtttatctgcatttgggctttgacgctatcctgacgctcacagcatgtaaagtaaagcaaacagtggatttaggaggtgacactagaaaaggaaactgcagcttttgctacggtggcggcgctcgcaagccacagtggaggaggctaaaaggatggagaggaagagcaacgacggaggaagaaggttgcgaaaggaacgatcgggcaccgagacgcggagctgggagtgggagtggctgcggttgggcgtcgctatcatctagctgaaaatatctcggctggcggcc

SEQ ID NO: 129317 - DNA, 437 bp, Zea Mays
agtcaccacttttgttgttttaccatgtgcacaaggagtggtggaggtggagccagaaccaaagccctgtagcgcaacagcaccaatattctagacttcaatatatttgtttgttagcaaatttcagcaaaagaaatactactttgcaaaaaacttgtgggtcgatgtggttccactgtggagcacatgcgagtgcctcttcatctatgacggtgttaggcatgtgaagggaatatgattaggctatatgctgttgataatcatgtaaaaatagtggcaaaaaggaatcaagttagtatatatttgttcagaaagtgtgtcaaggtatgaaggctaccatttgcacattatgtctctcctaattttctggttccagcatattaattttctggaagaggaaaaaagatgacatctgtttgctagttagtgaaataaac

SEQ ID NO: 129318 - DNA, 419 bp, Zea Mays
gtggctgctgagtggcatttaagagctgctggaagaggaattagagtgcctggacaggattgtggtttgtagtgctcaaccgtttgttcctttactggtcggaagatttggttgctaggaatgtacaagtagcgtataagagtgctcaactggctaatgtggccgtaatttcgtagcatggtggcatcaagattcttccaagaagactgattccatgttgcatatttttctcttcagacatgatttctctggctgctcctaatctcccattagattgtgtcttctgttctccacacaattcagtgaattcactcaatctgtcagcctgatttacttatcgatccgggtactttggttatcgccttgcaatttatatcactccatccccaaaattacatcagttggatatttagtaatat

SEQ ID NO: 129319 - DNA, 436 bp, Zea Mays
gagcaatgacgctctgtctcttcctcttgggagctatcgcaatctcttaggcggaacaagcgggctcaagaattcagaaaagcgaagaagtggcagaggaaaaagtgagagttagggctcggaactcaaaaaggcacatcggcaggagtataaatgggctccttaggtcgggcattacttctaaagtgctagatcatagttcggaaaagtaaagaccgcaatcgtcactcgggcattacctctaaaatgccatcactatcaagcgcacggacaaactttcaagcgcgcagatgaaaagcaaatagctgtgattatatggagcaactgcatctttcattcgtaatatgagaagtaacacaaactcgaagccgactcgttataagtcagcctcttctacccttgccactacattacactacagtacattacattacct

SEQ ID NO: 129320 - DNA, 635 bp, Zea Mays
ggttcttcgtgatttcccaagttatttgaaaccggttgttccaaagtcctcgtgcttttatttgtgtgcacatttgcactaggacgttcaccttcaaggtgtgtcgctgtagaacatctaaaaggaagcatgttgcattctctttagtaacttgctggtgcaggcgtccccgcttagctaatactgaatcatccagttttctcccccttttcctaggatgggaagtacgagtagagtccataccctgcaggggtatctccactctctccggtgcattttctgtaggaatatgcgacttcgactcttctcttatatcagtaaaggcatctggcagattatttgctaagttttgtaggtgtattattcgttgaacttcaagttcggtttctatagtgcgtggatcaagcgattggatgctactagcactccattctatttctcgacattctttgttattaaggtacaatcctccccctaatgccgggaaatgctcttcatcgaagatgtatcagcgtaccgaaccgtgaatagatcccaagttctaggctctaaatatttgattatggacagagattcataaccaacatagatccccaacttccggtgaggtcccatagatgtacgctggggtggtg

SEQ ID NO: 129321 - DNA, 503 bp, Zea Mays
caagaactctagtgaaagggacggcttggacttccactgctttcggttgagcgctggtccatcgctcggcaggacgaggcggtcgttggcctcggcgctggcaatcacccagtcgttgcgccagttttcccacctcgcgccgccaaaggtggggatgtagacgacggctggatctggcctcgtctggaagtagtaggcaccgatgtggtccctagtcttcccagacttgaccagcacaaagaagtagtggaagagagaagtacaaggggccacacctacgaacatctcgcagaggtggacgaagatggctgcctggaggacggagtgggacgtgaggtgttgactgaagcctgaactgctccagcagcaacagaaagaagggagaaattgacagcgccaacccacaggagatgtaggaggtgaacaacatgaactccccggcggcgagatcgccgaggggggcagcgccagcacggattcttccagcgagccctggcgcgctc

SEQ ID NO: 129322 - DNA, 511 bp, Zea Mays
caggcatgcctgcttagattgcaaggttatacctggagagtgtgtggtaacccaacataagcttgtcgtagctgacttccgttttaagattcgtttacaacggaataagcataacaaggtcactagaacaaagtggtggaagcttaaaggggatgtggcccaaactttcaaggagagagttatcgaggagggcccttgggcagaagagggagacataaatatcatgtggaggaagatggtggtgtgcatccgaaagatagcttcagaagagtttgggttgagtcaaggaaacagaagggaagttaaagacacttggtggtggaacgaagatgtccaaaaggctatcaaggagaagaaagattgctacaaacgcttacatcatgacaagtgtgcggaaaacatagagaagtataggatagcgaagaagtctgcaaagcaagcggttagtagagctcggggtcaagcctttgacaacctttatcaacggttggacacaaagcagggagaaaag

SEQ ID NO: 129323 - DNA, 719 bp, Zea Mays
ccccactgggcagtcgcgccagcgcctacacgcatgccccctttcactgctccgcagggcccacatgctagctacattatcgcgacgacgcgctgaccatgtactactgccaaaccgggccctctcctcattcacacgccacgttgtgtctctgtcctgtgggaccgggctatcagctcaatcgcgcccacgccaacagcacccgcgccgcgtcctccatgatctccagcgagctcaccccatgccctggtttcttggctaatcgtgccattagtttataagacctgaccccacgaactcctacgcccattgctcccctctaatctagcaaccacggcgagaataggagacttaggcttagatggcggccagaaatcgtccgccagcgccattgccatcttcacctaaagaccgggcacacgggtcgtgtccaggagcctcgcggggtgtttgttgaaggtttcgtgaccgtctggggaggtagtgactatggtggtggctggaattcgttgctagactttggtttccgctgtgcgctgtgggaagcttggttcgcctcttcgaatcgcggtgagtagcatcctacgaaatgccctaccgttaccgcttcatgctgttgcgttcagattagagtttaggatcggcaatgccctaccgttacgcaatgccctatgcaatgtcgccgccgtgcgtaggtctgttgccatcgtgggcgagga

SEQ ID NO: 129324 - DNA, 487 bp, Zea Mays
gccagggatcagatctatgcagaaatccacttctctttctggcggcattcctggcaactcttctgggaatacatccatgaattcttctaccactgatatgctttctgttgctagattaaacaccattggatcattggcgggtggctgagcctgacaagaaactgactttccttggtggtccatgagaaggacagttttgttggcgcaacttatgatgcctttgtgcttggttaaccaatccattcctaagatcacatcaatcccttgggatggcaagatggttaagtctgccaagaacactaccccacttaaaagaattctgacttgggaacatttgagctggcatagaaggtctgaccctggggttcgggtgaccaagggaatttctaggtgggtagaggggatgccatgcttttccacaaaactagtggctataaaagaatgggatgctcctgaatcaaaaagtacagtagcgggagtaaattca

SEQ ID NO: 129325 - DNA, 516 bp, Zea Mays
gacagattggacgtttggtagatggctcttggctggtcttcactccgctctgcgcttcaatgcctctgctgactagacttgcagttcagtagctatatttggatttcctttgatctctatcgatctcttccttctgtctcagtacattcattgcgtatactgtatggatatgacttcttcagaaaatccaatgaaaattcctggccgtccccctccaatgggtgtgaccaaggggcatcttggtatgcagagcgtttagcacactgtcctagagtagtaacttggtgtgactgtggggtgtaatcataccgcccgagcagttgaccttggtccaaatggtgtcatgttacgcgaagcggcgtctgttgcctgactcattttccggtggcttgaattgcttattgaatacttgcgactgttcggcgagcgcggtaggaagtggacagtcactctcggcctctataaatagcctgcttgcaccattgttctcttcacttatccttcgatcatctgttg

SEQ ID NO: 129326 - DNA, 603 bp, Zea Mays
attgtcaaagctgggatccagtcgggcccaagtcccacctgggattttcgtccaagaagtgccacgcccgagtatttccctagaacgggcagaagagtgcaatgttctgagccagccagagtcagatgccgatgactggagagagcctatcatcagatatataaagaatgaagaggagccagatgacaaaactgcagtagaacgcatcgcaaggcagtcagcccactacactctcatcggggaagcgctatacaggaggggcgcgatgggagttctcatgaagtgcattctttcagctactgggaagcaactattagatgaaatccatgccgggcagtgcgggatacatgcagcgtccagaacactagttgggaaggtcttcatgtccggtttctactggccaactgcgaagagtgatgcagccgagttagtccagaggtgcgaagcttgtcaatacctatcaaagcagcaacatttaccagcacagcaactgcagaccatacccgtaacatggccatttgcgtgctggggactagacatgattggacccttcaagaaagcttagggaggatacactcacgtgctggttgccatcgacaaatt

SEQ ID NO: 129327 - DNA, 764 bp, Zea Mays
tagggaggtgatcgagcaccatctgaagatccaccctgacgccaaaccggtgagtcagaagcctcgaagacagtccattgagcagcaggatttcatccgtaaggaggtccggaagctgctggacgctggcttcattgaagaggtccatcacccagtatggctggccaatccagtcatcgttcccaaggctaacgggaagcttcggatgtgcatcgactacaccaacctcaataaggcctgtcccaaggacccatatccacttccgtgaatagatcaaatcgtggattctacctccgagtgcgacctcctgtccttcctagatgcttattctggtttccatcagatccagatgtctaggcaagataggaagcataccacttttttaactgtggatggactttactgttatgttgtaatgccatacggtctaaaaacgccttgccaacatttgtacgggcgatgagtaagacttttggtgacctgattagggacagggtagaggtatacgtcgatgacatcatggtcaagactaagagagggtcgaccctagtggaagacttaaccctggtctttgacaagatgcgggcaacacacacgaagctaaacccagataagtgcgtctttggtgtctccgcagggaagttgctgggattcctggtttcgcaccggggcattgaagcaaacccagagaagatcaaggcaattgagacaatgaggcctccggcccgcatcaaggacgtccagaagcttatggggtcactggc

SEQ ID NO: 129328 - DNA, 790 bp, Zea Mays
ccctcagccatccaatgacctcccaatggtctggatctaattgagtgaaatggggtaccttacgtccaatctgaggccttcgtttcgatccaacgctccccagatcatcttcctcaacacgccctgcgctaccgcgacattcactgcacacgcttcttcatcgcgacggcggatgccagagctccctttcattgatgggcgtgaacgcgaacaagatctggacgccacaactcgcccagccaaagcgcccgcgccacccggagattaagcggtgcaggggtaccggcgcatagaccacactctctctttctttctcttctctcttcctcatagctctattcggccaccgatgtagattctcctgaagctgggtgcgggacatatttgaggagagggacgagtagcgaagctccttataaggtcacagacgatagggccacgccaggtcggtttccggaggattcgatggagtttgttgcgatttttcagcaaccgagcacataggctaagaggattccacggagggtttgttagcgaggaggaccgtggcggagatctagagcggctcgcaatgaaccgagcagggtgacggacctgacgagaccgagggcagaacaactgcgtgcgcgcgagaggttttctgttggctagggtctgcgcggcgtccgatccttcaactaccagcgcacgaagcggagaggagatagggagagggatagagctagcacagggtctgcccggtgaagttgttatagagccgccgccatgagcgcgcctgatgtaggtgatt

SEQ ID NO: 129329 - DNA, 296 bp, Zea Mays
ataaatttgaagcggccattcacggactgtacctctgcatgaaaattctgggtccgcaaggtgtggtaacggtttacgggaaccagcagactgcgcgtaacattgagagagacttcgttctaggtcaacggaacgtacactgccttacgacacagcgcgaagtctccgaagcaatccgcccagccgccgacaaaaaagtaaaagcacaactgcaaagcaacgatggaacaaagacagttcccctcgacccggcgacgcccaagcaaacgatcgtaataaagacctgactttgcaag

SEQ ID NO: 129330 - DNA, 571 bp, Zea Mays
aatccactcgatgctgatgactggctgcgcacaataaaaaggtagttagaagccatcggatgccccgagagccaacgtgttcatctggctgctcatcaactttccgggatggccctatcctggtgggataccttcagcgctgccgtcagagatgctacctgggcagaatttgaagccgctttccgagaacatcatgtgccccaagggatcgttcagctcaaggaagatgaattttgggaactaactcaaggtggaagatctgtcagtgagtatgtgcacaaattcacagaactggctcgctacgcgcctgacgatgtcaacacagaagccaagaagatggctcatttcttgaaagggctaagaccagaactcaaggctatccttgccagccaagatttcctcagcttctcgcacctctcaaacaaggccatacaactggaaagggcaagggaagaggaaaagggtcacctcaagaggaaattccaagtcctccgagctcagcagcaggacaggcaccaaagaattcgatcctttgggtttccacccaaggggccaagcttcaacaagccag

SEQ ID NO: 129331 - DNA, 632 bp, Zea Mays
gagacgccggggcaccctgccaatccaaacatttctatatgcttcctgatgggtgggcggatcatcaacaggcaccgagggagagcagcgagtgagagaactcaatgacgccgtagttgttccgcgtctgcgcggttgtctagggtgccatggaagaccgtggtgcatgctaggaattgtgagcaacttggtcgaagcatctgcaagcttagggagcccggggcagcaaggaaattctcgccagtgatgtcggccaccatggtgccgctcggtggcatgggctgtgcgactgccctcagtattccaggtaatacttccacgctcggttcgtcgttgtgtcctccacgtaaatcctgcaaacacaaccaagggggggcttgggaacatcgggttgcggctcgtcggtgtgaaggccaccgaactaggatgcgccactgtgttcctggtgtctggagaaagaagatgagaccgtagccatcgatcggctagcggatggtcaggattagatcgtcgccctactatttgtctgaacgccgtggatcttcgatctaacggatatcatggcgtaccggttcgattttatgccggtctaatctggcgcgtttggtgttgatccaacggcctaaatcgtt

SEQ ID NO: 129332 - DNA, 612 bp, Zea Mays
ggagaagaagagggtactggctgacgggtggggctagtcaacagagggcttgggcaacagatggcacgggcgcgctacaacgattcagaggactcggccaaatagttgcgcgagcgagggattcagtccccgcgcggattctgcggagtcagttggggaagaagaaggtcctgacctgcgggacccacacaacggtgactagagcgaggactccactacgtgcgagctagccagccattgagaacaggcgcgagggtgtaaatgggccggtcaaggccattttggcccagtcgcagaaggaggatgggcagggacaggatgggctgaactacatttggcccaggaacatgtttcttcttttctatttcatattttcagttttattccaagtctcaaattcgtaaatcggatttgattcaaagttcatggtttccaagattaaatgcaacagcaaataactccaatatgatgtgcataaatacatacctatgtttagttttgtttattttatccaaacattttaagtattcaatgcacacacgtaaaaatgatttccttgaacatatagtccgtttagaaatatgttcatagttatttaaaagagaagatttt

SEQ ID NO: 129333 - DNA, 474 bp, Zea Mays
atcgaggaacataaggacatatcaaagaggaatttgagacgaccggacgtctttaaaaggagacaaatcgacaaggatgaacaggaggaggagcaccgacgagaacgaggaggccggagccctgccaagccaagacttagctaggactccaccatgcagcttctaagctccacttccaccccgataagagatctggaacttatcctccctctatcgactgcttgtaacccctactacgagtttgatcatcaatggtgacggtagcgcaagccaccgatgactagaagtagggacattttgtctgaatcagtatacatattgtgccctctgcgtacaccattcgtagcccagaacatgcacaataaatttacttgtcgaagcgagttacgaaacatgacaacagtcaattaataaatccagaagtgaaggtgtaccgtgcatgtaaaacactggatcgatagaatataccacgaa

SEQ ID NO: 129334 - DNA, 553 bp, Zea Mays
cttgcctgttcagaggctagtgtacgtcatcagtgaggtatagtccgaaataaagactcgctaccgataagtcaaaaaattgttgtacgtagtagtcctagcttggcgcaaactacgacactactttgagtcacacccagtgacggtagtgtcgtccttccctttgggggagatcattcagaacaggaggcctcaggcagggtaaccaaatgagcggttgaactcatgggagaaaaactctcattcgcccacagaaaggctatcaagtcttagatgttggttgacttcctagctgaatggaccgacactcagctgtcgacggctccaatacaggccaagctatggactatgtactttgatggatcgctgatgaaaatcggggcaagcgcatgcctattcttcatctcgcccctcggagtacatctgtgcttcatcttacgcctccacttcactgcatccaacaacgtggccaaatacgaagccttggttaatggcctgcgcatcgcggttgagctaagggtccgacgcctcgacattcgaggggactcccaac

SEQ ID NO: 129335 - DNA, 399 bp, Zea Mays
ttcgtagtggtgttcattgatgatattcttatatactcccagagtgagcaagagcattaagagcaattgaggaaagtactacagaggctacatgattactagttgtatgccaagcttagcaagtgcgagttctggatcatcaaagttctgttcttgggtcatattataaaccgagatggattagttgtggatccaaagaaggtagtagcgattctggactagaaagcaccgaaagatatccgaggaatcaagagtttcattggaattcctagctattatcgacgttttattgaaggtttctccaagattgccaggccaatgacaaccttgctggcaaagaaggttgagttcaagtggtccccagcatgccaagagtcctttgagacactgaagaggaag

SEQ ID NO: 129336 - DNA, 294 bp, Zea Mays
agggggagagagctcagctgcaccaaaatacaagtgtcttttagtacgaagctaagtcatgctagatatacctataagtctggcgtgttcagcagcttcttcattttttctggcctcttccaaggcgtcatgagattctttctctttctttctaataccatcatcagctatctctcgtccacccttcagccatacttcggaataaaaatttccacctagtgcaatggcctcggccgaagggtttctaatatcgtcggatgagagcgaaaatcctggctaaaccgcagccttggc

SEQ ID NO: 129337 - DNA, 275 bp, Zea Mays
ggaagatgatgagtttatgtctcaggccgccgaagaggtagaggcggcttattacaagaagaagtctgatgaggctggggctgaggatgagctattctcccaagctgcagatgaagcagaagccaattattacaagagaactggtgacaagtgtgatgcaggtcaatacagcaagtgtaatgaggttgtcgttgaggattgcgcgacggatgactccgaagatgagttactcatagattgtgattcagactgaagaaacttgtagcctgttatgt

SEQ ID NO: 129338 - DNA, 460 bp, Zea Mays
agacagcggacacgaaccctagaaccacgatgacgaaatagcggacggaacaaacctattgcacagagcagcaaaggaatgaggaagcggagggaggaatggcgagtagcaaagagcttacgtgaaggagacggccggctgaggactgaggcggtgaagggagcaatggcgagcagcagccccgtgctaggcccaaaagaaaccaggggtgcgtactgtcggcagaaggatccagaaatgcagtcaaaccaatacaggaaaagccaagagtccaagactaagtattgaccattgattacagatccaacgactgaaaatgtactagctgacgtggacaccgtggttgtccctggtttgaaccgcctttgttaaataggaaatatgtaaaagctctgcaccacaacgcaatttttttaatttagcccttttctaaaaaaatatcacgtttacacacctaaac

SEQ ID NO: 129339 - DNA, 401 bp, Zea Mays
tagtagcttgtctaacttgatgtcgttcaagtaccaggtgggcagcaaatttctgttctatcgtcatctcccaatcaagatatccctcagcatcataatgacacgaaaaagatggtatagaaaatttaaacttagcataagggtcgtcaggagcacgattgttattaccttgctggcggtgtgccataccttctgtgttttgatgaagacgacgacgtaggcgcaaatctctggtggccacttcatcataattaccttcttcatcaaacaccgcatcatcgggaagacgtggacgaggaggtagtggtggcggtgcttgttgttgcgtctccaacacagcaagtctgtcgatgatctaggacaatcgtcgatccagcttctcgtaagtcttgccaaggttc

SEQ ID NO: 129340 - DNA, 450 bp, Zea Mays
ctccggatagacgtttcatcgttttcatctaaaaccttaacctgaaacaggagtataataagttcgagtttagagactattcgacttgacattttggcgagctctcggggaaaactgttccctgtagggggtttcatgtcttcctctgttcccctaatgttttgtttgataagaaattaagaattgtatgttgatgatctattgaaaccaatggatgatttgttgaaatgaacgtttttggcgatttgattcggttgcttgagaactgaaaatcttctttccttattcgattaggttgcctgcgggagagtctaagaggtttggtgttgtcaagttgttcctatattctcatgtgctgtcccatttgtaggatcttcaaagtttaggaattcaaatgtgagaagaacaacatgttattgtactgtacccactaaaaacagagaatgaatt

SEQ ID NO: 129341 - DNA, 596 bp, Zea Mays
taataatgtggcctaacagttgtatgttgttttttcagttagcatgcagagatttccctcatccacgacatctatgcgctgccttgccattcagcagcagttctcatgcaagtcattgtagcatggtcagtatgagctccatttcctctgtttgcaagtgaatcttagtctactcctgcaggctgtatcatggacacattttcattggtgtgcttatctcttatgcagtgccattgttatgtctgtgattgtcctgctccctgtgccctatgggacaagcattgtcatgctacggacaaggatagaaagtggaagagacttagggaaatatccaaaaataaaagccagccaaatcctaaacgaagaataccccagcatttcaaacgctcagtcacgacaggaccatcatcctcacagtattccgcaaatatgactggttttactggaagatttcctgcttcgggtactgcgaaccaaattcaacaggtggatatctctgttatggttgcacaggatatggtgaggggtatcagtctgccgagtgcaccatctcctacgccaagaactaaaaatcggagctatggatccaaaggtgc

SEQ ID NO: 129342 - DNA, 604 bp, Zea Mays
tcctatccctccatttcagatccgacgaccagtagatttcctccctattctaatcccaaccgtctgcttcagaatcaacggccaggaacctgtcgtttacctcccgatggtggctctcctacaactatggtggcgagatcgccgacccatcgtactactgcagtctagatcgtgatttcacacacagcgttgccgaaacagcgaagcagataccgtggacgagaaagactactaggtggcatatgacagcatgtggccagagaaccgaaactgctactccggcgtcattatcgaacctgggaccttgattagatcaaataatgctagcatttaaacccatacctcgaggtagcctacgacaaatcgtcggagcgaaagatacggtgtcgtcgtcacaccatggcggtgccccggtcgatagatccggccaccccggccccggccctggccccgatccctcctctgtttggcaatggcgacatggttatccgattgtttggggtagatctagattggttgggtctaactcctgcgctagccatgattatatagggcaaagtatttcagagtgttgaggggtattcgatcgaggagattgagtccg

SEQ ID NO: 129343 - DNA, 535 bp, Zea Mays
aagacgaaggcgtctcccagcgcatacaggctcgcaacgccatccggcgaggacttggagcattcctggaacattgataatctccgcaagttttttgtttgactcctcagggccagctcgcccttgtaattcgcaaaaacaattttattctggcccgcactcttttcctcccggggggtgaggtttctaacgaggcggagtcatgtaatatacaagtgaaaaatcccccgcaaaaatctacgtcgaaaaaagaccacgtcgacggtcttcgacattcgactaatacaaagtcaccgcgaggggcagcgctagccaccctcgcgtgcgacactccgcgcaaaagtcgcctaagggtgcagccggactagcacaacaagtgcgaaaaatcgaagtcttcctcaaaaaagactacccgtgctaaactctacaccaaactgtccgcgcaaagaccgactacaggcgcgccggaccgacataataaacgtactagaccaagtgcgcaacgcctttatgagcatagccggatgcgcgcagg

SEQ ID NO: 129344 - DNA, 418 bp, Zea Mays
gtggaaacggctcttgacgccggagctgctcgccgaggagcgtgtcatggtgcctatcgaggccggtctccagaagatcagccgtgcggcgcaggggctgcaaatttatcggcgcggtggttggcagtggaagcaataagcgacgctagtgactaaacgcgaaaaaagactgggtgatgtgaagtctcttctgcgtgttctggatttaggaagatactagtggaagcaataagcgacactagtggaagtcttttgtgcgcaattttgagtacagattgttaaattgtttggatgtaaaattctcttcatcacaagatacatttttgtaagctgaatatcaaaatgcacatgataacaggaacgataccatgcaatgtatgtgtatcgtcaaaatatcagagtgtatatactgttaagg

SEQ ID NO: 129345 - DNA, 424 bp, Zea Mays
cgacagtggacagtcgcggcggcgcgccgtttacagtgcctcccgcgaatcagccgcagcggcagggtgaatcgtggccgaggtgccaagcaatggaggcgaaagtgacgggaaaagggggcgcaggggcgatacttgtactcccacgacgcggagtccgcggccgggcctagcacaccgaccacgcgagatccgtggagttccttcgccgcaagactcggtccgtagttgacgatggggacagagaggtactgaccaacgggacccactagtcagtgtcgatttctcagtgtaggcacgcgcggtattggcctggtggtggactgtcagtaattgggccagggacggattcgtcccaaaatgggttttatacttttctatttcctgttttccattttcccttttgatttcaagtttctaatct

SEQ ID NO: 129346 - DNA, 706 bp, Zea Mays
gattagggttccaaaccttgggttgggatttttgggatgttacaaacctaccccacttaaaggaatttcgccctcgagatttagactggatttgagaaaagataagggtattccctcctcaaggagtcctcactctcccaggtagcttcttcttctccttctttgctccactgaactttacagagtttcacttctgaggtgcgggtctttcggactgctgaatcaagaatctttactggcttctcacggtactaaagatctttctgaatctgcactgcctcttcttcgatgtgactttccggtgcttgcaggcatttgcggagctgggatacgtgaaacacattgtggatgtcaaacatggactctggtagttcaaggcggtatgctgcgggtcctactctgccaatgatgggatagggaccaacgaatcgtggtgctagttttccttttacttggaacctcctgacaccacacatcggggagaccttgaggtagacaaagtctccttcctcaaatctgagttctctccacctgttgtccgcataactcttctaccgactctgagcttcaagtaatctcctgcggatcagggcaactttctcttccgcctctttgacaaaggcaggtccttctagtgctttttcccctatgttggaccacatgagaggggtccggcatttccgcccatacaatgcctcgaacggtg

SEQ ID NO: 129347 - DNA, 522 bp, Zea Mays
cttcggctcgcttggcttcttctcgggcttcatgggattctttcttgttcttctttatagcttcgtcggctaattctcgggcgcctttcatccaaatatcggagtagaatttcccacccatcagagtagcctcagccgagggatccttcgttttctctacagtgaagactgcctctgtctgggttgcagctttaacatgttcacagccagtttttttccaaaattactgcaacccctctagcaccatcaaaggcgcagaaatcaccacggtcgctaaggatctcatcaaaggcttcaacttctttgtcaatccattcgatgattccttcgggatcgcctctaataaatttttgttcagatgagtatgcacccacctttgataaactatccttcaacttcttagcgcaatccaaggatttctcataatacctctctttcgactcctgaagctcatctacatttttttgcaatcttgcgctagtccattcacttatttcttgttttgctttagccacttcgaaa

SEQ ID NO: 129348 - DNA, 336 bp, Zea Mays
cccattcagaagtgcagaagattctgtcaatccttgtaagagttggactagcatggccattgctccaagtgtaacgatggccattgaggcagatttctttgagcaacaggctgtccaaagctgatttgaacgcccccatgagatgtcggtttaagtttctattgtttttatctgaagtctgatagatgaggttgaaatccccaagcacaagccatttctcccatctctgtgacgctaggtttttgagctcctggaggaaattgtgcttctccgcaacagactgcgggccatagacccctgtaatccaccaaactgagttatcggccttcatagtga

SEQ ID NO: 129349 - DNA, 747 bp, Zea Mays
tcgtagtggtggtcgcggtggtcgtggccgcagtgccgcgggacgcagcggtggacgtggccgtggtggaaacaagccaacttgtcaggtttgtctcaagtatgggcatgatgctcttcactgccgccagcgcttcaatcactcattccaacctgaagacctgcgtgaacgcactggtaatgtcgcgaacactgggtcatacaacgtcgacaccaactggtacatcgatagcggcgccaatgatcatctaaccagtgacttggatcgcttgactgtgcacgatcgctacactggaaaggactccgtgcaggttgccaacggtgcaggtctgtcaatctcccatattggtcatactatgcttcctggcttatctaaacctatacatcttcgaaatgttttacatgtgcctaatcttcataaaaatcttctctctgttcaaaaattagcccttgataataatgtgtttattgagtttcatcctcatttctttcttattaaggatcaagcaaccaggaaaactctactccgcggtaggagtcacaacggcctttatccagtgccaatttcctcttcgccaccagatcatgctgccttgtccagtgtcactgctcgtgctgcttctgttcatctatggcattatcggcttgggcatccgtcctctagtattgttcagtctgtcattagctcaaataaattggcttccacgcctagtccattgtcactagtttgtgactcatgtcaacgagc

SEQ ID NO: 129350 - DNA, 1032 bp, Zea Mays
gaccgtacttgttcatgggcttggcccttgttagccgcgacacaggacaggggctcctagggtttcttcactcgacgtctttatatgcagaagcaaaatgaatcttggatgcgcgggcattccggcgctgctgggtgcggactgcaagtgcggctgtctctcttcctccttcgcttcgtttctctccaatcaatcgtctcgtctcctctcctctccttggtgcagtgtttatttcgctcttcgcagttttttttccgatcatttttttgcatctctcggctgcaatggtgtgcatggtcagatgattagagaataactgcaacaaaatgatccaggacatgattcctagttttaagtctctgatggcctacgtgctgccatcgcaaatgcttctgctgtcgccgtttcccccctttttgtgttcgtttgtgaatctggatctgcgctggatgtgatgaaggaaagattggtccgtgtttctgatttttttcagtgactgacaaccgtctctgttttccttctgatctcgagcaaaagcccttttttttgcgtcgagtcgatcagtttcctctgttccagtgtttgcctcgttgcaaattgaaattgtggtgatgaattgtgaacaaacttcgcatgtcagacttcggagatgcttctggcatccatgagaagatcattcataatactgagcaatgcagatcttactcgcgaaaggatcgacagtacattttgacgaccttggaacttgctgcctcgtcgcagcacctctgctcgttgcggcggtaggttggtagattggagttcttggactgtcctctagtggtttgtgtaaaatagggttcagaaattatgatgacactcttcacagagataaatttaaaatatgtgacggataatgaatgggatagaggatctgctgaagattgccttgtgcactaggggaggctatctccagtctctggggtgatttgttttgttgtgaatcgtaaaaggccttttctcttcatgctaagatttgaaaatggtcggtac

SEQ ID NO: 129351 - DNA, 307 bp, Zea Mays
ctccactactttcaccactggcgacatactgtcgactgttctttctagtcagagggacctcatcttcttcctccccatcgtcttcaccagcagcacaggcaacacccccattgggatcagcagcagatggagcacacccagtggggtcggcgtcagtaaattcaggcacaggcacttcttcagcagcaggaaccgaagtaccaacgtcccgatccaaactagatactcgccggaggcgtctctttttctttttctgctcatcagcaggaggatcaagttgattgactcggcaaggacgtctcgggcg

SEQ ID NO: 129352 - DNA, 539 bp, Zea Mays
gggagagggcttattccgtccgtttttgcgggatcccgtttttttccggattgaacccgtatttattccgtatttgacaaatatgggacgagcctaatatgcattagtatataaactaaatcctcatgtatttaggtgacaaattatagcacaattggccattttaaccaccgactcttttcaaataacaagtgatctaaagtcttaaataacatcggatgtagttaaatgtacacatttagcaaccaaacaacaatagaatgttgtctctctatatctatttgttttatattattgttctgccaatcaatcactagtcaaacatcaataacatttctatttgtattaaattatgagtttccgttagtatttccgtttccgttcgttttcgcaattccgtttatcccgctcccgtttccgttcccgactattccggacccgatcccatttccgatgataaaatgcggatacggaaacaggagaggggtttttccgtccgtttccgtccgttttcatccctaaccgagaggtcgaaactc

SEQ ID NO: 129353 - DNA, 658 bp, Zea Mays
gggtactggccaattctagccgcatgatctaaaatctaccgtccatattagattatccttattacgaaccaacgcgcgatcacggacgaacgacaaccgttgaatttgagatatgcgaaccagatccgttataaacctatgaatcgtgccaaccacacgattacagatccattggcccagatcatatgccgtgaaggggtacgcagccaccaatctcagccattcgaaaggaatcagacggcgccaggggattctccccacaagccggccggccgaggatggcgacccgaggtctcacggcggtctttggccggagaaagtgacaatcatgcactcgagccccaattaccctcccgaaagatcctacgtgtagaggagatcattgcgagcaaggtggatgacgtcttaccgaaggtggggcagtgagattgtccgaccacaaagcaggcgagtccacggcggagcagtgggcacggtgacaaattccggtggccacaagcacaacccgcccaaggtgaggattcgcacaacctccgtgccgccatgcgaagtttctcgtgcggtgtttgagggcgtagagacagggtagcgctgtttcgttcgggatgtctgaagtccttccgtgtactgggaatacccgccgacgacccgagcacag

SEQ ID NO: 129354 - DNA, 615 bp, Zea Mays
gcgctccgcctacacggccaccgataacgacaccgaccatcgacgtttccacgttggccctatttgcctgctgcagcatcccttccgcatcatcgccgccgagaagctccccggccttatcttctatgcccagtacatatgatctgtattgcacgaagcattaattaacgctcgactgacatgtagtttgctccaccctaaacaacatggagattctactcgtcggtggggagatcatggtggatggccacatccccactgctgctgccattgacgacaccaagcttcgatgtcgcgtgcgctcctttaccaggcctaccgtagggaacatcttctatatcggatctctcggtacgtaacgcccactaactcctcgctcgacatccatctgaacatggagtgatggagaagatgtaagatgatcatgtgtgtgtcgctgcaaaggagactcggtacgtcggtggagagatcatggttggccgcagccccagcaatgagcatcgacaagacctcgttgcgactcccagctacctcggtatgtgacgccaaccacctcctcgctcgacacctgaacaatgagatgattttgtgcgtcggtgcagagacttgtgtaga

SEQ ID NO: 129355 - DNA, 1055 bp, Zea Mays
tgaataagtgttgcgtgtcccggcctagatgggtgatgcaagaagacacaaggtttatcttggttcgggcagtagaaggccctacttccagtagaggaggatgagactcatattatctttcacctaagtgcttgtagtaggggatacaagctagtcgagagagggagtggacccaagtctctgaggatgattgcggcaggtgccaatattggtcgaggagggcaaaacctgtgaagtgtggttctccccctcctggatgccctgcacttcttttatagccttaaggagggacctcaggagcaccaaggtttgttgaaatgaggagaggaggcgagaccgagcccctatagcagcatgaccgtcggaatggcttcggtctttgcagttgtcttggatcaggggaaggacgttcggccctgtatcccgcatcttgaccgagcagagagtcaaggctaggatcgggggctcgtacgcgtaaccgagcctatcttgtggatgtgttgtccgagttgtagttgttggaatagtgataaatatggtaaaaagcacatggtaattcatcttgtatggcgtaaagtagacctacaccagccctacagttctatagccattccgttgtcagctgtctttgtggaagggttggtggcatcgagtgtccttttgtcgatgttatttaatgcgcacgtcttcatggttttcgagatcttcgactgaggctgggctcgaggctatcttctgtctgagatgagctcgggcgagtgacgaagattactttccataaaaagggggcccttgggcgagtcaaggatttctcacgtgcgcgactttcgcccatggataggctcgagcaagacgcaattttgagcgaccgttgagcggggcctcgggcgaatcatgattcaaccgtacttgatctcagggaacatgttttctgattttttcggtactcaggtgttaggtacgattatgggcatagtctgggtacccctaattatgatacccgacagtagccccgagcctccaaggaagtgtaggcacttgcttgggggttctgc

SEQ ID NO: 129356 - DNA, 1495 bp, Zea Mays
tgcataactaccaatagttcatctttttcaatatatatacccctttctggctgagtttgagcttattctgttttggagactgatttgtttgatcttgtgaacctgtagttatatattgtacttagcaaactaattagtccatatggttgtgatgctcattaagcaccaaaacatttatagaaatggctttgcggaacatttccctttcacttaggataggatcttgattgtagtttccttgtggagatcctgattatgggtttctttttgtccaagatctccgtacccctatatattgtaaccaatgcatctctcaatcgactacagactattatacacagtttcatactcttcaaaatgaaaccctagctctttgataccatgttagagagtggcccaccaagtgcattgccatactcaaggggcaaatatacaatgtacatatgcaaagaagcccttcaagtagagggaaaatacatatacatcctatacatctaacaatatgcagctctcctgtctgtttgagaaagactcctagccatgtctgttgttaagttcaagtacatattttattttgcaaagaaggcactcatggaaaacattattattgtcagtttaatctttgggcacttggaatttttaggtaatgtatactaagagatagttaatatagggttttagtagtagacttataatagggttaacccctaaaaaatctgttcaaatgattactgcaaatcaggcaagtggccctggtaagtatgatcctgtgtcaaatggctttgcgaaacttttcaaattggctttgaaagtccctagctcattctcccaacattttaagatataatggagtgaaaccttttactttgcatatgcattaagaaggtgaaatctggaagagagactggctatagattatgttaccatactaatagacatctctaatagctcaaatttattttgtgtcttgcttggcagggggtaataagtgtgcagcttactcctagaatcactaccgaggacttaaccctttttaaaactggatgccatttgagatagcatcatccatgattgaactctgctgaaatactgtgttcataatatgtggcggattttaaatcatcttttatatgcttgttgagaattctcccagcgtaggggtgctctgaaattttaaattacagaaataaaatgcaagtgtgaccatgctgtactgtgcgcctgtatcatgtctatttgacccaagcatttattatatatttttctgaagcatggaagactacgatggcttcactgcctcctagttgagtagagaacaccatttgatttctagatgcttcttttgttttcccatgaaaaaaatatgctattatttaatgaaattcttacatgggagtgaatgataatactgtgcatgattaaaattagtataatgtagcataaattgatcattgtgactacagtgtagaaagtagttggttgagtaattctaatg

SEQ ID NO: 129357 - DNA, 476 bp, Zea Mays
tggatctcgaggtcataatccttgatcagttcaagccatcttctctgacggaggttgaggtctggctgagtgaagatatacctcagactcttgtgatcagtgaagatgtggcatttgttcccaatcagatagtgcctccatatttttagggcgtgcactatggctgccaactccaagtcgtgggtggggtaattctgctcatgcggcttgagtaagcgggatgcataagcaataactttctcattttgcattaagacacaccctaagccttgccttgaagcatcacagaagatgacaaaatcctggtgtatatctggtagtgtcaaaacgggcgcggtcgtgagcttctccttgatgatctggaaactttcctcacattttggagtccacacaaactgattatccttcttgagaagttcggtcataggtcttgctatgctggagaatcctttgataaagcggcggtaataccctgc

SEQ ID NO: 129358 - DNA, 561 bp, Zea Mays
taagggtcagcccctcaccggcgataagaacaccaccgcagcgtggatggtcgtcggtggccgtggtaaatatcctcggcatagtggcagaaggtcactaaggtggcaggctccggttaaacggcgacccccgtgccatcaccggaatccgccgcgcggaaagcttgccagcacatctgaaatccacacttcttctccaactccggtcgacggcctataaattgagctcggactctgcttcttctccacattacgcacctcagtgcttaagcaattgactcaattccgccagagaacttgcggagccccaaattccctcctcctccgttcttgcttcgccgcaagggactccatcgtggtcagcgcgcttcgggtcagtgtttatcaaattgcttcttgttctagttttcctttgatctcctattgctctccatgccaatcaattgaaattcggccgaagcccatcaccggaatgcacccttgctctgtaaaacgccgccgtgacccaccctcaccgacgacctgctcttcggctcgtattctgcccaaaccaaagtgtgt

SEQ ID NO: 129359 - DNA, 352 bp, Zea Mays
ggaggtttagggatccagcggaaggcgtgaggaaggcgacgggacacaaggaggttcacggatccggcggcatgatcaggctctatgctggagcaggagacttgaagtgggtgggtggaggatggacgcgatcgaagaagggaagggagggatgtgagatgaaccggacgacgagggagctcgagcggcgatgggcgcgacgtgtgtggctgcaagacgtggggaaggcggcgtggggaaggcgtgcgtggctgcaagacgtttagggatcgggggtgcggttccttggagggatggaggagagttggatcagagccgtgggcaacgggaccgacgatccagattaaaaatt

SEQ ID NO: 129360 - DNA, 513 bp, Zea Mays
cttcgacgttactgtggatactgctctggcctcgatccacttggtgaggtattcaacgacgacgaaggtgaatttgaggttcccttgagccgtaggcagaggtccgataatatccagcccccagcgttgaagtggccatgtatgggcgattagtttggtgaattgcgaagggttgcttgagcgaggggaaaacttttggcatgcttcacaagacctcgcgactcgattcgtagtacagattattgtgggccagtagaatccttaacggatcaccttggcagtgagggccctaggtcctgagtgggagccgcaagtttcgctgtggacttcgtgaaggatttgaatgccttcggtttcagtcacgcactttagcatgggctgactgatccccttcttgtatagctggcccccgagtagtgtgaagtcccggcttcagtgtttgaggcatttggcctcattgatatcacttggatggtaatggccttgcagatacaaagttattggggcccgcca

SEQ ID NO: 129361 - DNA, 767 bp, Zea Mays
gccgaggctgtggttgctgattttgtcttcaagaatattcagccgttgaaagacagggcatacccggcttatctgtaccgaggcctagctgactcgactcaggttatcaacagaaggattccctctgtagacttggtgaaccggcttgagatgattcttagaggcaaggtatcaaatgttggtgccccagtggcatattcagcctagaacttgcctcctcccatggccttcactctttttgtgtcgaatccacctgtcgctgacggcagtttgggcctcagagtgcggccctctgctgaagaagttagcgccttggttgcctcgctcggggaagttcctgatggtgaacggcaggtccactttgaggtgcccttggatcctagtgatgcagagataagcgctatgcttgatttgctggctgaggactcttctgatgctgctcctgctgggacattggtggtggcgcctttcccagaggctggtacaacctcagatattcagaagcctgtcagtgttcgcccgagacgcccttgccgagtcaatcaacttgatcctcctgctgatgagcagaaaaagaagaagagacgcctccggcgagtatctagtttggatcgggacgttggtacttcggttcctgctactgaagaagtgcctgtgcctgaatttactgacgtcgaccccactgggtgtgctccatctgctactgatcccaatgggtgtgctccatctgttgctgatcccaatgggggtgctccatctgttgctgc

SEQ ID NO: 129362 - DNA, 535 bp, Zea Mays
cgagttggtcctttggcatcgatgcgacatcaagttgggtgatgagccgatcttaagccgtgtatcgtgtcataagtcaccaacgccgaattcaataccaatgcaacagaaagatagttcgatcattccataccccatggtgcaggaaaatatagcactgacctccacaaaaatcgttgaaacaatcatatcacctcttgcgaaggaactcgacgagggggacatagacaaaattgttcctcagaatgtcgacgcaaacatcaaaaaggaagcaaaggttgacaccaatgttgaagggccaactacttcaaagaaaattcatcagcgaatcaccactgacgatgtcaagaaaccatcagaatcagtggcacgctacctgcaaaaattgcagagagttatgacaaatcaatcaaaagcggaatcagcatctcgtggagtacgcacacggtcccaaatagacaatttcgaagtatgggaagaagatggaatgattcatactcgagaatcattacgtcttaaaatcaatatcccgata

SEQ ID NO: 129363 - DNA, 1072 bp, Zea Mays
cagttctagaaaaaagaaatcgcagcacaccgtcctgccgtttcctcttctcgtctcccattcgtttttatacctcacccaacgcaaggccatggcgaccagcttgctgctagcaccattgcagagcaccaaagccagagggaggaaaaggaggaagaaggaaaggaaggcgaggcggcggcggcggcggagttagcggaagcatggactgctgcatctgcagccccatggcgccatctgtgctctctgccacgagggcgccaaggccatcatcgcgtttctgaacaatgatgatcagcagcagcaacaagagggcggccatggctctgtgctcaagtccagagtgtcgacgatgaagcctgacagctcaaccaaggtacgtatgaattcttaccgtttctgatacaacgacatgctacttatatatcctgatcgttttttttttctttcatattgctagaattacacatctgaattttctgttttttttttcattttgctacaattacgcatctgaattttctgaatcaacactgttgtttgttgtaataatataataaggtgcggtagctgttcattcacgtttggtttgctagctagtagcatataccagtattgtttgctttctagtcagctgcatgtcacaatcccaggaggacgcttgctgcatgcatgctgtaaaaagtgaccccggatgttaacgggtctttacaaagttattagtctcaggctttcagcaacagacttttagaaaggcctgtgttgtgttattagctagttttggtgctctttttcagtaggggcgttcaactctttctctgacccctgccatttcgcatttggtaaaaaatccaatccgaaagcctgaataataccaagactactaacatagtaacatgtagtaattaaggaaatgacttctgccatacaatccatgctcaaagtgtaaaagtagtagtaggcaacaagaagacatcgaaatcagaggtgagttttggcagccagacagaattcagttttgttttctgaaccaaccaaccaatgcaggggatgagaaacgcgtgggagcagg

SEQ ID NO: 129364 - DNA, 662 bp, Zea Mays
gacattgaggaagtgtccctggctagccttgatgatcttatcaagaagtttggggacaccttagaaaacgctcgtgcgtagtgtaatctatggtggttgtatgcttgtaatgaactgaagtgctgaataaaataacatgtttgagaaaaaatatggcctatgcatagtagaaatcctttctcccctctggcagatggcctcggataaaaccacgccttccacctcaggaattggagcaaggtctcccctaggtgtcgaaggagaagtcggtggagaagggagtgagacccacctccctgcgcctccggagctgccattagacctagcccaagttctggccaaccaaacccgactcattgaggtcctcactagaagcctcgagaaccagcgcccgattggaggaagacctcaggacagaacaggagagttcttaaggctcaagcctcccacattcgccggatccaacaacccgcttgatgctgatgactggttgcacatagtaaagaggaagttagaggccatcggatgccccgaaaaccagcgtgttcacctagcggctcatcaactctccgggatggccctatcctggtgggatactttcagcgctgctgtaagagatgctacctgggcagaatttgaagccgcttttcgagagcatcatg

SEQ ID NO: 129365 - DNA, 519 bp, Zea Mays
agggtcaaaaggcaataagactgaagtgggtattcaaggtaaagaaagatccatcagggaaaattgtgaaacataaggctaggctggttgcaaaggggtatgctcaagtccaaggaatagactatgatgaagtttttgctcctgtggcaaggttggagatagtaagaattttactggctctagctacacaaagggagtgggaggtgcatcacatggatgtgaaatctgcattcttaaatggagaactttgtgaagaagtctatgttaaacaaccacttggtttcactgatccaacctgtgcagaaagggtcttgaagctgaacaaggcattatatggactcaaacaggctcccagagcctggaatgccagacttgacaaggagctggtaagtttgggttttaaaagaagcccagaagaacatgttgtctataaaaaaggaaagaatgtgtctctgttactcgtaggtgtatatgtggacgatctcattatttgtgggctagataacagggagatagagg

SEQ ID NO: 129366 - DNA, 277 bp, Zea Mays
cccccgacccaacgacgacggcggtaaacaggacagccgcggcggcgagccctgaccggcgaagttaatccccatactcccacgcccgttttctaattcggctaagttgcctactgcggaagacataatgaggacgagggtacacttattaccgaggatcgatgactcgtcgatgctggccacggtgaggcttggttccgcggtggaaacagagcgccaatgagaaattcacgtcgtcgtggggcctcacgcccccagatttctctccgagcacaac

SEQ ID NO: 129367 - DNA, 298 bp, Zea Mays
gagcaattgtagagtggagcatgggttaacttatctttcaaagtgttgaacgcctcttcttgtggggggtcccaagcaaaagacacacctttctttgtgagttcgtgcaaaggggcagcgatggagctaaaatcacgcacaaaacgatggtaaaaccctgcaagtcctagaaaactccaaatttgggtgatcatcgttggtgtaggccagtcctgaatggcttcaaccttgctgctatccacctcaatgccctgcggagcaaccacataaccaagaaacaagacacgttgcgtgcaaa

SEQ ID NO: 129368 - DNA, 503 bp, Zea Mays
ccgaagtcaccgcgagaggcagcgcagactaccctcgcgtgcgacactccgcgcaaaagtcgcctaagggtgcagccgaaacagcacaccgagagcgttaatcgaagtctatctttacagagacgctccgcacaaagtcgcccacgtacgcagccggacaaatacaagcgtacgaatacggccaacatgccacatcaccatacaaattacaattacatacacacggtgagggcatcgcctatcacatacacacggcgagggcatcgcctattacatcggctcaaccttcagaatgatacccatctccctgtaattaaacaacattatcctcaattcctcaccctcaaaagctctcgaagatccccctcgcctatgcccgccccaatcggcgaggataacaattctcgtttaccaaccccatctacccgaagtcggccacgctccatccccatgcgacggcgcctgccgctccgcgaaaattcacccacactttgttttcccac

SEQ ID NO: 129369 - DNA, 542 bp, Zea Mays
ttgaataatacgaacggtcaaagttttagaaaaaaatcaacgacgtcatatatttgtgaacggagggagtagtttgcggtaaaagcatatttgttcggatttagggaggaaaatgagtttatctatactgtgactcatacagtcttggtaacacggttaacaaacggacataacatgcaaactgtatctttttactatttaccttaaccatgtgagttcttttatttggttctggacatccttttattctagcttgctgtaatctactggattgcagcatgaacaccttcatgggtcttagcttatcttttcactgccaattgtggtctgagatgtgtactattaaatctcgaacaactatgttgcaggcttctgtagtccgtaggctccaatctgtactataacacatactcatttctatgtggtctacttgtttaccaaatcatattacagaatagttctctgtattttgtgttccagtactttgatcactgaataaatagaacacatacagatttgtaatcgggctccacctgtcgtcg

SEQ ID NO: 129370 - DNA, 804 bp, Zea Mays
gcatctttttctttggaacaaaatattttgtagatgctctaagtgtttagaaaatagaacccaagtgaggtgcttttgtgatcaaacaaaatgtatgcatatgatgaaggaaaatttaggggaggattttagaattagaggatgaagggggggggtaaaaggtggattagggtttcaaacctagatttggattttgggatgctacaaacctaccccacttaaaggaatctcgccctcgagattagacggggctcgagaaaaggtaagggtattccttcctcagagagtcctcactttcccaggtggcttcctcttcaccatctctgctccactgaaccttacagagtctcacttcggaattgcgggttcttctgactgctgagtcgagaatcttcactggcttttcccggtactggagatccttttgaatttgaattgcttctgcctcgatacgggtttctggtacttttaaacatttgcggagttgagacacatggaacacattgtgaatatctgacatggattctggtagctcaaggcggtaggccacaggtcctattcgggaaatgatagggtaaggaccgacgaaacggggtgctagctttcccttcatttggaaccttctgacaccacgcattggagaaaccttgagataaacaaaatctccttcctcaaatctgagttcccttcgcctattgtctgcgtaactcttttatcgactctgagcttcaagtaaccttctgcggatcaaggcaactttttcttcggcttctttaacgaagtcgggcccttctagtgtccttt

SEQ ID NO: 129371 - DNA, 376 bp, Zea Mays
atgcaccaaaagatccagtttgacttctctcctttcttgacgaggttgagcttttcttctccagacttggtctcattgattcgaggttagtgtatatcaacagagttagggaatatagatttggatgagatagactacatgatgtgggtcaaaagcttgtttgatgttagtggggataggcagattatgtaatccatctcgactctattggttgggttagatctcatgtacgtggctgagttggtttaaggcactagtttagttttaagtgtatgaggggtatggccttatcttttgtaccagcattaagtaacttactctagattagatcataatagattagataaaatctagattaggttagatatgtctggat

SEQ ID NO: 129372 - DNA, 358 bp, Zea Mays
aagacggtgtctcggcttcgcttggaactgctggcgaaggagatggaaggtatggaaactgaatctgagagggagggacgtaatcataggcaggagggaggtgatgatcggacgcatggagagagggagtaccatgaccggcaaggtggaagtagggagcgtagagctgctaatccacaagggggaaaccgggagtatcgagatcagcaaggtggaaacagagagtatcgtgcttccgatttacctaagatgtcatttcccaagttccagggaactgaaccaggcgtttggtttgataagtgcatggagtatttcaacgtctaccaggtgcctgagtttatgtggccttcatctgctt

SEQ ID NO: 129373 - DNA, 418 bp, Zea Mays
tgaacctaatttcttgtctccttcaggtatgctagaagaaagtctagatatcaatacatatgcatcgcaagattgaaattggtgtgcatacatcatcatggttgctagaccaaatttactacaagcatcgacataagccatgatagaagaaatcacacagcgataccacaaaataaaaactatatctgtggggcaagaaaagaaagctacctctgtagtccttgcactctgcatcaacatacgaatccaggaaacaccaggggtcctgtagcacaacataaacaaaacagcagcatcaaatatgtatcaggtcgttgaacttagcagaaagggcagcaaagtaataatcacatcttagagcatagatcaaacaaacctcgagcttgttagatgtatcctcatcaatatcgcatccaaa

SEQ ID NO: 129374 - DNA, 412 bp, Zea Mays
ataattcgggtggttctgccatagctggtatcagagcaaattccaccacagaaaaggacaataaaccatgaataccattttcaaaatttaaaacttgcctagaaactgctacggattgttaggactagaccgctagacctaggacgaaaggccttaggcatagagggagaaataggtggctaattaagtaggccccgtgggccagtacttagactttttaaggatgccctaagagcaccctattatttggagaggagacgttacttccagcatgcatgcataataaacacaaaagggaattaaaacttgagctaacccacttcctttaaaaaaccatccgggctctttttttccttccaccataatctttacctatgatacccttccgcaggtgaattcacctaccccaacc

SEQ ID NO: 129375 - DNA, 497 bp, Zea Mays
cttagaaagatggaaagcgatggaggaaaaaataggaactagggttcaggggccaagaggacgtccacaaaagtacaggttggtgcacagagtcaggcgcagaaggacaggccgatggctcgggagagttttggtcgcagcaaagtaatgccactcggtcattacctctaaaagataacgaaccgtcagacaaaagaatagaatacacaacaacagagtggcgtgagaacaagcttcattcatcattccatcagttggggaacattacaaaaggaagaccgacttattatgagtcggcctactgcccctcgatccaacactacattacattactaattaaaactacattacactactagttaaactacactatactaccactaaactactactactatattatactatactaatatttaagcccgtggcactcggccaccggcgttgccgttaccgccatcacccgtgccgtcaccgcacttgctgttgccttcgcc

SEQ ID NO: 129376 - DNA, 453 bp, Zea Mays
actggacagggcacctaggaaccgtctcgttgaagatattgacgataacctcccgtttttaatccatgatagggttcgcaagctactgagatctagattacttcctttgtatttcagcaagacctgtggcttatcgattcctgacaccgatttcattgaataaaaccttggtgtgctgcctgagttggatttactggtattcatatcactgaacattagtcgctctgagtctgaaatatataattgctacaagcaattcgtgaagctcttcaaggctcttgtgggtaagtatcctgaaagggatgcaatcttcaagctacctaagtcacttgatctgcattttaaattccttgagttgcttattgtaaaggactatcgtgtgatatatggtccagtcctcttccccaagcttttgatctctataatgtactgcgaagtgcatcaacttttgag

SEQ ID NO: 129377 - DNA, 564 bp, Zea Mays
ggcatatatactgaagggtccaacacaaccttctttgaattttcctcgcgcacaatttggatgggattcaagagccttttttcatcttggtataagaaatataattggttagaatacagtgaatctgctaatgctgcattttcttttattgcttcctatttaagcaacctggaagggtagaacactttggctacgatgtgtttaccaaaaaaggattgactgattggaaacatgcatataaatcactgcctcaacatgttagaggtgtaggtagtgctcacaatcagtgtgttcataaatgcgatgattttaaaaatcaaagtcaaagcgtggcaagtgtgtttgctggtgctagatagctagtagaggaattgtacccaatcctcttgagttctactcttcgttgttcaagatatctcttagggcaaggcatgtcttttcgtggccatgatgaaccctctacctctttaaacagaggtaaccttttagagttgatagattggctcaaagatagcaatgaagaagtgagaaatgcttttgatcgtggtggattaaattgtaaat

SEQ ID NO: 129378 - DNA, 825 bp, Zea Mays
gaatcctcttcattgcccttggaggtgaacaactcaagtacgcatttcagctattattctcggcattgaataatgcagcagaatatgagacactgatccatgggttgaacattgccatatcactgggcattaagaggttgatggtatacggagattcactagtggtcataagccagataaataaagactgggattgctcgacagattccatgggaaagtactgtacagtcgtccgaaaattagaagacaagtttgaagggctggaattttatcacatggaaagagatcgcaatgcagcagcagacacgttgtcgaagctaggatccagtcgagcccaggtccctctcggagtctttgtccaggaagtgtcacgcccaagtattccctcagatcaggcagaagagtgcaacacctttagccagccagagtcggactctaatgactggagagagcctatcattaggtatataaagagtgaggaagaagcagatgataaggctgcagtagagcgcattgtgagacaatcagcccactacaccatcataggggacgcactatatagaagaggtgcgacaggagttctcatgaagtgtgtctcctcggttactgggaagcaactattagatgagatccacggcggacagtgtggaatacatgcagcatctagaactctggttgggaaagtcttcaggtctggtttctattggccaacaacaaagaaagatgcagccgagttagtccagagatgtgaagcttgccaattcttgtcaaagcaacaacacttaccggcacagcagatgcaggccatacctgtaacatggccat

SEQ ID NO: 129379 - DNA, 967 bp, Zea Mays
caaactttgattaacattttgtccatcctcaaatatgttgaagactgagtgattgacacatggtggttcagagcagtgaaccatttataggttaataaagcataaaaaatcattgacagaaattataactattgtgacaaagagacggagagagtgagagagacaaacatcatgttcatctcacaggttaagcatagaggctggaagcaaatcacactgctatgtttctggcataacacagtttcaacacaatgcatgtttctggcataacacaaattcataatacatcgagacactctgggacaggaactaaaaaacatctcaggagaacaatataaagtactcaaaccaaaaaattaggcatttcatcttagtgaccaattaagacgaagcattacagggattcacatataatttgtttgatgaatccaacaaaatttagtaaccacatgttaaaatttcattgcagtgtagaataaattggtgtctcgtttcaggtttgaactatcatccaccagtttcaatagctatcatcaaattatcatccacccctctagcttttcaggtttgaacttagctgcgcaggggacagtcaaaatcaggtttgtgcatcagatctaaaatgcagaaagtagaacacaattcaaaacaaactggcagtaccttgttcatgtggatccatgacagggaagatgcatggggaatgggggtgggttggcggcatcacctgtgtccttcctttaaaagcagtaatggtgggcatgttgagtggaaggtaggcatcgtcgttgaaaggttgcgccaaggttggaatggggtattatatatggatggggggcggaggcgctgattggaaacttaccgcatactatggaggtcagccacctactatggaagctcggtggcggcaatggaaggtatacccactcgtgtgatgctagctcattgcgggggatagaaggaggcg

SEQ ID NO: 129380 - DNA, 697 bp, Zea Mays
ggcgtcctcatgaaatgcattctctcatctactgggaagcgacttctagatgaggtccatgctggacaatgtggaatacacgcagcatccaagacactagtcgggaaggtctccaagtcgggtttctattggccaaccgcgaaaagtgatgcagccgagttagttcagaggtgcgaagcttgccagtacttgtcaaagcaacaacatcttccagcacagcaactgcagaccataccagtaacttggccgttcgcatgctggggactggatatgattggacctttcaagaaagctcaaggaggatacactcatgtactggtagcaatcgacaaattcactaaatggatagagttcaaacccattgcttctttaacctcagctaaggtcgtggaattcatacaagacataatattcagattcggaataccgaacaacatcataactgacctgggatccaacttcacaagtttagagttcttcgatttctgcgagcaaaagaacattcagatcaagtacgcttcggtagcacacccaagagccaatgtgcaggttgaacgagctaacgggatgatattagatgcactcaggaaaaaggtcttcgataaaaatgaaaagttcgcaggaaaatggataagggaattgccctacgtcgtttggagcctaagaactcaacctagccgagctctgcatggaaaca

SEQ ID NO: 129381 - DNA, 384 bp, Zea Mays
tttctgttaaagaagagaagaagcctagagatatgtagaaatgactaggggcttcagggaaaggtttaatccaaggcatgccaggactatccacaacccacctcaaaacaaagacaaaaccaactagactcaggggcaacataatcaatcgtaaggctttaggacccagcaataaccctctcaaaacaacttccatccgccagcctcaagaggaggcaggggaggatgaagcttcaaggaaggtttaattcccagccaaggaagttgttctgtcttatccgtggagaagacaaggggtacaccataaggacatgctaggtaacaatccaaaagcagaaggaagttgctgaagcacaatagaatgaaccaaagcaagtcctccac

SEQ ID NO: 129382 - DNA, 337 bp, Zea Mays
ggacgatgttccttcgccgctgctcgatcgctaggagagagagagaagaatcatgagaaagaataacagaccattttttctccttaatcagtgataccgtagatattttttcttctcaacaccaccaaacttagatttagtggagcatctattgaggtgttttactaatttagtgaatctataagtagatctatagatttggtggagcagatccaccggtgaagctgatggagacgaagatgcttggctaaaaagtttagatggtgaagctatcatgaacaggaacaggaacctattgatggaagagttggagtaagtgtttacgtagccggcaaac

SEQ ID NO: 129383 - DNA, 565 bp, Zea Mays
caacaaaagtgatacaatacatccacaataatgtcacaacaagttcaaaccggagtaaaaaggattaaacagatacatcgtagcactgaaaatgggacatagtgctacaaaaaattacagatcctagtgactcatcctagtgacccaatcatgtttcattgtaagccagttgaagcgttctttcggtgtgtccaaagtcataaacatctccctctctgccctcttgacaaaaacttgagatgctatgaagtgttcttttgttcctagaactgcaccacactccttcgccaatgccatcacatctctaatggagcacccattgtcctcctttcttgccaaagactcaatggatgttgtgctcttctcacttgctgtcacaagtttgctcaattgatcttgcacccaatgtcctcccaatgacttgggctttttacccttgtcctttcgaccaacagaaacatgacactttcctttagcagttgtaggggaaacctcttcacattcttcatagtcttcatccttgtcatcattggcctcatagtctccatccttgtcatcagtgttc

SEQ ID NO: 129384 - DNA, 1797 bp, Zea Mays
tgtctgaccagatcagatatgagatgcctgtgttgtaaccatgaagcgagatctgaggactgaatgacagtatctagagcaatcccaaactgccgaggcttgcacccgtataaagcttcaaaaggagacacaccaatggaagagtgttgtgaagaattgtaccaaaactgggcaaccaaagccaatggatccactgagtaggacaagcgtgaacaaaacagcgcaaaaaggtctcaagacactgattcacacgctcagtctgcccgtccgattggggatgatacgccgaactcatacgcaggcggacatcagccaaccgaaatagttcttgccatagctgactgaggaaaatttgtcacgatctgatacgatcgattttggaagcccatgatgtttataaatctgatcatgaaacagtctagccactgacagagctatgaaaggatgtttcaggggtagaaaattagcatatttagtaaaagtgtccaccaccaccaatatgcaggtataagactgagaagagggcaaggcttcaataaagtccatggatataatctcccacaacgcagtagggaccggtaaaggttgtaataacccaggcaacttggcccgatcagctttggcctgctgacagatcacacaggaagtcaccaaatcatgcaccgcttgtttcattcgtttccaggcgaacaattgtttcagtctcgcatatgtaactggcacaccagaatgccctccaacagccgatgagtgaaaagcaagaatcaacttatgctgcaaattgggactgttacccacaataactcgattattgtatcgaagaatgccatcctaccaggaataaggtggtagagcctgaggatccaaggccaactttgcaatcatatccaacactgtatggtcattggcatatgaagaagccacttcagtaacccactgtggaatacaggatgacaaagcgcaggaacccgctgagctagctggacgacgcgataacgcatctgctgcaccgttatccacacctttcttgtgaacaatgcgatattgcaaccccaaaagacgagtaaatattttcttttgccagggcgtattcagtctttgttcatccaactgaaccaagctatgatgataagtatggatatggaactctttcaattgtaaatagtgacgtcaatgatccacagctactaggatagccaaaaattccttctcatatgtcgataagccttgcaacttcggccccaatgccttactcaagtatgcaatggggtgtccagcctgcataaggacaaccccgactcccagtccacttgcatcagtctccaaacaaaatggcagcgaaaaattcggtaaggccaggacaggtgctgttaccagagcttgcttgagagtctggaaagaaacctcatgatcttgagtccaaatgaaaagtgcccctttcttgagtaaggatgtaagtggtttcgctataataccaaaatgtcgaacaaacgcctgtagtacccagccaaccccaaaaaactacacaactccttcacattgctaggtgtggaccactcgaccactgcttgaattttgccagggtccgtcgccacacccgcagccgagatgacatgacccaaatatgccagttgaggtttagcgaacgtgcacttggaccacttgatgcaccactgatccttgagtaataattgcaacaccgcatacaaatgttgaacatggtcttcaagagttgcactgtacacaagaatatcatcaaagaacaccaaggcgcaacgacgcaacaaaggggccaaa

SEQ ID NO: 129385 - DNA, 341 bp, Zea Mays
gtgaggccatggaacacatccatgagacccggcgaaactgccgggcacgaccccgaggacgtgacggcgaggagtaagcgggattgactatggcggcgacgtatgcatgagttcggtcgcggcggcttctctctatggtgactctggttcgtgtctactccaatggctcccagtttgaatgaccaagggcaccagattatgtagcatcggagggcgaagtctgagtggaaaaggcggaggcgccaagccagccatgccggggatctcggcgcacgcacggatttgttacggagtcccagcagtgaagaaggtcccgacgaacgggcccatgcaatagagag

SEQ ID NO: 129386 - DNA, 730 bp, Zea Mays
taccctggcgccaacattgtagtgagcaagtggatatacaagcacaagttccactctaatggtgcgcttgcccgccataaggctcgatcagttgttcgaggattttcttagtagccaaagcccaagggtaatcaaggaattgagccctttttagcaatcccctgcaactgctcactgattctgctccaccattccatcattttagcttctcccaccataggagcaaaggcagacaagttgacctgtcccagcagctgaaacaaaaaactcctagcaaaaacacaccccaccaaaatgtgatctatggtttcttgatcttggtcacaaaggacacatttgttaggatggcttaggcctctcttctgcagacgatctgttgtccagcatcttccaagatcagcaagccataaaaagaatttacacttgggaggggaccaagttttccaaattaattcccaatacttagccatggtcgaccctatgaagaggccatcataagctgctttagctgaataaattccatcagtagcgaacctgaaaatatgcttgtcctccctgtctggatgaagctggatactttgaagttcatcccagagatcaaggaggtcagcaaagacacctactgtcaaggcccctttaatatcagttaaccattttctgtttgtcaaggcctcaagcacagttctgatgttcctaatcctttttggcacagctgcaagcagtcgaggag

SEQ ID NO: 129387 - DNA, 481 bp, Zea Mays
agctgctcgtacgaagcgggctccctcagggtttggaggccctgccccctccactgagccacctccccagcctccccatcatccatcttcctctcgccccgccgctgcctcgcgtccctctcctggccgcggatctcccatgtcacgtgctcgtggtcgtggtcgaggtcgtggccgagggatgggtgctcgcttggtccatgggtttgcgacgtttttctctatgtgccgcaacatttctgctaatgtacatgaggtggcacggcgtcagcgggagactgacgacaatcttcgtcgtcaagcttccaccatgggtatgccatttgcccctcgctcgcctgatgtgcctctccatcctcctcccccggagatcaatgagtggcaccagcaggcctacggggtgccatttatgtcagcagacgaagaagaagaagaagcctacgttgatgatcgcgagcagtttgccccgcctccctaccat

SEQ ID NO: 129388 - DNA, 355 bp, Zea Mays
tgaagatcatgcaactttgtaaatgaaacttaaataattgttggcttacattgatgtcagataaaatgaaatgttgtctatcatgataacgtggttcaatcgggaatttaacttctacccgagcgacaatactgtatttccgaggtagcccataaaaatcttcatcatggtggtcgtcgaacaacctgtagctatattaaacatacgactaaataacggtaatttctttgatagacaaattctgtgtaaatatatttatgtaataacttacataggcatccgttttatgcggtccgctgcgtctctttctcggttcaatacgaccggttccatcaaaaccttctagcctttaaca

SEQ ID NO: 129389 - DNA, 504 bp, Zea Mays
aaaacaccactctcgaattgagatgggaaattagagattttagataatagacataatgtaatcacaaggtaggatagagagatgagaaagataaaggaaataacaaacaaaagcacaacaaaggttagagttaaaactcgcaggtgacaaggaggaggatacgaccaagggaaaaataggtaaaaatctacaactctcagatcgagatggaagagaggagattttgaagggcaggtataagataaatatcaatgtaagatatgatgatgtcgaaggtaaagatgataataatgaaaagcataacaaaggatagcgttaagataagactcacgaagtggcaaagtggagaaaacaataaagggtaagatagataaggtctcaatagaaaggttgaagtaaaaacccattaccgaaggatgttatgagggaacaatgagatcatcaaggatgtgccaaatagaacgatcattcatggatcgtcaagaaaccagggtggtcaagggc

SEQ ID NO: 129390 - DNA, 711 bp, Zea Mays
tccgggaccttgctaaggcccggaccttaatcggagggacctagggcccacccgagggacccgacatgccttcttgggggagctccggacttgtacgtacatggatccggtgtccctctgtggaggttcggacccaacgatgcatcctgggatgtattatccttccttgccacgtggtgctcttagacctgcccatgtggtagggtcgggttccattctccgtgtggcctggaggcgttgtatgggtgcagcgtcttcatactgtagaagtacccctgattgagggtaccgacagatcacaagttcacaatataacaagtttgcagtataacaagttcataaagaccacaagttcatagactcaaagtttcacaattcacaatatccactcgatctagctcacatggcatgcttacttatgaaatattttttcctcacataaaaagtttttcacaacctcacaggaaaaccctaaaacctagtgtgtgaaaaagaccaaatcgttaatctcaactgccttccaacaccatctatccaaaaaaactaaaggtgtccaaaaaatacaaaaataagtaatccttatctagagacgtacaggcgatgcgaaaaatcacatgctggaaaattccgaaaaattccgagacacaattctggaaaattccgagacacaaatccggtaatttccgacaaaaaccagtaaccgaaggaaac

SEQ ID NO: 129391 - DNA, 383 bp, Zea Mays
ccgttctcccctgctactccctcgcgcatgcaccgagccaaactctccaccatcccgccgccagacaccgccgcgagggagcgattcgcgtcgctaccgtcgccgtgcattgcgtcgccgtccgaggtctgctgggtggtcagggtcaatcgagttggaagtgctggtcacgtggaagtcgggcatgggcgcaatcgaagaggggagctcaccggagctcacgaaattccttgccggtgttggagaatccgcaggttcccgtggccagggctgtccgcgctaccaaccgtggtgagaaccccctttccgtaatcgccatcaccccctctaggtttggcaccgaccaattttgagtttggagcgtccagccgtggcattgcgcg

SEQ ID NO: 129392 - DNA, 650 bp, Zea Mays
tttttgcggggggaaagccacatttttgtggcttcggcttctaagtgaaaactgcttcatcttcattgtttttttgcttgtgttttggcttcacaagccattttcacatgtgcacatttggcaggacttttgattaagagtgtggagaagccctaacaaaagccctgccaaagagagccttggagagaaggaaaggcttttcatctaataacctcaagctttccgcagatctgcaagtttagtttcttccaatgacaagtttggaactctaggtattctgtggcctggtacagttttgttattgtccagaatcttcgtatctgttgagaaaactacataggtacttgaagctttccaattagtttattatacatgaaatgtttatcgattgagaactgcaatctaatagttctgtttgttgtcagcggatttgatgcagatgaaggcaccactatccacttagtactatcttggacttgtcattagagtatgtggtccttaggccgtgctcaacagatcatacgtaatggtcgtgcaaaacactattttacaccgtagaatacactgtttgtcgagtggagtttgaaataggatgtgtgatagaaagtaagatatgtagtatgctggagataaccttagtagtatgctcg

SEQ ID NO: 129393 - DNA, 369 bp, Zea Mays
tcaaccatgatctagttatcaaatgagctcagtcactatagtcgatttgtagctggtatgtagccctataactttggtacagaaagcttgctcggttactatacaaaatcgggagaaaatctagcctcaaatctctttgtcagttcatctgaaaggagctcgccatggtacagtagcttgactggatcagatcaaccgcgcggctgtcctcaccgccgacggatccctccgccgtgattcgggtcaccggcgtttggattcatgcaccggacttgtggataacctctcggggtaaaagatcctcatcgtcgtcaagatggaaaccacctcggtcggccgcggtactcctcccctggttcatcgcctgcg

SEQ ID NO: 129394 - DNA, 326 bp, Zea Mays
tgatgtgcctgatgtcgggctggagttatctcgagcagcgtcccacgcctcgtcgaccttagagcgtggtcttaagggtcaggaggctggtctggattgttctgctcccatggaagtgggtgaaggtccttcagccttagaggtggctgttatggagaactcggccctcaaggatggcgctagcgcttacccagcccccgagggtgtcgccggggatgatccggctcggatgggtagcgcgagctatgacccagcccccgagggtgtccgagttggttctccctctcacacttccatggatgttcacgtagtgtcttctcctccgc

SEQ ID NO: 129395 - DNA, 508 bp, Zea Mays
caggagcgatcccagccgtctgctatggatccagcggccgcgacatcatcttccccattcaggcacgtggctacgacagcgccgccccaaaaccacaaccgagccagtgccaggataccccgccctgttctagcctctagcacctaaatcgaccggctcaacataaatcggaggtaaaagcgaaccatcagagagagtccttatattggtcaatggcgcagacatttctgcccgcgatgaggggcagcaccgttgtgaaccagcaactccggtgagaaatcgaagagctttggcgcacaatcccaactaggatggcaaggatcaccatcccccggatgacctgaagcacacggactagcgcacaagccccaaatgtcaccatgggcgagtgtccacgatagcgtgcggatccaggacgagcaccacaccggtgaggaatcgccaagcgtcggagaccccatctcaccctctgattccatggacggctcaaccctgcactggaaaaccc

SEQ ID NO: 129396 - DNA, 714 bp, Zea Mays
ccacgctggtactccatccatggacgcggctcgcgcacgcagctcgcgtcgagttgttcttcaaggtgaagctggagatcgtggggatccatccccacgcgtggtcgcgtgacaccgcctccatgatcctggctccggcgtgctggatcgagaaggtggacgcggcgtcggccgacaagacggaccagtcgttcttcggcgtcactgcctggacaaacgaccccagcgccatcccccgttctgtttcgctgctcatcgcagagaacgagctgcgggtggtgcattctgacgaggtcctgcatcgcattttcgaccgcctgccctcgtatctgaggaagaaggtgacgctcaagtacggtgttatggtccacctgcgggaggtggaggacctcgctccgagctcctcttcgtcatcttcgtcgccctctccgccgagctccgacgatgacagcggactcggggagaaccccgaccggcgttttctttcctccggtcgcggttggggctctcgacgttggcgctttccctgcagtcgtggagtgccggacggtggttcggcgtccgacggtgccggcccaccggccaacggcggcgtgggcgagaacgctggcggggcccgtgaactgtccgcgtctggggagctggcggggcaggggtcaaaggctgtcgccctgtcctcggaccatccggtcgtgggagcatcccgtgatggtc

SEQ ID NO: 129397 - DNA, 282 bp, Zea Mays
cgaatccactaacaccaaaacctgttgacaataaatggatgcccacagtctgatagttttgctcccttcgctgcctgatactgctgcaacagaaatagcaagcacactctctaggctagtctcagttgcaggctctgcagactccatctccagttcagatgcacccattgttagagcccacatttcttcaaccagatgtaaaggcactgtgttcgagcacgtgtgaagttggccccatctttctccacacttaaaacacagtcccttagccttccgatatgc

SEQ ID NO: 129398 - DNA, 1038 bp, Zea Mays
ttttgtaacatttttactatatgggtgtgttgctggttgttttcctagaaatccaaggtctcttacgcaaatcttatacggcgaaggtgtatcttcccatgtggaatgctggaccttcagtctacggattagattagattataatcacattgaatcggtatgcaatcttgatcatcggacctccgatcaacgaccgaggacccgcattatctccacaccgtttgatcacaaatcttcgtttcttgattaactcatgaagggatacacgtaggttttaatcacgaccgcatatccaccgatcaacgaccaacctccctcctcctacgcccccattgcctcagaaagttgcacgttcattaccacgacagagggctcgttggtggcacacgatctcacgattacttgatccgaatcaaacaccaatacgctctaaactacaagaagtgcaaggagaagttataagagcagacctttctggcgggtgatgtcgagaccgagccgaccatgatgatctgtggcttggtagcgagctgaaggggcggatctagcccaaaatccgagtggggcccaactattgaggggggcctaaatggaagcttactagcaaatagtatttcataactataataattaagatagaaagttaactgtaatcagaaatttgagtgggggcctgtgcccccactcaccataacgtcggtccgccactggcgagctcctcgctccgacgagcaattcaccgagctcctgtgatattttcgcccataaaggccacggtcatgtgaggggatctctggtggagccctaggatcaccatccgaggttgcggcatggccgaggatcacggttgatggcggcgactatctctcctctctctctctttgcctcttgcggcggcgactccctatattatgcgtggtgctggaggttctcaattgcgtttgaggtacgggtggatgagggtgctctgtagcctggctttatagtcgcatgaggggttcgagacttgatgattctcggttggggtgtgaatcaagt

SEQ ID NO: 129399 - DNA, 431 bp, Zea Mays
tatccgtgcaaaagtcgcctaagggtgcagccggactagcacaacaagtgcgtaaaatcgaagtcttcctcaaaagactatccgtgcaaaagtcgcccaaaggtgcagccggactagcacaacgagtgcgcaaaatcgaaggcacattacatccgtgcaaaagtcttcgtcgaaaaactatccgcgcaaagaccgactacaggtgcagccgcaccgacataataaacgtgctagaccaagtgcacaacgcccctatggacacggccggatcagcgaaagcacacagcctcatcatacaaattatagttacatacgtacagcgagggcatcacaccttacattggttcaaccttcgggatgatacccatctctctatagttaaacagcattatcctcagctcctcaccctcaaaaagacttcgcaactcccc

SEQ ID NO: 129400 - DNA, 361 bp, Zea Mays
gttggaaatagtgccacgaaatttctattgagaataacaggtcttctaatttatttaccgcgcctcctgctttgctggaagctggatcgaacccttctttttactcctgttgcgttggcctttttttaacgtggccaagtggttgatctttgtcttctcctagttattctagtagtttgacctttggagaaatattcgggcaaaaggttgttcctacactcgtctgattctttttagagatgaaatggatttatggttgtacaatgcaaaagctaagagttagtttgggagccacaaaatcagagcgactaaatttcccttctcattcaaaattaaataacaaggggaatttagcccctcc

SEQ ID NO: 129401 - DNA, 680 bp, Zea Mays
aacaagagcaatgcaactggcgtccccatgaacatgacggtgacagtgagtgagtaactctggcgatcgatatttcactccagttgagttgtcatgcatgcatactgtaaatcagaactattaatttgttgctgctgctgcagatgccttgggtcacggcttcatagcatagaacctgacaatcagaaacatggcagggccagaaaggaggtaggacatggcgctaaggtcaaattcgaacaagtcggtcgtctaccggtgcagcatggaaggtcatgaggacaccttgtatgtggagaacgggatctagttctacctacagaccttgatctggggcaccgtgaacttaatttgtgtttggcaatgcccaggccatgttccagagctgcccgctgctggtgcgccgcccaccgaaaggcaagcacaatgtgttgacggcgtaaggctgcaacaacgccagccgtgagtccaacttctcgttccacatgtgcaccgtagaagcggcaccgggcgtggacctcgacggcgtggagacctaccttggccgcccctataggaacttctctcatgtcaccttcatcaagaagtctctcagtcgcgtggtcagccccaacggctgggtagcgtggaacatgaacaaggtcgtcgaggataccacccggaccgtcgtctacctagaa

SEQ ID NO: 129402 - DNA, 462 bp, Zea Mays
gagaagcgctgcagtgactacttctcttagatcttcaattttgtcctcgagagcctcagtagaaacaggagttggcatctttgtagatttcaaaacaacatctaaaaccctgaccattctcctttttctaggagtcactgttgtagcagttattagcttcggcaaccccatcgcagttgggggactcagcagtttcggttgctcttctaccattgagcccttttcttctgccccttctactggaccgacactagcttcaaccgtcacagcaggaattgcctccgaagccaaggggatggcttcgacatgtttagcagtctccgtcttctctgtatcaagcattgcagctgtccttagctctcttcagcataggcgcgacggaagaagatgaagttgccacttttctttttgacccttgtttgtgggcaggaaagcagtaataaggataaaaaatccaatcac

SEQ ID NO: 129403 - DNA, 313 bp, Zea Mays
gtgctgtgggcctagcctagcttagcccagcccatatatagcatattagccctattgttagcgtaaccgttccctgttagtgtatacctctactgtaatgggtcttggtccacctaactctattataccaatgcatttccaaccctgattagggttaagagtttctattctaatatggtatcaagcctttcttctcttcctccctcccctagcagcagtcagccgccacccatggctgctccctccccgcgcccctctcctgctgcacctcgtgtagagacttcttcaacccctgcatgcgccggcaatcttc

SEQ ID NO: 129404 - DNA, 426 bp, Zea Mays
tgattttatatgtacatcatgtgcaacgggaaagctaatcttaagaccatctcctcttaagattcatgctgaaccactcaagttccttgaacgaattcaaggtgacatttgtgggcccatacaaccattatctagatcgttcagatacttcatggtattaatagacgcatctacacgatggtcacacgtgtgccttctgtctacacgtaaccatgcttttgctaaaatcatgacgcaagtcattcgattgaaagcacattatcctgaacatcaaatccaaaaaatccgcctagataatgcagctgaattctcttctagagcattcaatgattattgtatggcccaaggcatacacattgaacattttgtgccttatgtacatactcaaaatggtttagctgaatctcttattaagaggatcaaact

SEQ ID NO: 129405 - DNA, 381 bp, Zea Mays
gtgcaatgtatagaaggttgaatcgactaaggttgattctgtacttattcatgcatcatgctaagaattatactaataacattttcccccccttagaaagatgccgccacgcacaaggctaacagcacgtaagtcaacgggaccaattggagtaccccggcatcaactagcctctcgacacgaaagcagcagcagcgggagtaatgaccccataggagaccttgaagcccaagtgagtcgacttcaagcaacgctgcaacacaggaccaatgcttggattgcagacggagatagaatcaatgaactaagaagggacatccgtcacctgcaggatcagcttgctgatcgagacttagcacttgactgggcagtacagtctca

SEQ ID NO: 129406 - DNA, 300 bp, Zea Mays
ggctctgggtggaattgggaggtgggattggggctacacggccgtaaggaactatagtttcaccatgcacactcaatttgggaagaggtggcagaggcagtgcgaattttgagctgcaatcaaactcactggtggagatgtgaacacctcgccatggaccatggtgctatttatagccatagcggtccggctaatgatcagcgaccgtggaaggctttgttcacgcatggcaaccacgtatagaagaggcactgtaagggaaatcgaggcatgggtgacaccacagcggaaatgaccgag

SEQ ID NO: 129407 - DNA, 560 bp, Zea Mays
cgttggcatgctcgtacctgccacagccgcgaagaggacgtcgtagtgtgtagcgttgcagcgctggatggacattaaacttctacattggtaggagagggcggctggcagaaggcgttgtagacagcttagactatttgtaacgttatcttctaaagttttctctataccgcactatgcagccacgtcatccaaattctatcttctaattttcttccgctcgcgacagttacccctaaattctcactctatgtcatcactacaaccataaaaatttattttcttacctattattaatatattcttgtttttttctcaaccaataattactactgtgcacgtgctctgaggaaagggggtcgtcttgctctgcctaaatctagtgtgtccctatactatcatcttcttctgtggcgcgtagaggaggtctcagactgtccgcagcggtgtttcctaaattttttccccctaaatgttactatgcagccacgtcagcaagattctctcccctatattcactcatcccgcaatcgtcccccctataaattcccctatgtatc

SEQ ID NO: 129408 - DNA, 313 bp, Zea Mays
ctgctgatggtgtcgaagttcctccgagtcatgtttttgatatcattcctactgatctcccttcatcaagcaatgcatcaacccttcctgctttgggtcttcccatgttcctctccgatcttcaggtgaatcaacttttgctttttttactgttcttactggcaaactagtttttttgcttatctttccatgatcataggatgttcttggtggtgtatctgcccaactgaggtcctgcggtgctcctatccccgatcaagtcttgtctctgatgcagtggagccctctactccttcaaaaacaaatagatggc

SEQ ID NO: 129409 - DNA, 449 bp, Zea Mays
ggagtccctagggggctcatcacccgcagaaaaaacagatgccgaagatgtacgatgatgaggaggaggtggagggtggtgatggtaaccagagccggatggccgcgggtcaccaggaatgggtcccggacccgggtagggaggaggaggatagtgaccagagccggacgacctagggtcaccgggagtgggtccctgacccgagtagggaggcggagggtgagaggatgattgacccggatccccatggtagggaggtggggcaaactgctcgcgatcatcaacgtaggcttcttcttcttcttcttcgtctgctgacataaatggcaccccgtaggcctgccggtgccactcattgatctccgggggaggaggatgcataggcacgtcaggcgagcgaggggcaaagggcatacccatagtggaagcttgacgacgaagattgtcgt

SEQ ID NO: 129410 - DNA, 739 bp, Zea Mays
tttaaaataaggaaataccttttgcactcaatgtgcttatgttcatgtattaattttagtattatttttctgctttatttccagtagtaaatagcagaaaattatttgaaatacatgtgaacgttaggttgcgcatttttatgtcgctctaaatatttatattatgttgagtttttgactcacgtcgagcggttaaatattataggggtactcggacacactgatcaagctatgttattatcggttgagttatgacattagctgaatattgactgcgccctcgcaacacgacgcagtatttgtgccgttcgaacttggctgcgtcatgtgattgctatgtctcactctcgcttaataggaccactcctgttgagttggaccggcatcgcggagtcacgtatttttcgcatgccctgtaggcactgttcgtctgtcgttatcaccgagccacaattgcgtctgttgctcacgttgtgtggacttgtcgcgtaccccaattaccgaaccacaactgcgcctgttgcgcttgttatggaggcttgttgcgttgtcgtagcccagatggccacacacgcgttgacgccagatacgatagagcttgtactcacgtgaattgtggtgggtcgttcaagccctaaagtcacattatgcgcaaccttcgtaaacaattttgcttagctctatattttatttgcttgtgttgtgtggcatcatatatttatttatattgccaagtggc

SEQ ID NO: 129411 - DNA, 327 bp, Zea Mays
tatgttataccaataaacatattgtacgatgcttcttctccctaatcttcaaaaaatcatacaacttctaatttcccctcaatagttcctaattgaaaaatgtataacccatcactcatgttctgttcaattccatggacatgtccactaatgctattgtgtaaaacgaaacattttgtgcccatctgcttagttgttggcataaattctcttgaagttactttgcacatgtttctaaactaattgatactgccaaggtgtggaaactaaatatacctcctcctatataaatacatataaggagcttttgtcaatgattgtagattt

SEQ ID NO: 129412 - DNA, 276 bp, Zea Mays
ggaagatgatggggaaacggtggtggtcggccttgagatggtggaaactgatgatggcagtgggtgggtgggtgaagaatggaggatcgctggacatagctgatactaggttaataggattcctactcctacctgggatctccctcaatctatactggtgcactcgtggtggttggccatgaactgggcgagaggaacgacgaacgtcgtgttcccggcatggagaacaaggcgactagggttccgacctccacagggaagccagctaaggtaata

SEQ ID NO: 129413 - DNA, 580 bp, Zea Mays
gacccgataaggtcgccaggtaaaagccatgccctggggataactccggtgactcaccgccgtacttcccccctgctttgcggcttgagcagataagctcgccggtgaaccgccgtcttccggccttgtgccacgtacccgagtgtttctaccgtgtcgccgtgaacctttgcgactctccgtggctcgccggagtatttgccacggcgctagccacccagccactgcgccagtaaccttttcctcctccgaccgccgcgcgtccccattgaaattcccggccaccgccgttgagccctataaattgaagcccccaccagccccgcaaggtcatcgcccacccagccaccgaaaatcgctagcaatcgttcgccagagctcacgaattttagtctttccccaaatcaagttccgccaccgtagaaccgagctcgccgcggccagcgtgaaccaggttagttcataccgactgctccctcgtttgagtgctctcatgtacccgtgatgcccatcgacccactcaattgaactgggttgccttagatcgccgggaacgcttgtggtcgtccgccttaccaac

SEQ ID NO: 129414 - DNA, 312 bp, Zea Mays
ctgcaataagatgtcaaacaatttatcacacttggacacatcaaatgtatatttcatctcttcccttttccctggacttggctttaaaaaagcacacgtcataggcctaccctttggcgcatctatccattcagccacacatacatctgtctcttcatcactgtcattattgggctctaacatgttaaccccctgtttctctttctccctgccattcgtatctctaaaccggctatactgtttattgtccctagcacgactttcatgggtgatagcacgctgcatgacttggtttatgtcagtaaaatcttg

SEQ ID NO: 129415 - DNA, 519 bp, Zea Mays
cctcgatccatgtaaggaccaagtgcttcttttgagttgattctttatcactctgaggtggtggatctcccataactgctcacaccatgagttggtcacccataagatccaccaggtgatcactaagctcctaatcgccaccaagtcatctagatgatgtcgatcaacgagggtaataaacacacactcccacttgacctaaacaatcctaatgagtaaggtagatgcacacttgctactctctatgtactaataaggtccataatcctgtgattatcaaatctcaatcatcccactaggcaatgactccctcttgctctctaatgtgtttctttaactgaacaaatgagcaagagagtctctaatgatgatatggatgggtataaatagccctaagacaaatggctagctatttcccctccacttaggatggggcgccaagcatgtctggtgcaacactactatccccatcagataaatagtaacactataactagtttcaatactaatcattaacag

SEQ ID NO: 129416 - DNA, 285 bp, Zea Mays
gcccaggaagccaaaacaaattgatatcaaccgccacataaaatgagcataatgacagtcaataaataaatgctgattggtttcatccaaaatacaaaagccacatttaccgctcccctgccagttgagtttagctaaattgtctttcgtcagcacaactcctttcaacaagtaccacataaagattttaatcttgagaggcagcttaagtttccaaatttcctaatggtaaaacaccttctcattattaataagactcctatacatagattgaacttaaaattg

SEQ ID NO: 129417 - DNA, 869 bp, Zea Mays
ttcgcttggttcatcggttgttcgtgttgtgagcaggagagctgttcggtttagaccttttgtttaggagggattgttcaagatattaatgctgccttcactgatcttggtcaagaaatctgaagattagaggagttcctactaaattacagcaaaagcagtcaacttgttgcctgtcgaactgttctgttccccagtgacaaaactcatctgtttctgccctgctcatttttttatggaattgccaagtaggtgggcctaagatgtgacctgatgaataaatataaacagctggactgaaccaaccgaggaacgattgcgtggacgctggatcgtagatcagatcaattgcagtgaacacttctctaatcacgtttaatttacttctgaattgaccaatcaaatcacatgagtgtactgctgagggtatattcgcttttagtgtccatattgttttttagagaaaagggttcccctgcttttagtgttcatatagttaggttgtcattgtcactaattttggaccatgtgtataattttaacagttgtgtaaccattatgaattatatacagtaactggttgctaccttttctgaatttgaagtcgttattcatcaagaaattgtgcggttgagtttttcttttttgaattcagaagtaggctgtttctatgtttctgttgtagcagaaactctccctctttccttccttatcctgcttggctgtcaaaatagtctagccatacttcctcaacctacctttgtgtcagttggcaaatgggaatgatgcaacgcagtcattttgctgtagttgcatcttttgttcttattttaccagcatcttagatctgtaaatctatccacttttcc

SEQ ID NO: 129418 - DNA, 559 bp, Zea Mays
tgtggctttgtctttattcaaatcagattcaaccatttaaatggactactaagttccattgccttggagggccttagcattcacacctcgttactgtactgcatttgcataattttgcatgcaaaacattacaaagtcaaagatagactagcaacttccacaaggcgcattagcttgttcctcatgtatccatgttaattgtttggtcttttaggcaaaggaaactttactggccactgaaacaaggtctggctcattcattgagtaggtacacgtgacatgcttattgataggtgtattgatgcaaccttctacacttgcattgatagattggcgatgcttagaccatcactgtaagcacctaactgttccctcagcccgtaaaaactcatcactgtcttaatgattcttactggcatggtataaatagatgttgaagctgtgaattcgaaggatgtgcttctttattgtagcactgaaccaaatctaggaattgagtatgcagtatatctgtttgctaagtgtaaatcgagtgagatggttatagattgtgtcttca

SEQ ID NO: 129419 - DNA, 363 bp, Zea Mays
aggtgtttcgctcggcaggctctctgtgacggcatggatagtccgcgaactggcagaaggagtgggtctttcctgcgtcgagccgaacggtctgtgccatgtggctggacggtccatgtgtgcgcagggatgggggctttcgccacaacatctggatgtgacccccaagagatcctagggtttgccttaaggtcagcagaccacccaaaacgcctccaaacgatgtagagtcaaagatggagatgaagaaggctacgttactgctactcttaaggcaagaaagtaaagaaatcgataaaaggattgattggttcgattgttggtgcgtgccatcgaccgtaccccttcatatatatatatagg

SEQ ID NO: 129420 - DNA, 415 bp, Zea Mays
ccggaacattcgttcgcgccgtctgcgtccaccgtccgaactccgacgtggcgcgccctgcgccgcccgctcggcggcggcaacgctccggccagctcggcctcctcgacgctgttcgccgatggggacgacgacggtgaggtcgacgccggcggttgccgtccgtccatgcgtttgggatcctcagggtgagaatattgtgagaatattgtcattgacgagaggtccttttcgattctcactgttcgatttctttaatttctttctcttttccccctctcagtaaccatacaaaaacaaaatttcttttgtggattcttttaatttatagcacatcaaaacagtgctttatgagtccaaaagccatcaaagcagtggtttttgtggattcttttaatctataggatcattgacg

SEQ ID NO: 129421 - DNA, 307 bp, Zea Mays
gccggatcaacgaaggcgcgcagccttatcatacaaattatggttacatatacacagcgagggcatcacatattacattggctcaaccttcgggatgatacccatctccctgtagttgaacaacattatcctcagttcctcaccctcaaaaagatttcgcagctccccctcacccacactcaccccaatcggcgaggacaacaattctcgcttaccagtcacgttcacatgaagacgcccactctccatctcaccacgttgacgcccaccacttcgcgacaatccactcaccctccgtttcgccacc

SEQ ID NO: 129422 - DNA, 326 bp, Zea Mays
cttctattctaggcaaggggtacttgttcttgatcgtgacctcattcagagctcgataatcgatgcacatttttctagttccatctttcttctccacgaacaggacaggggtagcccaaggcgaggtgcttagccggatgtaacctttctctgacagcgcatcaatctgcttcttaagttcaactaactctggtccagaaactctgtaggctcttttagaaatgggggcggtgccaggaagaagctctatagcaaactcaactttccgctctggtggcaaacctggtaagtcttccgaaaacacactggaaattctgacacaacgt

SEQ ID NO: 129423 - DNA, 549 bp, Zea Mays
gcatttgaaaatttcatcagtacattcatcctggaaagcagttgtactatttatgtattgacatgttagaaacaaattagtggcagaattatattttgggaccatgttacagcacttcttttgacccgaatacatgaagccatgaaagtaatggttgaggggagggggaagcaagtacctgatgatcttttgggtcaatacgggtaacttccttgaaggtttctatagctttttcagtttccccagattttgcatgtatgtgaccaatagcctagaagaaacataaaaatcatttcacaaatacaacgctatgttgcaaatacatgaactgagaataagcgtttgattagatatatgtcttaccttcaaactttcacaattttcagggtgcacctccaaaactttctcaaagctacctaatgaacttttgaagtctccaaattttaactgaatttgaccaagtcctggttcagatcaaattgtgttataaatatcaacttaatatacagtggagtgctccaaatgaccaatcatgctaatctaggctgc

SEQ ID NO: 129424 - DNA, 767 bp, Zea Mays
aaaagacattactatgaattcataatgcccatacctggtgcaaaaagcggtcttctcaatatcctcctcacgaatcctcagttgatgataaccagagttcaaatcaattttggagaacacctgggcacccctcaactgttcaaagagaacctcaatacgggggagtggatatttattcttgatagtcacttgattcaaagtgcgataatccacacatagccgcttgcttttatccttcttctcaacaaacaatactggggaagccatggagacctgctaggcctaattaaacccttagccagcaaatcatccaattgccgcttcaattcaacctgctcctttggggccattcgatacggagccttatgaatgggctgcgtaccaggaatcagcttaatctcaaaagctgcatcgcgctcctgaggaatgcctggaagctctgccgaaaacacgtcagcaaagtcacacaccacccggatgtcctgcacccgcaaggcagccttaccctccaccaccatggagaaaaagattcccgacttcctggaccggcgatccggaagcaattacgccaacaaggataatgtgaacttaggggaacttcccaagaataccacctccctacctgacggcgccagttataacactgtcttccaaaaacaggataaaactgcgcgatactgggataaccaatccatacccaagataacatcaaatgccccaaggaaatcacaaccagattggccgaaaagacctcatcaacaagaatg

SEQ ID NO: 129425 - DNA, 284 bp, Zea Mays
ggcaacccttcgatatcctcgagagccacataaaaccaaaagtcccaccaattgccccacttattcctagcacaaggaacaatctcaacaacttcagccgaggtcttcccagtcctcagcgtgaacgtgcacgatccaaattgagctatcttatcacctatttttctcttctgccagtgaagacagtaattcttcgcgaagacctccacagatggctgcccactgtatgaggagacaacccagacatacttcgcgagcgtcgccacagcatttggtgtcaacta

SEQ ID NO: 129426 - DNA, 469 bp, Zea Mays
acacactaaattacttagaaacagtcaactaaatctgcataccttttggctgacagagcaagtttagaggtgttttactcccacttttatgtagaaccaagtccaaacctctttataaaacatattctctgtactatgggctccaactttgccacatagttcatagtaaaaaaccacaagggttggtcacaatagggctctaaactttgcatcactactgattttagactttaaattctgcatagactaagggtccctttggtttggcttccagggagagattcacgttctggaatcttaaaacgcaaccaaaggggcttcccatgagaagcgattttcgaaaatttacagattcccgcaagtcattttggaatcacgtggtaccccagatttcaactgattcccctccgaaattacccgcactgccactctttacaaacataacgcttcatttctttttgtcctgagc

SEQ ID NO: 129427 - DNA, 348 bp, Zea Mays
caaattccaccacatagaaggacaataaaccatgaataccattttcaaaaattaaaacttgcctagaaactgctacagatcatcaggactagaccgctagacctaggacgaaaggccttaggcatagagggagggataggtggctaattaattaggccccgtgggccagtgcttagatttttaaggatgccctaagagcaccctattgtttggagaggagacgttactttcagcatgcatgcattataaacacgaagaggaattaaaacttgagctaacccacttcctttaaagaaccatccgggctctctttctttttttccttccaccataatctttacctttgat

SEQ ID NO: 129428 - DNA, 907 bp, Zea Mays
cctaaatacaaattgctctccaatataccctttaactctttgctatacagctcgaatctccatggactaggtataggggagcttaaaaacccaatgaaaaacactgaatttcagattcagtttactgaacctattgctgaaatcctagtctgacagcacagctacaagcaatctttctcccagttcttagtaacaacaagccaaccttggttcacaaaacatgttcacaacaccaaactctacaagttttctgtagaagccctaagctaaatactcacagatcaagagttatagtgccccgaagttgggtaaaaacactagaattcagctacagctaactgaacaagaaactgaacacatatgcctgacaaagaatgtttgggcacagtttactccattttttgtgcagcaccaaacaaaattttcttaagaagatttgatcaccattatatggtcttcaactttgctgcagagatataccccagaactccatgtaccagtcacaaagaagctccaaagttgcaccaaaaacactaaaattcagatttagtaagctgcactaagtctgaaatccaattctgtcagctccactttagaccaccttttctccaagttccaagtagctttatgggtatgacctttaaccaaactttcacaccaacatatggtcttcaaacttgctacaggaaattcagtccaaaaccatatagattaatcacaacagagctccaaactaagcactaaaatactgatttcagacttgggctaaatccgaaaactcagaattcaaacagctctactttgagccacttttactccaagctgcatatggttttaggggcatcccacctaatacagtatgttctcctatgttcatgctacaggtttttcatagtaaccataatgt

SEQ ID NO: 129429 - DNA, 341 bp, Zea Mays
aaggccctcccagagcagaaagcagcaatatttctgtctctgttaattagcttgccacgtatgtggcatactggcttgtaatttatcgaggagagagaaaaaatttaaagcaatggtttttaattaagaaatcgtagtatcatctgtccaccttccagttgacagtgtcctatgggctcggctgaccaaccacatttgttaatcccttcattactatcttcttttgtgctttacatagataacttctacatgccaaaacatacttcaaagatacatttttagaggtagtgtcttttcctgtacaaaatttcgcaagaatttaataacaagtgatgtacagt

SEQ ID NO: 129430 - DNA, 597 bp, Zea Mays
caaggtggacattataacaaggttgtagagctacactagggatacaaatttgcttagacaacttgctcctaaaaccatgtgcaactgggtgtaaaactggtccaaaatagggttgtaatacttgtggagtttcagacagtaatctctgaaactgaagattttatattctgaagcaactttggaggcctgttagtggctgatacatatagctatgggttaaagttatgtaccaaagtgaaataccacatgttggtgtataagtttggttaaaggttaggcccctaaagctacttggaacttggagaaaaggtggtccaaaatggagctcacagatttggatttcatacttagtgcaactaactaaacctgaattttaattttttttttgtgcaactttagagcttctttgtgcctgatccatggagttctggggtatgtctctacagcaaagttgaagaccaatggtgagcaaatctccttaagaaagttttggttggtgctgcacaaaaatgaagtaaattgtgcccaaacattctctgccaggcatgtgtgttcagtttttgattcagtttgatgcagctgaatttgagttttcac

SEQ ID NO: 129431 - DNA, 469 bp, Zea Mays
cggggtccgaggcaatttctcgccggtcatcgttaccaacctcggatccgcgccgcgccgcgattggggctcagccatctcggatttcggtaagaaaacccaccattctgtttgccttcttctcaattccatttcgcgtctggtaggtctagcgattgtgtaccatggagcgctgtgggcactccgaccatggtggcccgccgcggcactctctgtcgtcaccaaagttccgtcggaggtaggggataagctctgcgccgttgatctccatagtgacggcctggattagattggagatatcccttcgcgtgtgtgatcctagccgtagatttaggatcggtcggatcaaaacgaatcaggcttcattaaatctccaccgtagataggaaatcggatggctcatggcgctttccggttcgacgcggcactgatttaatctgtagcgtccattgacgatcgtgcggtcgat

SEQ ID NO: 129432 - DNA, 564 bp, Zea Mays
tttggaaaaaaataaattcgttcgcactagtctatttggcttggaatttattattccgtaaccttttgaagttcacatacaagcttatcttaaattcgtggggtgtgatatgaaaattgattacatagattcttctgctatgtttctatgctgtaatttactgcacactcttcatcttagcttcctgtagcagaagtgaacacataagtatctcctccatatgagtatatgaccattgatgaaatacaaataaattttgcatagaactatattagcttaattcatttatgcctatattatgattaaggacagacccagtgctggcggctctcatgtaagtggagccttttttcgataagaagcgctgtattaaattcaagagttagcatcacgccgatacaacatcgaagagttcatgcccgacctctgcataactagggtgcacacaacctgatataagtggagcctagagaaggaataatcaagacaagtcttaaccctgcattttgcatagaggttgcatcaaacctaggaccttagtagaaagacttctcattgtgtcag

SEQ ID NO: 129433 - DNA, 564 bp, Zea Mays
cgaatgcatatgtgtgtgtggatgcgtataggtataggtgtgtatttggtggattgaagtccgtagaaaagaaagttaagtcagaaaggacacatataattattatgtttttagattgtggataagagtatggtgatgcgcgtgaagtgctaatgaatgcctcatcgtaggtagggttaaaatttcgtttgtaattgtgaggtagtcacgatgtgatggcattagtaatgtgatagatggttgtaataagtatcgttggtgtcatttgtgaatttgaataatttacatttgtgtggtaaaacttgaaaggtgaagagtggtgtagtggtgcgaaggataggtttaggagtttcaacgatcagtcgatggtcaacatagttaaaattgattttgcttatgtgatgaagtgatgacatgccttcgtagtcatcttgtcgtctgtttagtgacctggttgaaagtcgtggagaaaagttgattgcttgtgtgttatttgtatagttgtcactctagcgctccatatgaattgcaatgtgaagtagtaggccctctatgtgacgttgg

SEQ ID NO: 129434 - DNA, 527 bp, Zea Mays
tcgtcgccaagccacgtctctgcgtggatcgagttctccgcgtcaccggacctaggtaagacttccccaaatgtcctcattatctccattgaatgtagaaccaagtgtttcagttccctgtcgcactggggtacgtttaattgctcgtcggtgccattagaaccaccatggtccgccctcctcggtggacagtaggttttaccgaccttacacatgaatcaagtcattagaacgatttgccgcattgcgagcttggtgtgtggcatagtaattgagttttggggcactggcggagcagggcggtcgtcgtcggcgatgtctgccaccgcgagctcactgctccgtcacccaggtccggccggagggcgtgagctgccctcgatcgttgatccaatatcctgtgggcaggattggatggcgggggtaccagtttggtgggggaattgtgactcgtgcgatcgggatcggatgggggtgtatgcttgcagcccgtgaccaacggatcacgatcggactgccaacgacgc

SEQ ID NO: 129435 - DNA, 418 bp, Zea Mays
agcaaatctactggtaaaaccctagggcccgaaaaccaaattcttggcctttggcctcaaaagatgacagctcacaacaagtcagcaatagagaaagccaactctgccatacaaaccaaacccctcaaccagcaaggtcataaaactgaagctcatcttacacatcagcaccatgatactccaaccaaacacgcagaattccgtaggaaaagagtcaataataaactaagaaagattgggctattcaaggagatagaaatacacatttttttccccaacaagctatccttaaaagaacttggaataatagaattacatgtctcatgtagtcatgtgccacaacgccggaccaaattgctggaaccttccaagagtattttgctctcaccactccaccactcaagtttcacgggatttc

SEQ ID NO: 129436 - DNA, 709 bp, Zea Mays
cgcgcgtgctgctgttgtgcgactgtgtgtgcgcgacaggtgttcgcgctaacgccgcagctggccgcatcctacggcggtgacatcatcggttgctgcaagtgttgttttggtaattaggttggtaggtttggccgtttggatggtttggagtcgggatttgagattcgtctccgttggagcgtcccatggagctgagtggggaggattccgggagggacgtgttttttttgtttcatggaagtcagttgagtcagcgtggaagttgatatgagtaactctagtgtgtgtatgtaccttgcgcatttgattcacaagttgctatctgggacattttgctggatgtgctactctgggcgcaatatcgttgtggtgtgccaactgcaattatatgctagcctgagatctgctagtaatgtcattaagtgatgtgttcaacgacaaaaccagtgtttgatggctgggttccgttatcatcatgctgtggctgctggttttgcttgtagtagggctctaggatctgatgctcataatgtttcacattccttgttgtagatgtcatacttgttgtattgttgcatgtagctttgttgatgtctcctgcctcctgctacaccattttgaaattacaccatacatgggaaccatacctttgacgttttacttgtagtttgatttgatgaatgctgttatggtcgttagagggccc

SEQ ID NO: 129437 - DNA, 516 bp, Zea Mays
acgagatctcccactgtgaaggatcgataccgtatgaccttatcatgatagcgcctcagagtttgctggtattgcgctgattgaatcactgtattcagtcgctcttcttcgagtatgtcaacgtcttccagcctagtagcttcagcttctgctatgttatcaaagattaaccttggtgccccgaacttgagatcggcaggtagcactgcctccgaaccataaaccataaagaagggggtatttctatgcagagctcggctgggttgagttctcaggctccaaactacatatggcaactctctgatccattttcctgcgaacttttcattcttgtcgaagactttctttctaagtgcttctaatatcatcccgttggctctttctacttgcccgttggctcttggatgtgccaccgaggcatatttgatctgaatgctcttttgctcgcagaaatcgaagaattctgaacaggtgaagttggatcctaggtcagttatgatgcaatacggtatcccg

SEQ ID NO: 129438 - DNA, 366 bp, Zea Mays
cacaacaacaactcccaaggttctcagtttcgctctacaagtcagggcagaaacaatcaacaacatatgcaatgcttaggacaacaggtctagaggaacaatcagcagagaagaagttttcaaataggttaaaggtctggtgggtatccgcaggatcgtcaaggaagcaacatgaaaacaccggccagaaacaacaatcaaattaccccagtttagcccaacgaatgcttcaagtgcagagaaattggtcattataccaacaactgtccaaagcgcaatccacagacgccctagaagtacaacaatcaaaggtttgatcagttaacacctacttgtggtaatgtgtagaataaaactcagcagaac

SEQ ID NO: 129439 - DNA, 297 bp, Zea Mays
tcggcctaaagatattgggggtcttggtatttccaatcttcaatatttaaattgggccttgcttgtaagatggttgtgattgcaaaaaactgactcttcgaaaccttgggctgctcttccaatgcagtcccactctatggtgcagtccatattctcatttgctatgacctctaatgtgggagatggcagaactattttttgacaagatagacggctgttgggtcagagactggtggacttggcccctcgctcgatcgcccttgtcccaaaaaggattgctaaaaggacggttgcaga

SEQ ID NO: 129440 - DNA, 361 bp, Zea Mays
gtatgcttgaatgtaagtgtggaaataaggggtatagagttcaccgctaatctgatagtgacgggtactcagagaatagatattatcctagggataaattggctagataagtaccaagtagttatcagctgtgataagaggatggtgaagttggtgtccccactaggagaagaagtggtgactgagctagtctcacccgaaccaaagaaaggaggttgtcaccagatggctatttatagtaatcaggctgatctactcgaggctatcaaggttgtgtcagaatttccagatgtgttccctaaagatctaccaggtatgccacctgagtggaaagttgagtttgccatagagattactcctg

SEQ ID NO: 129441 - DNA, 919 bp, Zea Mays
gacttggtcaccctagcttcgacgtgttgtcccagttgtgtcgtagttccataatctcgtgtactaggggtactccagagcatctatgacatgcctatcagctaggtcgtcatgttcgacttcctttcccatgttcctcctctcaggttacgcgtattttttaatctcatacaccatcacttatggacatcactagttcttagtgtccagttataagtattacttggtggcagttgatttttctcacaatttgtggacttaactcttgcgtttgaagtctgatacttttaccactcttttgcacattttccttgggtttccattcaattcattcgcaccattacgatcgcccattgtgataaaggtcgtgagtttgataactcctttcgagctttcttgctttctcatggcgtgtagctacggatgtcatgcccatacacctctccctagaacagtaaggttaaatgcattattcgcactactgccaacataatatgctctttgttgtttcaggcctcagtccatgctcgctattgggttaagaatattcataccaccacctactagctcaaactcctcccatgacgatctgtactcccatgccctactttgctctctttggcatcaccccatcctgtgaccatcttcatgtctttgggtgtatgtgctaccctaatctctctgctactacttctcataagcttgcccctcgacccttctattgtgtcttctcgggtactcttctgatcacaaggagtaccgatgtcttgatctcaatacccaccgcatgttgatctcccgccatgtcattttcgatgagatagacttccccttctcatccccctccaactccaccttcgagttgagccagattgaccttgtggctccctcaggacaaccacctcagtttttccacctg

SEQ ID NO: 129442 - DNA, 520 bp, Zea Mays
gtcggcctgggatggctggagggcagcaccaacttgtggggggcgcgagtttggagatgcgccgtgggaggaagaccgactacctcgacatcccactcaaggacaacatcaaaggatggcgcctagaatagtttatcatggagaatcacgggaattccctccccccacggtcaggaaggcagccagatgttcgcactccgagctggaccgaatcccccacagacctggaggtggctgaggcaggggctctactcgttgaggttggattgttgaaagagaggggtctgactgcagaagctgtggttgccgatttcattttcaagaacattcagtctctaaaggacagagcgtacccggcttatctgtatcgaggcctcgctgattcgacccgggttaccaacagaagaattcctgctgtggatttggtcagccggctcgagatgatactcagaggcaaggtgtcgaacatcggggctcctgttgcatactcagcctggaatctgcctcgttccaaggtttt

SEQ ID NO: 129443 - DNA, 432 bp, Zea Mays
ttggcattgctgtctctgaatccgcgcccaatgcgaagcgggacacgcttgctcggagtcggagtagccgccgccgcggtcgtgtgcgcatggctcgcctcctgctcgcgcgcgttccccttccccatccccttgctcgagccctacacgagccagaaggacggtgagcggagccttcccccattcacgatcgccgcctccgtctctgctgctgatccgacctgtctccgctctgcccagtatacgcatatttcagacactgcattaccagagaagctaagttctgtaaccgcacgatgcagtcgatgccatcaacggcctgtatgcggccctgggctcgccggacctcgccggcggctggacgggatcgggaggagacccctgccgggaggcgtggcagggggtgcagtgcgacggccccaacgtgaccgc

SEQ ID NO: 129444 - DNA, 520 bp, Zea Mays
accgttgtttcccagacatgcattcagctgagctgattccttcttccaatcttctaaaaagttggtcccctttatcccgaaaggttttcggttgagggcgtctgctaccacgttggccttcccggggtggtaatggatttcgatgtcataatccttgatcaattcaagccatcttctttgatggaggttgaggtctggcttagtgaagatgtacctcagaatcttgtgatcagtgaagatgtggcatttgttcccaatcagatagtgcctccatatttttagggcgtgcactatggatgccaactccaagtcgtgggtggggtagttctgctcgtgtggcttgagtaagcgggatgcataggcaataactttctcattttgcatcaagacacaccctaagccttgccttgaagcatcatagaagataacgaaatcctggagtatatctggtagtgtcaaaacgggcgctgttgtaagcttttccttgatgatctggaaactttcctcacattttggagtc

SEQ ID NO: 129445 - DNA, 523 bp, Zea Mays
atccatgatagctccatttctgtcgtcttcaacactatcttcaatttcaccgcagtggaggtcttccactttggatccctctcctacttcgtggaccaaaagggtgccctgcatcgcatagctaatgtggggaaagatgcccttaggtatcacatcatcacctcaacggatccagacagctccagtgataacagaggctaaaccatggttggtcgcgactcgtcccacgctggcatgtcctaagctcaagggcccggacttacctatatgtcacgtcagatcaccgctgtgtcggttgtacgcatggccgtatccactcctccacctcggccgactgctatagcagtcccaatgcgtcggacccccttgtccacctcgccgacaatctagacccgaatcagtcaaaagaagaaagaggctgaggcccttgctacttcctgggccaacaaagcgtggtcgacaaccgccgtgatcactcgtcctgtgagcgtggcaattacagtcgtggtgccaaacctcccgc

SEQ ID NO: 129446 - DNA, 403 bp, Zea Mays
gaaagagtagcggccgaagaggtatccatggatttcaaccgcaggatcaccatccgacggtaaccagatgatcaattcacttaatgaaccagtacctaccctagccatccgatctaggatcaacgactcgaaaccttccgcgccaaattctcttccctggccctcgatctctcgatcaacgcttcagattctaagtgctgaaagggtatcctcacgttctaatctgagccgtttgctatggaatcaacggccctcgacccgtcatctacctcacgcctacagccgagctccccacggcggcgctccatccaagcacggccagtaggggccccggtaccctaatccaacccaagttcggtacatacactggtgaggacaaggagcacggcatggaagcattacc

SEQ ID NO: 129447 - DNA, 383 bp, Zea Mays
ctggtataagtcctgtgacttgatatggtccataaccctaaccattgacaaaatgcaatcccaagtgaaacagtgctgttaatgtgagaagggcatgaatttgcaacttcgtttagatcacaatattgctagctttgatggcactcggtatgcgtgcacaagttctgaaatgcccttgcactacaatcattaagtcaacttgaccattaatgacgcattacctgaaccaaatcaagaagttcagttcaaaagaatgttaactttttagtctgcagttatatagtagtaatggtataagcagtatccccactggtgcttctgaaggactggggcaggctacttctgacactgcattacaaatatgcctcttggtttttttatga

SEQ ID NO: 129448 - DNA, 431 bp, Zea Mays
aaggcatagagatcgccctatgacgagtaagcatgagcatgttgcactgtcttaagtccttgccgacttaagctgattgctccattagtagggtatagtggtcaccctaagtcgagtaagcgcgagcatgttgcaccgttttaagtcattgccgacttaagctgattgctccgttagtagggtatagtggtcaccctaagtcgagtaagcgcgagcatgttgcaccgtcttaagtcattgccgacttaagccgattgctccattagtagggtatagtggtcaccctaaatcgagcaagcgcgagcatgttgcaccctaaatcttttattgatgacgtactttccaattacagaatacaacattgctccgatagttcttgctaagggtaaaacttcctgaggtgctctatattccatgaattccctacttcc

SEQ ID NO: 129449 - DNA, 325 bp, Zea Mays
gagaaattatgaattgatggggatctagattgttggggagaaattctagacatttggagctcctatcgacggggagtctcttttagagtttggggaggatattgaaagggggatttttagcttttgctagttatgttgagtcatttgcctctttctagaggaactagttttgatttcagcacacttgctgattttgtgcttcaatctagttttgtcatctggctagtggtgttgagcgcttcttttgcctcttcttgaggactagcttatatttcttggtcgtgttgagccattgcccatttctttggggaccaagctttgctcg

SEQ ID NO: 129450 - DNA, 926 bp, Zea Mays
aagaaaatgcccatattttgtgaatctgtccacgactaccatgatagtgtcataaccttcagactttggcagcccttcgataaaatccattgtgacatctgcccaaattccatgtggaataggaagaggctgtaacagtcctgttggatgagtcctttctggttttgcatgttgacaggtcaggcactggtgcacaaactgagttacatccaccttaagtcccttccaccagaaaagtttcttgaccctctgataagttgcatgtatgccagaaagccccccgtggcactgtaatgtaaagctgctatcagtttggttctaagggcagagttggaccctatccagatttggtcacctttgttgacaataccttgctgcaaactaaacccttattaattgggactatgcaccaacagctgagtaattaactcttgagcttcaacatctgtcacataggaattcaaaatctcttgaatccacactggttgtacttcagaaagaacaactagctccatcatagcccccaccctggatagagcatcagctactcgattctctaccccttttttgtaaacgatctgaaactgaaggcccattaatcttgccatagctttcctttgtagttcggactgtagttgctgctcccctaaaaatgtaagtgacttatgatcagtcttgataacaaaaggactcctttgcagatatggcctccatttctccacatcaaggattaaggctaaaaactctttatcatagatagacaggtgtctattcctctctcctaaagccttgctgatataagctatgggttttccttgttgcatgagcactgcccccatttcgttgtcacatgcatctgtctctaccacaaaaggaagatcaaatcgtggtagggccaagacaggagtagtcgtcatagctttttt

SEQ ID NO: 129451 - DNA, 364 bp, Zea Mays
gccaccttggtgagacgatcgattattacccatatagaatcatttcctttctgtgttcggggcagtccggtcacgaaatccatgcctatttcttcccacttccattcgggtactgagaggggttgaagtaggcctgcaggcttctgatgttcggcctttgttcgctgacaggtgtcacaccgggccacatactgtgctatttccttcttcatccctttccaccagtatctggctttgaggtccaggtacatcttggtggtccctgggtggatggagtaagctgagttgtgggcttcattgagcagggcttcccgtgcttctcccactggtacacacaggcggttcttgaaccagaggactcctt

SEQ ID NO: 129452 - DNA, 289 bp, Zea Mays
aggggttgtctcgcctcttggacttcgggtcctggttccgcccttaacccgggtccctgacgggtgggactcctcctacctttgcctgcttcggtgaattcgccagggcggtcttattaaaaatatacgaacaggcgcccgaaacgtccttggagctctcgctgggtgtcacttcaccaaaaccccaaaccgctcctttgctcttggctctccggcgaccttctaagaatctggcaatggcgtaccggcgagtggacccggagcctcataccaccaggcttcagcgccg

SEQ ID NO: 129453 - DNA, 695 bp, Zea Mays
caatatccaccacaccacgtcttattttgttgttatagtagaagatatgagagttattaaaagtaaggtatggctgatgccacactaagccataatggctcctccgccgctgctgttcggcaaaccatcacattctgtgacgcaggacgtcgagcaactcctgacttggggcactccggtcccatgtgacaaaatcccccattcccattcctatcgtgcaagccatcacacactccggacgttgggcctacattgcagactacgggcgcccacgtgacagccacccttagttttgcacacaccggacccatgtctgctcgcgcaaaaagttgcctcaatttgacactggcaggagcatttgaccacgattgctttctctgaagaaggaaggcttataagccggtaaaagctatgttggctggccggtatggtcataaaaatgtgtaagccgtgacgacgacataggtcgcttggctttagggtcagtctcccttgctttctctgcccagcgagccctcgccctctagctcttcctgctagcgtcgtctccgtctcgtgctctcctgatcatcgtcgatctcagccatctcaggagcacccgctcactcccagacgcccgcgcaaaggaatccccacgatctccatccaaactgcccactccctccacgatctccccctctagctcatgatccctc

SEQ ID NO: 129454 - DNA, 1317 bp, Zea Mays
ccggctgcaaagtaaagcatgcatgcgcatgtgagtctaatgttttgcttccctcatcgttggatctcttttgctaatataatcattagtaccaatttcgatgatattcttcgttatgtggcctggtggttcacagcaacattattcaaccgtgcgacttttttttttcttcttgtctgacatttttttacccgtttgtctatgactaacttattattagggtaataagttagtagagcgtgttactacccctttcttctttacgaaagatcagtactagcatgttttacttgttctgatggtaagcatgagaggtatccatggatcaatacatatgcatatgcttgatcttttaatatatatcttgttcaagaagaagtggataacgagctgcatgcttcaagtgtgtactcttagagccgcacatccgcaatttcaagcttaaattggtttcatcttgtctaggaatatctttttttttctgaaaaacgtacgaaaaaagtactcgcatatacactagcgctaatcatgctaaaagtggctacatgtttaccaataagctagggcggggatgccatttttttgtttggggattattcatttagcgtgatctttggattctattgtacaccctaacaccataagcaattcatagaaatgcatatggtgttatagagagagagagaaacattacagctggttcaccagctagctagcataccgtacgtacagtaccacggtaccatacatgcaattatgctttgggctataagtggtaagcctttctttcaaatgctttcaactttggtgcgtgaagatggaagcatcattgcagctgcagacacgccaaagtggttacagcatgcatccagagagagggaaagctactagaaacaacagactggtaggagtaattcggagtgtctattatttggtgtggggtctggtgtgggctatactgcttgctgtatgtatgtgcgaagcagcagaccttatcacctctgcaacatttgatcttctgtcgcattgcatgatgatgatctaagacacagcatatcaaaatatgcgccactcgattgacaatgttagccagacttttgcctatttgttatgtttagactacttttgctattttggtatcacactgtcatgtttttttttcactatgggaagtgcactaagcttcagttacactttggtatctattcttaagaacgttttttaatgtattcaaaatgtaaatttcatttaaaaagtaccggattcacaactgatattgtgctacgaggactaatgacctcgttcttcaggcccggt

SEQ ID NO: 129455 - DNA, 702 bp, Zea Mays
ttaaaacattgctggggtttgctggagcaaagcacgcaaactactggcagctttagtgcagtcaactgtagtggtgtgaacatcgaggtgtatttagtatgttttattttttcttgcaagagcatattaggttaaatatctaagtagtgttgtcttgtttctcttttcgtctgatctgaaatttgtgctgcataccttagtgtttgttcttccgcggttccacgtaaacaccatacactgtccttgagttgtatttcccgttgttgagaacccacatgttgtacagaagatctatctatgggacttgtactatttaaacctagggatcgcagataaattacagtaggaataacaaaacacgtcccctttgcaaagcttcgactgtgatattgggtgcattaacaccatgtatgactggaagttcttcaactgatgctgacgaggtagttctcgtcatggaagggacatgactcttctgttaacaccaaatgaattgctgaagcctttgcttttgttgtgtgcaacttctgcagatctgaggtagtgtgatactagttagtagttactgccttttttgtgctctctttgttgcatgggtgttgtttcttcatttgaattcagaagttgtagatgtcctaaagtaagaataggaagaaaaaaaacttgcagctgcgtatagttatttttctgggtggctgggta

SEQ ID NO: 129456 - DNA, 618 bp, Zea Mays
tgcccattcacgcttcaagatacaactcactattgatgatggtgctatatgtaccttcacgaaacaaagtgggacatcaaagttgctatagaaagcgtcgctcattatttgggacgaggcatcaatggctaagagacaatcaattgaagcgttggacaacaacatgcgtgatatcatgggacaccctagtctgcccttcggtgggaagactattgtgtttgggggagatttcagacaagtactccctattgtatgtaaggggtcaagggctcagatagttgttgcctctctaaggagttcttacctatgggaatcaatgtgccacctaaagcttgttcgcaacatgatagcaaagagcgacccatggtttgcagaatattttgttatgtgtcggtggtggaactgaggaagtgaacaacgatggtgatgttcgtcttccagataaggtatgtgtgccatataccggtgatgactgcgaccttgatagattgatagatgacatttaccccagtctaaacgaaaacatgtctaatacaagctacatcacttcaagagcaatattgactactcggaacgactgggtggatatgataaatatgaggatgatcgatcgtttcc

SEQ ID NO: 129457 - DNA, 288 bp, Zea Mays
gtggagcgggaggaggagcagtggaagcatgagtggtggaggtggtaggtatggctgaagtggtggatggctcaggagtgactagagcgggcgaagtgggaggtggagtggtagcagtggcgggtgtagagggagcggaggagcgaggccgagaggcgagtcgacgaactctgtaggcaatctgatcggatgaaatctgcagctgaccacctctctctgccttctcagctgctctatccaaacgccgtttcttgcagccttcctgctgctccaagtagacggtcttcc

SEQ ID NO: 129458 - DNA, 297 bp, Zea Mays
catattcacgtgtttctcgtatggattggactttggagcatcggggcgcctggtatggctcaccggcgaggggcaccactgggcggagccgcgccgctgcgtttagccgtcggtaggtagaagacgcgggcgcgtccgtcgatctggaagtggacggtactggttaggacggggaggtcgctgggcgctgcgcctttgatcaaaccgcggacgtctcggatcgggtcaggcgtacctgttcggctaatggcatcatgaccgttggatcggttccagacgtctaggattagatctggg

SEQ ID NO: 129459 - DNA, 520 bp, Zea Mays
cttcggcattccccaaccactagaggtcgaaaatgtcctgtttgccaagtattctgtaccaagtgtctagtgctgatgtgctcagccacgaccctaaactccacctcgaccagttggcaaggagaccccagctgcatgttgcacaagggtcgggtcataccgaagttcagtctcaagggactcattaccatgctcatgagcttctcccttttcttctcatcggccttcacataaaaccactcgtctgtccacccggtcagccatttagtgcggtagccaatcgcgggggcattggtatcctttcggtatgcaaagttatagcacccgcaattcttgtgcagaccattggcttttgccttcatctgataatgaagctcgtgcactcgacagaacccttcgacattgacactctttccttggcttcgaagagcacaaatatacgcgttgagcctaacaatggcattgggggtcagctggtgtatgtagatttcgaacttcttcaaaacctcaccgatcatct

SEQ ID NO: 129460 - DNA, 1244 bp, Zea Mays
tttcacgtatatgtttggattcatatcctaatacccagtgatcatctggtgcagctattggaattctagattagccacagagaggcagaggctagttaatatctttagaaacttggacgttgtttgtaagttacaaccttgcattttgctttgtactttaatattcttttgcatgttgaatcaggatcagtcatctactttgctggatagtaatgcatgtgtatagttaggacaatcatcaagctctattccttctagcatcatctttgctgaaagttggataggacaatgccttgctgtttgaaattgaaatattgtgtttcatgtgcttttgattcattaatttttgctttaatcagtccgatatcttatccatacaaagcaagaggttaccatactgtgcctatagcgctgctgttgtcctagctttcccactctgttgacatgcatatttgttttgtcataagcatcttatgcaaacagcctatacaaggaagaacatccactaattttcagatgggctcatgctaatcacatacatcaatatcggtttctgtttacagaacatggtttcatatgttttggaattttaggccctggtagttattaaatgcatgagtaacttatcagcaaatcaaggatcagtatgatagctggaacatataaatttactgctgtcttttgaaatttatttgaaattggacttctgcagtagcagttcctccacactcttatcttaattcaacctgatgcaggtgatatgttctcaggggttggtcctctagcgatttcagctgcaaaaaaggtcaaatatgtctatgcaaatgacataaaccctaatgcagtgggataccttgagagaaacatggttcttaacaaacttgaaaagaaaatagaggtattgactgagacatctggaagaaacatgcttttgacatgtaacatggagttattttgtttgtatcttgtttttatgtttcgttcttcataaaatgtgttgggtgattaaaaatagttttcattaaccaaccatatttattatatttggtgaattttgttaatttttttgttggataggtttttaacatggatgctagaaggtttgttagtgcaatatattcaagcaagcacgtgcaaccaatcacacgttattatatttggtgaattttgttaatttttttgttggataggtttttaacatggatgctagaaggtttgttagtgcaatatattcaagcaagcac

SEQ ID NO: 129461 - DNA, 408 bp, Zea Mays
gtgtcttaatgcaaaatgagaaagttattgcttatgcatcccgcttactcaagccgcatgagcagaattaccccacccacgacttggagttggcagccatagtgcacaccctaaaaatatggaggcactatctgattgggaacaaatgccacatcttcactgatcacaagagtctgaagtatatcttcactcagccagacctcaacctccgtcaaagaagatggcttgaactgatcaaagattatgacctcgagatccattaccaccccgggaaggccaacgtggtagcagacgccctcagccgaaaacctttcgggataaaggggaccaactttttggaagattggaagaaggaatcacctcagctaaatgcatgtctaggagacaacggtagcctggaagtcaagc

SEQ ID NO: 129462 - DNA, 840 bp, Zea Mays
ctctagcaattatttaatcattaaaaatcattttctaaatccatttatttgatttcttaacttcctggactgggcgcactaatacagagaagctcagggggctcggggcaaaatttgccagacacagtgaacagccgagcgaggaccgcgggttgatttcactaaagtccgagggctctttaagaaaactgacccgcgaaggggtatccagggtttcaggccgtccgatcactgatcaagggcccagattaaatctttcccccgcccgaaccggtacgcatttataaccgtccgatcgacgaccgacgatccagatttaaataaacaacacataagcgcacccctccgattcggatcggacggtccctgtggaacccgaacgaaccggtacgcgaaatctaatcagagccgcatacgctagatccaacggccacaggcgttcttctacccccgacacaggagcacgaccgcgcaggaactccccccacggcggcgcgctcgccggagtttgtcatcgccgcgcacaagcacccagacgccaattcctcagagctaaacgtagagcgaaatgaggcgatctcgatcgagggatttttaccgtatttcacagtgtggagagctttgcccgcggtgagcggcggatgccgagttccggtgagaaattccggtctgtgcggtcgccaatcccgccagtaggctccacggtcggctccccgacgccacgcgcaatcccccccgacccagctaaagcactcggtcaacggcgaggccaagaaccgcggcggcggaattcttcttctctcactcaaatccacgctcctcggtgcttttcgctcgatg

SEQ ID NO: 129463 - DNA, 780 bp, Zea Mays
gtcatattgatgtgtggtgttttacttgagtggacataaacacaatctaggtatcccttgaatagaggggattattggaaaccaggtatcacaaaaggtcattagctagcccaggtatcacaaaaggtcattagctagcccagtggaaaaaggtgccttacaaccttaacatatgtttggatagttctctctctcaatttggctaaattttccatagtctttattttattttgagaaatgatgtggcaaattgatgtgtggtgttttacttgagtggacataaacaccatctaggtatgccttaaatagagggtagtataggaaacctggtatcacaaaaggtcattagctagcccaataacgtcttcatccactagttaaactctaataccctctagtgtgaatacaacgcccacaatatcatagaaacgtcatttgaggtttaaaaggtgatctattgttttgaattctttatattccaactttttatcaactatatggtggaaaaaagttgccttacaaccttaacctatgtttggacagttctctcgtgcaatttggctaaatttcccatggtctttattttattttgagaaacgatgtggcaaattgatgtgtggtgcatccactagttgtactctaataccctctagtgtgaatacaatgcccacaatatcatagaaacgtcatttgaggtttaaaaggtgatctattgttttgaattctttatattccaactttttagcaactgtatggtggaaaaaagttgtcttacaaact

SEQ ID NO: 129464 - DNA, 303 bp, Zea Mays
attagaggttgcgtttgcgattgggtagagggggctgtccagaattttaggtggtggatgaacagcagtagttctagcagtttctgtgtttttttcgtgagaagttaagggaaacaagtttggggatcatgtagaactttgtcttacctttccaacgagtatttatgcgctcaatttggagttataaattgaaagttatcaccgtttgaatccgggtatatggctgtccaaaaaacagattttcagggggatgaacagcagcagtattagcagtttctggggatttttcgagagtaattaggg

SEQ ID NO: 129465 - DNA, 277 bp, Zea Mays
tagagatctatcctaaaaccgtttagctcttacgcggcagttccatatccattcaaggataatttggttgaaacggactatattttacccttgagataataggcacacaagtcagtgtgtcttgctcttttattcctctttccgcaggccagagtgtctgtttatttgctcctccggtgacgatcgatcgataatgcccccctcatctgacactgatcatggtgcttgttcatttgctgctgtgtgcaacctctccaggcatttctcgagcagggag

SEQ ID NO: 129466 - DNA, 336 bp, Zea Mays
gtcttatgttatatgtttccttctctagttgattgtgatataggagtttccatagccattgatgcataggtcctctgttaaaccggtgtttggaatgcttttgtgtgattaatagaagaactaatgaaaagtcgtagcaaattaaataaatgctcatacttgtgatgtcatgtttgtgttagttaagtatagtaagtgtcattatctttccagtggtagtgtttacgtgtgcccaatgacacatgaataactagcgtttgcgtatagttgttgcagtgtcttactaattagtgtttagttcactaccgtgtatttatatatcttgtgatatttttc

SEQ ID NO: 129467 - DNA, 736 bp, Zea Mays
acagaacagagtgactagtgattcgttggcttcacaatgaagggacgaagagctgtgctcggttgatttggatgaagggggaagagagcgcggtgaatttataggcccagtgagccaccgcgaaggccatggtgataaccatcaccggaccttgctggcgaccaacgacgacatcggcgctggccttttctaagagtttgccacgttccgccgcgacagtaatgccgtcagatcggtgatggcgtggatggacagagaagagcggcgacggtgaccaagcttggtcggaaggatcagtggccgtgtggcggtcggaataattatcttccaccgcgacgatcttacccacttcaagaatatcatcgcgaggagatgctcgccgaacgctcaacccgaccacgacacaaatcacggcgcagatcggtaccggcggcgaggtgtgcggtactagagatttttcttgctactgtaccattgggacttctgcttaaagcgcctgacagagcataatcaaggcataatttctccataatctatgtgacaacctcataatgcatctgcatcaaagttatagatctataatccatcttcatttttgctatagcatccctagtcgaattcctactgaatccaacccaaacttgaacttcaaacgtgaccaatgtcactggtggtcatacttttctgaaattggtgttcagaactgtccaattgacttctgacagcacgccttctc

SEQ ID NO: 129468 - DNA, 274 bp, Zea Mays
gcggtgtgggcccttccttacagccacccctcgttgatatctcctggatcacggggccgggttgtcatctccttcgccgcgccgttgaaacgaccgccgatttcgtcgggatcggctgcaatccttgcgcggagtccgggcgtctcgttcattcgctaaaccaaccatgggatgactataaaaccatgcggcaaaccctgcccttcgtctcctccccacggtacccagctaactgggagaccgcaggagccgcgccgccactgctagccttgcc

SEQ ID NO: 129469 - DNA, 336 bp, Zea Mays
ccctgaggtactgtgaagaccgactggaacttgttgagcaaagactgaagctcctctggtagagtggacaatattccttgctctttttctgataaatcaatcaattggcaaaactctatgactgaacagtggtctgttgctgtctgcaggccaaacaatttgactgtagacccttggtatgggatggccagccacttttctgcccagtgaaccatcataggactgtaaagttccaaccaatccatgccaactattaagtcataagtttggagaggcaaaatacgtaagttggactggaactcacacgctcccaatgaccaaacagcttggggtatg

SEQ ID NO: 129470 - DNA, 569 bp, Zea Mays
catgaaggtgtgagccccgccacacaagtcgtccaggaagacaagcaacaaaggatgatcggtcgacaacacaacgtccagggatccggacgacagtgatcaccagaaggatgatcggtcggcaacgtccagggatccggacgacagtgagcaccggctggaaggcgacgacaacgtaccacgacatcggcggccaagacgtggcaacgttcgcgtaaccggacccgagtgggccgtgtaattccctatgttgggctggaccgtcggttagtatatatcccacgacattggcggccaagacgtggcaacgttcgcgtaaccggacccgagtgggccgtgtaattccctatgttgggctggaccgtcggttagtatatatctcgaccgggagcgtgtatgaggcatcaaacatgtatgaggcatcaaacatgaccgacctcgtgtatgaggcatcaaacatgaccgacctcgtgtatgaggcatcaaacaacaaacaccagaagcaaacacttgattgtcctcgtccccgatctttttcttccccactccttctactccctgcgttctcc

SEQ ID NO: 129471 - DNA, 1860 bp, Zea Mays
ggcgctaccagtgtcgggacagattcaatgttccatagggaaattttgctgtagtcctgacgctcagtttctagaaagcattgatgcatttccttcccttcttgtccttattttagattgctgtttactttaagacagagccttattttagctagctcctgccactaataataatcctttctacattcacattgctctgttcctgtcccaataagtccctgccgctctccatcactttcttcggtccctccctcccgtctccttcctctcttcctgcatatatcctcgcacgtcgcccttgctgccatggggccgtccaatttctctgagaatcctaatgtcctgagagggattgcaggatcctcttggaccgccccccgcttcccgcacacgccatccaacagcataacaaacacacaggattgctccgcctctcggaatcagatagttcttggccgcctttgttgtgatcgtggccacaaggccccaagggatgcaggtcgcgtcgattgaatgagaagtaggtgagggagatagagcatggttgaggatggcgccgatcatacttcaccgtgcgttgtccttctccatcccgttgcttcatcgccgtgatgtgtcgtcgcccttacaggtcttgatctgatcatcttctacaaccgatgaatccatggatatggagacctggattgtaatgcaaaggaatggatggattggccaattattgatctgaactaaatttttacaggcctcggatgtgtcgaacagacctgaaggcctggcattattgacgagaattgctgaggacactgactgctgcgattctggacctccattgccagaccactcgccgttggagaaaagcctcatcagcaagatcctccgtctgagaggtgttttggatctgccatgtcgaagttcatgcgacgcgttggatcaggttcatgccaaaacttgacaccatttcccgttttgacagacatcgtgatgggcgtatacaaattgttgttctccacgcttaatgcagttgcttctggataccctgggggttctgaaggttgcatatcccaaatgcttatcaggtgtatcaggaaaccatacatcttctgtacgggaggtctgtcgtctgaattgaacccctttatctgtaccctacttgcagaacatctcctggacacatgttcataaaaagaatgctatccctttttcaccatgctgtgttaaataagcctgatccaacatctacttctgaaaaacaaacagggacttgttcacctccatcaggtcctcgtgttggttcaggattgctactcgaaaatcaagcagctgcctaactctggctctgagaagcaaacaatcatggagagcgagagcttagaccatgtaggtatgcagtttgacttgcccatgttgatactttgctgtcaatacaatggtcagaaagcctatgtcatcgtactgaactttcgccatcgagttcattactcagctgctcaaaccggaattgtaggtaagcgtgtcattgagatgcttgatcaggtgactccagtggtgaaagaaatgttcagttccatggaaagctccagttctgcacaggcggcggcggcagcagcagcttggccggaggatctcccagaaagaagaaccctccctcctgttctctgtcgcactacatcccatcatccatcagacggtgacgaggttgcgatgcacacaggacgttgcaaagttgaggcaccggcgcctgggcacgagacagatgagggcgtttgcaccagggaggaggatggccaaaccagcagccgtgaaccgctgtcagctcctattcctaccgctgagtttttaccgctgcagccgacgctg

SEQ ID NO: 129472 - DNA, 380 bp, Zea Mays
taaaagaattcttttagcagtcagcatgactacagcgtccagcctggcttcatagcccgcaatgcctgcatggtccgtgatctttttgggttagcacgtataggtaatcatctcgaaagatgtagacctcatagtgataggcatttcaaatgcggcctaaagcacggtctctgggctactaaactctataaagaatttagcgcagccagtgcttaggactccatcaccctatgcttttcccaaaaaaatgcaagattattttgcataaggaccattagtttcgacttaattatgtgctatgttttccatgcaaacataagagaatgcaaaaacaaaagcaagtcgaaaaattgtgaattataaatgtaaataaaatataa

SEQ ID NO: 129473 - DNA, 463 bp, Zea Mays
gtggcgtcaagacagactagctctgtcgtcgttaaaaaaatgtggtcaaatggatagatgcgaggactagatcgaggagcaccgtagttgaggtcggacgcaggtgtcgagaagggggtggcgtcgagaagggggtgggacacatatcactgaggtctagtacaataggccataagtgtgacgtaggccaaggggcgtgtgggtcattaatgtgtcgcagtccgacgtccgtaggtcatgagtgatatgcgacccgagggggctgtaggtcatgagtgggaagcagacatgcgcccagtgcggctcggtaacagtcgtggttaatgcacccaaccatttatggtgggtcagttcgggaccgggtgcgtgatccacgcgagtggttcccttcgacacacccgtcctctcttgtcaggctctgccatgcctggcccgggttcggtgccgcatgattcgatcggga

SEQ ID NO: 129474 - DNA, 386 bp, Zea Mays
ctactaactattaagaaggtaacgtagaccaagagcgtgcccccgctcaccttatcacgcggagcatgcacctgctctcccactcacgctgcatgtaagcatgcaactatgcaagctacgggtaccccctcatccactcatgctgcatgcaagccgtcgaagataggccccgtggctccctccgctcacgctgcatgtgttcttgtcgaggcaaatttttgcatgtgttcttaatttaaataaaaatttaaagaagctgagtgtagctcagttggtcgacagtatgcatgtacgcccagacccgacccctcaagtccaagtcattgtcgaggcaaatttttggatgtgttcttaattaaaaacccttctatgttagtcaagttttt

SEQ ID NO: 129475 - DNA, 830 bp, Zea Mays
cttcaggtctggtttctactggccaacaacaaagagtgatgcaaccgagctagtccagaggtgtgaagcttgccaatacttatcaaagcagcagcatttaccagcacagcaactgcagaccatacccgtaacatggccatttgcgtgctagggactggacatgattggacccttcaagaaagctcagggaggatacactcatgtgctggttgccatcgacaaattcactaaatggatagagtacaaacccatcgcttccctgacttcagctaaggtagtggagttcatacaagatatactattcaggttcggaatatcaaatagcattataactgacctgggatccaatttcactagctcggaattctttgatttctgcgaacaaagaagcatccagataaaatatgcatcagtaacacacccaagagccaacggtcaggtagaaagggctaatggaatgatattggaagcactcaggaagaaagtcttcgataagaatgaaaagttcgcagggaagtggatcagagagttgtcgtatgtggtttggagcttaagaactcaacctagccgagctttgcatggaaatactcccttcttcatggtctatggttcggaggcagtactacctgctgatctcaggtttggggcaccaaggctgatctttgaaaacatagctaaggcagaagctactatactggaggatattgatatactggaggaagaacgattaaatacagtaattcagtcagctaggtaccagcaaaccctgaggcgctatcatgataaggccatacgacatcgatccttcgcagtgggagacttggtccttc

SEQ ID NO: 129476 - DNA, 1067 bp, Zea Mays
tgtgtatcgatctccatgcgcaagcgcaacgccgtataaagattgagcaatgctcagcagcatcggccggcactaaccacatatcaaataatgcagcaggcgcgcgatcgatatgattctcctctacttttgcatgcatgcacgcacatttggtcaagtacgcacatacgtagtagtaggtgcacgcttttggtgccgtcgcccatccatgcatgcactgcacacgcaccaatgtctccccttctttaatttatacgtatacatactattaactatatctctagctttgagctaaacaaaattcagtttacaacgaattttgtaggattaagatctgccctatttggaaagcaaaaaaactgaaccaaaatgcagattcttcgcatggacctttttacaacaaagagtattgactgtcgataaccttcagaagaggggatggccccgcaacccgattaagatctgccctatttggaaagctaaatttatctgcaacccgattaagatctgcaggaggcgcacgatcgatatgattctcctctacttttgcatgcatgcacgcacatttgctcaagtacgtacgtacgtagtaggcgtgcacgcgtttggtgtcgtcgcccatccaggcatgcacacacaccaatgtccacttctttaatttatacatatacatactattaactatatatatatatatatattaagagccctgagctctatataactgtggagagtcccgatcatcaacaccaacaaatctgttcgagcctacgtccgctcactatttatgccagcgaaccaatgtagcgtaaacagaaaaccaatttagcgtaaacagagtaactccctcgaccccacgttctagaaaaagcggattaggcccactttccacacggtcaaccactactgccatagtcaaaacatgtttacgctatttcaatccactgtttatgcaacaatatcgatttagcgtaaatacctcatccagacccatgttccagaaatacccgtttaggcccactttccacgcggtcaaacagttctataccctaacctcctggccgact

SEQ ID NO: 129477 - DNA, 284 bp, Zea Mays
aaaccgaggaggctgaatcagctgcgcaaagatgtggcataagtagtgagcatatggcaactgtcgacaagcacgaatcccatccaaaacggtgtcctcgatctcacaaataaggaagtccacgacgtcaaactcagagtgagagaccagggcaccaaggagccagagctggatatgagtggtagcctccctgtatcccatcctcggcagaagagttcgtctgataaactcaaataaatacttggctgctgtagtaaagtctgccggtgaacgtcgcgacccat

SEQ ID NO: 129478 - DNA, 292 bp, Zea Mays
atcaatggtctggtaacaacacatgaaacacacaagccagagagtgatattcgtcaagatgtgtcgtcctatattaagctaagcacttctttatcaactccacgacctgcaccagcacagtgcaaaactcgtttcgaaagactcttcgatttctttgtcggtgcaaaaagcggcggtgacccatggccgagctcacacgggcttcacgtgctacgcctggaggctggagttcactcccggttgattgatccgcaggcgttggggaacaggggcgtagggctgtggatcctag

SEQ ID NO: 129479 - DNA, 579 bp, Zea Mays
gaaataaaggcaggctaaacacgccgcacgccagcagcgtcgccaaccaaaataagcaacgcatggtccataatctcgttcattttttatatttcttagggcctgattggatattatatgctaaaatttagaagggtgctaaaattagcacatcttaaagagttaaactgctatgctattgaaagataaaatttagcacttcacttttaacactctggtttaggtgtcgaagcgctaaagtttaaattataaaagttataactttaacactacgatccaaacgtgccgttaaacccgaacgatgctatatattgcaaacatgcaaaacactctcgggattgaggaaaaagctgacatgcgaaacttgttccgttctgggctctggcctcatgggattgggaagagcacagcggtgcatgcgcaatcagctactccctccgtcacaaaatgatgtggttttgacttttgagaccaagtttgaccgttattatttatttttattctaatttagtttatcatacaacgtactttaactatcaactattttttatgtattcataaatattttaaataaaataa

SEQ ID NO: 129480 - DNA, 314 bp, Zea Mays
aataccgcctctgacccatagaccatgaagaaaggagtgtttccatgtagagctcggctgggttgggttcttaggctccaaacgacgtagggcaattcccttatcaactttcctgcaaacttttcattcttatcgaagaccttttttctgagtgcctccaatatcatctcgttagctcgttcaacctgcccgttggctcttgggtgtgctactaaagcatacttgatctgaatgcttttttgctcgcagaaatcgaagaactctgaacttgtgaagttggatcctaggtcagttatgatattgttcggtatccc

SEQ ID NO: 129481 - DNA, 503 bp, Zea Mays
gcaacaagaaaggttgagaaagcttagccaaaataactcaaataaatccccaaatcagcccttgatctatgaacccttagagaaattcagatttctgaatttctgaatttcagacctcttcccaaagatcctctgtgttctctgcttttcgaaactcaaagccaggagatccaaatatcaaagtcgtgccaaaatcccttgaacacgtcctggaaaagtttgaactcaaaccaaattcatttggcatggttttggagcagcttgacctcgggaccaagcattctgacactggcaccttggtgacgctacaactccctgtccctagcctaaaaccacgcgacatccatacacaaaagacaaagcttggtcaggtaaacaaatccttcgcagcgatcttgcccaaattcgcgaagatttgctcccaatcggcgcttgaacaggggcagaggcaacgggaacacgtgttcgaccgtggctgacacccctggttcacgcccgttcgc

SEQ ID NO: 129482 - DNA, 283 bp, Zea Mays
cactaagtaggggctgatttctaaagcagctgggttgtacagactgaaaaggttcaattttttattaattgtttagtgagccacacatgattattttcagtagtgctctttgacttttaaaatatgatagtcactctggggcaagcatgtctactcgcagaaagtaaggagtgtcaaaagtgctagtcaacagaactgaaggatgaataaaaatatatactttgaaacctgtctaaggggactcaaaagcctaataaagtaacaacctacccatttgctatgg

SEQ ID NO: 129483 - DNA, 514 bp, Zea Mays
aagggagctggccgcgttgaggtcggtttcgggtggcggaaactcgaattgggggaaatccggaattagagctcgctggtgatcggctgggggtaatactgggtggcttggtgcgtgaggatgttgcgaagctagccacgggctcaatttataggaggagcgagcggtgacgggtaatttgagcagattgcgctggcggccggagatgaagaagaaggcactggccgcgtgagtgcgtgtccacagtcgtggcgagctcaccggcgacgatgggactgctatagggagtcacggcgacgcggtggaaagactcggacacgcggcagacacggagatggcacgacggcggtgagcagctttatccacggcggtgagcaaggggaggggtaccgcggctggccgggatggcgtccagctcaccgacggtggggatttttaccgagctatgtttatccgatggccacggcgcacgaatcacggcgagcggcaatcaacggcgacgggccaccggcag

SEQ ID NO: 129484 - DNA, 488 bp, Zea Mays
gaggagaccactgaggagttgctggtcctgatcgaaccagcggtcgtactccggattgggtattggcgtggcgccgtcgaccgtggatgcgacgacagttgtagccggcggcaggtttggagccatcaagaaaccccatcagctttgagcttcggaggtaggggagggcttgagcacgccataggagataattggccttagtcagtctgattgtgacggcttgggaaatggggacaagcgaagccatggaaagatggaggtggagaggaggaggagaaaatttgtggtgggtagtcagaatatccttggctctggtaccatgttgttaatggtgcaaaagacactgccctcttggggatataggcatgtatatatatgcgcgtacagcagggtggattacatggcagcaatgccgtgattgacatgccaagattacaggaggcctcaatcaaccgagcctcaatcaacggatttaagtgcgcatggcc

SEQ ID NO: 129485 - DNA, 383 bp, Zea Mays
gtgactgaaatatgtcatgactgatgcctcttgttgttgtggtgtaaatctctctttgtcccttcaaacagcctgtaaaggtatctagatcatccgtgttaaggtatcagactgttcacgatagggcgttggaccattcgtgatgcagatagctctcatccgataaacctagatctggcctttcgatagggacccgtcaaaagaagagatcgtaaagttgcttcagaattgattgacatggtgtgatcgtgtcttcctctctctgctcctggcttcgttttcttgtgctcattatgtcccagtagcttagcagatatggtaagaatctataaacagagcaccttatggatgctatttttaagaacctaaaactttttatggtt

SEQ ID NO: 129486 - DNA, 645 bp, Zea Mays
gtggtggtggtggtgagccccaattagagcccggccagagggtctccttccttcttgttgacttctggacgatgtggctggagatgtgcatgttggaggtcctagcggtcctttagtggagggtgattttctgattggtgctcccttctcctccgactgatctgagtctagatccgagtcggggaagtagagagtggagtgtgccacatcgaagatgtcatggttctcgtctagggcggaggtgttgacatagatctatgatcgggtgatgaggtgatgatccggtgtagtttgattattgtcttggacgcttgaaaccagagatgagtcgatgcagttcatggtgacgcagcctttggttgtggcgtagttgtagtcgtcgctggagctattgtggacttaagtaaatggccctatcggatcgaggcaacaaccatctgtcccttggactttttctccgcatcagcgatgcggtgcagagttccactttgatcagcaatagaagagatcgatccaaaatgaaacatctcaccaactatgaagttgacggcgtcggtgaatatgatggccatggagctaactgatgttgatgtcgcctcccctacctcgtgcgccagctgtcgatgtttagtaccggtaacacac

SEQ ID NO: 129487 - DNA, 722 bp, Zea Mays
gaaaaatttggagtaaaatgagctcaaagttgggctgtcagactgccctaagtctgaattcagactgacagtgagattggatgaacttagggctcaattttaagtaagattttgtgactttttgtgggtgcacaatgtagcaaagttagagttggtctattaggctacaactttgctgcagagcattggtctagttgccatataaaattgggaggaaattcgccccaaatatggtctgtcagactgactgaagaagaatctaatggtacagtgacaagaagaatctattggttcagtgaaccggccgtcggcgacccctcgcgtggattcacgccggtgtggtgattcgtgctcaccggcgcccagataacgttccgcggtgaaaagatcttcttccccccggatgagcttaaggcaatgtttgtccggccgccgtgtctgctctacctcgatcgccttgaatcgaccctcgccggagttagacacctcatggtcttatgccacgtgcctcagcactttaaccacgtcgccgtgactcgtactgacctatccagagattgctggtgaggttgccacggttgtagccactaatctcgtgcgctagtgactcctttcttcttcgaccgccaccatgccaaacaaaattcactggccaccgcttagcgccactataaattgatgacatggtctgctgcgttaggtcatcaccaagcctgagctcc

SEQ ID NO: 129488 - DNA, 697 bp, Zea Mays
gcagtttagccctatgcaagttcattggtgccacaaatggatgttaataccctatcaaggaaggacaatgttgttgcaaggtgtgtcttagggctgtgaggagaagttcctgattcaagttactgccatatccgatgacaacatggagaagcaagcacctgggttgctatttggtatttatgaactgcttcaccagttttcatatgttctctccccacctatatccttacctccaattagagcttgtgaccatagtatacctttgattccaggaggttagcctgtttatattcgtctatatagatatgccccagcccttaaggacgaaattgaacgacaagtgtctgaaatgctacagaagggcatcattagaccaagcgcatctgctttttcttctcttgttctgttggtcaaaaagaaggatggttccttcaggttttttgtgtactatagatacttgaatgccttgacccttaagagcagatttcctataccgatctttgaccaattagtggatgaattatctggtgctagctggttctccactttggatttgatttctggttaccaccaagtgagaatgtagcatggggaggaatacaaaactgtgttccaaactcatcatggtcattttgagttcttcgttatgccttttgggctgtcaagagcaccaaatactttccaaagttctatgaat

SEQ ID NO: 129489 - DNA, 378 bp, Zea Mays
cttgtacagtgcatgctgcggtaggtgtgcagtattatctagtatttagacgcaaataaattgtgtgtgccaaactgcatgcatgcagcggtatctctttcatccaaagtagaacaaaagatacttttctttgcctttcactttcctctgcacttttaaaatggattcactcgctcctgtgtcgctaagcatgcatcacaaagtggcaccaaaacgatcgtccagctttgcatcgttggaatccgaagcacacaccagaggatatctctggtatcccactgtctcaagagtagtgtgctgctgcacagccttccctctgcttttgggggtagctttaaaccctttaccaccaaagctacagctgcatgtgtaggagta

SEQ ID NO: 129490 - DNA, 536 bp, Zea Mays
ggtagagtaatgcatataaaagcaataatattgatgttacgactatttcaaaaggagctagatttttctttcttagggacagtatagttttatttggagaagaggggaattacttaactatagctactttacaataatcttctcttctttttcttgaacatgcagaagagccggataccattgcattaatagaagagaacagttacaatacatagccatgctagtttattattatcatttgcttatgtctataattccattttctatatttctcagcttttagtttgatagcaagttcagaaagaacttgatgtcacgcttcatatagtactagtagagagaccagagaagcaatcaagatccatgagtggttctgatttatgatttatgagtctcttttgaaaattgtgttctttttcttgtgacgtctgctgcatgtgaatgaatttcggaagttgtggctgttgaatccaatggttatggatggtttgcattagctatctgctgtggttgttgcttgaaggcttcaatagtgc

SEQ ID NO: 129491 - DNA, 706 bp, Zea Mays
cacacattcttctcgaaccatctttcttgttcacaaatagaactagggctccccaaggagacgagcttgggtggataaaacctttttccaataattcttctatttgtttgttcaattcaactaaatgcttgacatccattctataaggtctttttcaaatggttgcaattccaggtaataattcaatagagaactctacatcacgatcaggtggcatacctggtaattccttcggaaatacgtctggatatttacatactattctgatgttttccaaatatttttcctccaattgatttaccatgccttctgcttctgctgacatactaacattgacttccagtctttctccttgtggacttgttaatgcaatcattctcttagcacaagatattactccatcatacttggtcaagtaaatctattccaagtaacacatcaattccacttgactccaaaattattagctctactaggaagcttattcctctaatttcaagcttagtttgagggcatgagtgagtgactctattttcacctcctggtgatctaatcaataatttcctcttctaaagatagtttgatatattatgctttttcacaaatgactttgttacgaaagaatgagatgctccagaatcaaataaaaccgatgcatgtatggagttaacaaggaacataccatacaccacgtcagcatcctctg

SEQ ID NO: 129492 - DNA, 630 bp, Zea Mays
cggaggtcgaggaaagaaaagactgaacagagtctttgatgcgataagcttcatataccccgattatcgctacccactacgagggcaagagaaaaagaggaaaattgttgcttcggtcaccctagctgagcctgtgccgaagagtaaaaaggtgaaggttctgacccaccggtcgcattatattgaaccggccatagtgcctgaattcggcgcagggtcctcctcagtagccgaagcaacagaaactgctttgattgcacagagcactaaagaggcgaccgtaacgccgaagatacccatagccgagtcagtcgaggctaaggttgataaggttgaaaaggcaaaagtcgaagaaataataaaggtgtcaaaaattctgagcccttcgacggaggcgaaactgctgaaggtgcaaaaaacttatgcggcaactcccaagaggaggatgatggccaacgtgctagatgttgtgctggaaactacgaaggtcttgagccctgctactgcaaagaaagttgccaaagccacaaaaacacaggtcgaagccaaaatcgggcaagcagaaactgaaactgcgcaagttcaaattaaatcagaagctgggccttcggtgcccatcgagatggagct

SEQ ID NO: 129493 - DNA, 589 bp, Zea Mays
gcttctcgtgtcctggccgtaagcattccgtgcgatgcctccgctgtccggccgtcgtggtctcgtcacgcacgcacacgtacacacacctcgcttgatatgatgcccgtgtgctctcaggtctcaaacaacgctgtccgtctctccggcgcggaggggataaaagtctcggcgtgaactcctggccagtcttttgctgctgccatatccgcgcgcactgccggccggccagccagccagccagcgcgcgcgtgtcgcggcggagctagagggctaggtagcagagtggtggccagtgccgcgggttgcgttgggatggcggcgcttgtggcgctgacgctggcgctggcgctgacggcggcagtgacagcgacggcgaaggagtgcaccaacatcccgacggagctgtcgtcgcacacggtgcgggcgcggctgcaggcggcgccgggcggagcggcggagtggcggtggcgcgagctgttccacgagcacctcaaccccaccgacgaggccgcgtggatggacctcatgccgccgcctggcgccgcggctgcggcgcaacaccagcagcaccaccgccaggaggagc

SEQ ID NO: 129494 - DNA, 298 bp, Zea Mays
aggatcttgatatgatactctgtatttgtcaaatcaccctgcacactgaatttttccattgatagttgctcttctgggactctgaggcatttctttaattgtgacatgtgaaacacatcatgcacatctaccaagtggttaggtaattccagctggttggtaacttgtccaactcacattacgataaaaaagggtccaataaaacgtggggacaactttcctttaacctagaatctccgcatacccctgattggtgacacttttaggtacatgtgaatcgtgatcaccttcctcaaac

SEQ ID NO: 129495 - DNA, 3377 bp, Zea Mays
gatacatgtggcaattcgagacacaatatctagactatcaaatatactctaacactccacaatcatagagggagcatggtagacgtttagactatagaagtctatatggactaaaatcccccatagtcgtgacgttgtcggagtgcagatgcaacgacttggagaagaaaccgacgagaagctgatgtagacgatagttctctgtgtcgatgttgaggtagcctagtacaaggatgaacagttgtggtcgataatcttgcaaaggatagttgtggtcgatgaaagctatcgaggtcactaagaagtaggagccacacaagtcgtgtgcttgatgtgttgtggtgatggtggcgaatagaaggaagcaccatagacaaagatggtgatgcagtcaaggcagtcaatggagaaggtcgatggcgaagtcgacattgtcgaatcaacgtggctgaggcatgtgtgaggtttactagctaagcccaaaaacacaccggggatgaaggtacgcaccagtgttgctagcaaaagacatactaggtagaggaccccaaccatacgtcagtgtctaaagtgactagcagagaaggcctccgcgatagttgcaatgtgtagaagaacaacgaggaagcatgtgtcaatgcaccaatggttgtcggtgtggatgaagtagacgaggacagaggacgacactggcaacgagattgtgatggacgaagtcaaagaagtagatggttgacacatctagggacccagagtggcagtggtgagatctgcattgcgcaaggagtcatggtggtgctagagtgttgcaacagtggtgcttaaagaagatgacgaagagcatgaacggtccaggtataccatgtgagagaggcgcacaacgacgtagtcgacggtgatgtaggggcaatacaaggatgaaaataggcgacgatggcgcaaaacccgaccaattaggaagaaaaagggacccacaacaacaacaaattttgttacatcaccaagtacccacaaatagtccattctcctaactcaactcaccctccttatcctcgatcagaagactgaaagagggagaaagagataaaccacgatcacaaaggctcgacttggctaacagggagaggcacatagcctagcacaaccaacatcctctttttctttggcaggggtcttaatggctttgttgcttttctcctcaaataaatctccaaagatcgcatccattggattcactatgcaggggaggctaggcaatgcctctttgagcttgtcgcctgatgtatcctcctaggcgggctttttctcgacctacttcgacatagaatcaaagttaacaaggtcgaccccgaaaggacttaaaaataccatgatgtttgttttgtcattacctcaattttctgagcgttcagaacaagactcttcaacaacagctcgtacatgttcttcagtggtaggggtctttgcaatgccagcaggcttctctgaggcaaccttagaggcctcgacctagaccttctacttctcaccttcatggtgtttcctttcaaagcgcttgggtgctagcaacttttcctttgccacaatctcactacccttgtattttgcctttggcttcaaggactttgtcggagggccccctctagcctccttttcactaatcactcaacccctatctataattcttactttgcatttcctctgcaatctagcatcatgatcgacaatgaggttggggtagtctagatattctaagtcatatgctttgatcacacgattatgtattctctttattgccactcactatcgcactaagtagatgatctctttcacaatatagttgcataaaactttgttagcaactgtctccaccataatgagccactcattgctcggctttatgaagatgctgaagggattgaatttataaggtaactgaatcatctctcgagcttcaatctccttcgtgttgtcctcatcttttggcttaggtatctcctagccaactttcataggaaatacatggtaggcaatatgctcttgaattcgtctcttagcaccctaggggtcaagggtgacaaagcccatgggctcacacggcctctccagaatcgtcaccacgacaacacgtggatgtcgtctgccccacaaccatcaccatgattgcatgcacaaaggacaaaggcatgatccaaccggtaggagagcccaacaaccaccatgacatgtagagaaaccagcgagcctctgatttgttgaagcttgacaatacaataacgacgatgaacgcgacaaatcagaaggattagtcatgcatcctaactacgagagcgcaactcttgatggagatcaatttcctcgaggcagcgcgacgacgacagcagaaggggaagcctaagtcatagcctaaactcgttataccatgttaggggggtttgccatcaaggattgatgtattgcattaagcccttaggcagtttatatagagcacatgagtaagagacaaggcaaatcatggatatatatgacagtagacgagacacaatatctagactaccaaatatacttttaacaacttctaacaactaaatataaaatatctaaaatatttgttgagaagttaacatatgagagagaacctataactgtgcaactaatataagaaaaataacataaacatataacaatgggaaaattatgacacgctaataagtcacaaacaaaaataacaactaattatgaaattgacatgtagttgagtatttatacaatgatatatataatatcgaaagtgctttcgataatattatgttagttgatcaaccgtgctcataacttggttggagataaatcataaattcacattctttgtcacaatttattacaagtttctattgtccaaaatattatggtttaaacaattcaatttctatagtgcatgggcatgatgcctaaaagcttactagactctcttctcttatcattttttcctagagcatatcttttgttgccctaaaaggtaaaaacctatcacttgggggtcgctctcaagttttgaatgtatactccacttatttcatttgttcgatgtcctctcagctttcattctcaactgagcatatttagccttcaaggaagggaaagaaaaagaggagacaagaaaaacttggctatcaacttcacttatatatcaatggaagaaaaccaacttctattgggcagggccatgtgcatcaactagactctagcacccccaacacaaaacctgtcatgaaaaaaaggcgtgcccatactgtgtctagtagattcagaacatttgaagatggaaacttcttgttgggagtgtgtggaagaaaacttagaaagctaaatccaac

SEQ ID NO: 129496 - DNA, 391 bp, Zea Mays
ataaaaccctatcttagtttgtgtaacaggagtaccagatgtggttgctggtgcaggcttggtttgtggaccaaaatacatgcaagaatgtgagatgaggaggtaaccaaactgtaatgagcttcaaggaagatagcatccgcttggaatggcttcatatgcattaagccaaccactccctggcacaatttggaaagatgtaggattagtatcagaatctcacctcttaaattcactaatgtcttctcatgatccatgccctgagcattaggtttcagaggaactagattttatgcttctgagctagccaatctggaataacttctgattatggtatcaactttatcttattttggcagataagtaactcgtaggctttcactaatcagtg

SEQ ID NO: 129497 - DNA, 292 bp, Zea Mays
cgaatgcatccaaatttgcctcgtctttaaatacttcattagctatagcatactgatcagaatcgcttttaatatcattatgtctaagatatttcattgcactcgagtgggtcatgcgatgtgatgactcaggcataccaacttctgagctcctccgttgagtctggcgggtgaagggctgaatagaccctgtgttgctgctgctgcgttttgtaggagacatggttctacatgccattatcgctggtgtcttgaactcatcacagaaacaaaagatttcatccaactcagt

SEQ ID NO: 129498 - DNA, 306 bp, Zea Mays
ttggaatccatgtagtggtgttgcacctagccaacatgagcatactcagtgtcatcaccacaaatcaaggtagatgatgacgaggaagaagttaactacaatgatgatcgtgagccagaggatgtgacacccacaagttctagatcagtgagagtaagagtgacctcataagggaaggggaagaaacgaaaaatcagtggtggtcgatggtttcaagataagatcggagagcttgttgctatgaatgagagggctactgcttcttgtgaatcaatggctagtagggagccaaaatctaatttttcc

SEQ ID NO: 129499 - DNA, 411 bp, Zea Mays
ggggcactgaatcgatcggttcacggtgaccgggcggatgggcaagaggatgaacatgttccgaccaaacgacggcgaggagaccaaattggggctggggaaaggtccacgggttcaccagggtctacggacatactttgatttgggcagaacaagaactgaagagcgggtcgacggtgagggagtcacggcggcgttttacaaagcaagggtgcgttccggtgatgggcttcggccaaattccatttgctcaatacagagagcaataggagactatacacgagctagaacagagagtaattgagaaattaccaacccgaagagcgctgtccgcggtgaagttcttcacggcagaattaggaacatggagaaaggaaattcgtgctacgtgagtgctctggtggaattgag

SEQ ID NO: 129500 - DNA, 842 bp, Zea Mays
cgcaaaacaatgcggaagcgaaggtaaattaatgagccaagttttaccggctgaggcgctacggtgaggtcggcccgcggcatgaagcggcgacgcggcggtgctccagcgccggtgatcaatccatggagcgacagagcgccattccatgcaggtaatccatgaacagctccctggcaacgtagagaagccccaagaaccaatagaagctcgaacgacgacgaatcagcgaagacctcccccgcggcggacctcccgaccacccatctcacccgcgcaagcacacgacgtaggcacgtattgcgggtgaaagctcgagggggaaggccggaaggcgattggcgacatgcggtaatcaaggccgggcacgacttataacacaggccgcacgaatcaatgggataggctggcggcggtggaccgagcactcacgcgacggctccaccccttccctctgttctggttacggaatgccggccggatagaaggggaaaggcggagacgggtgtccccatttatctccccaaggtcgtgcaggtaggtgggttctgcggggttcgcggtcaactgatcacgcgaagatcacggtggggcaggtacgccgtccgcgctccgcgcgatgggaggaagagcaacagtgatatatgggccccacaggtaagcgaaaacacgagggagggcgcgagctgacggtccgggccaccagccagcgggatcgcccagcgcgcgcatgtggcatcctggtttactgacgaacggccccacgttgttagcgcgttttcacattcatgcggctgtaggcatgggcaccgaccggcttggcccacgtgtcatacccccca

SEQ ID NO: 129501 - DNA, 610 bp, Zea Mays
gggataccaaatagcatcataaccgacctagggtccaatttcactagctctgaattcttcgacttctgtgaacaacggtgcattcagatcaagtatgtgttagtggcacatccaagagccaacggtcaggtagaaagggctaatggaatgatattggaagcactcaggaagaaagtcttcgacaagaatgaaaagtttgcaggaaagtggaccagagagttgccatatgtggtctggaccctaagaacccaacccagctgagcgttgcacggaaacactcctttctttatggtctatggttcggaggcagtgctaccggctgatctcaagtttggggcaccaagactgattttgaaaacatagccgaagcagaagccactcgactggaggatattgatatattggaagaagaacgattgaatacagtaattcagtcagctaggtaccagcaaaccctgaggcgctatgatgataaagccatacgacatcgatccttcacagtggaagacttggtccttcgccaaattctaacaggggaaggacgacacaaattgtcgccactatgggaaggaccattcacagtagcagaagtcactcggcctggatgata

SEQ ID NO: 129502 - DNA, 1371 bp, Zea Mays
agtgccaaggacaacactatgtgaacaatggtcgatttaacaattgggataaaaatctcatcataatcaatgtcggggcgttgagtgaagtcgcgacacacccaacatgccttgtagcgcttcaaggatccattagcgtgtcgtttatgagttcaaacccatttgtcaatgatgatgttgctaaccagagcctcaaactcctccttcatagcctaatgtcaattaggatcagcgagggtagaacaatcattcttcaaaactagtgatgtagccagaggagatgtcatggacacaaccatacaatgaacaagctactagaacatacacttggcatgcatggttatgagatgcgggttaactggtgggatgattagctcagcaccagccagaagaggcagcgatagggtcgtaggagcagtagtcggtgaggggcatcacgagtagatgaatgtggcatgaatgttcgcggagggatcagcactaccactggcgcatctcttatgggcgcactggagaggagaacgctagggcaaccatggttgctgagaaagctaggttctcttgtcgtgtgtttgcctaaagtggagccacacgtgacacaatatacgacattagaggtacaccagggagtggcacaaaacttggatggacttggggagcaattacccgagctagtaacaacgcaaagcctagtgacacttcagggaaggcgtatcctgaagaggcaccaatcgagagggcatcactgatgcccccatctttgaaagtgcacctatctaaaagataactaaatcatttgtaagaccaagcaagatagagaaaggaaactctacatcatcaaatgcaacatgttgagaatcaatgatgcgactagtggagagatcaagacaccaacaagcccttgtgatcaaaagagtatcctaaaaagacacatatagtagaccgcatggcaagcttatgtttagcagacacagagaggttcgggtagcgcgcacactcaaaaacctagagatgcagttaggaatgctaggtatggacaggaagcgttgactgtcttggtgggaatattgttcaacaaatacatggcagtgtggagaccctcaatctagtaatgtgtgggcatggatgcctataaaagcaaagatcagatgatgttattagtagaatgaataacacactcaactttaccattttgctgtagggacaagacattcgaagcagtgcaccctaaaacaagaagaaagtatgagaggaagcattgtcgaactcagcctattgttgtattggacaaacttggtgctatagccgaattgagtggacacatacgcaaaaaatgaaatagtagaaaagtaccatattttatgcttgaag

SEQ ID NO: 129503 - DNA, 294 bp, Zea Mays
taaggtgtggaggtatccggccatgtagacgatggtggggtcatcttctgtggggtctcctcctgacagagcctggaatcttttcctccaggtgggggtatttttgttgctgggtggaaaatatcgaaggggggtctcagagatctctcggctgtagttttggcacaactgtttaagggcttttcgggcaacaccctggcaagtgtctggaaagcggtgcccgatgaaggtgatttggaagagagggtggtttgggtagtttcggctttctcccaggtagactgccatagagca

SEQ ID NO: 129504 - DNA, 391 bp, Zea Mays
cttacaacaaaatgacgccaaaacagagcagccagcagcttccgctgatccaaatccattcgatcatcttttgaaaggctgccggtacggtgttctctagcaagccggcgctcacgtcgttgctcgttatggacgagtccggggttcttttttcccctgttgttcgtatcgcctctgcccatttggctttgatgtttctgccggtcctcacagccatgcgaccaagccatgccagtggcagttgggtttcaagactatgattctacgaaggttttgaagagtgctcgagttcccatctccatttctccaggtgcaggggagtcaaatggtacaaataatggctaacaaactgaaagtttctgtgcgtcaaagccgagtggccgaggcagaa

SEQ ID NO: 129505 - DNA, 338 bp, Zea Mays
gctgaacgaccccaagaagagattaagccctgtagtctaccacctcccgttatttgtgggcttcaccgagggcgggaaacatttggtgacatcaaacgaccttcgggctggggacgtctgcgagcttaatttgctaaattgtactactgtgctcgtagcccaaaccgtccatgtcaccatttttccattagtcgtctgatcctttatcaatggctttcgactatgtttgttttttgttgtgtcccttcatgtattgttcatattgttttgaaggagcacatttgctctttttgttgtgccttagtcgatgtgtcatgacatcttaatttagaccgaag

SEQ ID NO: 129506 - DNA, 308 bp, Zea Mays
cagccagatgtgcgcactccgagttgggttgagtctcctactgccttggaggtaacagaagctagggttctacttgctgaaatatgtctgctgaaggagagaggtctgactgccgaggctatggttgctgactttgtttttaataatatccagcccttgaaggatagagcatacccagcttatttgtacagtggcattaatgattcgactcgggttactaacaggaaaatttctgctgaggatctggtgagccgactagacatgatcttgaggggcaaagtatcaaatgttggtgctcctgttgccta

SEQ ID NO: 129507 - DNA, 627 bp, Zea Mays
cggactagcacaacaagtgcgcaaaatcgaagtcttcttcaaaagaccatccgtgcaaaagtcgcctatgggtgcagtcggatcctccgtgcaaaaatcgactacgggtgcagccggaccaacacaataaatgcgcaagatcaagtgcacaagtcgcctacgggcgcgaccggatcagcgaaggcacgcaaccttatcatacaaattatagttacatacatgcaccgagggcatcacacattacatcggctcaaccttcgggatgatacccatctccctatagttgaacagcattatcctcaattcatcgccctcaaacagacttcgcagctctccctcacctacactcgccccagccggcgaggccagcaattcccgcttgccagtcctgtccacacgaagacgaccaccctccacctcaacatgatgatgcctatcacttcgcgacaactcactcactctccgtttcgccactgcccttcgccgcctatgcccagtactcgcactcggaagatcctcatcacccattacacacggagaagcctccgccgcagccacatccaatgctgcaaagtaatccaaatcctcatccaaagactcctctgtccacacaatcgaactcccaga

SEQ ID NO: 129508 - DNA, 670 bp, Zea Mays
gaatggaggaaggtcaatgatcgcatcagggctgaattggacatgaatccggaacttaggagtataaagacagttcttatgaggagctatgacggtttaccataccatctcaagtccgctttcttatacatgtccatatttccagaagattacaaaattaagcggaaacgtttgataaggagatggattgctgagggttactgtagaggaatgcatggcatgagtgcagaagaagttggtgacagatattttgaggagcttttggataggagcatgatcctgctgttggaagaggacactaagtatggtggggccattgattcttgtcagcttcatgatatcatccgtgaaatatgcatactaaaggctagggaggaaaaccttgcttttactctggaggaagggtgttgtttgagcgacgcacaaggtacaatacgtcatcttgctataggcagcaactggaaaagagataaagatgtactggtggagagcatgctggacttgtcgcatgtgcggtcattgaccgtgtttggagaatggaaaccattttttatttctgataagatgaggtttctcagagtgctcgatttgggtgatacatttgggttaagagatcgtcatcttgatcagattggccagctccttcacctgaagtacctgtctatacgag

SEQ ID NO: 129509 - DNA, 1331 bp, Zea Mays
cactaggcccaaatgaagtgcaatcacagaggcacatacaggaaaactatagcacaacagaattgcagcacccatgcatggtccgtaacaacccactgaattttcgcagtgccaagtactggtgtcaatgataaattgataatagtgtgtataaccacagatctattctttgatgtctgtttgggggttaacttgaaatatgatttcaatttattggcgagtcgaataagagttaagtaagaaatgatcattggaatcagcggagtgtaaagcatccaggaactaacctgtgtgtttctcttttgagggtgtgctcagtgctcctatagttgatatttatccaggactacgatcagttaaattatatcatgaggacgaatcagtgttgaataaaaaaaaacagtcggttagtttctggatgttttacatatttctctttaaaaaaacatgcagctgtggttgtctagttcattattgaatcttattgaatgtagatatgcacgatctattcgaacagtttcttgcatggtaatgtagagcagcacgaatggtcatatattattccgagtattctgcctgcgttgctcgcgggagtcctgaggcttcagaatgcaaaaacaacgccgccacttggttacagtagatcacattagacattaccatctttattctatatatcacagtcgtgttcttgcaccagtggatcacattagacattaccatctttattctatatatcacagtcgggtggcgggtaaggccttcgcatcgtgtcaggctgtcagcgttccagcctgtgtttccgttgcagttatgggtcaactctgaactctgcatcggtttgtttttgctgataaaatggctggagatttcgtttcctggtccggtttctggtctcagataatcagatccaacctctcctgacgcccgtatccccttctcttttcttgcgaacgcattcccccccccccccccctggtgccattcgcaatcatctttcttaggatatgtacatgcaagtgtctaaactctaatcatgaacagaacacagccatgaattgagcacaaattgtaggtgtaacaaatggtacttgtcccatttgtttgtatggtggtgacaagtgacaagtggccaatcaaacttgttctgtttcgctgctaggcatgttatgtttttggtttgtttttattattaaaaaaactcggaatacggttgctgtttttcttgattttcacaagaaacgagacaaggcccgtcgtgataaagaatgtaaagatgagtcatcatctgtatgctgaatgcatcatccgctcgcaaatacagatttatc

SEQ ID NO: 129510 - DNA, 303 bp, Zea Mays
ggcgtcacaaaaagcgcccgcggcccccgtgcagtgcagtgcagtgcaggagcaaagcgaatgggacggggagagccggcagcagtaccgtgggcagtggcttgaggctcgatccggtgggtggcttgaggctggtggtcctactcaataattgccggttaagggaaaagtttaggtggtgatatagctccagccgtgcaagtgcaacatttctggtgcctgtaggccggctttagccctctaccgacatatatgtgtcgtcggttagtaatgttatatagcctaatagcatctgctttcctc

SEQ ID NO: 129511 - DNA, 534 bp, Zea Mays
cccgctatcaaatcggaaccgcccgtggacaatccaacggtcgggcaattgtctccccaacccagacgcggacgacggcgtgagcaagcctacggaggcgccattaccggcgcacggccgcccgccaatccgagcgcaaatccacaaaccaagggttggtaaacggagcggggacgaaggcgaattagtctagggcttccttacctggagttaggaagtcgagataccccgaccacgggcagggcggatctatggcggcacacgaacgacggtgagaaattcctcgacaaccagttggtctttgctcccagcgccgcatcgagcacgtcccagagcacctgtcgaagcccatagatctatcttcacgctccgaacggccataggtgcttgaatcgatggcgacggcgcgttcggcatctcgttttcttcccctactctctggttgcccgatggggacggtcacgctcgatgagttgagcttcagggaggtctcggggttctcatatataccaaatgtcgcgcgcgaaactcgga

SEQ ID NO: 129512 - DNA, 347 bp, Zea Mays
ctcagcggtgcaaactgcaaagccatcatcgttatggtctttctgattttaccatcccatcgctaagatgatgacaccattgaccttgaccattgccatggcctctcagtttgccaccagccttcaatgtagagtaagaaaactgcatgccgtagtacagggtcggctacagatggaaattgagtgcatgcgtccagctatcacctacacccaatacttcgaacccaagataatgatcaccatatataccctgtgatttgaagagataaaaggttcctggattgcgatggtagacccacatgccataatttgagaataatctcatttcatatgtattttcattgtag

SEQ ID NO: 129513 - DNA, 509 bp, Zea Mays
gattacataaggaaatagcctactactacaataatctagtcatctgcgtccttggctgctcctgctccactgctagcttcaggagaacgatcatctgcaatgttcatgtaaggtggggctccaaagagatccaactccccataaggtcctccgccatctgctcctaatgcactagctcccatcaccgcaacctctagtggcacgttcggatgtagctggtcatacaacacgtgcacttcctcgtgcagagcattattatacacttgcagattttccagggctacgcttagctctttcacccgggctcgggtagttgccttgcaatcctaggctatagatctatcctgctccacaacctcccgctacaaatgttcaacctctgttgacaactcggcgatgcggcgactatcacacgcacgctccttgcctccatgacgcagttccatctttagacgttcaactctagcctccagatcccctatgggatcattactcccgctactgctccc

SEQ ID NO: 129514 - DNA, 279 bp, Zea Mays
cacttgctcactcgaaggtgaggcacaaaggaatacaataaagcataataccataacttaaaggtagcaatagtgattacatcattcgtagtttagtaaccattgtttttgttgcagtggaaataactaacgacggtaaaagagtaacatggcgaagcttggccaaatcactcctcttggtcctctcctgcataggtagcatccttccactcaaccgtccaatctggtggtagggtggagggacaagtcaaaccatcaaccataccttgcagaaaacct

SEQ ID NO: 129515 - DNA, 420 bp, Zea Mays
cgcgaggggaggtggcggtggggacgcggtaggagattctaggacaacatggtcgtggggagggagagaggaagggatgaggggttatccaagtaatattatccattagatttgagtgagaaagggagaggagattatccaatgatctggatcattgattttgatggtgtgttaagtcttggtgcaatttgtttagtggatttagcagaggttcagtgtggaagtaatttggttgggtgcgttttgcacaatttaaactagtggattatatacagtggcgtagtgctcggtatggcgatatgtggcgctcgtcgtacctgaattcgacacctcagcacaacccgcctagttcgttttggcatctctgactctggtcagagtgtctcgagcggcaacatgtatggtgttgttcgccatggc

SEQ ID NO: 129516 - DNA, 613 bp, Zea Mays
cttatattggtatttggaattacagttgatttaagtatgaacttcacacttataaatgcaaatttagggttaaattcgaaatttgaaagaaaagaaaataggagataaaagaaaaaaaagagaaaaggggaaataggaatgcctcacatgggccaatttggcctagccggcccatttggctatccctcagcgcggcccagtcctcatccacacgcagggacgccgacaacctgggcccgcttgcaagccggccaccgctgcgtgtgctcctcgcgtctcgcttacgggtagggcccacacgtcatccctaagagaccgcccgcaccagccgggatggttgctcgtggccgcggcaacctcgggaacagcctcgtcccgagtccgtggccttgaccagggttataagtgctacgcgccgccctcccctgctctatcctatcaccaggccgccccgtgcgccgcctccatatgtgaagtgcaccgccattgacgtcaggaagcgatcgacgccgcaatcgcgccttcctatgcgttccttgacggtgatcccctccccctcgcttgtggaaccttcttggatcaatagaagttcataccgcgccgtagccgaacc

SEQ ID NO: 129517 - DNA, 597 bp, Zea Mays
cgagcaaagaaataaatatggtgccgcgatagcgttccacaagtagagcagtaaatcgtcgatggtggggttgctacgcgagctccacacggggttggggattcggcaaacggcggcacgcacaactcaacaacagatgcgcgatgcagacgtaggctagcagcagaggagcagggcgtggcgagactgagcagagggaggagaactcgtggctgtgcctcttataggcgagggagagagtgaatcgggttggaattacgtgccttgaaggctatttgcagctcgacgttggtggctcaagaaactgacgttgtaattctccattaataacgccatgaagctgtgcacagtaactgaagagaaaactgcggcagggtggacatggcccgaggcatgcggatgtggcccacaggttggcaggcaaacgcaaggtcagcgacgtggtctggtggaaagggagggctggccggcgccattgatggcagtccccaagtggggaagaagaagagttggaaaccattaatggaggtagaagaaactgccgaacggcatagagaagaggaagaggagaggtctcggctgctatgacgggtgtgc

SEQ ID NO: 129518 - DNA, 615 bp, Zea Mays
cgtctctctcgctttgttgcaggaggaattgctgacaccaaatatcatgaccaattcccaaaagagctctgatcaagcgacagctaagcaacacaaccgtttccagtagggtgtgcctgaacagtctaaacagcactctgatcaaagtaaagcgacagctctaatggcgtatcgtcgtgctaaaggcctgtgctacaaatgtggtttacgatggagccaaactcacaagtgtagcaccacggtaccccttcacatggtggaggaattgtggcaattggttagtccttctgattcagtggatgaacaacaacctttgcaagatgagtcgaatcaagaccttatgattctgtcagttaatgcagttcttggcactgaggccctgaaaatagtaaaacttctagccacaattttcgcaaaaaaggtaatcatgttggttgattctggaagttcgtcctcctttatttctgaccgattagcaaaagcacacccagctctaattaccttgcctgctcctgttcaagtgagagttgccaacgaccaagttatttcctgtactcaagaactgcctaaatgcaaaatccaaatccaaggccactgtttccacattgatctgaa

SEQ ID NO: 129519 - DNA, 605 bp, Zea Mays
gctagattacctaacggagtcgagggtgtgctcaatttatagtgtgcttgagcggtggccagtgaattttatggagacgcacgacggccggagaggaggaggggcactggcgcaaacgattagtggctttcaccgtggcggactcaccggcgacgagccagtgatatagagcggcttacggcgacgtggtgaagcttcaaggcacgtggcatccgatcgacgggcggccaactccggtgaacttatctgagccggccgcaaagcaaaaggggtatggtggccagcctccggtgttatcctgtggcgaagatcttttacccaaaagcgttatctggtcatcggtgagcacgaatcacaacggtggcgtgaatccgggcgcacgactcaccagcagcgaggttctctgaacttgaccgtatccattcactgtaccattggaaacgtccaacagagtgcctgacagagcaacttgcaacgcctagatctcggatttttgtgccagaacataccaatccgtctacaacaaacttgtagccctttatttcaactataattctgctatagcaactaccctcaatcgagcaatgaatctaactctaaatcga

SEQ ID NO: 129520 - DNA, 323 bp, Zea Mays
tgttcgagtcataacccgatcacgatgggacgcgcgagatttttacgctgtaattttcgggccgcattgacctttttgaaacagatctacgatttacgctaaaattcgttatcatttacgctgttttggtcacgttttacgctaaaatctgtccgagtaagaactcgtgctcgatgggacgcacgctggtactggacgtggctatacctggctggggcttcctagcacacgggatgtggtatgtttctagacgaaatctaatagttttcctgtatgttgttaagataactatcccagggataaggacttcagcctatattaat

SEQ ID NO: 129521 - DNA, 320 bp, Zea Mays
aaaccgtattcgcgcaatcaacggaggcaaacccgcgccgataggaagaaaaccccagccgcgtagtctttcctttcgtcggaggcgactcgccaggcgatttccgctgctccaatccagcgccgctccaatccagcgctgttccaatccagcatacatccttcaatctcccagcattggagcctgattcaagaagttccaggtaatccaacattgaaatacaccgagtttgccgtcaattttttgaagcatttcggtcgattgaagtggatttgattgtaacccttattctccagctaaatgtgtgatttgtatccgtt

SEQ ID NO: 129522 - DNA, 351 bp, Zea Mays
tattgcattatattgcactattattgcatatttcatatttgcataatggttgcagttgcactgttgcgaacatgtagacctgcgtagttgcatactacttgttgtattgcgtttctagatcaacgttgatttgtggttgcggttgcttgctgttagccttagtgcaaatgtgcactgcggagccgaaattctacacatgttaatatttgatggacaaagagtcgatggtagatttgtttacaatgttccgttgcaacgcatgggtaccatactagtcccacgtcatcttttttataaataacctctcacagctatttcaaattaatctattgcacgcttaaaatgtaaaaa

SEQ ID NO: 129523 - DNA, 915 bp, Zea Mays
tatgacgaataccgatatccctgagatcctgaataacgaattgaagatcccaagcgtctgaaaacagaaattctttcctgaacaggattcccaataatatatgagaacttcttgttgagaatcggaaccgtattagcaccagatagcagtagcttaacaatgtcagcgtaagaaatactcttcttgccacgaatagtccaccaattagccttctcttcattaataaagttcatgtattcatgaatccagtttgggccaccatgattccagatattgaagaaggctctgaactctgcgcgatcaatagactttgaattgtagatatgaaaacccacgcccttggaaaaaaccgaaaatctgaaaacccgatcagaaagctgagtaacattaaagcctgtcgtagatccacctagggggcttggagaaggaagccaacataatccgagtcaagcttgaaaattcaacgaccaaaagaaatcaccaaccagaaagttgaggggaggcctggtcgcacggggcacaccggagaggccagacaacgccgaagagaatcctcaaaggcgatcctcgaccgaaaatccaacttggccagatccatccagaaggaagcgagaataccaggggcagagaagcgagaggaagtagatcacctcaacgaagaaaccaccggggagacgaggagagcacaggtcaggacgggaaggggacggattccagccatcataggtgctcttgttcttgatacatacttatgttaccccaatatccttttgattatcattatacgatgtttcttataatatgacttccatgttctccgattcttgatatgcctggtaggacatgggcatgtaaaatatggtggacaggtccgttgcttctttggtgttcttaatcgagatataagagaggcac

SEQ ID NO: 129524 - DNA, 924 bp, Zea Mays
gtttgctacttgggtaagcacctgtcggtatccctctatgtcaggggtgcgcggtaggctattggcgatatgagccaagacccctccaacctcgctcgatgtatttagtgcttgagcaaagtcagggaataggttccaagcaaggagtgggttctcgtgtcggaacttggcttcctgcttggcttgttcctactcgcgctcttgagcgtggcaacgatcatggcggcagaggagttgcggcgttctcggagtgctctttcatcgggggtttccccgccttagaagctttgtctcgggagacaggttgagctggatcctgctcctcggcttcatgctgacgtcgcaagttgcggcgcctgttccggcatcgacgtgcatcgcgctggggcgactcctcccccagtatggtgggctcgtcgttagaaatgggtgtgccctccactcccctggatgaagaggatatctgggaaggaccttggtgtggtgttgcgttctccctccatctcttttgaggccggagtggtcgagatggtcgcctgcggtgccttcaggttcacgctagaaccataagcacttagttttttttgctgagtgatctgagtccatatccaagtgggtgatgtggacaacagagttcgtcgcaccaggggcaaggcctcaatcgaccgagccgtaggtatcgagtcattccgaggtccacccgattttagcgcagtcttgcgtgggacgaaaacttgccgacgttctcacgctgctggtgggatcctcgctaacattgttcgtgacttccctgcggctgcttctagcttccccaggggagatttcttcccggatgggtccgctatgcggtgcaaggctcccttctagtaggcgatgcaagagatggacctgaactgaaaattttcttcggggttgaaggtgatc

SEQ ID NO: 129525 - DNA, 423 bp, Zea Mays
ctgggagatgatcgaaacactgccctcgtcagcttgaagtggtcccgagggggggagtgaaatgtgatcgttgaaaggtgacattttactgtggaattgttggtttaccaaggcgccttttcgtgtctataaaaactgttcatggctgcaacggaaagacttttacacgctggcttacagaaatgttggcttctccgcctaagaaactgatgcacgctttctgtttttcttgccgccggtgagctggcccgtgtgaagtagaccgcctgcctccgcatacggtacgttatgttgtcttcttctttgccaccgtctgtcgcgactgcgttgtcgaatacaccgtcgtcggagaagacagttagtgatccagcgacgacagtggagttgttaccagggcacactgttgagtttggaatatcaagg

SEQ ID NO: 129526 - DNA, 287 bp, Zea Mays
accctttgaagctttatatggacaacgatgtcgtactctgctaaattggtctgaacctggtgaaaggtacttctttaggcctgatatggtgaaagagactgaagaaaaggttcagaggataattcataatttgaagaaagctcaagctcatcaaaagagttatgcagacaaacgacgaatgcccttatacttccttgtgggagactatgtctacctgaaagtttcgccaatgaagggggtatcacgtttcggggttaaaggaaagcttgcaccccggtatattggtc

SEQ ID NO: 129527 - DNA, 625 bp, Zea Mays
cttgacatgcagcctcagaatggcatcctcagagttaacatcagtagaccaagctcgcttaaccatctccttgaaatcgtccagctttgtccagaacgattcaaatctgaagcctttgaagaaacaaaattgggaacagccttgcataataattgggcagtggtctgaagtcatagtgcaaagggacagtagatctgccgatgggaagagcccatgccattgagttgtcgcaaagaatctatctatcctggtcattgtagggtccacttgttcatttgtccaagtaaaggctctaccattgagatcaagctctaacagatgcagatcatcaattgtactgttgaactgactcataactcttctattgattgatcctttattttttcccttgctcttcttatcatgttgaagtctcccaggatcgcccattctggacgcatcacattttggatgtttcggagctctgacagaaagttcatttttcagtttctggctggggaccgtaaacccccgtgaggtcccagacctcatcctccactctcgagctgattctaaccaagatcgagtaggttgaagcgcatggaatgagatccatctcgaacaaatctgcgtcagaggccaaaag

SEQ ID NO: 129528 - DNA, 324 bp, Zea Mays
caggatcataccggcttactcaaatggatggcacggaagtagggaattcatggaatatagagcatctcaggaagttttacccttagcaagacttcaagagctatcggagcaacgtagtactctgtaattggaaaatacgtcatcaataaaaaatttcattctcaaaggcattcaaactgttggttatcaattgacttcgatttaattagacttgaaatcaacacactcactcgactaggggtgaccactataccctactaacggagcaatcggcttaagtcagtgatgacttaagatgatgcaacatgctcacgcttacttgac

SEQ ID NO: 129529 - DNA, 291 bp, Zea Mays
ggaattcagatatctcgataaactaggataggggtttacatcggccgatcgtttggaggagatcgacataggagatggtaaaactccaaggccgacttttgtaaacaagaccctggagaccgatcctagaaatgaaatgatcggtctattgaaggaatattcggattgctttgcttggaattacactaagatgccgggattaagccgagagatcgtagagcatcggttgcccattaagtccggtttcagacctttcaagcagagagctagaacatttcgtctagatcttct

SEQ ID NO: 129530 - DNA, 350 bp, Zea Mays
caatctttagcggcctttaggcatcgactaagtcttccatcgttagtgtctttagatcgagtagcatctcaattaagaccatgagctaggagtagttcttccggagcacacataacatcttcttcacaacacaagtgtcattgatggttccccgagtcctttagaccttgatcaatgcattgatacacaacatgaagtcatctatgggctcgttgtccttgaattggatattctcgaactcctgttacaactgttgagcatgggattcctttatgggatcaacccccacatgcatgcttttcaccacctctcacacctccttaaccgtcttcttactctctagcatcacc

SEQ ID NO: 129531 - DNA, 382 bp, Zea Mays
ctccaagcgaacctgcgccaaaaagtaaaaagttgaaagtcctcacccaccggccccattatatttgaccggccatagtgcctgagtttggcggggaaactacttcagctactgaagcgaaagaacctgctcctcccacgcagaagattgaagagccggctgtaatgccgaaggtaccctctatcgagttagctaagccgaagatagataaaactgaggagccaagaattgaaggaacaaaaatattagaagttgtaagcccttcgccagaagtgacagtgccgaaggcataaaaaggtcttgcggcaactcccaaaagaaaaaggatggcaagtgtattagatgtgctagaatcagtaaaggcttcaagccctactccagg

SEQ ID NO: 129532 - DNA, 641 bp, Zea Mays
ccttgacagcgtcggggctttgactccactgtttgagggacaagtagagccttcggggcacgtggcgagggttactgtgagccccctcttctcgcgcggcccttcgctcagtctttcttcaatggctgtggtcgaggatcctgtcgctggtacgggacaaagtccaccgtcggtgctatccctgcgctcaggcatggttaatcgtagccggataagtctgatcaaggtctggttcggcgttcgctccaatactagcccccccccccccccgagggaccggttcaactttgtgagctggtcccaaaatctgttttcgggagatggtcaaacgatgtcctcgatcataggttaaagtggcctcggagggtgccttgtaatgtgacagttgggatatgaccgttgtgttgtgtgaagttttattgtgtgactgttggcttctcgaggcatttttgcgaactataaatacttgtgcgggacatgcgaggaaacttttctcctgtttgcctagcggtttgtgcgtccttcagtcgacgcctccacatactcactcatgcaaatcatgccattacctcattcatcggcgacgacctggcccaggtgaagcaaactgactgccaccgtagacgatacgtaacatcgtc

SEQ ID NO: 129533 - DNA, 662 bp, Zea Mays
cggccggatgatgctacggctggagctcccaagtgacaggaacacaattggatccaccccggccatttcccctccatcaatttcaccgaggggacactgaatcgatcagttcacggtgaccgggcggatggacaagggggtgaacgtgttctgaccaaacaactacgaggacgaccgaattgaggctgggtaaaggttcacgggttcaccagggtccatggactcactttggtttgggcagaacaagacccaaagagcgggtcgacggtgagggggttacgacggcgctcaacagagcaggcacgcgtttaggtgaaaggattcggccgaatttcgattggttggcactaagagcaataggaggctaacaacaagcaagaacatgaagcaattcggtaagtactaacccgaggaatgctggccacagagaggttcttcgcggcggagttaagaacaggggagagagagatttggggctgcgcaagttctctggcggaattgagtcaattgcttaagcactgaggtgcgtaatgtggagaagaagcggagtccgcgctcaatttataggccgtcgaccggagttggagaagaagtgcagatttcagatgtgctggcaagctttccgcgcggcggattccggtgatggcacgggggtcgccgtt

SEQ ID NO: 129534 - DNA, 621 bp, Zea Mays
ggcgttgtagctcatcgaggacggcccgtagatggcggaggtgatcggcccacgtgctgctgtaaattaggatgtcatcaaagaataccaggacgaaccttcggaggaatggccggagcacgtcattcatcagtgcctggaacgtggcgggggcgttgcagagcccgaacgccatcacgaggaactcgtacaagccatcgtgtgtgcggaacgcggtcttgtgcacgtcttctggccgcatccggacctggtgatagcccgaccgtagatccagtttggtgaagaatttggcgccgtggagctcgtcgagaagctcctccacgaccgggatggggaacgcgtctttgatggtgagggcgttcagggcccggtagtcgacgcagaagcgccacgagccatcgggcttcttgaccaggagcacgggcgatgagaatggggagtcgctgcgtcgcacgatcccctggtcaatcatggcgttgcactgccgctccagctcgtccttgtgggcagccgggtagcggtacggccggacagccaccggtgacgcatcgggcttgaggaggatgcgatgatcgtgggcgcgcttggggggcaaacccatcggagctgcgaagagccccc

SEQ ID NO: 129535 - DNA, 486 bp, Zea Mays
gctgaatcagattcttaaaattagggctttctcccatcataataggtaagtcttcagaaacaatgtatttaataatttcttcacgagctaattgtggattgtaaacccaagtacttacagtgccgtccgcaacagagtttagttgagtttgcatacttgcaccaaaagttttccctgccttttttaaacaagctttgaagtgtcgattcaaatgcccagtgccacgagcagaatctgtactcaactcagttttacaatagtgacatatagcaatataactttttataccatcgtcgataatctcccgcttattcatatgcttccagcattctgccctagaaacagatggtttagcaccctttactggcacatcaacaccaatatccccatctgctggtaaggaactagaaccagactcagcccctctactaccatctactggtactggtaaggaaaaggaactagaaccagatacaggctcagtgc

SEQ ID NO: 129536 - DNA, 426 bp, Zea Mays
ccactagcatagatagggccgctcgccgtgagttgcaacgtgaccctacttatgatccacaagaccatgaggtaaattacacatacttaatttcgtgtgtgtacctaattaattagctgatttcacaatgtctattacatatgcatgatttcttgtgcattttattacatgaataggaggtcttgtctcaatttcgtgcgatgctcgaaaaagctgcggcacgataccaagacgcaccggaaccgacccaaggcgcaccggaaccgactcaaggcgcaccggaatcgaccgagacaaccaccgagaggtcaaggaaaaggaagcagagcgatcggaacagaggtgacaggggggctaaacaagtttcctgacaagacatataaaatcgcagacgtgagcccgaatggtcagcccctagctccagaa

SEQ ID NO: 129537 - DNA, 727 bp, Zea Mays
cggatttcatcgtagtagccttcagccctattaattggcaagccaaccaccgttaaagttaattgtaacggtgtagaaacaagagacttggcaccaataggattagtttattccaatgtgtgcagaataatgaataatggagtgttgataaaatatggagtgttgacaaaatatggtaaaaatgttttatgaccttaatatacgactagtatagtgcccgtgcgttgctacggcatgtcaattatttgataaaatgttagttcacaacgattacaatgttttgtgacaatatgttagggtgaaaacagacaatttacattgacaatactttcttaaacatggagttggataggtagagggagactggtattgcagccaagaagcaagaaaataagaaaagagaggcaaaagtagccacctactgtttgtcccccaacaaatacaagcgtgaagtatggagaagtcgttgaatgtaacataaagagcagaacaaaaacatgcagaattatcatccatctaccctttaccctttaaaagaagctgaagagagccttaggacatcgagctgggtcagcgggcgggcgggcaagggtaacccatccgttagattgggccgggtatcgggctgattcgatctggatagggttttcactggcctcgggtccagttcaagtacctaacctgctatgtgggctttggctcatattaggcgggcctttttcactgt

SEQ ID NO: 129538 - DNA, 463 bp, Zea Mays
cggacatttacgcaggcggagatactcctggcatccccacgcgtctgagccctgggacggtggttcatgtccgcacgaggactgcggcgctgaagacggggcaggttctcgtgttctggctcaaagccacgatcgtgtcgcagtccaccgacggaggctacggggttgtttacgacgccaactggccacgcgacgatcccaaaagcaccgtctacgtcacgccgccccaaatcaggatgatcgatccgtctccgtcgccgacaactccaccgcccaccgccgctgtcgccgcaactacgaagaaggagatgccgaggccaaccacggcagggaagagcttgcgcctcatccgcagcctctttcccgagatggatctcccctcccatgcttgacgatttaacaggaatcggattctgtgctcaggggcgaaactacatattagcttgtggatacacatgcaccc

SEQ ID NO: 129539 - DNA, 371 bp, Zea Mays
cgcaattccacaaccttcgcccgaaccttgcccaactcgtcaagggcgtggtccaactctgtgttgagcacggcagccaagttgaccatgctatttagcttgggattgccctcaccaactggtgaggcaatcacacctctagcactaccggtcgaacgacgagggtagtacttcaggtcgaggccatcagctaccccgctgaacaacaagcaatactgagaaagtgtccgtcgtgctgcatcttgcatggctgcctctgcagtatccttctcagtaatagaatagtgctctgagaaggcttctacaccctggagatcatcgtctggacgacgcaccaaacaagtagcctcccactggtccaggtataaccc

SEQ ID NO: 129540 - DNA, 555 bp, Zea Mays
gtcaccgtttgaggctctatatggcagaaaatgcaggactcctttatattgggatcaaactggtgaaaggtagttctttgggccagaaattatacaagaggcagaagaacaagtgtgaatgataaggtagaatttgagaactgtgcagtcaaggcagaaaagctatgctgatacccggaggagactactagagtttaaggcgggtgatcacatgtatcttaaggtgtcaccaatccggggtatgcgaagatttaaagttaaagggaagttgtcccctcgctttattggacccttcttgatcctgaagcgagtgggagaagttgtataccaactggaattacccgatcatcttgcggatgtacatgatgtcttccatgtcacaattgaagaagtgtctcagggtacctgaagagcagttacctatggaggatcttagtgttcaagctgatctgacttatacggaataccctatcaagattcttgatactttaactcgtgtcacaaggagtaaagtgattaaaatgtgcatagtgcaatggagtcatcatggagaag

SEQ ID NO: 129541 - DNA, 453 bp, Zea Mays
cttgtagtttcttagtgcaacttcttgcatcttttatgttgggtggtgaatggttgacacttgagatagcattcacgcttggcatgtcctcctcctcctcatccccttcttgaaaaggaatcatccttgactctgattcttctagtccaaagaatggtgttaagtcagcaacgtttaaggatgtgctaacaccataatgttcaaggagctcaatcttgtaggcattataattgatcgtggtctaaattatgaatggaacatctcctcgaggcatcaacctagatttactcttctttgggaaaacaatatttgcaaagatatatgcaaactaaacctctaagctcaaatgtcaccttcttacgatgcttgtttgcacattcaacatagtgcttggatcttttatttatttcttctttgacattataatgaatcttcttacatatgaagcgcgct

SEQ ID NO: 129542 - DNA, 1256 bp, Zea Mays
ggttgatggaagaacttttgtgagcaaatattgggttcccaagtgcaagtggctttgtggtgggttgacattttctactgatttcaagattttgcctctgggtggttacgacataattttgggtatggactggttggagtgccacagtccaatggaagttcattgggcagaaaaacggttggagtttgactataaccacagaagggtgcagttacaaggagtgcaacccaaaattcagacctgctacagtctaacttgttttcaattggcgtcattgatcagacaggaggctgttgagcaacttttggagttacatggagtggagagtggggatacagctgcgacactggttcctgagtcgatcaagcgagtggtggaccaatatcaacatcttttcttgaaacctactggtcttcctcccaagagagcagttgatcatgccattgagctcttgcctggtgctccaccttttcggcttcgaccttatcggtatactccacagcagaaaaatgagatagagaagcaagtcaaggaaatgttggatagtggtgtgatacagcagagtttcagcccttttgcatcacctattttattagtaaagaaaaaagatggtgaatggcgtttgtgtgtggattatagaaaattaaatgcttatacagtcaagaataggtatcctatgcctatttttgaggaaatagtggatgagctgcaaggagcatctatattttctaaattggatcatcggtcaggctaccatcagatacgcatcaaggaaggtgatgagtacaagactgcattccaaacacaccacggacactttgagtatagggttatgccttttggtttaactggagctccggccactttccaaagttttatgaatagactgctggctcccttgctacgaaagtgtgtggttgtctttattgatgatgtgctggtctatagtgcaactcttgaagaccatgtcagacacttgacacaagtatttgagttgctcagccaacaaaaattacatttgaagcagtcgaaatgcttgtttgcacaagagaaattggaatttctgggccacatagttagtgcagctggcattaccactgacccaaagaaggtggaagtcattcagaactggcccataccaaaatcaaccaaagatgtccgcagttttttgggaatggcaggttactatagaaaatttgttgcccattttggaatcatcagtaggcccctcactactttattaaagaaggatacta

SEQ ID NO: 129543 - DNA, 521 bp, Zea Mays
aaaggcccgaacacgctctcccactgagctcccaaccccagcagaaaaaatgccaaaagtctactgtttccctgagtaatgcctcctaaaaccccaaaccccaacgccacagaacatgaatgaaatagaaaaagaaatttaacttcttttcagaaaattgggatatcacactctacccccccttcaaaagaatttgaccactccaagcaaagcatccaaggtaccccatatagcaccaccattcaaaacatgggtccattattggtcttaattaacataagaacttctacctcggactaattgtctaaggaaactacacaaccagatatccagcatgaaacaacatgcaatgtagctcaagcaagtcatagatgcaatcaacactacgatttcacaccattgaatttggatgcggctatacatcaacatcaatgtcttcaaataacactcttttatgaaggggtaatatgcactaagcacaacccttaccagcttcaacaattcattttaattcaatggtg

SEQ ID NO: 129544 - DNA, 840 bp, Zea Mays
gtgaatactccaggtaataacacatagatcgtggcttcacgcgttgggctacgccatcggcaaccacgaacgagataaagaagacaacaggtgcaaatggatctgagtccaagcttggaaatggaggcagaggcaagaagggaaagcaaaagaggctaatggcgaccagccaagcccattgccatttcttcaaagagctcaccattataatgtcaaaaatgcaattgcgtggttcgagttgccaattctttgaagcccactgatggcgagtccaaaattgcaaaaatctcggcatgacaggacaggctgacgtctaacgggcctatttcgcctatttctgaccagctaagcatttctcattagacttcatctctttactttacgaggcggatgcatgcagtggcgatggcggaaccctcctccatacatgtacggatgactgaggtcgctggtagcagattaggcttcattattttagttaattaatgtccatagtctttttacagtttggtaaaaaaatcactattcgcctgattggttcacagtgcccacacagccaattcgcttgcagtccagtcggtcggatacaaagatttccggcgtacaagctcatgcagacatataacattaaaataacttattttacatctatgcatacaacccactcctcccacatataggtaaacaaacatatgcttagataaagtcaacgcacacaatagtctaggataagactatatggccaaccaatcagacaatatataaacacaaacattatgaatggttgccctactcatgacaaaacatctcctcaactcctcttatcaatctatggcggca

SEQ ID NO: 129545 - DNA, 403 bp, Zea Mays
ggcaggttggttggattccttcatcgcaatctggtgatatctcgattaagcatcgaggaagctcaacaccatgcaatcagaggtggagtcggccacctggtcaatgcgtaggagggaaaacagatccttcgggcatgccttgttgaggacagtgtaatagacacacatcctccatttcccgctcttctttcggaccagcaccaggttgactaaccactacggacggtgtatatccctgatgaacctggtcgcgagaagttttccgatctcctcctcgatggctctccatttctcttcgttaaaacggagtagtcgctattttatgggtttggagctggggattgatccatagagagtgaccgacgacttccctcaggatgcccacatgtcagaagctttccac

SEQ ID NO: 129546 - DNA, 425 bp, Zea Mays
aactttacctattctcattgggggagactttaatattttacgatctccatctgagaaaaataatgatagatttgatcatcgttggccatttctattcaatgtcggggcgaaggtacacctgggctaatactagggataatctgacttatgagaaattggattggattttggtagctatagaatgggagggaaattccctagagcatcggtacatgccttgttgcgaaatatatctgatcatactcctctgcttcttagcacaggagttgtaaccgcccaaacaattccttcgttcaagtttgaattaggatggtttctgtggtatggttttgtggatatggtaaaagatatttgggtaaatgagacaagaggttctactccgttggagaaatggcaagccaagattaggaaggttcgccaacact

SEQ ID NO: 129547 - DNA, 774 bp, Zea Mays
acggtaaggaacacctcgtactaatttcttttcccgtcacttcttcgtgttgcgctagtagctgtggggaatgggcgctcggaagaatgatggtgctcgctccggcaagttgcgcagtcccgccagtttgatggggagcggctgtattgagtggaagcgtgtggtccttcaggtcgcgtggctgatatactgccgtcgtgatctgtgcgccgtggaccgtttcctgtgctcgatgtcggccgaaatttgtttggggattgagtttgggaagtcgtcaatcccggcgagggccgagtgaatcggggtatggcgttcgtgagggccggattcacgctctccggcgagggcgccgtcgttcgggtgtgctggcgcggccctgtagtgcgccgggggggaagaaggcgcctctgccgtttgatctgaacggacgatagagattagatgtggctcacccattcggcttgggcgactactatccgtccgatcaagatcggatgatggacatcgctttaggattcattaaaccggcgccatccgatcgttgatccaatgatcagcggtgcatacctgttcgcatagggagaggatctaatcctatgcgtcaatctctaatcggacgatcccaggcgctgcataccccttcgccgtgtacatttattaaagagcccctctgttttcggaaaaccaacccgcagtcctcgggaactatactctgtgtcttagggaatttacacggagaaccctgctattttctataatttaggcccagtccag

SEQ ID NO: 129548 - DNA, 1907 bp, Zea Mays
cgcgtacgggaggttcggatccctcgcggatgctctcctgttgttcgacgaaatggcgcgccccgacgcggtgtgctggaacatcctcatcactgcatgctctcgccgtgggctttttgaggacgcctttattttgttccggtcgatgctctcttgtggcgtgggacagggcatgccgactgcagtgacggtggctgtaattgttccggcatgcgcgaagtggaggcatttgcagaccggcagaagcgtccattgctacgtggtgaaaactggtttggaatcagatactctgtgtggaaatgcattggtgtcaatgtacgcaaaatgtggtggaagtagggtaatggttgatgcacatagagcattttcttctattcgctgtaaagacgttgtttcatggaattcagtcattgctggatatatagagaatcagttatttggagaggcgcttgcgctgttcagtcagatgatctcacagggatatcttccaaattattcaacagtggctagtattcttcctgtgtgctcattcacagagtttgggaggcatcatgggaaagaagtgcacagtttcgtggtcaggcatggtatggaaatcgatgtatctgtttctaatgcactgatgacacattattccaaagtgcttgaaatgaaggatgtagaatcaatatttactagtatggatgtgagggatatcgtatcatggaacaccattattgcaggatatgtgatgaacgggtatcaccatagagcattgggcctgtttcaggggcttctgtctacaggaattgctcctgattctgtttcttttatcagtctgctcactgcctgtgctcaagtaggtgatgtcaagacagggatggaggttcatggttatatttttcaaaggccagtacttcaagaaacatccttaatgaatgctcttgtcactttttatagccactgtgataggtttgatgatgcttttcgtgctttcaccgatattctgaacaaagactcaatttcatggaatgcaattctctctgcttgtgccaccagtgaacaacatatcgagaagttttttgtactgatgagtgaaatgtgccgtggggtaaatcagtgccagtgggattcagtcacagtcttgaatgttatacacatgagtaccttctgtggtattaagatggtccgcgaagctcatgggtggtctctaagagttggttatacaggtgaaacttcagtagcaaatgctattctggatgcttatgtgaagtgtggctactcacacgatgcaagcatacttttcagaaaccacgctgggcggaacattgttactgacaatataatgatttcttgctacttgaaaagtaactgtatagaggatgctgaagtgatcttcaaccatatggctgagaaagacctgacttcatggaatttgatgatccagttgtatgcacagaatgacatggatggtcaagctttcagtctgtttaatcacttgcaatctgaaggcttgaagcctgatattgttagcattgcaaacattcttgaggcttgcattcatttgtgttctgtacagcttgtgagacaatgtcatgcctacatgctcagagcatccctagaagacatccatcttgaaggagctcttgttgatgcgtactcaaaatgcggcaacataaccaatgcatataacatctttcagatcagcccaaagaaggaccttgtcacattcactgccatgattggatgttacgcgatgcatggaatggcagaagaggcagtagagctgttctctaaaatgcttaaacttgacattaggccagaccatgtagttctgaccacacttctgtcagcatgcagtcacgcaggcttggttgatgctggaatcaaaattttcaagtccatcagagagattcacagagttgtac

SEQ ID NO: 129549 - DNA, 395 bp, Zea Mays
gttttacagggaccttctttaaatcttgttgggacataatcaagcacgatgtgatggaggcagttaaggcattttgcaaccttcggtgcatgaacctacaactcatcaactcggcaaatattattctacttcctaaaaaggagggagcggaggcagttagtgattttagaccgattagcctcattcactcctttgtcaaaatcatcaccaacacatatgcatgaaatcgtctcaccatgccaaagtgcgttcatcaagaaacggactattcagggtaattttatggccgtgcgtagtgcagtgaggcgctaccaacgcatgaacataccctcgctcttcctcaaattggatattgcgaaagcctttgatttggtctaatgggaataccttctctc

SEQ ID NO: 129550 - DNA, 847 bp, Zea Mays
accagctggaccagtgaattttggttgagataccatcttcagagatttttgtcgctgcttttctaaaattttctgttgtatctgtgccaacctagcatcgcgatccactgtcgtgggcatgtgcgactgaactgaaccctgtagttcttgtttcaatcccttgataaaatgtgccacaaacaatgtttcatccaagccttggttatgcatcgcagttgcatacctcacctcatcgaactccttcagatattcctccaccgacctcttttggtaaactgtcatcaggttgttcatcgcctgtgaatattcatccaccccaaacttcttcatcacagcatccacaaattcctcccacatccctaatccatactgcaacttaaaaatctgaaaccatcgcaatgcattctcgtccatatgtagtgaggctgatgtcacccagacagcttcaggaacacgatacatcgcaaaataatcagcacacttcctcaaacagatcttcggctccaatccatcaaaccttgggaaggtccactttggtataggcataggtggatactccttcgcatctccaccaccattcccacatcctcgattgcgaataggagaagaactgcgataacttcgattggcgttcgactcgtgatgtcgaggttccccgcgagctcgctcctccgtcaccgattctaccccttccaagtcccgcgccatccactcgagtcggatctcggccacctctcgtcccgtcttctccaactgttgcgccagatgaacccactcttccgtcgccttctgagccacagtcactgccaattccgattgcatcattagttgttgttgtacctcctcc

SEQ ID NO: 129551 - DNA, 822 bp, Zea Mays
ataaaaaatcactttctccaaagtgaatcaaaattcagcaaaactccctctcaaaacaagcatgtcaagtctcagcaaaaacgaatcaaactccccctgcaaaatgaatttgtgcgctactcactctcccccttgttgacaaagcactccatcaagataaatgcaaagaaccaatttagagaaaaacatgtgagagagcgcaagtagaagcttccgagacatatgccaaatacttataaaaactaactagcgactcagagaaggagcagcacaatgatatgaccattagaattttagaacttaaatctctttgaaaaatcaatgagccaggcaaaaacatgcatattccaaaatcagtgccaagctgaagacaaaacatatagcaagctcacacgacggatacgcagcttcgatcaaagttcactgccacgcccacaaatgcattcacatgtcatattttagtctggcttttgcgagcatgacaagcagggatatgggaagcaagagttgtgcccagccagttttgtttaactttgattatgagcgagaaccagcagggacatggggaaatcagagttgtgcccatatttaaactctcagtaagcaagcagatcgcgagcgaaatagcagagatatgggaattcagagtttttgctcacaaccatactatccattcctgagttaaaacttgcattgtgagttacatttgcagtgaaaaaccattaaaagaagctgacaaccaaaccatgagcaagatatatgtcaagtattcaacaagtcactaaatccagagaagcaggcatagcccaacataaatttttg

SEQ ID NO: 129552 - DNA, 475 bp, Zea Mays
gcggaggtcgagcagacgcatgcgcagctcgtggacacgtactgagagctgggtgcgcagaccatcgcctttgaagcatctggccaagaggtgggcctccgcttcctcgagtggctacaggaggagctgggggtgctcccgacaatcgtgacgggcctcatgtcctttgcctccctcgtcacctgcgagggggccgtgaatgctctgtcccgcgaggggtgtgggcacttcgaggtcttcgaccagtcggacgaaggcttcaaacgcgaaatcttctaggtcgaggacctgattctgaagcggtcggcgggggcgctcttcgacaggatgtggggccctcacggccgagagacggtccgagagaggtccgaccgggcgattgatcaggtaaaggctcatctttgtgtggttatatgtgtgggtatgtttgggtatgtgtggttttgctgaaggaatgtgctattgctgtagatgg

SEQ ID NO: 129553 - DNA, 549 bp, Zea Mays
gcatttgagaacaagtccccaacagctgcagacctgtatcactgttgtctgtaacactgaggacttaaccccatgcaaggttactgtggtgtcctgaagaggactactgagccatttttgtgaccagtgtatgagcataggactgtgactctccaaccagtccatccccataataagatcatatgtggacaagggtaatactcttagtgtggatgagaatgtaaccccactaatggaccaagaagtatccacaatatgtttcgcacagctcatgtaagacccattagccacttgaaccttcattggctagtccatagtagaaactgcaggaatagaagaggccacaaccatactcaaaaaggaatgagaactcccagaatcaagcagtgccaagatatccatgcctgctatgtgacccacaaatttcatagtgcgaggggcctcagacccatcaacagctgctttggacaattgcaacgcattaatctcaacattgtcttcaggcacctcggcacattcggccactgctttagtattggtgcattgcac

SEQ ID NO: 129554 - DNA, 388 bp, Zea Mays
ggactcctgaacttctcatctgataatggtcgtttcaaactatcaagctcataaatcaagctcagcatcaatgcctcgagagtgatctgacgtttactgatcctgggtagaggaccacgccaaggatgaattttacatctatagcatctcccctttccttttttgattttgttctgattttcgatgctctcattgtggctagagatagagacattgctcaaagcattagtgctgacagtttcgacattgggtgtcgatgaactagccagaccgatttcatacgattttctccccactgggtctaggattgcttcggcatcaaccttgttcagcaaacttcccatgtctcccagtaggccgatcatcgtatcagccgatgtgtttggtt

SEQ ID NO: 129555 - DNA, 525 bp, Zea Mays
ataacaaagatgaagatggtttgtagggctacaactttgctgcagagcattggttatgttgccatatgaatttgggagaaaatcgagctcaaagatggtctgtcaggtcaactgaatacactccacgatggtatagtgtctggattaggctgccagctcagaatctcgccgccggcggtccgcgcgaccggatttgtgctggtcgccgggattcgtgccgcgggtgtgtggatttcgctcaccatgaaaagatctcgtcgcggatgtgtatgagctactgtggcctcgctgtcccctacattttgcactggcgacgtggccttatggccgtcatcggagttgccgtgcttcacagtgactgtgccacgctccgagcctttcaccatgtcgtcactaaccgcaccagctcaccgataaccgctgtagctcctcaaccggtgagtgccacggtaaatcgcgccggtgactcacccccttcctccgaccgccgcgcgtcaccactgcaattccctgccaccgctgttg

SEQ ID NO: 129556 - DNA, 723 bp, Zea Mays
ctctgtctactgaacaaaatggatggggatttgtggaacactcaagtacgttttgcagggtttagttctcaagaacatggaatattcagatcatgagttaatgtggactatgggtttactttgacaggacgttaggctacaggttgttaggctgtgtgcaaaatctagagaagctatttcgtctcctgttcagcatctcacacttcattatcaggtacatcctattgttgcttttgtggaaattaatcttgctatgaatgtcactgatgcttatgttaactcttgcaggttaggcaccttgatacctctgaaaagagtgaatttcacaagttatagcaactgaaagatgaacaaggtaatccatgtttaactattgtgataccattatgccacaatcaagcattgtcgagggatgtgatgtgcaaagattattgagtgagtattccgacaagcatattctactattacaggtgaattgtccagtagtgatgagaagaagtacaaggcactaaagcgtgccactgaaagagagatactgcagagtgctgatgtcatttgttgcacctatgtcggtgctggagatcctcgtctttcaaacttccgtttccgacaagtaattattgtcgcctcatgttgtctccggttagctatgattcctgttgtgtaatattttgatgcaacagtaaactttattgtcaggttcttattgatgagtccacacag

SEQ ID NO: 129557 - DNA, 435 bp, Zea Mays
gtggaattgtgtgctcagtgcgcagcacgccactatctagatggtggttctcccgcccctgtcaggattcaacacccttaccgccccgtggtcgcttcgactatggtaccccagactgcaggacccagatagatttggatccatagatcgacatagtcggagtctgtaataatgcttaattcagtgtcttagtctagtcagtcttagttagagttagtttgcttctcatatgttgggatgcttgtcatgatgaacatgtaatgaagttggatctttgtaatgattgtcatcaaggtgtgggtatttcctacaacttggtgtagttattaataaagtcaattatttagttgggtaatccatttatttccactttcctctttatttgagaagctatcagtgaagatgatcatttgttcagtgctatggagatttccg

SEQ ID NO: 129558 - DNA, 908 bp, Zea Mays
ggggggtaagataagggggggagattagggttccaaaccttgggttgaaattttgggatgttacaaacctaccccacttaaaggaatctctccctcgagatttagactagatttgagaaaagataagggtattccctcctcaaagagtcctcactctcccaggtagcttcctcttctccttctctgctccactgaactttacagagtttcacttctgagttgcgggtctttcggactactgagtcaagaatctttactggcttctcacggtactgaagatctttctgaatctgtattgcctcttcttcgatgtgactttctggtacttgcaggcatttgcagagctgggacaggtgaaacacattgtggatatcagacatggattctggtaactcaagatggtacgctgcgggtcccactctgccaatgatgggataggggccgatgaatcgcggtgctagcttccctttcacttgggatcttctgacaccacgcatcggggagaccttgaggtagacgaagtctccttcctcaaatctgagttctctccgcctgttgtccgcataactcttctgccgactctgagcttcaagtaatcttctgcgaatcagggcaactttctcctcagcctctttaacaaaggcaggtccttccagtgccttttcccctacgttggaccacatgagaggggtctggcattttcgtccatacaatgcttcgaacggtgacatcttgatgctgacctgatcgctgttattatacgagaactccgcataaggtaaactggattcccaacttctatcgtaggttaacacacaggctcttaatagatcttcgaggaccttgttgaccctttctgtctgcccatctgtctgagggtgataggcggtgctgaagtctagcttggt

SEQ ID NO: 129559 - DNA, 773 bp, Zea Mays
gaatccgcggccctcctctgcttggaacccgtggcaacccggccccgtcctctgtttctccgctgcatctaatcactgtcgccgagagagagagatagagggtggcggtgtgtgccgccgggggcctccacggttgtggttagaaacgagtcgatgatggggcctcggggcatgtccgagatgtcgcgaagccatgtggcgtgtgggcgatgtggtggctgtgcgcgggagccctagttcaggctgaattcctcaccggaatcatgttggccgtagatcagcttcgattggaaacagcgttgtcgacaccacggatccaaggtaatgcaacttgcttaggttctccaccatacctacattgtgaagtcgttcaatttacaaattggagcaccagggaaccccggcaccggtcgtcggtgggcactccgccgtgttggccgcgcggctctgtcgtggctgggaagaagaagggctcccagccgtcgttcaattgatagatggcctagattggtaggcgtattctctcagctagagttgatctgtgccgtaggagggagatcgggcggatccaggttggtctcgggcaattaaatccaaatcgttgatgtcagatcgaaggggcggggctggataccggttcagctaaaaccgtgatttaatctgagccgtccaagtcagatcgggtggctgagtggtgtccataccgctccggccggggtatttcacaaataagcccttgtattctaacagaatcaacccgcggtccgtcctgg

SEQ ID NO: 129560 - DNA, 533 bp, Zea Mays
ctgactcggtccctgctgaaacaatggctgttgcaactatcctagagcttgaagaaaccgtggacacccgaaagcctgagggtactcgcccgaaacgtctctgccaggttagtcattcaattgcacctgccgagaggaagaagaagaagagacgacttcggcgagtatcgtgtctggactagggtgctggcccttctgctcctgctgctgaagaagtactggtggaaatctttactggagctgaacccaatgggtgtgaccctgctgatgctgatcccagtgggtgtgaccctgccagagctgaacccaatggatgtgaccctgctagagctgatcccaatgggtgtgaccctgcaagagctgatcccaatgagtgtgaccctgccagaaccaatcccaatgggtgtgaccctgcgccgtttattgtccgtattgttgacgaggacgaagaagaagaagaggaagtcccattgatttggaagaacggtcggcgttacagagtaagtggggggaatagcgatattccttctcta

SEQ ID NO: 129561 - DNA, 604 bp, Zea Mays
cgcgccagggattttcgatgggccgctgagcgcgccgcgtccaggtccagcgcccaagaaggaaattaggaacaaattattggataggataaaaagagaaagaattagatcctaaatttaggagtttgttagatcctaaagtttaggagtttgtttcagaaatagattagtggctagaatagaaagataagaaattagatcctaaagtttagggggagttgttgcaagccaaggctatatatatctgtaatcggcacttgagggaattgaacaagaatttagtcatccagtcgtcttcctcttttccctgtcaagccgacggctagggggtataaccctgccggcgaagacggaccgagactacgagttgcggagtcgagggccagctaccttaggaaccaactcccttgacaacctggtatcgtcgtcacgtcgatcctcttccactcattcagatcagtcctccacagccaccgcgcccaaactcagccatccaccatcaccacagtcctctactgcctccgccccgcagccgccagccatggtcgatcccactatgaaggacatgatggagatgctcaagtccatcaccacggagatgtcc

SEQ ID NO: 129562 - DNA, 275 bp, Zea Mays
gtggaagtatctctaacattgcaagacagggatggcgggtggacaacattaagtagttagtggggctagccttgaactttgtcggggtaggaaggttgaatacctagatatccctctgaaggatagcatcaaaggatggcactttgaatggttcactttagagaatcacaacaattccttgcctgctcactctcgaaggcagtcggatgtgcgcgtgtctgtactatgctcaagcttgacttttggcgttcgtgattatttattattgaattgag

SEQ ID NO: 129563 - DNA, 456 bp, Zea Mays
cgctggggacctgccacagtatgtcgcccttctcgggtagctcgaggtcgcgctccacttgctcaccgacacctgtggccttgccacatagtggttagctgacattgtcgcaacactggcttggaagagaacacgtgaggccaagacgggcgacgatcacgcccgcatgcatgactcgtgaagctagggcggctctggcgcacccgttgggcagcagccacaccttttttcctcctgtacacgagtcatgaagatcaataaagagaggtataggaacgaggttatagtatgacgagtgggtccaaatgaaccagtaacggtagtagatggcatcagtgacggtgatggctttgaagggatttagaatctaaactaatggcatcgaaggaaacttataacttttgatggcatatagagaattggtataggttatgatggcactgagggaattttctc

SEQ ID NO: 129564 - DNA, 465 bp, Zea Mays
atacattatctttttaacaaaattcttcctgatgatggtagagaattgtttcacattcatgcatttttgctgttagcaaccaagtatcatagttttttaagaagtatgataatctaaggtggtctattaaaaaggatgaaatgagaaccatctttatgcaatttcctgaagcttatgttgccacaattactactttgtagatagatggatcagttgttgaggacatttcctgaaagcacaaagttaggacaaatgtactgattgaaagaacactcctttataaccacaccacaacctatgatcatcccaaagaagacccaagtaaacagacatgcttaaataaaagtcagaaaagacactttaagatttgagatttgatcctgtagctggtcaggtggttcttaccgcagagcagatgaggatgattaaatgtctgaaatttcttgaattcttgagaaatcggcg

SEQ ID NO: 129565 - DNA, 400 bp, Zea Mays
gctgttgacggagtccgattcagaaggggaaattggcatggccgttgcaacggcccgagctccacgcccgtttgttacagtgaggggaagaagaaagggatgacatgtgggatcccgcggtcagcgtcacggttttgtctcctggacgcgggcgcgacgcggcagagggtgagcagagcgactgtgtcacgggcccagtggtcggtgtcccaacagcgagcccaagcacacgtggtggggagtaatactagcggctagggtttagctcactggatacgcgcgtgcgggggaagcagaagcgggccgcgcagagcacagtagatgggccgagcgtgcagggttattggccgagaatggtggtttcagcccaggggtgattctctcttcttcttcttttaat

SEQ ID NO: 129566 - DNA, 410 bp, Zea Mays
gaagagaggtcatcctcaggagttatatctggatgtatctagtaaggatgctcctgttccttctgattttcctatgcctaactatgagtgtggcagatcggcttggcggcttgggtatgtcaatccaaacatccagacacggctgctcgttgcttctacctttgtggcggttttaacgtacgtagcttataacttatgatttaatattgtttactagatgtgtactaatgcttcgttccattttttgtaggagcacctgaggtgtttctttttccagtggatcgacggtcctgataaatttgacactcgatatcttcttttcgctaattggttgtgtggaaggaccagtcatgcacgttttaagcgttgggttcctctttccccgaatcctccaccaatgacggatgtgg

SEQ ID NO: 129567 - DNA, 287 bp, Zea Mays
ctcgagtggagaagctttatatgtccgtggccgcagtgattagaagaagtcctactcaggtggcaaaggaaagggaaagaaccagaggggtcactccaagtcaagggggccatccgatgaattgttttgcaaatactgcaagaagatgaaccatgagaactgttacaaattgcagaacaaggagaagagaaacaaggataaggggtaagaccggtggtactgtctctgttgcctccgaaaatagttctgataatggtgatgttcttattgcctttgctagatgtgct

SEQ ID NO: 129568 - DNA, 718 bp, Zea Mays
agagacgcaacataattttatcatagaacgggtggacttgaccttctggtcgcactttcactcgcacattgttgagcaccaattcttgaagctcttggtacaaaatacgtcgattatttcgacgattttcacgcttgcgtttgtttactgatggaacatatgcagcgataggttggattgatggtgttggtagcaatgacctattctgttgagagcttgatgtagttgcaatctgagtgggtgcacttataggtcgttgaggcggtggtattggccctcttgtcctcgtgaagcaaatgtaattgtgggttcaccatgatgctgctcccgccttggcgacacgggtcgccattcttgacgtgcttgcttgcagacatgcgatgacgatgatgcatgcctagtcttgaagtattgatgagaacctcttcttggagccaaagttctttgatcatattgaggacgataacccgagatatgttgcctcatattagtttggcgagatgactctggctcttcatgataacggtcccgagttcggtgcatagacccgcccccggctcgtgtgtaattctcataaggacggctaggcctgcccctgccatgggtataatgttcattttcatgagaatgaataggtctgctcctcgcatgttcattcacatgagaataactaggcctgcccccagcatgtgtgccttcctcacgcccttgtaattgt

SEQ ID NO: 129569 - DNA, 342 bp, Zea Mays
gtgaactccttcccacctcttgtgcccatttcaaattcttgtgtaaatcttgtgaatcctagtgcatggttgtgtgccccagtgctccattgaatcccctgcaggtttttagctccttcgggagggtttcacatccccaaatagccttttcaccgaaaccctaaaccttcgcacatcacatgctcggtgaaatgcccaaaccagccaaaaatgctccgattgaacccaaatttttcaagcaccttcacaacacctccagtaacatattcgccaaatttcacgccaatccgatataccaggcttcaatttcactcaattccccgtttcgagcgatcgtttccg

SEQ ID NO: 129570 - DNA, 991 bp, Zea Mays
aacgagatcaatgactcaccgactaaatcctcccggtcgcagagcagcaaggcacgtcctcgaatcaccgatttgcggcaccctagaaaacacactggtaacttgttggccaaaggaggggcgatggtcaactgacgatagcttgcctgcaggcctgtccgggacgccgggcagaggagggtgcaagcagggggcggtcggctgcagggttggcctacaagcctggctcgaccgaacagaggaggggtactacgctggaatgtccgagctttcaagcgtggctatggcatgaagaggcactacgcttggcgagattgcgtgagtggctacatgactgcatctgggcgagaggcggaatgggaagccgttagcgctgttgagcctgagcactgccgccgtcgcctgcatgtcgatcccgagtaagggagggagtggaagatgagcgacgacgctgcgagaaagatgaaagtagggagtagaagatgagcggtgatgaggcaaggaagaagaggcgctgcgagcaagggagggagcagaagatgagcgatggtgctgtgaagatgatgaagaggtgttgcgagtaaaatgatagatgaagatgggagcagaaacgggaggtgactgtgtgccttcgctcgacgtgatgctccacgcgctgactgtaccggtggcgaaagagtctttgctacaccgttcaagttgaatcgaacggttgttgcctttttcgctgatgtggatagatcgagagtccatctttgcttccggcactattatataagaatgacataaatatactctctcaattataaaagctaatatgtggtgactataactaaagctataatttcatatgaaggtgtataccggcgaagagtaccactgttatagaaagtggtcatctgtaacctcacgtcttttggtattcgtgtgcatgaaaagcttccgaaggtcttaatgtaccaaaactttagtattatgtacatgattgttt

SEQ ID NO: 129571 - DNA, 519 bp, Zea Mays
gcatcatccttgagggctaagttctctgcagtagccgcctctaaggctgacggtccctcaattacttccatgggagcaagacgatccaagtcagtttcctgaccctcaagaccgcgctctaaggttgatgaggcgcgggacgctgcccgggacgatcccagcccggcgtcgagcacattagcacaaacctccatcacaccatcatccactggctctgacagtaggtcttctggaaccatatcctcaagagtctgatcgaagtttgccagggacaactcttgtagaccaatgagggcagacagagcaggagaaggaactccactactttccccactggcgacatactgccgactgttcttccgagtcaaagggacttcatcttcttcctccccgtcgttttcatcagcaacacagacaacacactcattggggtcagcagcagatggagcacccccattggggtcagcagcagatggagcacacccattggggtcagcagcaggtggagcacccccattg

SEQ ID NO: 129572 - DNA, 497 bp, Zea Mays
cttgctcatgattataatctttaggggatgtgatagtagggagaccagaacctgattcacctgcatttgaaggagcaaagttgagaagaaattgatctagtttcttttccaaatgctttgaatatgctccacaactcttcatatgcctcgataatgttgatgtcgttgacccttgcatgtaggcatacattttcttacaatacttgcactttgccttcaatgccttctttccatcctcggatgcatctccaatagtcactttatcaaaaacttcccacactttggatttagagttgttatcctttactttcacccccttacgccttttcttggcttttcttttgtcatcattatttgattccacaacatcaatctctctcccacctaggacagtcatttcatcctcagacatgtcatcgttcttgtcaaatgaatttctttctgaatctatctcattactttgattcacccccttcccttgcacaccagattccata

SEQ ID NO: 129573 - DNA, 586 bp, Zea Mays
ctcgccttctccaactcattgtaagccacatgaggaacaaagcggaccattttgttaaagcccacttcatactctgtgacagacttcttctcatgcttgtaagattgcaaatcaatcttcattttctctaggaaggtgaccaggtagaacgtcctctcaaactgcctgatgaaaacatcctaggacaggactcctggtgaggaagagtgagccgcctgcatgcctctccaccaaatttgagcctcccccttcaacagctgtgtgccaaaacgaacccgatctccatacacaatctcgaaaacatccatcttatcctccacaacagtcagccaatccgctgcctcaaccggagtaccactgccatcaaaggtgaccaacttcatgcccatccattgcatcagagagagaccactgacaggaaggggcacctcagccccaccacctggagcagcacccgcagggacagcgcccccgggcactcctccacctctagcaccctgagcagctccagtaggggcaacaggaatagcttacctcagaatggccaactcctactgcatggcctgcatcgcggctaacattgccg

SEQ ID NO: 129574 - DNA, 438 bp, Zea Mays
cgcaccggcctcggccactctcccttccctcccctggacccaatcaagctcagcgccgccgccttccttcactccggtgagctctctccctcccctctccaatagcttagagtcaaattatagtagttcacaaacttcaccacttcaccacgggcacagaacaccattccttttccccctatcacgcctagtagcctcgccggcgacctcgccgccgtggagcccaccaccaccccatggttagccactcccagaatgccaccagccaaattgaccccaccacatgtgttgcctagctctggccttgctagcccacctcctcgatcccggagaaccggagccacggcggaaaaccgccgttaaacctcgttggcggtcggttcttcccgaccccggccgattcgcccctccccatcagccacccgacgccgtcgaccc

SEQ ID NO: 129575 - DNA, 1419 bp, Zea Mays
gccaaaaatagccttaccggcctccaaggccaaaaatgtgtacaatggttcggacactagtgtactatggtttggacactaaattggttgttcggccatgaaaacttgtgttgtagctcacgcgaggcccaaaacagccttactttactttttagggttgtgttttagggtttggagtttggggtttggagtttagggtttacagtgacactagtgtactatggtttggacactaaattggttgttcggccatgaaaacgtgtgttgtagctcaagcgaggccaaaaacagccttactttactgtttagtgttgtgtttttgggtttggagttgtgttttggtgttcgggttttcgttttagggtttggggtatagggttcacaatttagggttcagggttcagggttcgggctttagggtttggggctctgtgtttagagtttgggcgggaggcatgaaatcgttgttcgacgacgaaaacatgtgtcgcgggaggccaaaaatagccttaccggcctccggggccaaatgcgtgtacaatggttcggacactagtgtactatggtttggacactaaattggttgttcggccatgaaaacgtgtgttgtagctcacgcgaggccaaaaacagccttacattactttttagggttgtgttttagggtttgaagtttggggtttggagttttgtgttttggtggtcgggtctttgatttagggttcgaggtatagggttcacaaattagggtttggggttcaatgttcaggccttagcgtttggggctcgaggtttagagcttaggcttttgggattcgagatttcgggtttcgatttgagggttagcgtttggggtttaatgtttagggtttggagtttgggatttgtgattttgtgttttgggggtcgggttttagtctaagggttcgcggttacgggttcatggtttagggtttggggctcggggtttaggatttaagtgttttgtgtgatgtagctcaatagatgctaaaaacaacctttcccatgccagtagccaaaacatgtttggcgggcgggaggcatgaaattgttgttcgacgaagaaaacatgtgtcgcgggacgccaaaaatagccttacaggcctccggggacaaaaatgtgtactatggttttaacactagtgtactatggttggacactaaattggttgttcggccatgaaaacatgtgttgtagctcacgcgaggccaaaaacagccttacctgtcttagtggccaaaacaagggtggcgaacgggtggcatcaaattgttgttcaacgacaaaaacatgtgtcgcgggaggccaaaatagccttaccgtcctccggggaccaaaacgtgtactatggtttggagactcaaataatattttactatggttttgagagcacctag

SEQ ID NO: 129576 - DNA, 416 bp, Zea Mays
gctaacaccagtcgccagatcaaaatcctagggttaggattagattctgacccacccgaaacggtacgcgatcccggccgcaagatcctaatcctacggtcacgattttatgaaatgagatccaacaagatccgccggttaacagatcagtggcccagatcgatcccgcgaaagggtacactcccgtctaatctggagcgtccactccacgatcaacgattggcgtcattcttccccaaccggatgccctgtagcggcagcgcccccaagctaacggcggcgcagacgccggtgactgcgattcacgcgccctgatgcccgattcttaataccgataggtcccaaacgaagattaggctaccgccaaatgttttaatgagtttcttacctgttacagcaactggaagagggcagcc

SEQ ID NO: 129577 - DNA, 307 bp, Zea Mays
tgctaggtccatgtcaccctgttaatttccactttggagtggcaattataacaaggagacacattttgaaaggcaaaaaatcaattattttggtgaggactgcacaaatatacttggaggaaggggcgagggattgaacatgcacccaactttcattttttgaaggggacccaacttccaattttgtcagagctttgcttacttgtgctggaactgctcaaagatcatgaaaggcttctacaccacgctcaacaggtagctctctaaatgaaatccatagccaaatcaggtacccatatggcatgac

SEQ ID NO: 129578 - DNA, 287 bp, Zea Mays
cctaggtccccggcgcttgcaagacgtcaaccatcagctcaggctttactcccaaataggaagagatgctcattcggttactataggacaaccaggacgtgtttgcatggcaacctgcagaatgcctgcgattcccagcgcgctagccgagcacaagctagaggtttaccctcaagagaagacgatccgacaaaagttagctcggtattagcggtaggattcattagagaagttctacaccccgagtggctcgtaaaccctgttcttgtactaaaaaataataaggt

SEQ ID NO: 129579 - DNA, 712 bp, Zea Mays
ccctatttcattacgaaatagaaagagacataagttcttacaataccacatgagcacccagaattttaaagctgacaaaacacacaactatcagctaaaaaggaccaaaccctgaccaaaccaaactactagtagcaacacaaaaagtaacacagagctgaccaacatcaaagttcacacagatcacaccaaagcagcaagcagcatttctatctcatagtttttcctgtagctaggcgctacaagggagaagaagtagaacgaccgcacagttattgaaccaaaataaccagataacaaaacatgtttcatttcatcggattcgtctgtcaactggcctccaaccacgagtcttgttgtagatctcacacgccatctttttgattttgagacttccgagctccaccaattttcttgccttctttttttgacgaatagcccaagtattaagccaaaaacaacaagagaaaatcacgttagtcggatcatcaattcggtcagtcccaaagcaacaattattgcgacatctccagatcgcccaaatgacagcaccacagccaaacagaaccagatttttttcagtcttattaaaactgttaatccaagtaccaaacaaatcatccacattatcaggaatagaatttaggccaagagcagagtagacaattctccacgtaaatctagctaccggacactgaaaaaacaaatggtc

SEQ ID NO: 129580 - DNA, 889 bp, Zea Mays
ccaaaattaaataacccgatgtataaaaaatgtgtaaataaacatcattaagcatataaacgtaaataaaaaatgtgtaaataaacatcattaagcatacaaacataaataaaaaatgtgtaaataaacatcattaagcccttcttctattaggaaggatcactagacataaaaaacatttaaccaaacattgaacctaacattgattaatttacaatgaacaagaaattatgcatcaattgtaacaactagccaaaataatgcatcaaattttaactaacaaactaattctaataatatgcatcaaagaaagaagaaaaataccttcacgaagaccgtcaaggtggtgatggtcgaggagacgcgggccggctgtagttagagtggacagagagaccggagactagagtcaaatgggcctacaattagatggaaacatggctttaggtttcataactttgcatagaacaaaacataactatacgacctgctacccagtacccagccacccagaaaaataactatacacagctgcaagttttttcttcctattcttactttaggacatctgcaacttctgaattcaaatgactatgtcgttgctaattaatttaccaagatgcgctgaagcaatgttttaataagacagcaaaccccagcaatgttttaataaataagttgctgaagcatatcactgttttctacttgcttgaacatgtcagcaatctcgcatgttggtaatctattggtaatcatgtggacataatgcagtagagctgtaaacgatgctctttatcctctgttttctacttgcttgaacatgtcagcattctcgcctgttggtaatctattggtaatcatgtggacataatacagtagagctattagc

SEQ ID NO: 129581 - DNA, 280 bp, Zea Mays
gcttcacacttctggactaactcggcaacatcactctttgcagttggccagtagaaactggatctgaaagccttcccgaccagagtccttggtgcagcatgtaccccacactgcacggcatggatttcatctaattgtctcccaatggccaagtgaatgcatttcatgaagactcctcttgcacctctcctgtacagtaagccccctatgatggtgcagtggcctgactgccttgtgatgcgttctgccgcagccttgtcatccagctcttcctcatttt

SEQ ID NO: 129582 - DNA, 614 bp, Zea Mays
ggaaaaagcgcctgcacgaatagtgttccatctcactgtcaactgttcagcaaactgcagggagggaagcatgagcaggaaatgtccatgagccaatttccttagaattagcgaatcagaactgacttcaagcttttgagcaaccgcatctgcgatatcagcatctgacacaggcacatcactgaccacaaagatagacactgcatacttcaagtcctcctctgctttttccatcaaactgttccaaccaatcacacaaggttgttgatgatgcgttgtcccagtttcagacagaggggcctcgtcatttccaggttgatcagattgcccccaacccggatcagaaccaccctagaagatgacttgcgtttccgatggcgcctgcgtcgcgagcgaggcgggagggtgcccagcgaagccggcctagccgcagctccaacctccctgggtggagaatcagaaacatgtgcatccactccccctgctatcatcttgtgatgtgctggacccttctcaatgcctagaggggagattctacgccagatataggccttcttcttgcatggaaggggcacagaaggctgaagtctcttccagaccgggacctgaggcaa

SEQ ID NO: 129583 - DNA, 679 bp, Zea Mays
gaggaatttcggctctctttacatgctatcagtggggctgtgtctgacgattgtatgggagtcagggcccttgtccacaatcaggtgatgttggtattggtggattcaggaagctcagccagtttcattaataggctaatggtggacagacttggtctcgttacatccaagtgttctccggctattgtgaaggtagctaatggtgaaactctcagaagtgaccaaatggtgcattcactggaatggtgggcagatggacacactttcaggactaacatgagagtcttggagttaggggcgtatgatgctattttaggttatgactggttgaagcaacacagtccaatgcactgtgattgggaggagaaggtgatcagtttttcagttgatggagaagaggtcaaattgaaggggactgggggacagtgtggaagagtggtggaggtgtctactatgcaggtggacaaatggttaaaaggaaatgatgtctgggctttggccttgctggaagtaacccccaagtctgaggaaccaactgttggtgtggagttgcagaatctgttggatgaatttaaagagatgtttgctattcccgcaactttaccccctgctcggccatttgatcaccacattcctctgattccagggtcagtccctgtgaatgccaggccctataaat

SEQ ID NO: 129584 - DNA, 530 bp, Zea Mays
ccggctctccaaattgcccctatcgctggccaaacttggctagctgctctagctagctaaactaagttacatattagaaagtctgttggaatgagatactacatatagagtttaatctttatagagagataaataaagagtcaaaaatatagtctcttggagatgctctaaggttaggatgctctctgcatgctcgttcataacttgtggcaagatttgagcacagctgtggtattgtggcaatgtgactacaacacaacagaacaaaagcgatattctgaaacaggtaaaacacctctaatggcatgacaagagtatggcaacatacattgttaaactgaaacttgtgaatcacttggaaatttgaatctggactgaattaagatattgggaggatgtttagttaggcagtgtagcatttagagaccaattcctagtctctataacattgtagggaaaaagagtgcttctgttaatgcgtctctatgctctaaccctttaagcgtctcttttagaagctccttagttag

SEQ ID NO: 129585 - DNA, 663 bp, Zea Mays
gttgttttcaaccttgggatgaacggcggtcttggggggcaaagaacggacacggtcgtcggtgagcgttcggatggcgaggtacgacgtcgagcggcgtggacgaactccggtgagtctccacggatggcgaacgatcgacgaacggcgtgagcacggtcgaggtgctatgcggacgagctccggtgacggcgttcgaacaacgaggcgcggaaggtccagtcgaggtgctgcgcggtcgcgttgacggcggacggtgagcacggacggagctccggtggcgagaggaagagcatggaggggttcggctgtaggggctcagtcgaggctgtccgacgtggtccaaagagcagggcacgaatgtgaggagctagagagaacttgggggagcaagggaggaggctcggcatctattttataggcgagggcgaggggagatgagagggcgccggggagggatgaacggacggtcttcatggctgccattgatggcattcatcaacgaagggaggtaatgacggcattgaagctccaataacgcgcagacgaacggacgcaggcttcggtcggcttcctggcagcgtcgtgttggggctggtggctcggagcttcggtcctgcgcgcggtcgagtgtgtggcttcggtagggcggctcggttgcgg

SEQ ID NO: 129586 - DNA, 510 bp, Zea Mays
ggtttcggcgcggcggaagcttgatttggggaaaaaccaaaattctagctcactggtgatcggctgggggcgatactgggtggtttggttcttgactaccctacggagctcgcggcggggtcaatttatacacatcgcgagcggtggtcgcgaatttggacgagacacacggcggccggaggtgaagaagaacgcgggtgcggtgaatacgtgtccagtgtcgtggcagtaactccggtggtcgacgggaagttagagggagtcacggcgatgcggtggcgagattgggacatgcggcgcaaggccggagaacggcggtcaccggcgaagctatccgcgccagccacaaagcagaaaacgaagacgacggtgagtcaccggagtgacgtccagtgcacggcggtgaagatctttctacccagagcattatccccgagccctgtgcacgaatccaaacgccggtgacacgaatcgcggcggagggatccgtcggcggtgaggacagccgcg

SEQ ID NO: 129587 - DNA, 988 bp, Zea Mays
ctccaatccacctcaccccacgtggattgaggtgaatattagggtatccaaacaaaaacaaggcctgcatgggttactcctttaccttttctttccctgttgtgctactgcttggttcatgaatggctctggtacgggtcgtaatccgattcccagaatgtgctgtcttgatatgcacttgttgggcgagcacgtctgcactgggagtgggagttggtctgagccctgggttgcaagttggacggacgatcttgacagcctgcacctaggcttctgctgatggaagcggccacttggcctgctgtgggtgtcatgcccggtagtgagctggagaagcctgccatgcagtgggagctgtccgcttcatgggaagaaaggaaaaaaaggtgacactcaagttatgtccctgtagctacattcttgcaattgcaaagcggactacagtactgcccagaatctgaaattttgaatccttcagcgctggcagctgcagcacctctagattagcacggcagtgtccgagtcacttcagcattcagaaaagcgaggaacagatcagtccctttggctttgctgctctgccaagctagatggttgtagagcgcccgggatctaaggctgtacagtatattgttgttagttaaccaaggcgcttgatccattgaacgcacgcagatttttttcatggagacactgcaacagcaggctacacgtgtgatctggggcagttccattgaagcttcaggttgaggcattgcctagatctggggcgaccactagtgatggacaccgttgcgatggcccatgatcatgcaggatggagtatttggtatcgtggccgtttggtgagatctgatggggttggaaagaaaggaacaggcacttggatatggccaggcaggagcaaggaacgaaggctggggctggtgatctttgcctcttcgtatattcagacaaattaaaggtgccgaaacttgtcttggaggtg

SEQ ID NO: 129588 - DNA, 323 bp, Zea Mays
tccggatcgtacttaaggctttgtccaaattcccggtgaaggcaagtaaaatagtgatggtttataccattggtcgatttatgtgtcatgtacttgattcatatccatgtcaaatgtgttcatcctcgtatttcattttgagaattgttgcttgaagttattcatgttctattatttacatatgttgagggtgttgttcaagtatgttacacgtgttgattattattttgaagtagtggaagtatatatttaacacatgttagatggggcggtctcgtgttggtgtcatgcatagtgcatccatcatcttttgcatggaagtt

SEQ ID NO: 129589 - DNA, 512 bp, Zea Mays
tcaccatgtgtcttgtcctcacacccaccaacaaaatggctcggccgagcgcaaacatcgtcacattgttgaaaccgggctctccctcttagctcatgcgtccatgcctataaaattttgggatgaagcttttgtcactgccgcctatcttatcaaccggttgctaacacgtgttattgataatctatgtccgctagagcgtttgttcaaagctccacccaattataacatgcttcgaattttcggttgtgcgtgttggccccatttaagaccttataacaaacacaaactctcctttcgatctaaagggtgtgtgttccttgggtatagttccagccacaaaggttacaagcgccttgacatggattccggtcgtgtgtacatctctcgtgatgtagtttttgatgagagcaaatttccctttgccactgatcctctatctcgtagcgatcacccacaaaccaaccaaactagtccaccagatcgtagcagtgttattttgaacactaaca

SEQ ID NO: 129590 - DNA, 519 bp, Zea Mays
ctcgcgtgcgacaaatccgtgcaaaagtcgcctgagggtgcagccggactagcacaacaagtatgaaaaaccaaagtctaccgcgaagactatccgcgcagaagtcgcctaagggtgcagccggactagcacaacaagtgcgaaaaaccgaagtctaccgcgaagactatccgcgcaaaagtcgcctgagggtgcagccggactagcacagcaagtgcgaaaaaccgaagtctaccgcgaagactatccgtgcagaagtcgcttaagggtgcagccggactagcacaacaagtgcgaaaaaccgaagtctaccgcgaagactatctgtgcggaagtcgcctaagggtgcagccggactagcacaacaaaagcaaaaacgaccacaccaaactgtccgcgccaagaccgactatatgcgcaccagtccagcataacaaacacacctaaccaagtacataacgccttcgcaagcatagccaaatgtgcgggggcacacaacctcatcatacaagcctttac

SEQ ID NO: 129591 - DNA, 627 bp, Zea Mays
gccgtactctgcgatttacacatccagctcttcttgggtcaggtgtcccccagatctgtaagcaacaaacaggagttactatgcattgcatgagctgattactactaatcaccttcaggaagccatataattaattaactatccagataagatgggtataagttgccttaaaggagacatgaaacagtaagctaggtttaccctatgtcaggactcaggagctcagggttgttcaggaaaaataagaggctcattgtcagatttttatatataaccacccaactaaggcgctaaaagatattaattttattttatgatgttactacatgcaatccgacttaaaacagataaaaggattgaagatacgcctttcatttacatgccaaaacgtcttcaaacaagcaaataatcttcacacaaaagagtgtcattcacgcatcggtcctggccattcgataatcctttcaggacttctctgttttaaaaaattaagtatgtgtaaggccaaattaaaacaatccctaaacactaatgacattaccgtttcactagttgcacgaacattaactatcaatggcatatatttcaactgagttatggattgcatggtggaaacctagattgcca

SEQ ID NO: 129592 - DNA, 281 bp, Zea Mays
agaagtggacaaataggatatttgggttgttaaaatcgactaggttcattcggtggaagtgtttgtgagctggtgtgaagtgggtgcatgggagccatgttgggtagccgtgatgtgttggcatccccaggtttcttgcaccgagaggtggctgagcttgatgactctccctatcttgccttcttatttaattattgcaggttggttcagttagagcagctctcctctctgccctcaagccctagccctgggactgctgtaaaggattggaattcttgtgt

SEQ ID NO: 129593 - DNA, 441 bp, Zea Mays
agccaatggtggtcactgtttagtggcgtggggtaaggttactaggcctaaagatctaggcgggctcgggatcactgatcttcggcttttgagcgtgtcgcttcgagctaggtggccttggctcaaagaaccgatcactctaagccttggtcggtcctccctgttcaggcctgtggagcggtggaagccttgatcaatgtggcagttgtgtctcaattgggtgatgggcatgacatccttttttggaaggatcggtggctgaatggtagatgcatcggcgagatggcacctgaggtccttgagcatgtccctaagcgtgtcgcttccaaaaggctggtaaaagatgctctaacaaatctgaattgggtggctgatataaggggtgcgctttcagttagggcgcttgcacaggttttggatatctgtgacttgctggagggc

SEQ ID NO: 129594 - DNA, 1128 bp, Zea Mays
attggattgcaagagattggctacgtcctaatacagaaggctagttagagacaagagtgaaaatatgtggggtcgtctaagaagacaagccctagagtaacttgggcgtgttcggttctgttgtgttaaatctagttttcctccttaagggaggccccctctcccttttatagaccaagggagtgagggtcacatctggtaggtggggccaaccctggcgcatgtcccatgctgcatttatggaaaccatgctgatgtcagcctgatgtcctgtggaaatgtcagtggcgttgtaggtacatgccctacctgtaccggatatcccgagtgccatgtcgagcatgtgcctgtatgccgaaaacctagaacatggcaggaggagcaggctctacatgccaccacatgagacctgagagttgtatcgtacgtcacgaatgaccggggtggttagacatcgtgatgtataaagtagatgtcccatgatgtgatagaccatgacgagtatcgctcatgttgccatagtggtcgtgccagggcgcgccctatagcgtgcatgtcgccacagtgccacgctggcgccactccccagattactagggcctgacatccagagagtggacatgatgttaacacagttgcacttgccatgtcgaacaggagcattatgtcttctaactccaactccttgactgaccatggcatggacggctagccaggcggcgagtttgaagccctcccattgaccatggttgtcgcgggccccgagacacgtggcgtgtcgggagcccgacaagctagggtatgctggagcccggatgtagtggggccatgagccctgcttggtggtcagcgtaacggttgtctggaggagcccatcatgggatcgagagtccacctagaggggtctgggggcccaagagcagatgaagtaaggtgaaaaaggaccgctagggggtccggagcccttctcgaagggggcctgaggcccctagtgataccttgagaacaggtgaggtgcaagataatcagtacagtttggataccccgagtccacaagatagaattctccttgaggtggatgtggaaatttatttccatacttctcaattgcatctttgaaaactgtca

SEQ ID NO: 129595 - DNA, 624 bp, Zea Mays
cagggatgggcgccaccgccaatgtttcagtaggagcggcatcagaggaatcctcggctaacatatcaagcatggcacttatatctgcatcacttggattcaaaggcacctcaaaatgaacttgtctctcatcgtcaggaatttctccgagcgaggcaaccaaagcactaacttcttcaggagagggtcgcactctaagacccaaactgctatcaccaacaggaggatttgacatgaaactattaaaagcctgggaaggaggcaaattccaggccgagtatgcaacaggggcgccgatgttcgataccttgcctctgagtatcatctcaagccggctcactaaatccacagcaggaattcttctgttggttacccgggttgagtcagccaatcctcggtacagataagccggatatgctctgtctttcagtggctgaatgttcttgaaaacaaagtcagcgaccatagcttcggcagtcagacccctttctttcagcaatccaacttctgctaacaaaacccctgcttcagccacttcctggtccgtgggggactcggtccagctcggagtgcgaacatctggatgtctccctgaccgtggggggagggaattcccatgattct

SEQ ID NO: 129596 - DNA, 607 bp, Zea Mays
gattaatttgggtggacatagactctttggatcactgcgtacaccctcacggtgcagttcttggtcgtgatcggagttgattctcatttgagttcgttctgagaaaaccccaacaaaactccatttctctcgggttttatgatctgcactttgatttttagtttgtgggttcatacttccctagtaaccatcttctaccctgggctgactacatgtgatgtttgagatcattctggctatttccagtgtctgacgttgctggcccctgtgtgcggcactactgaaccccgacaatgtcggtcctcacgcccacactaccactcgaacttccttgtgtatcttgctctaatttttatgggaagttggggtctgctgttttgaaggatttttttacagtcaaaactacattggtttgcactgaactctgatctgctgctttgagtccctagaggggttcctggttgaactttggggtcaaaagtgatatactcgcaagtcaagaatttttagtggctcccgttcaccccctctagtcgcctcaccagtcctacagtattaactagaaaacacttcaaaagtgcgcagaattaaaaaaagattactcaag

SEQ ID NO: 129597 - DNA, 664 bp, Zea Mays
gcaagtttgtcatgtgaactattttttataatgctcaattttccatgtgaactatgccccctgatgcgtaatttttgagattttattaaatttatacaatagtctatcacctgcaagtgtgtaagttgttgtaaaaaataccatagtgggtaaaaaattatatataccagggtcaccaaatgaaaaactaagcatgaattatctcattacttagatgtcgtagttgatgttgaatataaactaacatgagttgagttggctaattggtgggagcttaggtgttttgctcaaggcatccagggttcaattcctgagcttggtagcaatttttttgctaccgcgagtcctacaattttttttctcagccccgccgtggaccgcaagctatacagttggcccgacaagtcaacagacggtcagcagccagtcgtactaataattgagcattgacacctgctgactggggacagagaagccatgacgtcgagtggcagcagttgcccctctcccaatctcatagtagtagctggtccaatctctgctctccgggctgatttgacgagtaggaaattagatagatttatgggaggaaaactcttaatgacttgtttgagagtaaggatattagagagacctccaatcccctgatagtaaggtgattcca

SEQ ID NO: 129598 - DNA, 353 bp, Zea Mays
ttgcaattaatgtatggatgtttggtgtagctcttgtgtctttaatgtgctggttggggtgtttttatagccccaatcacccccacatagccgttggagtgaagtggagaaaattgaattgttctgtgttgcaccagaccttgcacaatgacgattcggtgtgtatcgaaccccttttaaactactgtagcagagagtcgttctgacgagaaaggtcttgttaggggcactataacagtctaatgtgccaccggaccatcaccacgtccatctagctgttggagttagagatgatcgttgaacctgtcagacagtacggtgtgccaccggactattccgacgcaccagcctcc

SEQ ID NO: 129599 - DNA, 416 bp, Zea Mays
ggggtgggggttgtggttgacggggttgctggtttacttaggggtggtggaggtggcaggggtaatctttcctggtattggagttgtgggtgttgggatctctttagttgtagtttggctatggctgagggtggtatgggtgttcgttttcgtattgaggatggaggtactggttggggtgataagagtgaactatggctctttgattgtttgtgggtgccgctctagccatgtgttctttggtttctttggttttgggacagtttcttgttagatgtgcggagtttcatcatggaacatgcaatagaaatttctgggttgttgagggcatctgccttggtctcttcgccttggcgcaccgccaccgcagccttcctatggagggtagccccggcgccgagagggggggcttcgcc

SEQ ID NO: 129600 - DNA, 610 bp, Zea Mays
tcggcaacagatggggcacccacattgggatcaacagcggattgagtacacccattggggtcagcgtcggtaaatccagtcgcaggtacttcttcagtagtaggaactgaggtaccagcgtcctgatcaaaactggatactcgccggaggcgtcttcttttcttcttctgctcatcagcagaaggatcaggctgattggttcggcaagggcgcctcgggcgagtactgacatgcttctgaacatccaaagtcgtattagcctctgggaggggcgccactaccaacgtcccagcaggagcagcgtcggatgaatcctcagctagcaaatcaagcatagcgcttatctctgcatcactagggttcaggggcacctcaaaatgaacctgccgttcgtcatcaagaatctccccaagcaaggcaaccaaagcactaacttcttcagcagagggtcacactctaaggcccaaactaccatcagtaatgggtggattcgacacgaaaagggtgaaggatttgggaggaggcaagttctaggccgagtacgccactggagcaccagcatttgacactttgcccctgaggatcatttcaagtcggctcaccaagtctg

SEQ ID NO: 129601 - DNA, 451 bp, Zea Mays
atcaagaacaacaacacctacttggataataagatcctcaaaacatcaatggtgtggttgtaagcattctaaatctttttcattataagaattctaggcataaattgtttattgcaaatcttataagccttgatcaagatgtataatgcttctccctacacgtctctaaaatgaatgcatctattcatctcattaaaattctttgatgcatatctctagggggagcctatgtctatatcttgattatgttgagactattgctttatcctagtaatcttatatagtctcttgaacgagaataagtttctcatgatgtatgctactacatatcaatccaacttgttaaaataatgtcgctcttatcaaagattgttgctttcattgctaaaaatagcatacttattggattctcctatttttgagcttatttgataatctaatgcatatgtga

SEQ ID NO: 129602 - DNA, 577 bp, Zea Mays
gaaaaataaattcatatttcatacaaagagaatgtggaaggttgtatggaataacaaagacgggccaacatgagcatgatgatgccatttgaccaaaaggtgtgaagccatcggtcgtgaggccgattcgaacgttcctcggatcagctgcaaagtctggatcaaacgtgtcgagagccttccatgcatccccatctgaagggtgcacgattaggtcatcattatcacggacaccttctttgtgcatcacatgtgcatagcggttttttagatagaaacaaccgtttcactcgaggagttagtggcaagtagcggagctgcttatgtgcaacatctgtcatcaccttgtcacccttatcattaacaacttccacaaatctagattgtccacatttcagacattttttctctcctgcatgctccttcatgaaaagcatacaattatttttgcacacattaatcttttcataatccataccgagacctttgatgattgtctatgaatggtacatgtctttaggcaacttattgggctttgggagcacatctcctaataactttaaaatctcattgtaac

SEQ ID NO: 129603 - DNA, 421 bp, Zea Mays
tatgaattactttacaaaaggtgatcgtctatcaagagaagtccatgtgatgctcatacaatggctggtatactcatatcgttattataacaatatgtctgatgtatgtatcgtccttagatgctggatgtcgatgagttggacatcattgctatttgatgcttttatgttttaaggtcatataaatctcagctaaatagggggtcgtatatgttgacaaccaaaagtggcaaaatgtataatgagctcagccatcatatttctatcattgagaaggtgatcaatattatatttggatcatctcttttgaaatcctgacgaaagaaaacaacttttcgagggctgacccagctgaaaccagctacgtcggatttccaactttgtgtcctctcatcgaactgataaaaaagacatatgaatc

SEQ ID NO: 129604 - DNA, 1856 bp, Zea Mays
aagcaggagatttctccatgttcattacttccatggagcttctaatgtcctccacttcagcccatctatcacctcctgcttggatattactcagcaacacatgatagccaacattacttggttccaactccacaagtttctgagctgcaaaatatgcaagcttagagtttgagtgaattctacatgatccaagaagggcaccccaaattctgccatctgccttaactttcatgttgctgatcacttggagagcttcctctagattacctgaacgaccaagaacgtccaccatacaagtatagtgtcctagctcaggtgcgaatctgaacttttttgtcatgcaatcaaacaactcgcgagcttcactgacgagacctgaatgactacatgctgaaagtagacttaagaaggtcacttcatttggctttactccttctttcagcatctgattaaacaatgttagagcttgcttaccatgaccatgaattgtgaatgcttcaatcattgaactccatgagactatatctttctgaagagttctgctaaagcatctttctgcaagatgaatgtccccacatctagcataaagcttaacaagggctgtgtccaaggcacaactctcagattctgcagcatagttgtttcttatgatgtatccatgagttgctttaccacaccttaaagcatctatttcagtgtaactgactaggagacctcgtagaatgtcagcatttggaaagtaaaaggagcccatcattctctcaaatagatggattgcatccaagaacattccatgatagataaaagcccatatcatggctgaccataagtacttgcttcccccattgaattcctcaaacaactgaatcgatgacactaactcaccgcatttcgcatagaggtcaacaaatgatgctaccaagattgtgtccatgagcccactcctaatagcaaaggagtgcagcttcttgccatggggaagaaatttgtgcctggcgaatacagaaacaacagcagttaaggtttcgctgcttggacacacttcctcttctatcattgccacatacaaactaataaccttggaaacattcccttctgaagagtattccgagattataatgttccacgaaaccatgtctctacttggagactgcttgaacagcatctctgcatcacccaagctagaagtcctgctcatgtgagtcaacatcgagttgagaactaggaaatcacctgcccaccccctcttcacagcgtagcattgcagctgcttaccactggcagtgtccctcaaggccgtgcacagccggaacaccactgacagcgtcactgcacttggctcgcaccggccgtgggtcctcatggccgtcagcagacgggatacctcccaaatatcctccgcgttgacgtacgcggaaaccagcgtggtccaagaaaccacgtcccgcgcgcgcatttcgtcaaacacaaggcgcgcggccgcgaccatcccgtgttgcgcataagccttcagcaacgtgttgccgaagtagacgtttccaccaaagccgacccgaatgccgaagcagtgggcggcgccgacaaggctggtgaggggcgccgaagcgcgattgaggagcgggagcgtgaaggcatccgggcgggcgccgcaccggagcatggtgatgaatgcagacacagcctccacggggttgcctccgtcgaggcggcgccagatggtggcgttccatcgggcagtggccgtggttgccgaggaaagcggagagttgcggaggagagtgcccagggtggcccagatgtgctcgacgaaatgcggaactgtagatcggcgcgcgattgatagggaagaaacgtgc

SEQ ID NO: 129605 - DNA, 879 bp, Zea Mays
ggcttctctgatgcagatattcagggcagcaacatgcgagtgcataacattcagctgcccatgcgggaagagacggaatttattcatgtctctaatgagcgggagttctggacgactgctaacatgcataggtactacaggtaccttaattctttgtccaggatgaccgttctcccgaagggcggaaatcaaatgaacgtccttggggagagtcgagtcttcctcctcctccttgctccaaacagtctcgcccgcatcaatgtgtttgacttgatctgggaagagatcgtccgcgcttcctggtctcctctcaaagggtgtgttcatgcaccctttatcatgaagatgatcgaagtggtcacccagacccacttcgaaaaaccagtcaaacactcccgctacgtaccctactgggttgattcctccaacccagctgctcgtacgaagcgggctccctcagggtctggaggccctgcctcctccactgagccacctccccagcctccccatcatccatcttcctctcgccccgccgctgcctcgcgtccctctcctggtcgcggatctcccatgccacgtgctcgtggtcgtggtcgaggtcgtggccgagggatgggtgctcgcttggtccatgggtttgcggcgtttttctccatgtgccgcaacatttctgctgatgtccatgaggtggcacggcgtcagcgggagactgacgacaatcttcgtcgtcaagcttccaccatgggtatgccatttgtccctcgctcgcctgacgtgcctctccatcctcctcccccggagattaatgagtggcaccagcagacctatggggtgccatttatgtctgcagacgatgatgaagaagaagcctatgttgat

SEQ ID NO: 129606 - DNA, 561 bp, Zea Mays
agcccgcagccggcacaggttgacccagaccaaaaaactcaagtggaagctgttgaccatcctccaggaccactggcaccgggtcctcatcttgaggctgacccctagcaaagtttgctggatgatctcgcactgcactgtccacgagtcaccaataaagtcgttagcttctgaaaaaacaatgaactgtggacctcctccagagacgtgacccgaaccctgagcaaagtcctgtaaacattgcgtctgtcctcttcccacaagatcaatctgccaaaagaaccaatagccgcccgcaagtattcagatgaacggtaatccagggggaatcccaacaacataagccagcattctcgattaaagaaaagggctctatgattccaagcatcgttatgccgctgagcagtgaaggaggcatcgaggtattgttgcggaccgagcaggacgagattgtctctttcaagcacgctactaaactgaaccagaacctgacccaggtgcgaccgctggatatcgcgcaccccaagccgcctgtgctccacaaggtattctctgaccaca

SEQ ID NO: 129607 - DNA, 362 bp, Zea Mays
cttgggaacaaccaatcgatctccaaaccatagaattcccttgctatcctgacggaagcacttgtatttttctgccttctgcttgatcatttccttgataacctgaactcccttatcctcaatctgtgccctgactatctgctcttgcaatgtgggctctaccgagatataacttaagtcacccaaagaaacaacttccaggttcagcttgcacaattcatcgcacagggtggtgactcttgcatccatgctcatacaattgcactgagcttttctgctcagggcatctgccacgacattagccttgcccggatggcagtgcacttccaaatcatagtccttgattaactccaaccatctcc

SEQ ID NO: 129608 - DNA, 743 bp, Zea Mays
gcggaggtcgacgaccttgagcgcgaagagcggggacgcgggcggggagctcttgaggcggcagaggaagacgcgcgcgaggtggccgtggcccagctcgcggacgaggtgcaggtgcgcgaggcggaggacgccgtcgggcgtggcggcgcgcgccgcggcgaggtgcgcccagtgcggggacgccgaggaggagtgcgggcgcggggagagcgaggtggaggaggagaaggacggcagcgacagcgagctccgcgcgctgaacgtggtcgcggtggtgaaggaggacgtggaggcggaggcggtggaggtgaaggacaggtccagcgcgccggcgccgccgtccgcgagcgcgggagggaagtgcggggagaggccggcgtcggaggagagcggggagaaggacgcggggtcgtggacgtggtggtgggcgacgtcccccattggcggcggcgctagttccatgtgcatgcagttgcagagtgagacaggcggggaggagaggaatgaacggacgggcgaatgcgagtctggccgagtcgagtgagagcggggcggggtgcttataaaggccggcgtcggtgagaaggacgggagcgagacgcgtgggccgtgccgtctgctgcagaggtcgggtccgcaacggtctcgagatgccagatgcccatgtcatgcaagcctgtgggtgatcggcacttcaccgtcttggtgcagactgcagagagagaacagctcgttttggg

SEQ ID NO: 129609 - DNA, 460 bp, Zea Mays
cggtggtgtgggggtgtgggcatacacacggggagccacggggttcggatgtgggcgggcgtgggctagacgacgtgctactaccaaggggacgagaggctggtggtggctgcggagggaggatctagacgcctagggaggggcggggtggacctaggagacgtggcgatcagagttggttgctagggggaacgagaggcggggcgactgctgtggagtgaggaggctctcgttgctcgtgcggccgcggacgatgcggattgacacagacagtatagattgaagggggcagaacagggggaggcagcctacccccttaccttcttcatagtagtagagatatgtgcaccctcatagtgctactcaccaccctcatactgttactctccatcctcattctgctgctctccaccctttccatcctcatagtgatgatatccaccctctctaccctcacgtt

SEQ ID NO: 129610 - DNA, 432 bp, Zea Mays
cccttaggaacgacttttgagcttcggaacttactctgcgctcccttaggaacaactttgtagcttcggaacttactctgcgccttaggaacgactttacaacttcggaagcattgttgaggggttgcattctacacttgatggtgtgaccacaatattattacatcaaattggagattaaacctccgtgaactgtttttcatgcaagaaaataaaatgacagacaaaacaaagatacaccaggttaggatattctttagtaaatgtgcttcgacccgggcgtagtgctattgactgtgcaagcttcagactcctcccgaaaatcgcattgttgctcagcgtggtgatgcccttctggctgctgactgcgaactagagtaggtgctagtggtggtggtggtggcccaggaagcttgagaatggcttaccgaa

SEQ ID NO: 129611 - DNA, 530 bp, Zea Mays
ataaagacgagcatactatgcatttacacatagtacttcagcaactgcacgatcatcgcttgtacgccaaattctccaaatgcgatttctggctaagagagatcaagttcttaggtcacaccatttcgcaggatgggatagcagttgatcctgagaaagtacaagaagtgatggattggaagcctcctaccaccgtgcgacagattcagagttttctgggattggcaggatactatcgccgattcattccggatttctccaggattgctaaaccaatgactgagttgctaaagaaaggagtgaagtttgattggagtcagaaatgtgaagatgcctttcacaccttgaggcagcatctgacaacagcacccgtgctagcacaacctgacaacaccaaatcatttgatgtgtattgtgatgcttcaggcactggactaggttgtgttttgatgcaagacaaccgagttattgcctacgcatccagagcactcaggcctcatgagcaaaattatcccacacatgatctggag

SEQ ID NO: 129612 - DNA, 469 bp, Zea Mays
cgcggttctgttgcgttcggttgaggaggatgctcctgacaagcgggtcccacacgccagtgatatccgcaagcacgcgcatacccgaccggtggaagaaagcggctgccagtgggccccagctaccagtgaagaggcacgtgccacacggctgacagaccgggtccacccgtaagcgccaagaataaagaaaaggggaagggaaggagatgggctgcgcaggagtgaagggatgatgggccaaaatcaatagtctgcggcccaggtaggttataattccttttcttttattctatttgaatttccctttactaatttgaatttggttttcaatttccaattcctattgaaattcaaagttcatggaaaatttgtcttcacatttatatgcacatttcctcttaatatagtatggatacattttctttattcctcgatttattctattttgcatcgtgtttcctctctt

SEQ ID NO: 129613 - DNA, 491 bp, Zea Mays
gttcgggtaattcggattcgggttcatgattccaatatcggtattttgcccacccctagtgccaggcacatttaatgtggccagtcgcttatgacaggtttaggattctggtattgggtattttgctcacccctgtgccagacacaattaatgtggttagtcacttacgacgggtcagtcctagaccagacgcggaatctactcgattgacttcctatcgatccgtctgacctcccttctccgtttcatccgactctaggatcatgccccgagactatccggaagcaggtcctttcgaggcagatctttccttcgttcttctgctgactagttcaatatgatgcaacacatgatatgcgttctaaccatttcaattctccaaccttttcaagtccccaaattctgaggtccacttgatttcgcacttcatctctaggattcaaattttcttggtactcttcatgtttaaaatgtttttcctctggcagcca

SEQ ID NO: 129614 - DNA, 492 bp, Zea Mays
cacggtggttgccacgatccccggcgcgagctcgcccacatccgttgcgccaaattcggccgagattgccaacgaccaggggactggggcaaggttaccgacgagtactccggcggtcacggggaatcagttagggattagctgagggagcaccgggatgccgccgccgatttcaacgcgccgccgcaacgatccagcaagaaacacgggaggaagacggtcctcccaacccgaccccacgcgcaagtgaccaagggagagatggctgaccgccagggcccgcctgtcggcacctgttgttggttgctggacagctgcgcgggagaaaggcctagatgggccgtgtagaggaataggaggtgggccagtcaagaagaatgcggcccaggtggggtttctcatttttcttttctttttctatatccttttcaaattttaaattcaattcaaatttaattcacgttttgaactcattggtttccaaatattgag

SEQ ID NO: 129615 - DNA, 471 bp, Zea Mays
gttttgtttacctggggaggctcaaactggtatatgaagcactgctgcttagtttaaggattgttttgactgccgtacctgggtggtgtaagtgtgaaccgaaagggacggagacagtcttatctctcctagattgtccttattgagtcactgatccgccatttaaataaaccatgacagcttcaaatagagaaggaagtacatacaattgtttaatcttcaggctggtgggcctcatcaagcacctctggccttcatatataaacacaaggtgtgtaatagatttgcaagtgcagtagtatacagttcttgggtgttgtcttcacctcagcagcttcatcccagaaagccattcacaagataccttgtaagtttgtaaccaggagcaagcaggggcttcatcgctttagtttgcaaggtatggaggagaggaatggcaccaacatggagaagtcagatgagatcctgatg

SEQ ID NO: 129616 - DNA, 807 bp, Zea Mays
cgccgagtcgtagggccgttgggaccgattccgtgctttcctccgcataaagcctctactgtggccctaaccttcgccgccatagcttagaaaccatcacggcagccgccgagagaaagagaggagagagaacaaacgcctgggcgctcccatcgcgtggaggaccttcggaccgtgagcgtcagtcccgtcttcaccccctccgcgtcggtatgttccgtgtcccttctctgtagtgtgataggaagcgcgagacgtcttagcctaggcactggcgtggatgcggtggggcaatgctccaggcgctgtcgaggggatggcttgccactagatggcacgtagtctcgagcagtctgtagatgaaggcttggtgccgagctagacgggtagtgggaggcgaagaacgttccgcgccgtataacggggactcgaatggcggactcgggtcgtcgctgccagatccttggcgctcggccgcggcgagtggactggagagagaaaagagagaagggagagaaccggtgatgaagaagacgcccgacatcacttgatcatgcgttggacggtaaggattaaaggatagggatgaagaaaccaggaccgtaggatggtgagtggagggggtagattaatctcgcgtacccgccgttcatcactaatcgcacggctttgattagaagcaggaaataccccttcatcccaaccgttatccaccgtagaccggcaatctgacgactaaagcgaaatagtggggatcgtgcgctgtcagtcgtcgatctcagatccgacgatgactcgggaatcagg

SEQ ID NO: 129617 - DNA, 497 bp, Zea Mays
gtgaaatgatccaccaccaccaaaattgtatcatagccttcagacttaggtaatccctcaatgaaatccatcgtcaaatcctgccaagcaccttgtggaatgggtaaaggatgaagaagtccagaggaatgctttcttttagtcttagcatgctgacaaatgtcacactgactgacatactccaagaaatcacccttaaatcccttccaccaaaacattctctttagtctatgataagtggcttggcctcctgagtgccctcccatagcactatcatgcatagcagaaatgagtttggttttgagggcagaattattggccacccaaatcaaccaattcttccttatattaccctgatgtaaagaaaacccatgttcatcaggaatgtgaatggccaactgacccaacaactcttgagcttggacatcagaaacaaaagaattcaatacatcctgaatccaaagaggctgaacctgcatgatagtttgcattaccat

SEQ ID NO: 129618 - DNA, 495 bp, Zea Mays
cggtgaggcacatctacgccggagctccgacaaggagattcagcatggtgtgcgcggagtggactgcgtgtagtaggggagttgctacagggcttgaaggagcgttagttgctgaagctgtggatgcatctagcggcggaagaaatggagcgaagcagttactggagagaggagatagaaatggcgtgcggggcccagccaggtggtctctttccaaacgcacggcagggagaaaaacgtggggagctggagatcgcatgcgagtgggacccataaggttgtttttccatttttttctacatgcagatcggacgtgggatgggagatgagagcgctggtttaggaacgatcgttcctttttttcatttgttttctcctttttctatttctcttcttttcgtatctatatgcatagtagagatttatgtatataaatatttgtccatttaagatcaagcccaaaataatttaaataaaattaaatgtgatagtaaa

SEQ ID NO: 129619 - DNA, 321 bp, Zea Mays
gttttttgcctactaataattgcatgttttgtagactcctccaccgctatgtgattttgagcagtggattgacacagaaatatcagggaaagacaagaagtggttggagaatcttaaaaagtgggatgcagaggacaaagagaggatggagaaaagacgagaggagcttgctgccgagcaacaacgtgaagacgaacatgaaatgaggcgtgttgctgaatgcagtgaagagaaggagaagaagcttgagcgtgcacgtcgtgcaaaggaagcaatggagaaccctaatgcattgcgcaagggcaaatggccccgttgcac

SEQ ID NO: 129620 - DNA, 331 bp, Zea Mays
accttatttcggataaccgctattttcttccttttttccacttcattaacatcttcgggcttctcttccaatagatttccttcatcatcatacaccatctctctaagagaacaatatgttcaagtaaggatgtataaataggatgaggaaattaatatgaaaatagttcatatagcttttacctcttgcatcgtgactcccatctcttcaaaatataagatgaaggtagttcatatatcttttcagcacgcaatgccataattatatggcgacatggaattcccatcttttcgaatagtttgcatgagcaacatccaaaactagtttctat

SEQ ID NO: 129621 - DNA, 557 bp, Zea Mays
gtcaccagcacttcctgaaatttaaccacgtccacgttggaaacatgaggatcagtatagtgatgttctatgagtggtggttgagggtaaatggattcatctcgttattctggcagcttggtctattatagttagatatgacattaattaagagttcgaaggatccttggcagttctatgaagtcgataaaagaagatgacattttgaggtaatcgtgtctaccattttggagcatatacaagacaagatcatgacccatggcagactgcatcaaagagaagtgtgtgtctatataattaaggcctgatctatctctccacgtgctccttcgccttcccaaggcctcaacattagatccactctggccagcacaaacgcggcgacatgcacggacgtggttcgctagatcaacacccgaagggcgcatgctatgcataattcgctaatcggatcatggcgcccgcaagaggaagaggagaggacgacaaagcaagaaaaagggcgagggcaaggccgtgtagtaccttggatctgctcggttagggggctcaatggc

SEQ ID NO: 129622 - DNA, 274 bp, Zea Mays
gggaagataaataaaaatcagacaaaaagaggaggtcggcgagcccgagggaggatgccaaccttgacttgtgaccgacagagcgcaacatctcctaaagctcaaagtttgaccgctgactaggttggagacaagttcgaaagacaagttaaggatgaatagcaggggagcgaccacccaaggtttataaagagggtagaagggcgctcgagtcctccctaggacgtggacgatggtacgacaaatttccgagttacgccacaatttctttggg

SEQ ID NO: 129623 - DNA, 341 bp, Zea Mays
atttgatttcggtcagtgctgtagagatctagctaaccaaacggttggattgtaaagctctggaacgtcgaatgcttgctcttctgcacttctgctgaaaattcgtaaagattcattgtgtcacgataactttggatgctataatgataggtgtgatacgatcgtgtagtagtatggtgtcactgatttcatcctttgatctccagaagtatggaatgctggggtgattgatttgcatagttaatagttctattccacaatacaaaattcataagcgatgctgagatgatgcttttaggtgctttctgtgttgatgttgttggactattgtcttgctgtag

SEQ ID NO: 129624 - DNA, 797 bp, Zea Mays
ggggttcgtcgcgatagaagtgcagcctcagtcggccgagccataggtgccacaatggtcctgggcccacacgacgcgggcgcaattctgcgtggggccgaagcctgtcgagatcctcacgccttagagttcgtctgcgaagttctggctggagttgggagaggcacattgggcgctaccggaaaagatcttttcccggatgggtccacaatgcgatgtaggatgccttcctaatctgcaaggagtgggacctgaaacaaaagatatatccggcattgaaggtaaccaggatgttgaagacgatagccatggagtcgtcgtagatcaacatcgcacccctacctggcaggcgagctatcgatgtttgtgacccgactgcgcaccatagggttacccacgtgatgcttatgggtatgacggcgtcgttgactgcgactcgattgtacatgctggagcacgtcggactttcagtaggatttatacaggttcgagacacttgaatgtgtaacaccctacttcttgttgaggatgtgtactggaatttctctagagtatgaggattacatgtgagctatgagggtgctcaggtgttgttgatgagggctagtgtgtgatgagatgagatagattttgtaggggtcccccttggccttatatacacgaccagagagttatctctttacaagttatgatcactatatattctacttatctcatcttttatcgcgacgtgtagtcctgcttatccggagttcgatcactttctcagcctagttaacgcgaatgtatagctcttc

SEQ ID NO: 129625 - DNA, 560 bp, Zea Mays
attaatgacgtgatgaagaaaatgaagaaaacagaatgcatatcatgtgaactcaaggcaggccacatgagtccacctgtagtccctagcagcgtaggatctatgcaagacttcgtatcgagcaccaagtaccctgtagacgatattgttgaggacaatccttgctttcttcatattccaatcaatcgatctgggacaaaaacaaaacaagctgctactggtttggtaaaaccaggacttgttaactacaaggataatcctgtcccaccacactatgctgtggtccaagttctagagatcacagacagtggttgtgaagattgggagatagactttccagttgaggggatcataactttgcaggaggcaatgaacgagttggtcctttggcatcgacgcgacatcaagttgggtgttgagccgatcttaagccgtctatcgcgtcataagtcaccaacgctgaattcaacaccaatgcaacagaaagatagttcgatcattccataccccatggtgcaggaaaatatagcaccaacctccacaaaaaccgttgaaacaat

SEQ ID NO: 129626 - DNA, 675 bp, Zea Mays
caccaagtctagcgaaggtgaattggtccggctgaagtatacattcagatatggggataaattcgatgaaccaaacgatgactggctaaaatgcatcgaagttacaagtgatgaactgcttggatcatattccaaggtagaagataatgcattatccacagccttcggaagtcggggaaagaagagattgaacagagtttttgatgctattggcttcgtctaccccgactaccgctacccgctttggaggcaagggaagaagaggaaagctgctgctttggtcgccccggctgaacctgtggcgaaggctacggtcaaaaagatgaaggtacttacccaccggccacgttatattgaaccggctgtggtgcctaagtttggcggggagtcctcttcagctgctgaatcaagagaaattgttcctccgatgtagagggctgaagaaccggctacaatgccgaaggcaccttcggttgagctagttgaaacgaaggttgacaaagataaggctgaaaggtcaacaactaaagaggtaataaagatgccagggattttaagtccttcaacagaagcaacagcgctgaaggcacaaaagagttctgccataactcctaggagaaggaggatggtaaatgtattagatgtactggaaacaaccgactccataagtctcgc

SEQ ID NO: 129627 - DNA, 879 bp, Zea Mays
gctcgaacaacccaccacaatctacgcgagtataagctctagcgtatctggcgtcaatgcgtgtgcggccatcagggcaacgacaacacatcaaaccttcgtaaccagcgcaacagacgcagttgtggcttggtagttgggtacacgataagtacgcgcaacaggcacaacaggcgcaacaagcgcaactgtgactcaatagttgcgacacacatgcaatgccttcagggcgcacgaaaaatgtgtgactcggcgatggtggtccgactcaacgggaacgatccgattaagcgagagcgcgatatagcaatcacatgacgcaaccaagttcgaaggcacaaatattgcgtcgtgttgccagggcgcagtcaatattcagctaatgccataattcagtcgataataacatagcttgatcagtgtgtccgagtacccactataatatttaatcgctcgacgtgaatcagaaactcaacgcaccacaaatatttagagcgatttaaaaatacccaacatagccttcacatgcaatttaattattttctgtcaattatttgctgccagaaattattattaatatagaaaaaataaataccaaaaataatgcatgtgcataaactcatcgagtggaagaaggtgttttctaatatttgttgcaacggccagggccccacatcctccacgcatcaagccgtcggggccaagttcgctcatgtcgtggtgcacatgctggtgcacatgcatacagacgtttgcatggctacattcattttgcatggtgatggaatggttgaatgggtcagcacaactatcttttttccatctactcggccgagtcttgcatgcacacatgcaaaattttcacggaagataatagcg

SEQ ID NO: 129628 - DNA, 377 bp, Zea Mays
ttgagagtctgcgtctaagcttggtcaaaaaaagcctccctttgtaacgttgcatgcctccccttttatagctaagagggttgagccccgacatgtgggcccatgaacataacagatgtagtacttggagctactaatgtttgctactggagcaatcttcttgcgccctgacgtctgagatctgcgtagcatcggcgtgcaggggaagcttctcgtataaggggtgatgagcacagtgcgccgcacagcacgggcgcactgtttgacaatggactggacaggtgagccgtctgcaggatggccctggcgccgcctgccagcggagtggacaggacgcattaaatgctaagggggcacatcgcctgtctgcagggtgg

SEQ ID NO: 129629 - DNA, 677 bp, Zea Mays
attatggtccccgacaacagtaatttgccaggagtatcgctagaacagaaaaagccaagttacctgaagattagagaagaacgacggaaatcccaagtcacgagaagctaaatgatggctcgatgaaggaacatcaccagggatcaattcgacgccactaacaggcatcagaactccagcatccagtgcgccgacctctaaggcgactcctttacttgaagcatgcactgctagtacaccttcagaatggggtggagaagatccgacgtggacatccatggaggtatgagaagaggagcctgctcagacaccctcgagggctgggttgcagcccgtactgcccatcggagccggattaccaccggcaacaccctcaggggctgggtcgcagtttgcgctacccacccgagccacatcattaccggcaacaccctcgggggctgggcaaccgctagcaccatccttgagaattgagttctctgcaacagccacctctaaggctgaaggactctcggtcacctccatgggaattgaacaaccttcaccaatctcttgactccgaagaccgccctccaaggtcgacaatgcacgagacactgcccgggatacctctaatcccacatctggaatgtcagagcagacatccatcatatcaccatcaacgggctcggatagca

SEQ ID NO: 129630 - DNA, 378 bp, Zea Mays
cctgaagagggctggccacggcgagggtgctttcacgacggtggagaactgttttgggggaaacaagagattctcgagctctggggaacgattcaaggcacgaatggctccactggttgcgtaagtacctaacagagcgagtggtagtggcaatttataggaggcttaggcggtggtgctcaatttagccgagcaaagctggcggtcggaggggaaaagagctctggcgtatgacacaggtggcctttcaccgtggcaggtgctccggtgatcaccggacatgcaccacatgattcaccgtgatgagagctagcgcataagcacgtggcgcgcaacggcgacagctcgacggcggtgagagttatccgagcgaccggc

SEQ ID NO: 129631 - DNA, 314 bp, Zea Mays
tctagtagtactaaacttaagtaaaagtagctgtacgagcactagtctcacctccctggctccttgttgagtcaaattcttggagattggagcagtgcgtcaatgcttgcacaagttctgtcatttctatttttaccctgaagatgtcgcggagtgtgttgtgctagcttgcgtagtgaccgcgcgcgcgatcaggtgggaacagggacgaaaacgaagggaacccctcccttccctactccgttttcatttccacgtttgttcgctttgttaggattgagccggtttaaatccataacgagttaaaattcgtg

SEQ ID NO: 129632 - DNA, 420 bp, Zea Mays
cgtgttacagttggtgtgctcgtgtgttcaaaaaagaggggtccttcccttttatacttcaagggatggactatacaatggggactttgtattctgctggggggtgctcgaccgacggcccttggggtagcatggttcctctaatgttgtccatagggtcgtgcttagtcgtactcccattatggcgtactgcctcgtccgcccatcgcacgggtccctttagctggtcttccgctgacattcttctggtagtgcgcgggggacccacaggtcatttgtttggatcaggtgtgcatcgtgcagtcttgcatgtcgtcacgtgcttgcgtcactcattggagtgcgtaggcgtacacccggtatggtgtatctgttgcgcgctacctaatattcaggccactgtagaagctttgatgttga

SEQ ID NO: 129633 - DNA, 544 bp, Zea Mays
cacatgattagaaagtctagacaaatctatgcgattaacaattgaccaaacaatttgacacaccatacgtgcggccttgccaacgtgtccatctgccccgaagaagtggacccctggcttgctcaaccgattcgtacgattcctgttagatatggccaggaactcctcagaagcctaatactcgcacatccacgcccaagcatccgaatggtggctcaaccaatccacctcactctctttgtactgctgagccgtcaggtggatttcctttgccatattcgcgtctcaatagttcccctgacgcttttggtacaccgtgatggccctcaatcatgctttatacatcatgccctttacaactctatcagctgagccattgaatacctcacgcacatatggatcatccaaggtataggggtcgcacacgcgaaattggccctgcaaatttgaagatcaccagagacttacaaatgcaaaatctgaattcaatttgaatatcacaagagacttacccaaaacaaatcccacactttgcttgtgtgtg

SEQ ID NO: 129634 - DNA, 395 bp, Zea Mays
gccaaactcaggcaccaaggctggttcaatgtaatgcggctggtgcgtaggaaccttcacctttttgcccttcggcacaggttcaactagggtggccgaagcaacagttttcctctttttcccctatccccgcagcgggtagcggtaatcggggtaaacaaagccaatggtgtcaaaaactctattcagtctcttctttccccgacctccgaaggctgcggacagtgcattatcttctgccttggaatgctccaagcagttcatcacttgtagcttcgatacacttcagccagtcgtcgtttggctcatcaaacttctccctgaatctgaaggtatacttcagccggactagaccaccttcgctagagttggtggtggtgtcctttggcatttcc

SEQ ID NO: 129635 - DNA, 640 bp, Zea Mays
ggccctttccatcaccgtcaccgtctcgccgacaccggcccccacccctcttgacacgcgcggatattccctaccgcgccgccacctcatctgcgccgttgcccgaatcctccgctccccggtgtcacacaccccgctgcttgacctcgatgactacctccgctctctccgcctcactctcaccaccgcggaggcttctgaggtcatgaaggcgctcgcccccgacacctctctcgcgctcagcttcttccgcttcgccgccacctccctccccggcttccggcacgatgccttctcctataaccgcatcctggtcctcctcttcagcaaccgcgccgatcccgccgaggccatgcggctcatcgcggagatggagcgcgacggcgtgcccggcaacatctccaccgtgaatttgctggtcgggatgggcgtggaggtggggaggtgcctggacctggcaagtaagtgggggctcaggctgaacgggtacacctacaagtgccttgtgcaggcgcatctgaggagtcgggaggtgtggaaggggttcgaggtatatgagaagatgcggaggaagggctacaagctggacatatttgcatataacatgctgcttaatgcgcttgccaaggctggaatggta

SEQ ID NO: 129636 - DNA, 516 bp, Zea Mays
atatgtagagccaaccattcgactaaccattggataaaagctatcgcttctacgcactcactagattgatcaagcgcaccataagttataaaatatgacaaatctaatgtcttaccgaagccaagcctttcttcaaaaactagcaattatagacactaactgtaacttattgtgcatactctagtgttaagccaaccctatggttctaaaaataattttgagccattgaattgatctggtgtcaagcactagactatatcatgcccacttcaaaactacaacgtgtgaaatagtgtcaatgaatgattcattgatcctaaaggccaaccatcgaactaatccagtggctaaccctagccctagcaatgaaatacatatacactatattgagtaaggcatggtctggagccctatgtaggcttagcactagactattcctatgcctgttgaggcaccacaatgaactccctttcaaacactttttcatgtatgctacctctttcaagtgtccaacac

SEQ ID NO: 129637 - DNA, 658 bp, Zea Mays
gcacagggtagtggagtcctaagcattggctgcggtatgttctttgaatataccagcccagagactatgctttcaggcagcaaaagttttgcccactactgggagatctactccattgtttcattacatggagattatctacgttgtgtacaccaattttcaaaaatctttggtacactttatgtgatacctggaattctccaacatataaagatatgttatattttgcggcaaagttgcaacagcaaacgaaaatggttatgccatttgaaggataattatttaatagagtttgatgaactcgcctaatgggcttaattatccttaatgttcattggatatgttcatttcatctttgcataatatggggattcacttctttattttggaggaagtgagatgctccctttctcttgtggttcttatgaaaagaacccatgtgtttttgtggcctgatgtgcaagcccaaaatgaatagcaaagaaaatcataagacttgtggacttatgagtatgtgtctacattacgttgtagactaacactttttattcatatattttgcttgaaagcaaatatacaagcacattaaaaatgaaaggacaatgagtatgacaaactcttttgtcattacactatacatgatatagtgttgtatgcc

SEQ ID NO: 129638 - DNA, 1188 bp, Zea Mays
gacgtgaagaagaggaagagggaggacgttgccccagccacatagatggcgtccgtccaggggttgtagtagttgtggcccatggtccatggatgagttgggggcaccaaaggtgtggctgctgccaccaggagtgtgtccaccatcgcgcttgccgcgtttccagcactgctgcgaagatccagagccgccacccgagccaccactggggtgctgctgatgtgggcgctggggcggcgctggagagttgcgaggagcaagcgtggacgaggtgggaggcttggtattgctggagccaccattttcagggaggcagcaagagctgcagctggtgtagctttcgccatggtaagttgacccgtttacacaaggactagccccgaaatagtgggtatgcaagtaaatacacaaggattaaccccgaaactcttaacaatactttaacacaagccatggctcaggtggtctagggctcaaatccgcctctggctgtagcacaattacctcctgatgatttgtatttctgcaaaacatagatgctcatctaatcagctatcaaggataaccggccgatatggttgcaaacttgcattgctgtttgaatccagctcaaaaggctagatcctagaacaggtagacctaaggctgtttgcagcagatcacacatattgtcgtgtaaaacactgtttttgtaaaatactgttttacaggctacattgtttacggagtggagtttaaaataagagatgttagaccgtagattacactgtttataaagtggagtttaaaataagagatgtgatatgagagaccgttgaagatagctttaacaaaagttccccttatgctgtgtggtattttctgtaaaatattaatgtaatatctagccgttttttgtaaaaaaaatggaagttgtgagtatgtatcctatacttcacaaagaagtccttgcaacttactataatttcaatagagatttgtagtgactgtagtgaaagatattgcccttttagcaactctcccattagcacaagcacttttgactgaaccagtgtgactgtgagcatgtatcctgcacaccactactgaaaaattcaatgtagattcaggcatgcagctatccctttatccatgttaatgtcagcacacaataataagggaaaaatgcttctagagcccttatgtcag

SEQ ID NO: 129639 - DNA, 402 bp, Zea Mays
ggaaaaggtgatcggcacctaaacaaatgtggtggttagggtttccgggcgcggaagcgttggcgttcatgccggcctagctactgtttatatagtgccctacgggccacaaccgattagaacagattgtgcccccggtcagggtgcatatcatccgcacgcagcaggggaggactcctccttttctcgctttctgatagtgagtcagaggacacatcctaacatcaccacagaaggggccagatcagtccacaagcacctcacctaatattatccaccaaagaacaccagctattgaactgtgcaaaagctctggcgtggcatcgccaataaagtgcagggaaaacagctactgcattccagtgtgcactgctctcaagcattgtccaatctcgaaatgtt

SEQ ID NO: 129640 - DNA, 333 bp, Zea Mays
ggcaaatgatctcgcttttgactccgccgtacgtggatggaaaagcgggcatgaaagatgaaacgcacaaggtacagtgcgtcccggaagcgatgagcataccaggcgaccgagcagcgtgcaggatcgtgcgccggtccgccaatgatcgctgtgcggtgcctgaagagtttgttgatcatccatcaacgtcgcagaaggcgtcacactcgcataatactgccagacgccgtcggctaggctacctaaaagactgcaatcagtcgcgcgcacagcacaaagatcagaggccgttgagctatgccagtcgccgtgccgagcgctgcgtttgta

SEQ ID NO: 129641 - DNA, 326 bp, Zea Mays
gtctcttatgtgatcaggaagcttaaactcttgaccatatccttgtctcctgtgtgttcacaagagtgttctggtttaacctcctgaaaccttttggttttgaaagactgactcctcagtcagggctttcatccttcatgatttggtgggagcaaatatcaggaacagtcacttgcctacctagaaagggcttcaactcccttgttgccttaggggcttggacaatttggaaactccgaaaccgttgagtttttgatggttgtactcctagtttggctttgtcccttaggttagctagagaggagagacaattttgggaagtggca

SEQ ID NO: 129642 - DNA, 289 bp, Zea Mays
gttctatctgcagtcaggaccacaaggatgtggtgtgtaggaggaatcctgatgggaagctcaaatgggagctggtgacttcctcctcttctcagggcactatcaacatgatgtcaagtgctgagcagcagttttcagttccacttcctccgcagcagttttatgtgcctgggacttcttagttcgtgccgatgcagggttttcctcagtatctggctgcgcctactcctgcatcgactactctatgtcgtcttagtttggagctccgcgtctgcctcactcgacggct

SEQ ID NO: 129643 - DNA, 373 bp, Zea Mays
caactcaccaagatattgtgcgcagaatggatggaccaaagaggcatggaacagtatgacacaacgtattaatgaaaggtttacatcagcaaactttgtagtgtcgcagttgaaggatagagatcaaaggctaaaaaaggactacaatgttgtgaagatcattgtgtcaaatagtggcttcggtcgggataatgatctgaaaatggctaccactgtgggtggggtatgggctgatctaccaaagaatttacagagatgagatggtagatcattccctttctacgatgatctgcatgagatttacaatggtatgagtctttacttatgtcttttaccttaacatagattctacaatgttgtgctgatttttttg

SEQ ID NO: 129644 - DNA, 354 bp, Zea Mays
agactctggagaaggtggccccccggagtgagcagtactagcggtgtccaagctagaagctagctcgggatcttccccctcgatatccacatccttgtctacgtacatgtcctgttgcatctcctggtgatgcatgtctaggtgctcgtttgcctcttcaagctgttgctgggtattctggagctggtttctagaacctcgatggtgtagttcctttcttccacctgctcttcaagctccttgattcgggcattcatatgcttagtttgaaggtccttctccaccaactcaatggatagatccaccaccagatcctcccggtcagtgatggtgacctttgcatcctgagccaag

SEQ ID NO: 129645 - DNA, 725 bp, Zea Mays
tgagagagggaactttaaataacagacatttgatagtcatcaaggtaagatggagagacggcgaaggtaaaggtagtaacagataacaaagggtggagttaaaaactcgcaagcgacacgaaataggatgcaactgagggaaaataggtaaccttcaatgtttaaaattgagacgaaagagagaaggttttggagcataggtataagataggaatcaaggtaagatatagaggtgtcaaagacaaaggtgataataatgaaaggcataacaaagtatagagtcaaggcaagactcgcgaaatggcgaagtggagaaaacaatcaaggtaagataggtgatgtttcaatagaatggtttaagtaagaattcattatcgagagaagttatagaggaacaacgagatcaccaaggatgggcaacataaaatgatcgctcatggactgttaagaaacaggggtggtcaaggacatgttaactgaaatgtcttgaacagtcattggggtatgcaagattccaaggatatgggcgtaccaagacaaggaaatagaaaaaaggcaaaggataacgacttaacagcggaataggaagggatctcggaagaccagaagttcatggatatataaactggagtgtttaagtaggcaggatagattcagatgtaagtatttgaaacaagagtattgaagaatctaggagtacgagcatgtcaatactaagggaataa

SEQ ID NO: 129646 - DNA, 488 bp, Zea Mays
gtgatattgttgtggttggtaggtgtgggcgacaactctttggttgtcaaccgatttatttctggccatcctatctttactggccttggtttcagggcaattcctagtgggatgtgctgagtcttcgtcatggaaaagacagtagaaccttcgctgttgcaagactcggcctttgcctctgcctctggtgttgctaccgcggccctgttctgtggggtactcgtggcaacgagcggtgtctccagtctgctgctaattggcgaagatgttcacttgggactggttacggtttggctggcctgagtctgactgtgcaggcttgacccatgtattcttagactgtggagtttccttgggtttttgatgtgactcgagttttctctagtggatctcttcggaccaggcatatttttcgaatagctgatataactcttgcaagtttttgggtgggtatcttatgcagtgactgtataagacgtcgaccaaag

SEQ ID NO: 129647 - DNA, 789 bp, Zea Mays
ttatggtgtggtagtccgtggatgaggtgtagaatccactcgagtggcttcctctcggttcgcttgaccccttctggctccgcctaacccgaccctcgggctcagtgcctcagggtttttcaaggctaggttcttctggggtggactcttcttccaacctccctctttctcctaggctccaagagcggggattggatccccgatggtggagcatgttggcgatggataaggcggggcattgaggtgatgactagcgatggtggcatgacgagtaggtggcagagcagtgatgtaacgagcgggtgtacggaaaagaaacaacgcgggcacatggaaaagtgtgaccaccaaaacagcgtctagggttatattcatttactttaatggatgttttcgtggtcgttagagataaggtaacttccaacagctggcaaataagatgttagaccttgcattaatgtttgaccgctattatgcacggttggagattccccttatatccagcgctccacttaggagctgtcaaaattaaggcggtcacaaaacttctttccctttcctgtagtggtcccctatgggattgcctccacctagccaccatgcaccaattttgggagagcactcgctatctctagcgctagtcctttgagctagtcacattgagataaaggtgactgatcatctcttgactaaggtgcaaaatagtactacttccaccattgatcatgtggtaactactgcaaaatatgtgcaagagttttgtcacacccagttctaggggcagagccg

SEQ ID NO: 129648 - DNA, 356 bp, Zea Mays
ggacttggttcatatgctctcattacgacactcgcatcgacttcaaacttcagaatttgaaatcaattggactgcgccgatcaacagtttgaaaacaactaaaccgagtaaataggcttaggcttgaccagagaacaaaatttagacggcgatcgtgcgcgaaaatagtactgctctggtagttaatttcggcccctggtcagacatatgcatgcatggttaacgtacgaacccaataaaaggaagccatcaaccatgcgttccctccaacaaatcaaccaaacacttcgacgtgacgtacgtaaacatacgtatactcttcgctagctagctcgcaacaacgcaccaagcccaag

SEQ ID NO: 129649 - DNA, 571 bp, Zea Mays
aagaataaaaacaaacccaactaactgggcctaaatactggaattcggcccaaccccgcttctccaccgcgcggcccaacttgccacagccccgtgcgccgactggtgggccccttcgtcggtcggccggtgctcatctgtggtcgctcctcacctcttcactggcgcatggaccccaggcgtcaggctcgtctcctacaccgcaacagatcgcgcgaggaaggcgcggcggaagaccaaatccggcggggatttcggcgatcgttccctccctgggactcaagatatatggttgggttgggttctcgctgaacccgccttgcgactcgccctgccgcgcttaccgcgatcccttcttcccccaaagccacccaaaggtctgtactgcaccgccattgccgcacagctcggcctcgcgaaaacgctggccatttcggcactgggtcgtcgttgggtgctccgcgctaccgtgggggatcttgcctgaagttgggagcgcactggtgtcaccgagccggcgtcaactccccagcgtcaccgcggatccgcagagcagcgtggcccgatcttc

SEQ ID NO: 129650 - DNA, 547 bp, Zea Mays
gctttatttttctccatctgaaagagtgcctctttaatctctttttcagagaaatgatcacatagcacattattgtctaactcattcaactgctcaagtccatcccaaacctccctatcaatttggaacatatttccaggggcaggaccaaacaagcctgaatagtactccgttgcatgcagcaaaatgttttcatccccaaagatttttttatctcctttttcaagaaaaattatgttgtttttccttcttcgaccattcgcaatacggtggaaatacacattatttccatcgccctgaaggagccagttttcatgagccctctgcttccagaatagttcttcctcatcaagcatcatcaaaatttcagtcataagagaacatcgatattcaatctgattactgttcaaaagatcagattcttcactttcttccaattttctcaactcataagtaatctgatcccttctctttttttcacacctttgagattccaatcccaacctttaagatactgcttacacatcttcaatttttgttgaatctt

SEQ ID NO: 129651 - DNA, 618 bp, Zea Mays
ctgcgacggaggcttctccgcatgtaatggatgctgaagttcttcctggtccgagtgctgggcgtaggcggcgaagggcggtggcgaagcggagagtgagtgaggtggagggtggtcctcttcgtgtggacggggctagcaagcgggaattgttgtcctcgccggttggggcgagtataggtgagggggagttgcgaaatctttttgagggtgagaagttgaggataatgctgttcaactacagggagatgggtatcatcccgaaggttgagccaatgtaaagtgtgatgccctcgctgtatgtatgtaaccgtaacttatatgaaactgggagccttcactgatccgaaccttttggaaaatacttcgattttgcgcgcttgttatgctagcctggctgcacctgtaggcgacttttgcacggggtcttttggagaagacttcgactttgggcacttattgcgctagtccggctgcacccataggcgacttttgcacggagagtcatttggagaagacttcgattttgtgcacttattgtgctattccggctgcacccataggcgacttttgcacggagagtcttttggagaagacttcgattttgcgcacttgttg

SEQ ID NO: 129652 - DNA, 326 bp, Zea Mays
caatcatctttcgagtaggtatgttgttgtggttcaatgttcgtataactcctttttccatttcagtcatgtatttatgtccgctaaacatgttgttgctgtcggctggtctgagatcatgattgtgttccaagtctaacctatcgatcacccacttctgttgatgttcttttataaccatgactactctgcagtctgttttaacctagacatttgtattcctttttggccctttctcgcacccctgatgttctatgcaattatcttgttcctgctgatcagcttttttgtttttccatgcttgttacatttcagctccacctttg

SEQ ID NO: 129653 - DNA, 875 bp, Zea Mays
ggaatctccccatcatggccctatcaagattgttgttatttttgtcttcagcccaataaattagattgaaatccccccaactgcccatggcccagcacaaacagatcggaccatgtggagctcttgcagaaactgcaactttttttcatcagattgtggtccataaactccagtaaaccaccagggaagattactatcatgtttgaattgaactgaaactgaaaattcattaccccccgggtgcccatggctgctagaaaggtgaactgatcaaacacatttccaaggacggagaagaccataaatctggatatagattccttcttcgtttcttgcaaacacactatgtcagggcgagtagactcaaccatcatacgcacaacatccctcctagctttcctattaagccctctgacattccaaatgagaatttttgacagattcatcgataacagaaatacaaccaaaacaatgcgaggctacagaaagccatcaagcacacatttcaaggcttaactccctaagcaaaggaacatccaagcattcttgcacattatctgggaccgaccatccaaacaaagctgctagggccttgatgtgtgagttggaaaggggcttgttaaacagctgtccaaattcctccagcaattcatcagtaacagccacctgtgaatttgtgacgttcaacttcatcatgagctccgcctggacctgtctgactgttgaatttaagccttcccttttctttgacaagcgactactgcgacatgggacaaaatctggcagaagctatttaattcttcttttttgaattggaggttgcggaagcaagcagtcaatgttcctggtgatattagccaccagcttcataacgg

SEQ ID NO: 129654 - DNA, 596 bp, Zea Mays
caagcccttcgtcttccctaccgtgcccaccaccattcagcggaacttccacggccccggcgctcgtcagccaacggcacggccattggagcgctgtggcactcgagtgctaccgcaaactcatcgaccttgctctgcgccacggcttagtaggaagttctggggcgccggcgattatgacgcggtggcggggaggtctgcgccacagcctccgagtatgtcacaacgctgaagatttttcgtgtggatcctattgattcttcgtagcatacctctgacgctcactttgcttcgtcgtaggtctacagaatcgcatgtgcgtccacccggaatttctccactccaacgcgacctcgcataaatggccgtttggaggtacacttgtgtgtggtttcaggcttcttcttttttcagactgcaatcttcactattgttgcagtatgtcttactttctttcccattgctatagccgtggcagagttgttggacaatgcggtggatgaggtgattaaacagatcccattgttgagccatacaatttgattattaggcaaatgtgttactatttttttttcaatcaaacagatagaaactgg

SEQ ID NO: 129655 - DNA, 308 bp, Zea Mays
taagctgactttgtttaagttaaccaaccctttctgcagttcgtatctgatacaaacctatctagtcaaggaaaactggtggcaccctaatttcatagacccaccaccaattgtacatgacttatgatagtgcaaggtttggagaggcatttaagcttaaacatttatgagggatcgtcctacttatttcatcgcacacaaggacatatatgcaacatgaacaagtagaacattaagaattgcattcacacaacaattgtgattcggtatggcttgttgtcacatggtgatccccatctccaataatc

SEQ ID NO: 129656 - DNA, 304 bp, Zea Mays
tcggaatatctgaaggttggatcctgagctgatgataacctaacctcagatctatcttggagaacacattggctcctctcaactggtcgaacaagtcttctattctgggcaaggggtacttgttcttgatggtgacctcattcagagctcgataatcgatacacatccttctggtgccatctttcttttccacaaataggacaggggcggcccaaggcgaggtgcttggccggatgtaacctttctctgacagctcatcaatttgctttttgagttcaaccaactctggtccggatactctgta

SEQ ID NO: 129657 - DNA, 307 bp, Zea Mays
ctggtttccttatgcaatttccttcccaggaaaggcttgatgaattggtcaattttcctgaattgaaaatgaagatttgaggggctaaaattgtggtggttccctggtcttcccaagccaaagccaaatctaggcttcactcagtgtgggtgatagcagaaaatgtacctgatgacttgcagaactactaagaaatatgtgagataggttcatctattggagctatagaagaaatagactttaattccttagattcgaaggaaattgtctggtttaaagtcaacgtgaagagcatagccatgatccc

SEQ ID NO: 129658 - DNA, 1131 bp, Zea Mays
gttttcattcaacatatcgagcagcgacgacaccatttcagggtctggctggctaccagcaccgtcatcggtctcaaaaatgcctagcttgttttgggtctcatgttccgtgtcatatgtgtacagttgggcaaattttggctgtgtcccacgctgtggaagtagtgtgccaatcctatggtgcaccaccccattaattttgaaaacataaggtgcagtgccgttatttatggttttgtcgatagctgcaccgaaagaggtgaatgcaaacaatgaattgtaggaccggataagcctcaagaaacgcctcgagcgagtacctccatcaaatttcaaaagatcagcaagcaaaggcggcggacattcaaatggttttaggttcaccttccctcctttgcagcaaaggttgtacacaattttcctctgggtggagaaggaatcgtttttgacacgctcttggaaccagaaaacagcgtggcagtatgggcatacatattcggggccaccgtagtatgacctctcagggtatgcatctacacaggaagaagagaaagggtagcaccaaagcaaagcaggaagaatgttaccaggaatgtcgggcataatacacaccttttagagcatctacgtatgacctatccaaaggaagcgtggtcgacaatggctcgccaggtagcatgtgatgtactctactgcgccggcgttgcctattggatgcggcaagcgctgaagggaatgacattatagatctactacctgtgccgacataagcatcactaacaccatattgttttttgctgaagcaatggctgaacaaacatggttgtacgcacgttttccctgtagcgcaggtattggctggttagaggtccccgaaaggttagatgggtctacttcgtcttcaccatgaaaaatgtgatgggcatcagttgtctcaaagactgggcaacctaaagaggatgcgtatttttggcacgcaagagaagtatcgcaaattaggatgggtaccggccatcgcatgcataaacaaagcaacgaacttgtgaggactaaccctgtgcaactacactgtgcctcgggcgcttcacttcatggcatctcgcgacacgcacacatggagaatcaagcata

SEQ ID NO: 129659 - DNA, 491 bp, Zea Mays
ctcctttaccaggcctgccgcagggaacatcttctatatcggatctctcggtacgtaacgcccactaactcctcgctcgacatccatctgaacatggagtgatggagaagatgtaagatgatcatgtgtgtgtcgctgcaaaggagacttggtacgtcggtggggagatcatggttggccgcagccccagcaatgagcatcgacaagacctcgccgagactcccagctacctcggtatgtgacgccaaccacctcctcgctcgacacctgaacaatgagatgattatgtgcatcggtgcaaagacttgtgtagatggccgcaaccctaggtttgctgccaacaacgatgacgagtttctaggtctcctccccgccgagagtcaccgcgtgcgctccgcctacatcgccaccaataatgacactgaccatcgacgtttccactctggccctatttgcttgctgcagcatcccttccgcatcatcgccaccga

SEQ ID NO: 129660 - DNA, 621 bp, Zea Mays
gtccgattaggccacaacggcccggattaaattatcctatcacacgaaccggtacgtgattcaggtcgatggatctaggatcaaaggtcaggattttaaacggtcgcgattcgatcggagacgtccatggtcagatcatcggccatcaccaatcctaccctgaaatggtatatacgtctgatctcgaccgtagattagtatctaacggccctgcgcccttcttcctcccaccagagaacatccccggcggcagactacgcaccgcggcggcgccatgaccttggcacagcgcccgcgatcccaggtggccaagcacagatccgaatagcccaacgcatgacagggaccaaggcaaatttagcatacggactcataccgaaggtagtggtgacggtggtgctgtcgacgacgcgatgcggagccgcggcggaacaagtgtggaagcgggccacggcggggtcctggacgacgaagtgcggcgacttccccaccagtggcggcccccaattcctcctccacggcgagcagcgacccagcggcgagcaccgaatctcaaccagggcaagcgatcacgccgaccacaacttgcgccccggacacagctccgtagatcaccccgcg

SEQ ID NO: 129661 - DNA, 519 bp, Zea Mays
tggatcaggatgccggtccttctgttcctgttgctgaggaagtgccagtgcctgaatttgctgaagctgaccccaatgggtgtgacccgactgctgctgaccccaatgggtgtaatcctgctgaagttgaccccattgggtgtactgtccgtgttgttgatgaagatgatgaagaagaggatgaaatccttctgattcggaagaacagtcggcgttacatagttagtggggaaagtagtggtgttccttctcctgccttgtctgccctaattggtctgcaagaattatctctggcgaactttgatcaaactcttgaagacatggttccagaagatctgttgtcagagccggcagatggtggcgcgatgaatgtttgtgctgatgtgcccgatgccgggttagggtcatcccgggcagtgtcccgcgcctcatcgaccttagagcgtggtcttgagggtcaggaggctggtctggattgcactgctcccacggaagtgattgagggaccttcagtcttag

SEQ ID NO: 129662 - DNA, 512 bp, Zea Mays
cgaggacgggggatggttccccatccccgcgaacttgacgaggactaaatttatcgcatttagatccctgtgggaactaaattatccccatactcgtccctctaataggggaattcctacgaggaatctgagattgggtccctattaccatctctaacggttgtggtgcgtaaggcgagagctcacaattatcaaagcggagtagacaaattagtcgaggatgagacgatgacgctaacaacaaggttgtgcgggaagaaggcgaagagctaggcgtgggaacacattgaggatcctggagtcgcggcgacgagagacacgacacacatgaagaagagactcgacgacgctagtggagcgcgacgatgatacttgtcggtgaagaactcgatgacgaatgtggtgtagaccagagacagagggtgttgacgcagcatgcaggtgcaacgtagatcgatgggtgtgcctacacagctcacaggtgtcaaacagctcgtagaccatacgtagga

SEQ ID NO: 129663 - DNA, 448 bp, Zea Mays
tttttttaaaagttattcgtaatacatctcgacgctagtttattttacactaggatctcggattcacgtgctaagataacgctcacgtggcagcaatcttggcgttaaggatctcgacgtcgaggtcggtgccatagacgtggacgccgaagagttcggtgtcacggatgtttgtagcctgcagcgggtggaggtagccaggcgacggcttgccttcattgcgtttcatgcagcggcaacgcgttggaaaacgaatcgtgctgcatggaaactcgaagaggctccgccacgcgtgcagtgcatgtgcaatttcccaagctgaaagcaccgagagcgcattgatttcaagaaacgtctcatttaattagtttaattagattgtgtttaatgtacagtggtgtttcttgataagtcttgaagctctgccgaagtttttttttgtttttat

SEQ ID NO: 129664 - DNA, 364 bp, Zea Mays
cagccaccaagaattgctagcaatcgatcaccagtgtgcccgaatttcttgtttccccaaatcaagcttccgccaccgttgaaccaagctcgccgtggccagccctccacaggtctgctcataccctccctgttcctgttctagcatctttgcttgctggtgatgcctctcgacctatttaatcgaactagaccgccagggatcaccgggaacgcactcatctgtccgccgctccctcggttcacgtggactgagcttgatagctcaccaactgtgcaattaagttgggggaaatactctttgggtctggaatttggtttagtccgaagctgggcaccggtcttggccccctccggctggtcta

SEQ ID NO: 129665 - DNA, 712 bp, Zea Mays
ctttatctaggggcactgcagccactgaatcataagtttcccttgacttagagatgatacggtcggtcgttcttttaatcgcagctgctgataggttgacttgagcagtaaaccctggaagctctgcaaccactcaaaattgaaaaaagcatacatcgataacctttcaaaattccatacctaagagttaacatttagcttaaattgtaccatttaaaacaatagaagcatgaatacaaagttcacgcggcaagtatatgtagagctaaaggacaaagcagaaccgtgttaagcaaacatcaatcgctatatttatatgctgcattgatacgagattgagccaaaacactgcacgggtcaatgcaaggttgctcaatgtcagagaatcagatggactttgagttcaaacgcgaagaccgagggttttgcggcgctcacctcgtcgcttcctccgacggtgggcgacgacggcggagaaggcgatattgaggcccacggcaacgagcgctgccgcaccggcgatggcgatgaccctgcgctctcgtcttctgggctccatcccggagccccgatgggttctagaaggttctggagaaggggccggccgcgggcggcgaggagagaagaaggtttcctagtggcggtgtgggcggcgagacttgtctcgaacggtagcagcgcctgagccagcgacttcgcgagcggaggtcac

SEQ ID NO: 129666 - DNA, 300 bp, Zea Mays
gatgggcctcgtacaaattggcagatgggcctcatatggcgcatgtgtctttgtcttcatggtttgcaagttaaaattagtaccacattgcccaccggttggtgtttaaatctgcttatatgcctacctgtgcgcgtagtagtactgttgtggtcaccggatgcgttgtgggatgtattttttggctgaaccaagagcatgcacgaggaacctgtcagagaccaggagcatgcacgaggaacctgtcagagaccgagatcatacgcagagacgggttatgtgggccctacctgtcagaga

SEQ ID NO: 129667 - DNA, 330 bp, Zea Mays
gttggtcgtggcctggttgtggcatgttaattccatagcatatttggattcgtgaattttcatattttcataataacaggaatctaattggcaccttcgggataccacttttacgaagcccgcgatgaggggggattgaaacgcaagaaactctaacagccgtaacgcgaagcttccaggagcaacggatgcgtacgccagctgcaggtggagagacgcgtttacgcctaccattgctatatgatcggacgatgaatattaaataagacgacgtggacaacgtgatagagcctgttttgaacccgctttcatatatagacagaaattttt

SEQ ID NO: 129668 - DNA, 449 bp, Zea Mays
ttcatgtatctgatgaattcagtcttcatgcctgaactggacaagttcgtggtggttttcatcgacaatatcttggtgtactcaaggaatgaagaggagcatgccggtcatttgcatgtagtgctccaacttctgagagagcaccgtctttatgccaaactgtctaaatgtgatttctggctaaaagagattaaattcttgggtcacactatctctcaagatggaatagctattgatccagataaagtgcaagaggtgatgaattggaagccgcccacaactgtccgtcagattcgaagttttctaggattggccgggaattatcgacgattcattctagacttctctcgaattgcgaagcccatgactgaattgttgaagaagggagcaaaatttgaatggggacagaaatgcgaagatgctttccacaccttgaggcaacatctgac

SEQ ID NO: 129669 - DNA, 722 bp, Zea Mays
ttaggttatgtcagtgatatacttgttttcagtggcatagtattttgtttatgttgttctacacgctgaacacgctaccgtgacttctttcttgctacacacactgcgctaggactatgtcagtgatatacatgttttcagtggcatggtattttgtttatgttgttctacacgatgcacatagggtgtgttggtgttatgcttgtgtcattccggtgcagtattctgttctcgttgaaatagcttctgtttcggccaactgctacaacgacagggatctgtgatcttggcacgcacacattgacagacacaacaaggcaaatcaatcagaggccagccaaggttattagttgtaatgtatgggattgcatcatggactggctgcaatgctccaactgctaagactgaaagatctagcctgaaatcaggtgctgtacgcaatcatggcttagtatttgccatatgcttgatagatgtcctttttgacttgcggtcttggccgaactttttttagttggtgtgtggatcatgcccacctctgattggatagggtgaccttaaacctacatcagacctcctttataattccccatggccagctgttggggtctctgagtatttgccattgttaatgtgggggcattcagggatcatgcaagaaatcatctaagcattagaacacggtccaccaccaagttgctgattggttctcatacaccaag

SEQ ID NO: 129670 - DNA, 696 bp, Zea Mays
ggtcttctaaacagcggaggagctagcggatcaaatcaacctcatccatttgatcaacctcctccatttgagtagcctgtctccttgtgtttttctcgtactatggacttgtgaacttgtggtattgggaacttgtgaacttgtggtattgtgaacttgtgaacttgtgctattgtgaacttgtgaacttgtgctttaatttgtggacgggtggacattttgtgaatttaactgtgtgtttcatgtgaaacgatgaattatggatatttgtggtattgtatgtgattctggatgaattattgaaaactggatattgtgtgcagattgaatttgtattttgtatgattgtttgtaaaacaaaagcaggaaaattctgtttctctgttttttaattacttccgacggcctcttatttccgacggccccgtcggaaataagctgtgacggcgtcagacgccggcggccggccgtctgcggggcccacctcgctttatttccgacggccccaccctggccgtcggaaataagcatacttccgacggccccgtcggaaaagcgggtacttccgactgggtattccctacggcgttacttccgacggaacccgccttaagccgtcggaagtagttacttccgacggtttaggatttacttccgacggtttaggccgtcggaaactgggcgttttatgattgt

SEQ ID NO: 129671 - DNA, 292 bp, Zea Mays
atcgatgtgggagctcggtcaccagggcgggcaaattcggcggcacgccggtgggagctccgccgggtggggcgtctcccggcccttgctgcgcgacgaggtaggttgaagacaaacctaggcggtccgatccttgttgaacggtcaagattagattgtaggataccccttcgcgctttagatctggaccgttagatgtgatcggacggtcgatgtcgtgtacggatcgcggagccgtagatcttcaaatcaacggacggtgtagcgtaccggttcggtataagttaaaaac

SEQ ID NO: 129672 - DNA, 310 bp, Zea Mays
gccaacgactctcgctagagccaacggtaggcacagaatcaacggtggacatgtggcagcactggactgtcaggtgtgccaccggactatctagtatgccaggtagccgaaggatgccatggctaactcaatggtcggcgtggcagggatggaaagaaatcacacattgttcactatccagtgtgcaccggacaatccggtgaacccatggacagaaggccaccagggcctcccaaacaaagaagaaataactctttggcccttggggttataaaaggatccctctaggcacatggagttcttacccaag

SEQ ID NO: 129673 - DNA, 1144 bp, Zea Mays
gccgattctgggccgtccagtcagctccaattcaatggccgcgagtctgcctcgatgcgactggacgaaggtggttggtgtgtagttaaaccaaagtactggtggcgtaaaagctctgcagatcctgggagatcctcacagattttggttgacaaggcatccagtctcttcaaactgaagcttcaagataaatgctacaactgtctcgctcctggccatcttgcctttcgctgctcggctccgtcgcgttgttggttctgccttcttcctgggcaccgggctaggtcctgccctcgtagaggcactcagaggaagtccaaatcgccttgtgccagtatagagccagtggggatatctttgcagggtactggcagtcttaattgtccgcagcagcagcacaactcttgtaccgagcctcgtctacaaaagcaggacaagcagccggcttccatgctcagactccctcctcgctcccccaagaaatcctatctacaagctttgcaagagagcccttgtatggaagcccgttacccaggtgatcctcgggggaggccagctcgtgcggccttcgccatctcggcgactggaccaattcgtcgacgcagggacgatctgatcagcaagacggtggtctgttccttcgatggtaacagtcatgaggttgactctctgttcgctggggatatgctgcgcgaaaaattcaaccttcagcatggtcagtaccagcttatcaagcactttcctgaacaatttctgattattttctctgatccaagatccaagcggtgggccctcgaccggaggtctgtttcttatcgcggtcgggtttttcattttggtgactggtcagagaatagctacgctagagaatctagtttcgagttcagagtcaaagttagggtggaagggatccctatccactgttggggtgaggatgttgcagcaagagcattgggtagaagttgtgccattcactttgttcaggagagctccagacgtagagagcgcactaggtcctttgatctgtgggcctggtgctctgacccctgtgacattcctaaggaagtgtggctaacagtcaccgagccagatagtgaattgccttctgtggacattcctttaactctggctggttcccatcatg

SEQ ID NO: 129674 - DNA, 476 bp, Zea Mays
gcgtaataccctacatccactgtccgtaagttgtattgaccgtgtcccttgtaacgctgtgtcccctcccttttatagtttaagggaggtacatacaaggatgctgaacttcgacatgcgggcccaggagcataatggaaggaatacattaagtgaataattaatgctgacagcacataaagatctttgctggacgttgtgttgcttctccgactagctactgccacatcttgtcgtgtctgctggtgggtgatggcttgttgcagtagaatacggagtagcctagtacgcctgttgtgcgtagaggtgtataggcgtagccgttcagattccctctgccttagtaacgcatgagtaatcagcgggagtcatgatgactgcagtccatgcggcattgataggcagtgacccttttcttggaaacacacgagtaatggtgagtcattgcccttgctatggtaacgtgtgagtaacag

SEQ ID NO: 129675 - DNA, 275 bp, Zea Mays
cggagaacccatcgcgccttgtagcgctcaagagagccatcagcattgaacttatgtttgaatatccacttgccagaaacaacattgcaggagggaggacggagaacgaggtcctaggtgttgttactctgtagaccagagaattcctcctccatagcctgacgccaatgaggatcagcaagagcagtgcgataagtctgtggcactggagactatgctgcagcatgaaacaaagcgagttgtcgaaatcccaacttagcacgggtggtcatacg

SEQ ID NO: 129676 - DNA, 600 bp, Zea Mays
ggctgtatatgaagctgctgacacaaagaggtgccatgatgatgacaaagatgtgtcggggtagtcgtcatgaaaggggatgatgctgaggtcgatgtagttagggctatcgaggacgtagacaaatgcagtgacacaatcaagagagggttgatgtagtcaagctgcgagggacgaatcatgcgacatggttgccaggcttgggaatgcattgtggatgaagcacacactagtgttgccaatatttgacgtacgaggtagagggccccaaccatgcatcagcgtttgagggaacattagaggtcttggcgatggttgctgtgcgctgaacgatggggtagaaggtgctgatgcaactcacggatgtcgaagtagacaaagtagttggggaagagacgatgacattaaagacgtggttgtgctggacgaataagaagccatacgaagtcggacgtgtctaaccgaaagattagtccaaacggatgtgtctgcccaatggcagcagttcggacgcaaggtatggtggtgatggtagcactcgatgttcgtgatggaggactcaaatagcttgacaaagattgggtattgatacgtgctgcg

SEQ ID NO: 129677 - DNA, 479 bp, Zea Mays
ctaatggaggtatatctcgaacctctttaggacctcaaccaacattttatgaaggggaaagcatggtccggccttccaaaagcttcagaagacaatcactttgtccttttcggggagaggaactgtgttttctcccccaggtctcactatgaatatatcgtggaaatacttatcattcatggcctcaatatgcccctttttatagtagatttctcgaagttaacatgactctgcctccacggccgatctttggtatcgtcaacaccattgtcaaagtcaaaaccttcattgtcaaagtcaacaacccgcctagaatctcatcaactatcttcgcagcactactcttttccatggcttcgtaaaaaccagctagtgcaagatcttcacttttcttaccctcggccatctcagttcaagaaaaaaacaaccgaagctaaaaacaaatgcaatccaatggctaaaaagcagcaagacagctc

SEQ ID NO: 129678 - DNA, 704 bp, Zea Mays
ttcaagccatctggttgttgaggactggcaacttcctgttctactatcccaaattgatgtacaccaacattaagatcaggtattgcatcttgcgctaaacaaaaaaaccatgcaagtagttcaagattttggtacagtaaaagtatgcaatattagcataaatgaaagtggatacggacttaccatgtccttgtacagataatccaatattttcttgtggcatgatgttatcattatcattgtcactgccagagacgtgtcctagcagatttagatcaagacataatttctgagacatgatcgatttttgttgtatgacttgtggtcttattctgagaagtgagagtgttttctttatatagagtggagtggacagtgcaccaaacaaaaacgaaacgtcaaggtgcagactggcgccaaattaaaatcacgaatcctggagaccggtaaaatatttgtgcaggtgcatggcgggaagagacaagattacattttggcgccacttcgagtggaacaagcaagcatcccacctttagtgccgctttggtcaaagagccaaggattaatgagcttttaatagttgttctgtaattaacgcttaatgcagataaagcagggttacatgcgtcatttcttctcttctgtaacctgtctcaaaataaccagaacgcctaattcaaccggacggagggagtatatttttt

SEQ ID NO: 129679 - DNA, 442 bp, Zea Mays
gagtaggcgggtcttggtggcttcagctgcggacagttgttcttgaagtgacttggatcaccgcagtgccaacatgcatttgccggaggttggttgcttgccactgagggggaatggaaagagctctgactctgctggctgaatcgtgacggagtgggtccagctggtctactgaagttgggccccttgggtggaaacccaaatgatcgagtcttctggtgccggtcctgctgctgtgcccggagaacctagaacttccttttgagatgtcctttttcttcctccttagccctttcaacttgcatggccttgttggaaaggtgagagaagttgaggaagtcttggctagccaaaattatcttgagttctggcctgagtcccttcaggaaacaggccatctttttgctctcggtattgacatcatctggcgcgtagcgggcta

SEQ ID NO: 129680 - DNA, 392 bp, Zea Mays
gaactgttgggctccgggcaaccctaatttgttgggcctcggccaaccccacctgggctgggtgtatcatctggtatcagagctagggcccattttaagaaggtgggaatgatgaggacatcctccagtattacccgttggcaaagacgcaattggctcagttggcccaattgtagtcggacggcggctgtgtgagcctcagaattatcccacctcgcttaacgtaggaggaggaagccactttaaaagggagatccacccttctcccattggactagtcttttggggcgattgggcctttccttgagttgggtgtgcttaatgaactgttgggctccgggcaaccctaatttgttgggcctcggccaaccccacctaggctgggtgtatca

SEQ ID NO: 129681 - DNA, 331 bp, Zea Mays
ctgcgtatgaatgccacgtagaagagtttctggtaccctatacgaacctgtgctagtgttctcagggatagaaagaaaagtaggagcatttgttctacccgtatcttgcaactaaattttagttttagtagagacacgggatgcagctcagttccatgacatttcttgaagggtgtggtgacattactacgactgaccagcgaatagaattcaccgaattggtaccatcagtgcgataataataagagagtaaataacttttgaaaagcagttggaaatccccttatggtttgggtctcaagagtgacaagaaacggtgagattgtgagtg

SEQ ID NO: 129682 - DNA, 574 bp, Zea Mays
ctgtgaatgtatatttatgtctgtcttgattcgatattgtgtagaccagatgtatgccaaaggaaatcgaaagcttaaatgcttatttttgttctgacagtcttgactatagatgtagatttttcccatagattttcttccctatgttatcgtcaactatatattttctggcctaggaaggtacttgttatccaatttgatgtttctatgaccgaaacacctgtaaattggacgggtattagatttaagtgacgcagaggttcaattacagaccttcattggatggatagtagatgtctgcagaggttcatttacatcccaagcggtctttgatttttaggagttgtaatttattgacaagatttgtatgacaaaacatgccgccgtgtgttctgaaaatagatgtggattcccaatgttaacgtcaatactattgcacgatccagtaaatatacttatatctaatttggtcccaagtggagcccttgagtcgatggtgtgactacttgcttgctttcctgaaggctgtagtatgtgttgcatctctggtttattactctcagttccggtgtcg

SEQ ID NO: 129683 - DNA, 600 bp, Zea Mays
gtttacaatttacaattgaagcggagattataatcagctagcagatattgacaaatgaaaagtagcttcatcacaaatgtaaactagcttagttcaaaaatgaataatggcttcaaatctcaaagaacttgcctccttgttgttgtggatcaggttgggacgacatggctgttgtctgcttggggctgtggatgaaacgatcacctgatgacctgagttgtcgtcttgctggagcagactggaggttgtggacttagtgccgtaaacactgcagattgaagcttcaaattcagatgtagtgacagaatctgaataaacatatgcagtgacagaattttcacaggctgttgtacatagtaatcaggctgttctcgttaagagtttcattgtgttatttgcaataataatcagattctggagagtacactcacaacagcctgtgaaaactggcagcacgacatgtttatgcatatgttctactcacaatgaagcttcaatttgcataaattccgtcaccggcgtcgacgttggagctgtcggagatgtacacgatgccggtgaccttgtccgtgtacccgctggagtcggcgtccaggtcgc

SEQ ID NO: 129684 - DNA, 1104 bp, Zea Mays
accatttcctaaattatttttctgaatttcctaagcttctggactgggcgcaaataacagagagacacaggggttattacgcaaaaattcatgagacacaggattcccacagacaggactgcgggttgatttcgacataaggcagggtctctttagctaaaagtcacggtgaaggggtatcgatagacttcggccgtccgatcaaatatcgaaggccaggattagatcttggcacactgaaccggtacacaaccctgaccgccggatccgatttgaacaacacagattttattatgattccacccatcccaatcgctcgttcaacgatctgtggtcacgatccgatcacatgaaaaggtacatacagattagatcaggaccgatgcccaaggatccaacggccaggaagcatcgtctacccatttcttcctccctacgaccattctatggtggcgcagacccccagcggcggcggcgccatggccatgaccgagcgaggagctcctcccagtggacaccttcaaatcgaaacgaatctacgcgttgttgagactacggcgagcaggtctagggcacacttacccgtagttaggacgtcgaggtaccccgaccatgatgagatgcggatccagggcgagggaaaacttcgatgagaaattcccatccacccacgacatcacgagcttcgattcgacttcgattatcatcccctcatgctggcgacgctacttgactggaatcccgaccccgaacgccattccccattggattcgccctaggcggctattacctcactgcatatggcggtacagcgaaggaaaggggggcggggacccagttttatactccgagaggtgtgcgagatctccggggagccatgaccacgcagagcacggaaatcacgggttgttggggaattgccacgagatccgatgggtgcggcaaggttgtgcagagaactccgtttcctgggcacgcgacgcggaggagacgggtctgacaccagggagcgattggggaattcgactttatactggagcagagccaagattgggaggtcggctagctagatttccgccccaggccgttgccgggggtcttggc

SEQ ID NO: 129685 - DNA, 466 bp, Zea Mays
ccccaacaaccagcttcccttcgctggtaatcacatgtctatcatttttgaatccgatctccttcatctcattaaggttggggttttcttctgaaggagctctgctcttggcagacctatcgtggtgtcactgttccaatagaagacacacatgattctgtagtttacgttccctttctcattcgtggacttgctcttcccatctcccctttttcccgcagcctccttgatttctatgaattgaatctgacgcatatgaaccctagttcaattatgcaagttgtcattttcgtacatttgtgcgaggcctttcttgggattctcccccacttcgagctttggaaatatctttatcactgtcagcccgggatggctaggggacaacaccagctagttggcggtgcaagtctagagcttcaccggggaaggaaagtggagtatctcgatattcctcttaaggacagta

SEQ ID NO: 129686 - DNA, 626 bp, Zea Mays
cgaagaaatggcggtggctgtgatctggagcagtgaaaattgttagggtaaagaacgtgtggatttggataatgggtttttatgggctacatacggttgggtggggaataactgggtggtatggctagaccatgagatacaactcgactagggctttctctcgttatttacgctaaattggtttggttgcataaatagtgaacggaagtgggcttaaccggatttgttggtgttggtggtcagggcactctacagttattgagagcctagggctcttaatatatatatatatatagggacgagataatggaagccctggcctttcattagtaccaggaagccccagccaggtatagccacgttccgtaccaacgtgcgtcccatcgggcacgggttctgacttggagaaattttagcgtaaaacgtgaacaaaaacagcgtaaatgattacgaattttagcgtaaatcgtagatctgttttgaaacggcgaatgcggcccgaaaattacggcgtaaaaatctcgcgcgtcccatcgtgatcgggttctggctcggacagattttagcgtaaaacatgaaccaaaatagcgtaaatgagtacgaaatttagcgtaaatcgtatatct

SEQ ID NO: 129687 - DNA, 801 bp, Zea Mays
agacgaggctaggtcggaagcagggaaaggaaccgcggtggtctggccggaaagcacgccgagaccaaatcaacggcggagcggtgttgccagcggaggttgtccgcggcggtgcacggattggggcaaacagggaggagaaggacggcggcgcagcacaccagggaaaaagggaacgggtcattgcgcatgatttgcttggaggtattggagcgaggggaggaacacgccaatttataccccgcagtagcgcgcggagtccgaccccaagagcccaggccgaggaggcccatgtctggcagcggcaatcgcgcggtggtcgttgcgggagcagcgctgagaccggatgccgttggggaagagtgtgaactggtggccgggtttgttgcggtgctggatgaagttgatttggagaagaaccccgtcgtctacgatacttcctgatacggggtccaacatagggcaatggccagcgagttcctgcgcaagtttgttgaggggaggtggatggagcttctgacagacggggcccatggcacggcgacacggctgggtgcccagtgcgtgacccgaggctggcgagtggggcctgaaacacagtgaccgtgcacaggaacagggccaagtgggccggcgcgtgtttgacgggggaaggaaagagatgggccgagacaagtgatatttggcccaaccgcaggtttccttcactttttccttttctaatttaaatttctatttgttttaactattttaaatttaaatgagtcactaattcaaatctgttttgaatttcaaagtcca

SEQ ID NO: 129688 - DNA, 328 bp, Zea Mays
acccatcgggtatatcgggtacgagttcggctgcgtagtacccatacccgtctacccgtgggtagtttctacccgccaattcatatacacaggccaatatacacatgcaagcaggctaagtggctgacaagtgggccgtcaagcactcaagtcaagcggtgaagcaggcctcaactcaagctgtgcgtgtgcggtacgttggattccttgcctaaaatagacgcggctacttcgatctttggagtgcccatgtgcatgtgctacgccgctgccgtctgcggaccggtcaaggcgtcaagcaaactgcaaacagcaaaccctagctcgc

SEQ ID NO: 129689 - DNA, 721 bp, Zea Mays
cctaatcccaacagaaagacggcggcaacgcgaccacaaggatcggggaagggagcggctgcacgtggcctacgacaacctgcagctagcgctggacgacgtcgcgacctgcaactagccagctagtgccacgacccacggcgagtcgacaacatgcaagttgtagccaacgtcttaacaacaaccatggatccataccaagattgttgatccccgctgcagcctacaggtcataagaattcaggtgtatgtgtatcagtgtctactattagcatttgtttacatttagatattttatgtgattgcatttttaccatctttttctcatgtgtactgttagcataataacatgtatcaatcactttaatacttacgtctccatatgtaccgttacaaaataaatatttgagtcaacagtcattttgttccgtaactctggtgtacaatatgctagtttaattgctagtttaatttgttttagactaggcattgaattgagtgtattgtgatttatttgcagatttgaaaatgaagagcagtgctaccactgatttgagcagttcttcctgttgcaactgctggcgttgaaagaatcttttcttgaatgaacttcataaaaaataagctaagaagcaagatgggacaaaaaaaatttaatggatgtttggttacttttattgaaagacaattcttcttgcaagtcaaggatgaagacattatc

SEQ ID NO: 129690 - DNA, 719 bp, Zea Mays
agaaataatgaccgagtgatgactaagcactttttagaaacggtgtctgacccgggaaaaccccatttgtatcacgtcgccgcacgcctctgcattctaagccctagcctcactttttgccttcgaacctcctttgtttccctttgatttcacttccgctcagtccgccgacgagattgcgatggcgcccaagcggaagaatcagaattatgttgttgcggtcattcctcctattgatctcaacagccaattacctttcgcaggtaatcatatgtctgttatttctgagtcggatcttctccaccttgtctctgtcggagttcttcctccgaaggagcttttctcttggtagattggtcgtgggtttactgtcctgacagaggatacacacgagtccgttgtttacatcccttttcttatccgctgccttgctcttcccatttctcccttctttcgagatctccttgacttttacaatctgaatctgactcacctgaatcccaactctattctgcaaatttctgtctttgttcatctgtgtgaagcctaccttggaattcttcctcacttcagtttgtggaagtacttgtatcattgtcgtcctaggatggctgggggcagcactagctcgtgggtggtgtgagtctggagatgcgtcgtgggaggaaaacagaataccttgacatcccacttaaggatagcattaaaggatggcgttt

SEQ ID NO: 129691 - DNA, 693 bp, Zea Mays
gttccggtgaacaccgtatggtagagctagaattgagcgctcgggaggcatcaggaactcacggggaaacgattttgtgcgctggttcagctggagaagctcgaagataacgggtcgacgtagaaccgagatgcggcggtgatctccggtggcgcgacgacgttccaacgtaaccactgtggtagagttcaatcaacaatgtgtataagcaataggaggtgttaaggagctaagaacaatgaacaggatgtagagaaaagaatcacggtcgcctgtccacgggagacctgcccacggcggtgctctgcccgaccgtgaagacgacgacgacgtcgggagctctggtggatgaaacaagacgaggattggtttgtctgatgcgcaaagaatagacagaacgagtgcacactccaatttatagagagaaacaaggaggttggctaattttggccagaaagagagacgacgccgtcggccctagaagatccccgaagccgagcatggcatctctgttaacccaaacgtaagcactcatgtaattcgacaccttcactgcggcgtattccagtaaagcagctacgtgccaatgtagagacgcgagaagaacggcccatttgagtggctcgttcggttgaaattctgaagtggctgttggtttttagtcctacattgctggtttaagtggtacagacc

SEQ ID NO: 129692 - DNA, 521 bp, Zea Mays
gcaacgaggacttttgtagcttggcgctgacgagcttgaccgtggtgaggtccagctgaggactttcttattgaaggcggtgaccatcgatggtggctatcaagattggtcctgggcattgggggtgacgccgaagaataatagaagtgttattttgccatgggaagggtggcacttccgctgaagccgtatagcggttctcggcttgctgcaattgttgtggttgatcccgtgtgatcaaaggcatgcagaaagatgatatctgcctggctactgctgttggctaggactttgtgcatatgccatcttgctatgttgcatttgatgaccatgacgtctacatgtggggcacttcaaagattcgtgtcccttgtatcgaaggttaggaggacatgcgacatcttgtttgtatcactggtccggtgactacaacatgattgacccttttgtaagtcttttcgttgccttttattttcgaagtctatgctagacccgccagatatcatgtttattatgccgtg

SEQ ID NO: 129693 - DNA, 395 bp, Zea Mays
aacttttacattcttctttgaaaaaacaaacacaacgtgaataagtgtctgatgtgaaaccagacgtactctaatacatgcaggattgtacgtaggacgtggtagaagtttggtcaataatatgctactagaacgagcagcagcaacccagattaaaggaaatacatatacgtgggtggtgcttattcgtcactttagtaaaacagggtattttcgacagttaaagccatcagacataagttattttcgacgtacggtcgtaggcttatgttcgacagtacccatccctctgtcataaagggtcaaaaatactcttatttccgacggtggccattggacataagctatgtctgacggcacctttcggccatcgacgtttatcctcggtaacggta

SEQ ID NO: 129694 - DNA, 540 bp, Zea Mays
tagacataaataatacggtaactttgatccaattgcacgacggccggtgccgatatggcgtgggtagctcagtctaacaagggggtggtggggcgacaggtcaggcgaggcttgcagaggatggtgactcgatatggcgtgggcagctcggtccaacaagggggtggcggggcgacaggtcaggcgaggcttgcagagggcggtgactcgatccagtggcattgatgctcacaagtttatatggtttgctctatttgctgtcatcggcgtctaaaaagacaaaaattcttcccaaccgacaaaatttttcgtcggagattaggactgatagaaaaacgtaacagaatcgatatcttagttggacgaatttttttgatgaccagaaattttgcctgtttattattcgatagtattagtatatacaaatatagatataaatatactgtgtggatctaggttattagaaccttaaatttgaatctttttattaactatgtgatatgtgttttcttattatacatttttacaagcttaaatgag

SEQ ID NO: 129695 - DNA, 714 bp, Zea Mays
acatcatatgatgaatggttacttctagtatttgcgtatgccttcagtagtacattggatatatcctctatatttgaactttcgatggaaagaatttgtaggccgcttatatagaccctatttggaaccacttataatcgattcaattataatcatcttactgtgaggatcttttctattctcgattatgctagtccaaagttataaacggagatcaaaagaatcagaaataatctgtgccatagtctcagtggtgaacaatgcagttgcccagttgtcccgttcaaattcctgaactattccgctcattgtcgccaccagtttgctgatttcttctttgatttccttgatgtaggcaaatcaatgatacattatttagagcgtgattggttgcctgctcggcccagcctgagcgtatccagtcattcaggcccatggcggcatgctaaagaggtgcaataggctattgtttggttactttgtttcatctcatgatggcccattagagcttgcctttggttgcaaggctgtacagacacttgagcatggcaagcctcccaactagagaacagaagacaccagtcatgacaacgatgttctttctcctcactaagtatgcaccttttcctcttgttgcctgccgcagacccactagtagcacctgcagctgcctcctagctcttcggagcctccccaaacagccttgaaacatca

SEQ ID NO: 129696 - DNA, 726 bp, Zea Mays
cagcctttacgcacggttgagggtgtgcaccgggggccagggtagccggctgtgccccaatttgaactacacaccgctcgggctcaaggaattcctcaccggaggccaaatctgggcggaatcgcccctcctccggggtccaagcgcgtcgcatcgtcaccgtcggtgagaaccagttagccgcactcgcttttgtctactcatcgtttggcgcgtaataggttggaggtagcgtcctgggatatcatgcgggtcatctccggccatggtcgccgccgtgtaggcgggcggcgccgtcgtgcgctagtttcccgaagggggaggggtgaacgtgagccatcggattttggatgtatggcgtagattagagtgagcgtaccgcttcgacttgggtttgtcccagccgttagattgtcgatgtggggacggattggatcgggcgtgttttaaatcctaacccttggtctttgatccgagggaccggatcgtgtatcgcttcgtgttatgatagatctaatcgcagctttcgggttttgatcgggtggccagagttatcgcgtaccccttcggcccgctgatcttgtaaataaaaccctcggtttcagagaaatcgacccgcaacccataggactgttctctgtgtcttaggagaattaccccgaggcccctgatcttctctgtttttatgcgcacagtccagagattcagaaaatcagagaaataaat

SEQ ID NO: 129697 - DNA, 1574 bp, Zea Mays
cacaacatagcacaagatcgacctctttattgttagcctggtcaaccactggccttcgatgtcgagctccaacacccttccaatctacagtcagcgatgcgtctggcctaaggcatatgagcaccgccaggtcaaggcctcctctgccaccacccacaacaatacctaagtcattgagatgttatctgggagtcaacatcatcattcttctcctcggtgcttcttgttcacaagcatgatgatagttggtgttgttgcttcgactattgtgccctcaatgattgtactgtcaaagatagtgtcctcatcttggtgatggtcgagctcctcgatgagttgaaggacgcctgtctcccaccaatattgacctccggagaggtctaaggactaatatccagaagagcagtgtgttcccaatctgctgtggggaagaagatttgaattgtttacaagacttgctgccatgtaatatttcagattttccatgtaagtaccttggtctgcctttgtctcccaagaaactcacaagggaccaggttcaggccatcgttgattgagttgctagccttctgccaggatggaaagctgaacttatgaccagggctggtagagctattcatgtgcagtttgtcatgacggcaaagatgatttatgcagctttggcacttgaccttcttgtttgggccatcaaagcaattgttaagttgaggaagggcttcctttggaggggcaggaaagagttccgtggtggtcattgcctcttggcttggcctaaggttacccgtcccaaggagctgggtggtcttgggattagtgagctaaagaacctatgttgggctctgagagctcgttggccatggctgcagaaaacagaccccagtaggccttggacggacttccccactcgtgtatgtaaggtggttaaaaatttgatcgctgcagccattattactaagctcggtgatggagccaataccctcttctggaaggatagatggttggatgggaaatgtattaaggacatagctcctgcagtgtttgatttggtgcccccgcgtcttgccaacagacggttggtcaaagatgcgctccctaattttcagtggatctccgatgtgaatggggcaatttcagttagagtcattgctgaattcttggaactttgtgaagttgtgctccagcctggaataagggatcgccacttatggaaattcagcgcttcaggggagtatacaactagttctgcttataaagctctcttccttggttcggttcagttcgaaccagcagaacgtgtgtggaaatcttgggctcctggaaagtgcaagttctttatatggcttgtggaacataataggtgctggactgctgacaggcttataaaaagaggactagaccgacctgagcagtgccccctgtgcgaccaagaggctgaaaccataaatcatttgctggtcaaatgtgtttttgccatacagttctggtttcatttccttagttcagtggggctgcaggaactgtgtccagctcatgaggattcttttgagtcgtggtggaagtctagcagctctcgg

SEQ ID NO: 129698 - DNA, 666 bp, Zea Mays
tggcggtccagttcaattaaaggggttgaggagcttgaggatagcctagggatgctagaacaagcgacggagtaacttgaactgacctgagctgagctgactggtgatcgactgggagcaatactgggtggtgtggtgtgtgatgatgttgcgaagctgacggcgggctcaatttatagagtgcaacagcggtggccgggaattgcagtggtgacgcgcagcggttggaggatggggagtttactggtgcgtgtgattagtggcgaaaccccatggcatccactccggtgatcaccggacatgcgacgcacggttaaccgcgacgtggtaaagcgtcaggacatgcggcggacgacggtggtggatcaacggtggtgaaagccttatccgaaggatcggtgagcaaggggagaggcacggcggctagccggagtggcgtccagctcatcgacggcgatgctatttcaccccacgacattattcatccactccaggcacgaatcgggacatcgacggcacgaatcgcggcggagggatcgtcgacggtgagatcactgatactcatcttcttcagttactgtaccatggcattcctcttcagataacctgacagagcaacttcagggcaatttctctccagatttcgcataataacttcatcatctc

SEQ ID NO: 129699 - DNA, 662 bp, Zea Mays
aaaagactcgtaagtattaagtacatatatatttttataaatcggacacaagttttaggccgacaacattttttagttcataaacttgtaggtccacacatggctattgcactctattgaccccattaagagaaatgacaaaaatggatctgtctttttgtataagccaaataataactatgtgcaactccacctcaaaacctcctaaccataataccccaagcaaccaaaggaccagtggtccataagcaatcataaggtcaccctcttcaatgacacctacaaccaattatccatggcatggctagtggagcaaattgtgctatgcttctcaaagtggaaaagaagagcttccacaataggcctggtgaaacgtactttcaactagagcacatatggagtgctcttcacaagtagcccaagtggtgcgcgtggcatgatgatgatgatgctagatatgcaagcaatcgaccacgtctcaaaatagaagttgattatagctctgcatcgctagacaatgtcggacccatatgacatattggccatgaaagggaaagagcgcaacacaaagggaaggggccaacaacgagtagcatggtgaacaagctctacaaggctagctagaggataacacaatcaaaattatttgagcacttcaccaa

SEQ ID NO: 129700 - DNA, 532 bp, Zea Mays
ggcgcactgatcgagcgggcccaacgccaaggaacacgggcgctgacaggtgagccaggggcgcagggcgtgcgtgcgcgaagcggtatccgcgatctgggccatgcgatcaagaccggactgaggggatcagactagggagggatgaacggttgtgggcagcactgctcctctctgcggcggtgaggtcgtcggagttgaggcaggcgcgtgctagggtggttccggggacaccggagttgggcagagagggagagaatgccacggtgaactcagtggcggggaaaaggccatgaatccgcggacagagggggaagaatggcaaggagaaagcctcgggcggaccggaggaactccggtgaaggattccggccacggggagggggcttgaggcgcgctaaggcttgggaaggcttcagcagagggaggggtaccttagggactcacaccggggcactggaccgggctaaattggtcgaccaccacgtgggcgcggcggacctccacggccgagaatcggtgatgccaaaat

SEQ ID NO: 129701 - DNA, 535 bp, Zea Mays
ctcgaatccataaagtccaaatatcaaagtggcgccaaaataccctaggaacactctagagaagtttgaaatcaaaccaaaatcgtttgacacgatttgacataggttttgtctcggtttggacagtgctgacagagctatcttcctacgccacaatatcttctcacccaggccatatcttcacttgggactcacacacgacaggaagaccttggcacggtgaagagacgctacacaggatccttggcaagatatgcatgtttaggtcggccaacaggcgtttgaactcagacagaattacacttccacgtgtttgatcgcgtgctcaagcgctcggtcgcgcactgtctgccctatgcgcgcgcgccgcgcacggtcggctcctatcccccgcgcctgcacccagccatgctcgagggcgccaataagtacctcgggtgcacaacgttctgctcttcactttgcctcacgccccaagcaaaaactccaactccagcgagctctccaccgcccgccatcactacccgagcacgac

SEQ ID NO: 129702 - DNA, 290 bp, Zea Mays
gaaatcgtgagcacaatcatacactatatacgaagcataatttaacgaacgtataatacgcatcgtcatgactcgacttataaatatagagaaagcgatgactactttggcatgtcaccacctctctatataagccaaaacaatttctacctacatcgaccgaacattcatattgagcacaccttattgtaccctgtctcacatacaaccatgatgtggcgtgcactcgagacacttcgatcaaggtagcgtaaccactagtatatgaactccgacactcatgtcttaac

SEQ ID NO: 129703 - DNA, 500 bp, Zea Mays
ctatcttacccttgattattttctccacttcgccactacgcgagtcttgccttaactctatcatttgtcatgacttttgttattatcaccttcaccttagacacctctatatcttacttgaggtttatcttataccagcatttaaaatcttctccctttccatctcaatttgagcatcgtactttacctacttttcccttggtcgtatcctcttctttgtcacctacgagtttttaactctatcctttgttgtgttttgtttgttatttcctttacccttctcatcactctatcctgccttgtgattacattatgtctgttatctaaaatctccaatctcttatcctaatttgagagcggtgttttacttatctcacccttggcaatatcctcttcttcacctcgtgtaagccttgacataactccattctttgttgtacttataccactagctcttcaatgccttcgtcttttccctcatacccttgtctgttatcgcc

SEQ ID NO: 129704 - DNA, 1154 bp, Zea Mays
aaataaatttataaataaataaattgatcacattttgggtatgttcaaattgtacttttaatctgaggataatttaccaccggatttgaatttgaaattcaaaatgagaaggggaaaatcagaaaataaaaagaaaattaaaaagaaaaccaagcgcgggactaatctctgaacccggcccatctgacttcccctccgtgtggctcagtccttgtctccgcgcagtggcactgacacccggacctacctgccagcctcatggattttccttgcgcacgtcgcccacgtttgggatcgctgaccattggggcccactcgtcagccacacagttgcgtcgtcccctatcctcgtcgtgccgttgtgccgcgcccacctccacagatctcagctgtgtgggttggctcgttcctccctacgactgtggacacgtcccgggtataaaaccctcccaagctgcgcccctatgaccgattgacgcgtagagcctatcaccaccacgagagatcgagagtctagggtatttggggccgccaccgtcacctcgcctccgttcgtggctttggtccatcggtgggtcgtcgcgggagctctagtgcgcgtaattggagaatcgggacgacactgccgcgtcaattgctcgctgttgcactgccattcgccgctcgtcggtgaccaacactctgcgcggcaaatttctctggtacgaaggctcgatcatgtccgttgtcgtccctatatcgcgtagaagcaggcagatttgaaactagggcacttactcacgggttttgggcttctccggcgagattcgccgtggaagccggccgccgccgccgtgtttcgtcgccagtggggacgggcgatccctgtcgtcgatccatcggcgaacggttgtgattagacgctaaataccggttcggcagaggtgtgcagaactgttggatcccaagcgtgcggtcggattagattccggctctagtagctcgtctgccatcgattcgcagatgtgtggccacgatttgaactaacgtagtgtagcgatgagtgaaatcctgaccactgagtatccatctgatggtcgcggttggatcgggagactgatgtctcgggaccgtcatatatgtatccgacgactgcgaacgattaccagttcgag

SEQ ID NO: 129705 - DNA, 397 bp, Zea Mays
cccggctgatgctgaccccaatgggtgtgaccttgatgatgctgatcccaatgggtgcaatccggccagagctgatcccaatgggtgtgttgttcgtattattgacgatgaggaggaagaggaggaggaaatctccttaattcggaaaaacagtcggcgttatatagtcagtgaggagagtagtgatattccttctccagctttgtctgctctcgttggtctgcaagaattgtctctggcaaattttgatcaggctctcgaggatgtggtccctgaagatctgctgtccgagccgatagatggtggtatgatggacgtttgcactgatatgcctgatgtcggtttagagttatcccgagcagcgtctcgtgcctcatcgaccttggagcgcggtctt

SEQ ID NO: 129706 - DNA, 283 bp, Zea Mays
gggagagggagacctcggcagctgcaaatgagaaaccctatcgcgcgctgatgtagcctcggagatgaggagggtctaacgggtgacaagcacagcaggctcacaaagaatgcagtcttcgtgtgtatcccatgggcctggctgaggccaaccttttgcacgaacgtggcctggcccaagaacagattcaagcaaccaaacatacaggaccatgtgatttttgcaagaaatgggttttgcacgctcggacgcgcaccatcaatcacacaaatattgaatttca

SEQ ID NO: 129707 - DNA, 335 bp, Zea Mays
agctatccctttcctagagcccctcagccatccaaaaagaaagccccctcccacaaacaaaatccacccaagagagaggtgaggtaccattgtgagtattgtgagagggatggtcatctagcttccttttgctttaggaggagagagatgagcggtgggtttctgagtcgagcaggaaggacatgaaccaccctctcatggtgttcatgctcagcctattcagagacatcctgcgagtcctagaggtgtttttcctcttgccgctagacctcaggcagtgagaccacgtggtggtcgtgcccgacgggatgctggtcgtgtgccatatggccaag

SEQ ID NO: 129708 - DNA, 424 bp, Zea Mays
tgcccttcttgtcctcgaggagtcttttcttgattgctgtgaagatctttccatttgtgcgctctatgattctgttggactgtgggtggtagactgatgcgaaaacaacctttgtccctaaggaggcgcaaaatcctgaaagtcttggttgtcgaattgttttccattttctaccgttaattcggagggtacctcgaaacggcagacgatgttttgctagaattttttgagttgtttttgctgttatggtggagactgcccccgcttcgatccacttggtgaagtactctacaaaaataaaggcaaatttgaggttgccctgcgcggtggggagtggtcccactatgtcgagggcccaacgctatagaggccatgtgtgggcgattagcttcgtgagctggaaggtgtcctgcatcgggtgtga

SEQ ID NO: 129709 - DNA, 365 bp, Zea Mays
ctaggtttcattgggctcagaatagtgttgtcctcctcaccttcgttctcacttcctccttcagccatgatctgttcagcttcagtagtggaggtacctttgacaacaacctcttctggcacaacaagacccgattgcgtcatcacttctgatattggtgctgtttcggtcgcttcgacctcgtccccctcgcgagacaccctagcagtggatcgtactctggccatttcagtgttcacgcttttcaagacgaagctgatctcaagtgacgaagcgcttgttcgaaaatgcaatacagaaagcttcagctatggttaaaatttttaacagcacaacagtgcgatggtaatgaatgctgtgataac

SEQ ID NO: 129710 - DNA, 324 bp, Zea Mays
tctgcaaacttattgttattattaccaaatgcacagtcaatcattaagatttagactgatatacgcaacactattttatgcataggggtccctcagaggctcatgcacaccattcgtcgtttggagctagtagttgacttcagatcaacaactaaaatgaccatcagggtctagcgctcacaaggacattcactggttgcattgtgctttcaagcacataggagaatatgtgtgtatataatggtggtaaagtgcacggcatcaggccaatgctgccaagcaaagatttttatatgcagagatgtatagtccacctcgttttat

SEQ ID NO: 129711 - DNA, 668 bp, Zea Mays
ggctggacagcttgactaagctacaagggttacgatggtggcctcggttgggattgcggtggtgtggttcgctctggccgcggtggtctagcgactgggaggaatgtgggcggtggcatttacggtccggtgaaatcccggtgagggactggcgaggctgagtggctagcatatttgtgtccattgagggccgaggcaaggttttataggtgtggcacgggcgaggagagcgcaacacggtggtggcagaccgacgcgccgggacacgcgcaggcgtggctagtgcgcgcgctagcgtgactgctagcgtcgagcacatggcgcagtgacttgagcgcatcttctcttgcatgtatggcttcaaccagtgctgatcttggcaagagatgtgtatggaatatctcccttgcaccttaagctatcttatttgtatgggggtcgaaagattttgagctgtgattaaagagatatggagtgtgcaaatggtgtttgtctcactaaccggatccgagaaaaaaacactatgttgtcatgtcaaaatgtttggtttcatgttcaaactgtaccaggtcatggctaaggtagttaggcacatttttcataattggggttaagggttttgagctctgtagcttagtgaacatgtgggctctttgggatagggctga

SEQ ID NO: 129712 - DNA, 487 bp, Zea Mays
gtaaaccggtatgtgctcgggatgctcggatcttaaatgaacgacacggattttatgaagcctgatcttttccgagtcccgcgatcatgatccaagggctccgatcaatcccaccccatcgagacctaacacctaatcatggtcgtctatctaggaaccaacgacacataccccgtcttcactcccagacaacccaaggcggcgccgcccacccatcacggccatggttcgccggtgaaggcataatgggcgaccccctgtgcaatctcccacgtggtttagcgctctgcaaggagtagaaaacatcgaagctagtagtggcgccatacggaggaattaggctgtgaaaaatacccgcccacggtgggggcggatctgcggcggagccttgtctccagcgagcaattgagtcggcgatggtagccctatccacccgatgacaccgcagaaggtttgcacatgaactagcgttcatccccgaccacgc

SEQ ID NO: 129713 - DNA, 298 bp, Zea Mays
cgccgctgtgggctaagggcggcctcatggaggtgggagagggtcgctggaccgtcaatcagtggctaggattaagaatctattataccgtttcgacttgggatagggttgaaccgctgaaggttagtctgtttggcagaattgattaagttagttgctcggtttattagattgattgagttagttgcttggttgttgagaaaatcaggaaggctttatcccttgttagttcgttgagaaaataaaggagcctctaactttaaagaggaacggacgaccgaaactcatcatcccaaac

SEQ ID NO: 129714 - DNA, 286 bp, Zea Mays
caatcggcttaagtcggcgatgacttaagacggtgcaacatgctcgcgcgtacttaacgcagggtgaccactataccctactaacggagcaatcggcttaagtcggcgatgacttaagacggcgcaacatgctcgcgcttacttaactcggggtgaccactataccctactaacggagcaatcggcttaagtcgacgatgacttaagacggtgcaacatgctcgcgcttacttaactcggggtgaccactataccctactaacggagcaatcagcttaagtcggca

SEQ ID NO: 129715 - DNA, 360 bp, Zea Mays
ccaagggggagtgttaagaaacctttcttgggacaggaaggcccatgtggcccatatgcatgaaaccctagtttttgtctataaatagagatgagatccccatatcatgtaaccttggacaacaacaccatacactaataaagaatcagtccctctctacactcttgtctccttgtgttctactattattgagttaaaaaacccttggactacactcggtagcaaggggttcttaacagtgtgaactaaatatagaagctacatggcagtctgtaaacaaagaactcggtgacccaaggctatggagatacttggtatgtagaagaaaataggcaagaaaaaaagatcttgagtgacaat

SEQ ID NO: 129716 - DNA, 326 bp, Zea Mays
aaattatttctgctctatataaataggaggactaataggtgaactaatttttttagtcaatccttcagctgacttttaggtctacctaataattagctttagccgatttaaacagactctaaacaccagaggtgtctcacaatccaaaatgattgaaagtcaatatctacatactctttacaactaatttaatcttcttagtattatgtcaacaagtttccatttaactgtgctacactcgtagcagtatctccagcattgacatcatatactaattaatatctacatacaagcattcaaaatttgtactcaaatataagtgattt

SEQ ID NO: 129717 - DNA, 486 bp, Zea Mays
cgttgaccccaccaaatagcatagcccctgatttatatccgcaagatatggcatattttttcaactcctctttttcggcgtctgttaattcttgtccgagcaaatcttgaaagttaaaatctccttcttctgaaatttcatcaatttgctcttccccttttcagttgccgcattcactgcagccacagtagcttcttcttcagccattttcaggagtatattgtcaataacctcaagtgtggtttccaggttcgactcttcggtggccccggcttcggcctcggtagcttcagcttcgccggtttcagcttcagtagttttcattccagtagcttcgactttggcagtttcagcaaagacaatttttgacaccgttgccggtggcggcgtctaatggatcacatctgttacttgaataattctccatttttcggcttcgcaggactttctgctgccgaagctgccttgtccttctgaaaaaacttc

SEQ ID NO: 129718 - DNA, 3774 bp, Zea Mays
tcatggtgtcgtgacgtgttacctcgacgccatgacctatggcgccggcaaatggtctaaaaacgacattaagtcgttcaggggtccaaacgtgaatttgtttcagaaaagggccaacttgtaaaaagttcggcaaaatgtccaggtctgtggccctgtcgtgtttcgggtctcctcgggttcgagtctgggtctagggctttcccagtaatataattcatgttttcgtcgggtctttaattcgagttttgggggcgggtctgcggacgctgcacctgactcgaacccacaccattgccaactctagaaagtgactaaggcttctgccaaaagtcacgatatgccgtttgaccaaggccgtgaggcgaaggaaaccataaaaaaaaccaagcaaactagaaaatgcgtgaatcaacgaacacgtaaactaccccataacatcagaagggatttgccaaaaaaaagtttaagaaacgtttgaaatcatttcgaatttatgtctcaagaactcacggttgtcttaaatcttatgcttgttcaaatattgtagacttcaatgtacttaaaggaagcgcaaaattctagtaacaagctgacgtgcccttactaaatttggttggagaaggatccttaatggcctctaggtaagggttgacttttggggcaacacctcacttttgattgaggtagtcttggctctcaaagataagagaatgtcttttgtggcatcttttgcgccaatgaaacaacattcataacatccatagagctccggattctctgaacattcaactgatctttcatcttctcaataaacttcttaaacttcatcgtgtgcatgtgctccatccgcatcatcctcgtcaccatctacttcctctttggcctctttctccactgggtctgcttctttttctttattatctgttcgctccttgatttcttcatcttcttcgatttctctgtcttctttatctacttcaggatatcaatcctctgataggtaagtaaaaaaagatgagagccttcatctcctcccctctctgcaaattcatgcaatttcttacattgctcccttctcccttatcgttttctcgaccgcttgctgcctgctttaagcctttcagagaatttcattctattataacagtcgtctgaatcctcaatcattggaggattctcctcatctacacctttagtacaagcatctcgtagaataatcctgatctctctgaaaactgctattgatgttcttacgttaacaccttcaagatcttctatccatggagtagctaacccagcaagtatgtttttatatttttcatgctctttttttcaataatacccatattctcggacccagaatgagttttttctatttagaactgacccggatgagttttcgactatgacatccaatgtaggctggtcagaagtcaaaaatgatctgcaaactgcattgtagacacattggatacgtgctgtctcagaaatatgaactacgaagattccaatagcacgtttgatatccctggacttttttcttggcaattgtatagactctcaaacgaatctcttagagcatcagggcccatcctagtttgcccaacgtccgtatctggattgagaaacctatagttctctgcaatatatatatatatatatatatatatataacaatgacatcttatagcatttaactttctatttcaaatgttccatacattccacccctccaacccttaaaatacaggtttcttcccgccagtaacaaagtaatatatcgctgcttatactcaatggtaagaaaaaatgttccacccgctggagtggtatagatcatgcgatcaggatcacaaatttttgatatgtcaaaatgtaagccatattttagccatcatgcacggatgacctcaatcccacacccaacattttttagagaatgattttcagttccatcatcagatttatctaagtatatggtggcttttttactcacttctatatccttgatgatctgaatcgatcgcacctcaaacaaaagaccatctaacagatcagttattttccaggttttctaaaagatgaatatagtcaatatgtcttttgcttagaaaacctgaaaaatatttgatctgttagatggtcttttgtttcaggtgcgaccgattaagataaagaatatggaagcgagtaataaaaccatcatatgcttagataaatctgatgatgaaactaaaaatcagtctctaaaaaatgttgagtgtgagattggaccatctgtgcatggcgcctgaaatatggcttacgttttgatatatcatgaatttgtggttctgatcgcatgatatataccactctatccggtggtacattttatcttaccattgagtataagcaacaatatattactttgttactggcgggaagaaacctgtattttaagggttaaaggagtggaatgtatggaacatttgaaatagcagtgtcaaatgaaaggtacatgctacgagatgtcactgttatatattgcagaggactatatgtttctcagtccagatacgaacgttgggcaaactaggatgagacctgatgctctaagagattcgttcgagagtctatacaagtgctaaggaaaaaagtacagggatatcaaacgtgctattggaatcttcacagttcatatttctgaggcagtacgtatccaatgtgtctacaaggccgtgtgcagatcatttttgacttctgaccagcctacattagttgccacaatcgaaaactcattcgggaatatgagtattgtggtaaaaagaatatgaaagatataaaaaacagacttgtaaggttagcttcttcatgtgtagaagatcttgaaggtgctaacgtaagaacatcaatattagtttttagagagatcaagatcattctacgagatgtttgtactaaagatgttgatgaggagaagcctccaatggttgagaatctagacgactattataatagaatgaaattctctgaagtgtttaaagcaggaagcaagcgataaaaaaaaagacaagggagaatgggtcaatgtaacaaattatatgaatttgcagagaggggaggagatgaagaccctcatctttttttacttacctatcagatgattgatatcctgaagtagataaagaaggcaaagaaatcgaaaaagatgaaaaaattaaggagcaaacagataataaagaagaaaaagaagcagacccagtggaggaagagactaaagaggaagtagagggtgacgaggatgatgcggatagagcacatgcacacgatgaagtttcagaaagtttactgagaagatgaaagatcagttgagtgttcagagaatccggagctctatgaatgttgtttcattggagcgaaagatggtcacaaaagatattctcttatctatgagagtcagaactaactcaatcaaaagtgaggtgctgccccaaaagtcaacacttacccagaggccattaagggtccttcctcaaccaaatttagtaagggcaagcgagtttgttactagaattttgcgcttcgtttaagtatattgaagtctacaatatctggacaagtctaagatttgagacaaccgtgagttcttgaaaaataaattcgaaatgatttttattttactactgtatacgatggttagattgatgttggtaactgactaactgttatgaatactgcgatatatatttctatgtgctactgatcttatgatatgttttgtgtttatct

SEQ ID NO: 129719 - DNA, 466 bp, Zea Mays
tggtcatcctgaagcaaagataaaatcctcattttccttcttttaccatttgctttcaggtgaaagtatttagtattgttatcaccttccataacgaatttttccctcgacttctgccttacttttgtttcctcctcaatcacaatatttctcaaacgagcttcatagacaattttctcctgtttttcatgatcagtcaggctattgacttcgcttttcacatctaactccttgattttaactgtcagatccttcttcaatttcttataccttccttcaatgttaatgttccaccctttaagttttttcctcaatcttttcaccttttccttccagatctccaaacttgaactgctccttacgggtttactccagcactctttcacaatctgaccaaaatcgggtctgtgtttccagcacagttcatatttaaaatccctcttgttataaattcttgtaccagaac

SEQ ID NO: 129720 - DNA, 498 bp, Zea Mays
ggcgcgctcctagtcctccacctcccgctcactccgagtctcactctcactccgtcctccctcttccttacagaaacacaactcatgcagctcgtacggcaccaccaccaccaccaccaactgccgcactgacacatgcatgcgcagaaagcagctagctagcggccggtggccttgagagccgctcgctagcttttaaaattagccaccaattcaatctctagctagcttgggggagctccgttcctagctacacgtacgggcggcgcggcaaccaccagccgtgtagccgacctagtacgttggagcgaagcatatatcggcggccgcatcacatggagagcgcgatggagaaggtgtgggagtcggggcggcggatgagccggagcatcgggcggggcatgggcatggaggcgtggggcgtcgacgacgccttcgtgccgcagcacggctcccggtcccggggcggcggcggcggcggcggcgacgacgacgagg

SEQ ID NO: 129721 - DNA, 428 bp, Zea Mays
cgagacagctaggtcaaatgcgtgtgacacaagcttctcctctaccatcggaccattggcgtcccataggttacgcgcgctagaccatcgctcccccacatgtcgcgtcgaccatcctccttcatcgcccctccgctctgaaccccgctagctagatccgacatgctagaccatcactcccccacatgtcacgtcgaccatcctcctccatcacccctatgctttagaccccgctagctagatctgacagggagtagatttgccaaaacaagattcaaaatcgaactactctataaatctctatctttactatctattaagaacttaatgtgggcggcttcaccctcctcacgtccaatgcacgaaaaaaatagtgcagaacaagcactcaaacccacacccttctgctctagaaatttggagctaac

SEQ ID NO: 129722 - DNA, 566 bp, Zea Mays
tcaaaaggtgccatttttaaactggactggtagctgttattataggaaaactttgccaaagaaagacacttgtcccaatctttcccgtagtgtagcacacatgccctcaacatgtcttccaaaatctgatttaccctttcggtctggccatctgtttgaggatggtacgttgagcttcgtattacatgggtcccaagtgattcctgcaattgttcccaaaatcgtgccacaaatggtgctcctctgtctgatactatagtccttggtatcccatgcaaacgaactatctggtcaatgtagatttccgtatacttctccgtcctgtgggtggtgtgtactggcaagaaatgagctgacttggtcaatctgtccataatgacccaaatggaatcatggtgcctggaggtattgggcaatcccacgatatagtccatgcaaatgtcctcccatttccaagatggtatgggaaggggttgcaaagggcctgctgccttcaaatgactggctttgatcctctggcaggtgtcacactcggatatgtacttggcaatctccctcttcattct

SEQ ID NO: 129723 - DNA, 1112 bp, Zea Mays
gtcttcttgcaaccacctcgccgaacggagcggcgggaattgtggcaacgaccacgacaactacgggggatcgagtccagcttggaaccttcggaagcgagatccttggcctataaagcgtcgtgcaccaggccctcgcggtttccccttttacagcaccgccgccgtgagccattaatgaaaaagaaaacaagctgcctccgtccaggggatagccgggcgcagtgtacacgtgcggaacctgggcgcttctccggctggcgtggttcatcaccacactactatcctccggtgagaatcctctgactgctcctgcttgttcaaccatacgtatagcattccttaggtttggattctgtggcgcaggcctaccagtgtgctgtgcgcgttggggcttttactgggctgggggatcgattgtgctctgggcggtcctagggttggcgaacgaccggtgttcgcctgccaggtcatgggcatgcgccagatagccggtcatggcggggaactagtcacggtgtggtcggccagacctgatgtcgtggggttgaagacgagcggtaaccgttggatgctagatgaacgcccaggattaggtcgtcaaataacgttttgcttgaatcctatcgtcaccgtttgttggtgatcggaccactcctaggcagttttgggtaggaaggatttatggccgttggatcgtgattgcgcagatgtaggatggcgcatctgtcatggctcatcgtggccgttcatcgatgaatggaagggcgaggggtaaccctggcgttttaaaatccagagcattgatatcaaatcctagggctctagatgcatacctcttcattttctaatctgggcccttgatcttagatcatgcggccagaaactgtggataccccttcgttggcttatttgttaaagagaccctggcaaacactggaatcaacccgccgtccagtgcaatagtgctctgagtctctggaagttttgtagattagcccctatcttctctgcaaattgttgcgcagtccagtgaatgagaaaaatagataaattgaattagaaaatgaattattaatataaaaacaattgctagaatttatttaattcgt

SEQ ID NO: 129724 - DNA, 406 bp, Zea Mays
tggggatcttcccggtgcgagtattgggtgtaggcggcgaagggtggtgggaaaacttagtgtgggtgaattttcgcgaagtggcaggcgccgtcgtatggggatggagcgtggccgtctctgagtagaccgggttggaaaacgagaattgttgtcttcgccgattggggcgggcataggcgagggggatctgcagaagctttttgagggagagaagttgaggataatgctgtttaattacagggagctgggtattatccctaaggtcgagccgatgtaatgtgtgatgccctcgccgtgtgtatgtaattgtaatttgtatggtgatgtggcctgttgaccgtattcatacgcctgtgttggtccggctgcgcccgtgggcgactttgtgcggagtatcttttaa

SEQ ID NO: 129725 - DNA, 973 bp, Zea Mays
taggactggccgtaggtcgcagccctgaccctaaaacttggcctaaaaagaaaatacctcttccccaagaaaagtctcctctcctcctccctgattttaacaaacccttcttttcctattccagatggaagactctctggccattaggacatcctactgctcagaggtggaagggttcccacatcttttgcgaagttgtgcgcttcgcatgggaatccgcaagaagccggaatacgtatggaaggagtattttgaaggcggaatggagaaatgctctatggcagtctacctgggagaaagccgaaactatccgaaccatccttccttccaagtcacttttaccggataccgctttccagatacttgccagaatgttgcccgaacagccctccggcaactatgccagaactacaacaaggtgatccttgaaaccccccttcgctactttccacccaacaacaagaatacccccacctggaggaaaagacttcaggccctgtcaggaggagatcctattgaggatgatcccaccatcgtctacatggctggataccttcacacccttgataaccaatatgatgacctcaccctccactgcacctacctaacctcccgggtggaaagcctggagcaaaaagtcagggaactttcaggggaaaaggcgtcccttcaggagagcctcgtaatagctgaaggcgaggaaaccaatacccgtgaggcttaccgcaccctaaagatggactatgacaagaaactgaagaagctcgcccccgcaagaaaaatacgcaagaagaccaaaagccaaggatgtcagactgagcagaaggaagaaacccctccaaccctaccccctgccgggttaaggaactcgtccgacaccgaggagatgtccctggccagccttgatgaccttcttaaggaatttggggacactttagagaaggagttcgggagtaccctagatagctcgcgc

SEQ ID NO: 129726 - DNA, 348 bp, Zea Mays
aagagggctccggattgtaggatttgagacggacggtagagattaatttgggcgtaccctttcgttctattgatcatgcgccatcggatcacgatcgtgtgggtataattacataccggttcataaccctgcgcgatctaatctcgtccgctgcacaaagatcggacggcacatattggcccataccccttcggccaactctttttcatatgagcccctactgaatcaagtattaaacccgccgtcctgtgcgggggttgctgagtctcggaaatcattgcgagttagcccatgtgtttctgtttatttagcgcgcagaccaggcccctattaaaatcgagaaattca

SEQ ID NO: 129727 - DNA, 419 bp, Zea Mays
gcggtggatttactcaggtagtctttcctagggcatagcctcgccctttgaccggtttgcaagtagagccaacaccgggtagtagccgagcagcgaaaagcgtagtggtttggtgagaagcagttgaaacatttaccctgaagcttcgatttgaacaggttggagcttgatgcatcgatctgctgctgagattttccaagatttcctaggtttttgcgccaccagtaccttggcttgacttccgtccaaccatcttcttccaccctctgtgaagcagacttgctccgattgatggcgagatggccattacactccggcgagcatccgctgaccaggacgcgctgacgtgatggggcactatccgcattcaaacccctcgcgccgctgcagatctgacggaccggcgaggaatccgctgc

SEQ ID NO: 129728 - DNA, 276 bp, Zea Mays
gtttatgtgaaaagtataattgttttatgcatgtgatcgatgattgggatagtcgaggcgaatgaggagtatgattaatcctgttagagtcactatgttgttgatgccttgtgcgtaacgtggggacacgtatgtgcgtgtgtgctgtggtgtattacagtggtggtggcgtaagatatttgattgaggtgtgcgggtatatgccataatatggttgtactcgcaacgaggaaagatgtatgcattgtgtaacacgacacttaggtcggtattata

SEQ ID NO: 129729 - DNA, 394 bp, Zea Mays
gtctttcatttggtatttcagtatcctgcacagacttaaccgttgtccacgttcatcaacgactaatcacctcggctatatatacacgcgagccccggacacgccgcctcgcttactcatctcaacttctccaccagtcgtccagtagtcaagtccaccagccaacagctcgtcggctgcctcgctcctgctctgcactgcactggtcgccgctcgagctacccggctgtagcaactagcaagattcattgggtccgtgaacgtgcagacgcagcacactagactgtctagacacattatcagattcgttctgcagtacaataatgggagcctgcaactcgtgcgaggccacggcggtggcggcggcgccggggccggcgacggcggaggcgag

SEQ ID NO: 129730 - DNA, 374 bp, Zea Mays
ctagtctcaatccctatgattgaggatctgattctagtctaggatctttccttaggtgtagaagttttccttttacctctcaccttcctcccctatatatacttgtacatgtaatgtctattatcatcaatacaaacacacgctttcaactcactcacatggtattagccgcctaggtcctgattcctgccctccaccccagcgcgcctcctctacgacactgcttctccccatggccgacctccagcccacctctccggtcattgttgatcctgacaccgacgtctctgctgattctgagcgtgcggccctggctgcccgtgaggcggctttggctcgcatcgctgctgcagagcaggacgccgccctcgccc

SEQ ID NO: 129731 - DNA, 750 bp, Zea Mays
agaaatttgaggcacgtgcggcgggggaatggggcgtggctagtacgagaattttttcatggaagctttgcagtttgcagctctgagtgataccaaaaatgattgcattggaattattaaaacgcacgcacacagaacaccttgagtatgtgttgttggttggtttacatgatacagccctgaacttgtattcgatcacttgcattttggcttgacgtggatttaatctaaagtcctaaaacacgctcgcgtttcggcctctctccgtattcccacacgatggtcctctcgccttccgacacgtacacacaccagtgcacctcggcaacgcttctctaccacggatgtgcagaacgctcgctccatgctcgtccggtcggccccacgtgacagttacctggcctctggtctcagctccccacgcacgcatctcgcctccacgtccatcgtcgtctctcagatccccgacccgtgcctgctccaacgcggttgcactcctccgcctgcatcttcatcatcgtgggtgcgtcacagcaacgacccgcttcgtcctcaccgcaaccacctctgtcctccctgttcctccatcatagccatcgtcctttcgtcaggagtcgtcgaatgtaagtccgtttattgttcagagctcgccatccacggatctgtttaccaccatcctatttcctgttcacagtttgacttcccccaaatctgtttgccaacgtatgtgtctgtccgtgtgctctgccc

SEQ ID NO: 129732 - DNA, 435 bp, Zea Mays
ctctgtttttaaacgtctctgaactgggcctcatttttcagaaagttcaggggctccggtgcaagttttctaagacacagagcacagtatgagcggatggcgggttgatttgtgatttcttcggggtctcatgtgcaaagtgggccgatcgaaggggtatgaatggatcctagccgttggattagttttcaagggaccggattagatcagcggaacactgaaccggtagggcatggtgaccgcaggatcctgattctacggttcagatttaaaatacatcgtgatagcccagacccgtacgatcgcgatccaacgcctagaattactccatgcccccatccaatctagaccgcccaggcaagatcggacggagggacccttctgcccacgctcgaccaacccaccggcggcgcggtcacctggcgcggcggcgcc

SEQ ID NO: 129733 - DNA, 449 bp, Zea Mays
attggatccagtccacaccatgtggaatggagtgtcaccgctgctgggcacagattcaaagacacctgccaagtcgtcgctcgcaaggcattgagggccctgtgtcagatctacgaagaagaagtggccgacactccgctcagattctttccgccctttcagagagaccgtcccgcttggatggccagggcagcagcttcttgaggatgaccccacagtcgtgtacctcactgcatacctgctcacccttgatgcacagtatgatttcttggctcggcaccaccgtcagatgattgcccgagcagaagattcagagaagcgcaaccgtcagctgcatgtggatctcaccacagctcaagcccgtgtagctaccttggaaagtcgtgaagtcattgctgtggaagccctgaagcaagccaaggatgagcacgtccagaagttgatggagg

SEQ ID NO: 129734 - DNA, 421 bp, Zea Mays
agccatgtatgtatacatccttccatcattccatgtgactggtattggttggtatataagcaggtggatttccctttctcattgttaaataataattgcaacattgatctacgtcacctcaccagaagaatattgaaaatagtgtcgccaggaaaagaggaacagtgctgtgacaaggcacctaggtaggtagctagctagctagctcgcattgtcgagattagccaaaggggactaatccaagagccacatcatcaatccctgcaaacaagagagagagatgcatagaaacactgctgtactttcccatgttctgctggttgttcatccatcccaaggcagaacagcaagctgcttcaaaagcaccaaactggggaacacctagaacagcatatgcatgcatcggtagaaagcccaaaac

SEQ ID NO: 129735 - DNA, 465 bp, Zea Mays
gtgaagtgtgtgtttggtttgaatttaggcgaataaaatgagatttgggcactcggctcggaaacgatcgctcgaaacggggaattgagtgaaattgaagcctggaatatcggattggtgtgaaatttggcaaatatgttactggaggtgttgtgaaggtgcctgaaaattttgggttcaattggagcatttttggctggtttgggcatttcaccgaacacgtggtgtgcgaggatttagggttttagggaaatgactatttgaggtgagaaaaccctcccgaaggagctaggaacctgcaggaatgttcaaggcacacagagacacacataccacaacttggtttcacaagaattcacagagatttggaattggcacacaggggtggtgcactgcctcattgtcagagaaatagagagatagagatgacagagggagaggagagctgctcaccgagcgagggag

SEQ ID NO: 129736 - DNA, 724 bp, Zea Mays
ctaaatcaacagtatggcaaaactcaataaatgacgtgtctacatttatgcagataaggaaaggttccctttggagaacatgaaaagcagatatatagatctatacaagttattgtaaatttcctagaaaaacttgtacataagtgcacgacactgtttattcatcacaaaatctcctagcacattctttattatttgtagagcacagcaagctagagtttgcaactttgttcacctatggctgggtaatcctccatgtcttgaatattcagtggagggccgaggtcgagacaggatcacaggagatcggcgacgagtcgaggagatgcaggcctcgaggcagaagggttgagaagagccgaagtcagcataccgaggcatgccaccacaccgacagctgagtgtgcctgaggtggcagactggcaggggggcgccatgatccgattcgcgtctggacaggaaggaggacaccggtcgccgttcagacagaccctccgccccatgcgccggcgccgctgaaacattgcatctgcctcctcataggtttttttttggacgaagcctctcgcagtttttttctaggtataggattgactgtaaaaaatagcttctcgccgaaacacctccctctgcacccacccagcactagcccgaccacctccctctccccgacccaccgacgtcttgacccgacggcttttcgcactccctaatcgatggctt

SEQ ID NO: 129737 - DNA, 689 bp, Zea Mays
ggacgaataaaaacaggctgcttaaagggatatgaaggtgggcgaggcgaagaacgattctgattaaaaggtcggatcaccaacctagttctcttctcaggcccttgatttgacctttcacctccaaacccctttgattttccatgcctagcatttttggcttccactgccagtgttgtactgacagccctactgtaggtaagatccagacttgttgccattttccgttgaagcctgtcattaagtcccctcataaaacaattctttttcttgagatcagtattcacttggtcgatggcatactgggacaaatgattgaacttgttgagatactacattacagtatctcccccttgctttaaccggatgaattcttcttgtttcatatggagcactccttctggaacatagtgctcatggaatgctagcttgaattcctcccaggtgacctgatccccagccggttgaactgctacaaaatttgcccactaaatactagcaggccctcttagttgttgggcagcaaataatggcttctgcgtctctgtgtagcgaatcaatccaaacttttgttccatgactcttacccactcatccgcctctaaaggttcttcagctttaataaagagcgggggtcgggtctcagagaattcctggtttgtagtttcacacggtccttgcggaggaac

SEQ ID NO: 129738 - DNA, 494 bp, Zea Mays
cttcgatcatggtgaactgggttctttgccaacgcaatagcagccgtgttatccatgagaataatcgttggcttagcagggatgccaacgacctcctcgagtagcttctgcaaccacacagcttgagctgccacggctgcgctcgccatgtattctgcttcacacgacgatgtggccactgcgttttgcttctgagacatccatgacactcgactccccccaagaaaaatatagcacctatagtactgcggcgatcatcaatgtcaccggccaagtcactgtttgaatacccaatcaatctcagactctcttcctcgactgtactgtagtccataacctgttgccgctgacagataacgtaaaacacgcttcaatgcgaccttgtgatcatgctttggagactccatgaactggctcaaaaatccaacactgaaagagaggtctggtcttgtatgaagtagatatctgagactaccaattatacttctatattc

SEQ ID NO: 129739 - DNA, 412 bp, Zea Mays
tgcaaaacaggatggcagctagaaagggcacaacatcacccacgctagaagacttatccttacaaaggcggtgcttttctctcagctgacgcacacactttccgtcctcaacgcccctaagtgtgtgctacaataccttgataagatcaggaagaggttcctttgggcaggaggagaaaacctaatggagggaaatgcgaagtcaactggccaatggtgacacgtccaataaacctcgatagcctaggaatgcttgattcagaaagatttgctagagcgttgtgattacgttggttgtggctagaatgggctaaaccagacgctccgtgggatgggcttaaacctcccctataccaagactgaccgacttctctttgcgacaacaacaagaataatgatcaatgatggagca

SEQ ID NO: 129740 - DNA, 282 bp, Zea Mays
cacaaaagtagcacaagacatacaaggacacagtggcgaactaaacaataaaatggaagacaccgtaacaaccacatgttcgctttagttatctacacattatcgacgttcaacattaacaccattaaaaagacgacaacatgttatttatttacgcaacacagttacaacatcacaagcacgcacattttatttatttggatacggcttttcattagttctcctattgatcgcgcaaaagcatcaccgaccacacaagtccaaccaagacaacgtaagctt

SEQ ID NO: 129741 - DNA, 1008 bp, Zea Mays
cacatgcaaggaagaaatcgacacacaagacgtttgtcgtacttacagcatccacatattagagacggtgcaatcgataccccgctgcatgaacagatcttcatctgcaagaggcattcctctgctcagactctgaagtcctggaattccagaaaggaaaggagcactcccaaccgtaagatctggtggtgttggcacgctgatacacctaccagaagtaggcgccgctgctcgcagtcccagacgaaaccctgaaccacaggcggtacctgagaacatcttctcatccactggaaacgagtctacgggcagccggaacagaccgggaatgccggcggggatcctcatgtaatcctcggcctccttgcggttgcggtactcgtctcttggcgcggggagcgccagcatttcctcgcgtggagggctcgaggtgcttgctttctctacatgcgaaaccagcggcgagccctccctttcatggccatggtaatcctccggtgccgggagcgccagcatctcctggcaggaaggacttgagccgctcagcttttcatcaccgtacgagccttcgtcggtcggcaggtcctcgtcgtcgtactctctgtgctcgtctccgggcgccgggagcgccagcgtcacctggctgggggggactggcttgctcagcttggcgctcagggatatcctggcgcgttgcagcgcctgcaggacactctctatgtccgcgatgctgcatggcgccggtgtgtcatcaagctgtctgtccgtgcagtcgtggaaccgtgacgagctccagccggacgccttgctgttgagggtgtcactcgatgggctcccatctgatggtgcgctgacggtggtgtcgcgcttaggagaccgagtgtccctgctgtatcctgaatcgccgtctgatgtttgatcttgccttgggaccgcgctgttgttggagctctctttgttcggcagacgttcagcagacgggttgttggtgctggggacgtttttcgc

SEQ ID NO: 129742 - DNA, 393 bp, Zea Mays
gaagggctgaatagaccctgtgttgctgctgctgcgttttgtaggagacatggttctacatgccattaccgctggtgtcttgaactcatcacagaaacaaaatatttcatccaactcagtttcaaattccacaataagtgtgtacttttctgaggacaactcattttcttctgcaatgaaaggccaaacttagtggttcaaatagaggaatacagcgaaatgttcaaacagagagatacagttaagtggttaagtgagtacatacttgttcaccatagacagttccctcatgtgcaagtgatgcctgcatagtcaaagtgtactttccccacaagcttcgtaagtttttaaaccttttttccaagtcctttttttccaaatccagaacactca

SEQ ID NO: 129743 - DNA, 1252 bp, Zea Mays
tttttctatgtaaaacggaggaataaaactcttcatggtcttgatggagcaactttgacaactatgtcttgccttgatgtattcgtagtggctacaagtgctgacaatttttgcaagggccaatgggtggtatccagttactgacgacagggcttgtttagttgattccttgtgagttatccacaggtttgatgcagaaatctgatgtggcccctctgcttagatgtcacgatgtgatccctttgctttagatgtcatggaaaagttgaacctcaagtcacgaggtagaacaacaggacttgatgtgtcattattgggttcctaacaagctgactgtttagtgaggcgcacctcctgtcaggtgggtttccgtacatttctttctgttgggctgtccattgaaagattcctccccatgaaaacgtactgtgtgtggcccgattcgtccagccgctttggtatgaagcttttgcctcgcctttagaaagagtttgaggaaacaaaagtgatcttgtcaacttctttctttttttcatttcagggaactcagattcctattcctccatgcaagagctttacgtccgtccgtttgccacatgagaatggccggctggtttagtcttgaatcatcatcatgattcagtacacatctacctttgctggcgaccaacattagcctggtgcagtgcatggtctgggcttgcatgcatgcaatgcccccgggatctccgttcctatctcttgggttgagatttacatatgaagcatagctgaaaaggttgtggtccgccgcagcagatgctgaaggccccaggtatgtgctggagcgtgtggctgttgcctcgtctcaagtcccggctatatgtccccatgcatgcctacttgtctgctgtcgaaacctctgcggacggacgttgcatcgtttcagaattacgtcacatggtcatctgactgaagagggttcacatgacgattcatcggtgcagcttggcgtggaagcaggcatgtgagctgtgtgcccctctacgcctgggcgtcgtcacatgaccaggtgaccgaccgtgacgcctgtttctccctacagcagtcaagtttgttctgtcgatcatatgatggtgttcaattccttggagcaaattacccctctcccgggccccggcagtaaatacacggttcgtgctctattgtttatttgcgtgtggaaggaggtggttcagatgacccccccccccccccccccggatttaccgag

SEQ ID NO: 129744 - DNA, 375 bp, Zea Mays
cctatcttagggcgaccactatgccttaccagccaggtgattggcttaagtcagaagaagttccaaaaccagcacgccacatttactttcacaattgttcaggatgactgttacaccctaacaacaaaacaatcagtactccgggaaaacagaatgttattcttgttaacaccaatgacatgttctagtgccctatcgacaaaatattcaaacacaaccatcacacgcacatagaattcatagtacattcagtgtttcgtaggatgtcactgcatcgaaacgtctctgctggcaatgttttttgcaggagcaatggaggaagaagggtgactcgacgcatcaggcgcagccttgacatcggcgacaatgtcatca

SEQ ID NO: 129745 - DNA, 409 bp, Zea Mays
ggaacttggagtgaatgatctgggaaatgcaagcatgtctgaatggggaagatgggaggagccaggaacagccaatgattgcttgtgtgggtgcagagcacacagtgaggtatctctcatgacacacatacatgagtgcatatggagacttgcttgctaatgctaggagagatatgatgtatgctgtgggttgtgtgtatatgtgctgccactgtgtgtacatgcatgtctggggaaagtggagaattgaaggtgatgagcttttgtttcttgttgggttcccttttcaaaccctgcatattgcatcgcattgccttgttgcttttggagatggaggagatctccatgtcaggctatagaactgtgctgtgatccatgccctctcatgcatatggtcatcgtcgtcgtc

SEQ ID NO: 129746 - DNA, 287 bp, Zea Mays
atgatgtgaagcactggcagaatgaaattgagatcaatgacaaattgcaattcttctagatctcacttgagataatttgtggggcagctaattttttgtatgagtttttagtatttcatcctgaaagatatatttggaatgaacatgaatccaaatattgctattattcccacaccagttgatttcaagtttgcttgtggaagagggaagcctggaatgccccaagatcttgatgaaaatttgtttcgttagagatatccatgttattgagatgatagctgtctaaa

SEQ ID NO: 129747 - DNA, 348 bp, Zea Mays
ctcttctctcttcttagtgatttggaagatatatcgggccggggtgatggatgaactcaacaaatggcggcatttgcatccggtaagactgctaagaactagcacgagacctgaaaactagcttgagtgcttcgatctaatccttggttcttgcaatggcggccctttcaggaccctgaggacgagctagcatacatgtacaggcagcaagaagaagatcatgccgggatgcaacagcaacatcaccatttcgctgagcggctgcccgagcagcagcagtactacacaccaccaccaccagcagcagcgccgcctacgtcctctagccccttccttcctcgtcttcac

SEQ ID NO: 129748 - DNA, 439 bp, Zea Mays
gacttgtacctgaccacgttcttgctgggctaggtcttgttgtgaaggcttggtccatgtcctgctggattgtgaagtctcttttggctttcgctgtgactcaacttttctgtggtggagctcttctgagtgggcatattttttgaaaagctggaacaacttctacaggtttgttggtgggtaccttgtgcagtgactgtataggacacctactcgaaggtcgctgactgcatagtggatggctatatggtcatcgaccgagagcagctgtgattttaataggaggagagtcgcgaaaattttctttttctcgttgcctataaagtgagagttctgctagtgtgtctgtttcgggtctatagccttgtaaattcaatatgaatttgtcgtgaagtgtcttccatgaatcaattgataatggtgataaccttgaatgcca

SEQ ID NO: 129749 - DNA, 479 bp, Zea Mays
aggggtcccagatcctcatgactccgtgctcgacctccacacgcgaaccgttctcatctaggtgtcccaagctgatgatagagttcctcaacgcggggatgtagtagactccgatgagcagcctgtgctcaccagacgcgacggtgaagacgactgagccggagcccttgatctctacgtcggaggcttccccaaacttgacggagcctcggacgctagagtcaagctcggtgaagaactcccatcggccggtcatatgatgagtagcgccggtgttgaggcaccatccttcgatcatgtctttgctggagccgtcgccgaggaaagcgcgtgctttcgactcatcaaggtggaggagtgctactgcggccggtgtcactggagattagggctgggcattcggtttttttctaaacttcggttcggtttttcggttttaaaaaacttcggtttttcaaacattagaaaccgttcggttt

SEQ ID NO: 129750 - DNA, 282 bp, Zea Mays
gcaggtgtggcagccgcccttcgtcctcacgtcgtgccacactgactcttcgcctcttcgtcccgtcgccacgatatgccgctccagtctatgcgcaacggttcttctcctcccccacatcaaagttcattctgcagtgatttctcataatcttggcaagcgttaccaccattaatagccttcaatctccttcaaactggctgtatttctcccttccctctccagctataaaagtcgaggtgcgctcacctccttctcctcgcccctgctcttttctccctg

SEQ ID NO: 129751 - DNA, 399 bp, Zea Mays
ccggtggatcctcgacgaggtcgaggtggacgatgacgcagaagtgggagccagagcgacgaactggtggagtagctccatctcgaaccaacgacgacctacgggagatagttagccaagttaccttaggaatgcaggacgggtcctctgtccaggcccagagacagagggcacgcgtgtcctccttcctcagcgactgaagctcaacatagtccagatcgcaggccctcgccaccacacgcttggcgatgctctcgttccaagcgtgaagggggatcccctccaggcagagccggacgtgatacttgaggtctacagggcctgcctgggtcatcggtagccaccgcctaacgcggatgtcgaggttgccggagagaaattccctgcgctccaaagccg

SEQ ID NO: 129752 - DNA, 789 bp, Zea Mays
ctgaatgctcctttgctcacagaaattgaagaactccgagctggtgaagttggatcccaggtcggtgatgatgctatttgatattctgaacctgaacattatctcctggataaactccactgcttttgctgaggtcaaggaagcaattggcttgtactctatccacttcgtgaatttgtcaatggcgaccagtatatgagtataaccttcctgagcttttttgaaaggtccgatcatgtcgagcccccagcatgcaaacgactaggttacaggaatggtctgcagctgctgcacgggcaagtgttgctgttttgacaagaattggcatgcctcgcacttctggactaactcggtagcgtcactcttcatagttggctggtagaaactggatctgaaagcttttcccaccagagtccttgatgcaacatgcacaccacactgcccggcatgaatttcatctaatagctgtctcccgctggccaagtggatgcacttcatgaggactcctcccgcgcctcttctgaacagcaaaccccctatgatggtgtagtgggctgactgtcttgcaatgcgctctgctatagccttgtcatccaggtcctcttcattctttatgtacctgatgattggctctcttcaatcattgggatctgcctctggctaactcagggcgttgcattcttccatctggtccgtgatgatgcttggttgttgtatttcttggacgaaaatcccagttggagcttgggccctactggatcccactttcgataatgcatcggctgccgc

SEQ ID NO: 129753 - DNA, 823 bp, Zea Mays
attcgtgccgccgccgtcctgattcgtgcccggtgaggaacggataacgccggggatggataaatcatacgtggcgccatctcccgagtccagccggagttcttcaccggtggccaccatgaccagtaaattttgccgcggtggcactcatgtcgtgatctccctcactgtgtctcctaccgatgtggtcaacatgcgctcgcgatgctatccgtggccatgaggtgatcacccgaccgccgcggctataaatagccctgtgattcccgacgaggcacgaccatcacacacaccgtgggttgaatcgaagccaaattcacgctgtctctgctccctcctctcaaattgattgtgcgcagtaaaactagaacctcttgcgaccgtgtagccccaagctccgtcctcaattccacccgagcacgccgcgacgccattttcccccaaatccgattgccgcgccaccgagaaccgctcacccgtgaccagcccgctctggtaagacgctgtccaattcaagtattgttttcatggctctgcatgctagtgaagcttaccgtggcacccgtttgctcaattcggccatgatttggcgggaacgcgtgctcatgaactcggtttccgccctgatcatgggcagacggttcccagtggggttcatgtcaaattaatggatgttcctagatcgtcctaggtcggtgaagcctccccgatagttagccttatcagtcgtcgccggccatggccggtacgggccgcgtcagagacgaacggcgagcgcgccgcggtcaaggagccattcggagaaggaatagaagtgtgaggg

SEQ ID NO: 129754 - DNA, 1933 bp, Zea Mays
gagtcaagatcaacgcaccctaggcgtaaaccctctccatagttgtgccccgagtcacagtcatacaaacgaggcatagaccctaagcatcataatcatcctatcagtcttgagttcgatctctttacatgtaaacaagaggcatcctcacaagcgtgtcaaaactgtttgtcaggtatgagttccacttttctccagactagttgatcaatctgatgcccctcctgaaaagctatcaccatgcctaggctaatgaaatatgttaggctgtacacaatggtttgaagaaacaacagctcctactttcagttatcatccagtataatcagtgaaggtaactaaaacaaggagtttgcatcatcatcaccaataatccctgcacgagcaaactccattcctgaagtggtgaaatctgttcacgtccctcacaacaatctcccgatctgtgaatttggagatgaacttggtgactgaatgacagtcctcacaaagcctgagattctttgtgatcctgatagcctctccactgccagtcttgataagcccgaaagcaacagccaacttctcactgtggccaagcaaaatcctctccttctcctcttcttcaatatcatacagaactgatctcgtgtcaggaacatagccctcatttttcatctgtgtcacaaattcaccaatcaatgcttgcagctcctccacctgtgggttcttgttgtcaactgaaacaaatgagtacagcttcttcttcacctctatccagctacagccaggcaccttctccagtgcatgctcctcaagtaactcctttagtacatcaacttggttctgcaatttagctcgggcataaatatctgccaagaggacatagtttccagcatttcggggctcaagatcaaagagatgagagcatgccatctcagcatactcaacatggccatgaattctgcaagcgccaagaagcgagccccaaacttgagggcttggttgaatacgcatgctctgtatcagctccacagcttcatccaggcgcccagcacgaccaagaaggtcaaccatgcaagcatagtgctcagcacgaggtgtgacattgtactccaccattgattcaaatagcttctttccctgctccacaagtccaacatgactacaagccccaaggacgctgacaaatgtgatgatatttggtgaaatgccttcctcaatcatctcctcaaacacctggagtgactcacgaccaaagccatgcattccatatccagatataagtgaattccacgacacgacattccttctgcgtcctatccagttgaagatgtagcgcccggtctcaaggcacccacatttcatgtacattgccatcaacgcattcagcactgaaacaagtaagtcaaaacccctccgaaggatatatgcatgcagtactttgccctgaccaagtgcatttaccccagcacaggcatgcaagacgctgacaattgtgatcgagtttggtaccaggtctgcatcagaggccatcatctcctgaaagatctgaattgcatcaccaggacgctcgttcttggcatagcacccaatcatagcactccatgacacaagattcctatcaggcattgaagtgaacacacgctcagcatagctgacaatcccaagcttcgcgtagcagtcaataagagttgtggcaacatgcgtgtgtaatccatagccgcggcggatggcatgagcatgcatctcccgtacacgggcagaggccggcaggtgcgacgctgacgctgcaatgcaggccttaagaccgtgcgcgtagctgtagctgtcgacggggacaccgagccggcccatgtcagcaaggcacgtgagagcctcctctccatggtcggcgagcgcgagcgccttgagcatcgcgttccacacgaagatgttcttcacaggcgcctcg

SEQ ID NO: 129755 - DNA, 418 bp, Zea Mays
gcagcttatatattacattcaaaattataaatactacacactttgttcagcaaatattacattccaaatgtttttacaatagcagctattcttcttttaaaactacttccgcagcttcgtttaacagttgagaaatagcttcattcaaaatagcttcggccattttagtgatttcttcctctctctttgcttctgggtcggccgttggctcgaagggctccgggggaggagatagctcagctgcgatacaaaacataaataagttcgaagtcacagaaataaaacacaaagtcaaaagcaattaagcaatacctatccgcatttcaagttccacagctttctcagctgccttcgtcgcttcttttgcatcataagaatctttttcactcttttttattatctcatgcgccatctcttg

SEQ ID NO: 129756 - DNA, 345 bp, Zea Mays
tgcaaattgaagtgattccttctggttccttgtctcacatttctgttgagccagattatcatggcccaactcagtgacaagggagtgcaaattatcaagaagaatctccatcagaagattgagaagtataattgtttcctccaagatgaaaagggtgtgttatggttcaaaagcagattggtaattcctaaagaccaggacctcaagaggaaaattttggacgaggctcatctctccaaattctctatgcatccgggaagcaccaagatgtaccatgacctgaagcctttgtattggtggaccagaatgaagagggagatagcccagtatgtatcagaatgtgac

SEQ ID NO: 129757 - DNA, 882 bp, Zea Mays
gtaatcagtataatgccgacggcaagcataatatattggctcttgtcccatgcatgaggcgtcgcgagcaggtggtatataaatcacatatgaatatatggtaggaagcgtgcagcaagtgaagatttgaactcatggaatcttcgtaacatgtttaataagaaaacaagcgggaccttctcatctcacccatagacctcttcagacgaagcatccaaattgcacgacacagtgtaaggcaagttgcgagagatacagagacaagtcagcctcattgttgcacgaaaagattgaagagcacgtccagtctggcaaatcagtacagggcctcaaaagctctctaccctgattctggggctgttcacgccgagctggaggagcagaaagcaagaacctttctggcctggtttcggacgcgcaacggccaacgcccgaggcgtgcacgtgaaaacgggtccccgtgaaaacagaacacgacacacatcccacgctcaacacagcagaggaggaccacattgcggctccaggtcttataattcaatctgggtgcgacaaactcggcccaaagcacgagccttttacgacatttgaaccgttttgaaacagggaggtgttttgtttgtacagtgataaactaaaccagaatatcaggtccagtgggtcgtctacccactctatcctacccacaggtaaacaaacacagaaacatagcaccactggcacgaggtattatttctgttctccaaccctgaaaaggtgcacaaaatcaaaagcacagctgacaggtgtaaggtgttacctcttggagtgctcaaaggcctaaacactacatgattttgtacaaaactgcctggctgtattaggcggctaggcgtatttcac

SEQ ID NO: 129758 - DNA, 397 bp, Zea Mays
gaacgatccaaaccttggaagatatgttgcgtgcttgtgttctgtcatggaagggcatctgggaggatcatcttgcattagcggagtttgcttataacaacagctaccaggctagcatcaagatggcaccatttgaggctttatatggcaggcggtgtatctcccctctgtgctgggagaccttgggagagagatccctggttgatcctgattgggttcatcagacttctgagaaggttcgggaaattcttcataatattttggccgctcacagccgtcagaagagttatgcttatgtgaggaggcgagacttggaatttgcagtgggtgaccaagtcctcctcagggtatcacctactaaaggagttgttcggttcggtgtcttcggaaaactcag

SEQ ID NO: 129759 - DNA, 524 bp, Zea Mays
ctcaggtttggggcaccaaggctggtcttcgaaaacatagctgaggcagaggcaactagattagaagacattgacgtattggaggaagagcgattgaatatagtaattcaatcagctagatacctgcaaaccctgaggcgctatcatgacaaggccatacgacatcgatcctttgtagtgggagacttggtccttcgccgaattctaacgggggaaggatgacacaaattgtcaccactatgggaagggccatttgtagtagcagaggtcactcgaccaggatcatataggcttactcaaatggatggcacggaaatagggaattcatggaatatagagcatctcaggaagttttacccttagcaagatttcaaaagctatcgggggagcattgtattctgtaattggtaaatacctcatcaataaaagatttcattctcaagggcactcgaactgtttattatcaatcaacacgcttactcgacctagggtgaccactataccctactaacggagcaattggc

SEQ ID NO: 129760 - DNA, 487 bp, Zea Mays
ggaaatctgatactccttgataaattattggcaatttttgctccggcacggtcagggatgcaccctagaatctcttcatcgacaccactaaagagcacagattcggacttgtatctgccagcaatagtgaattcctttaactcagaaatatcttctatggagagttcttgacggcccaggtgccgtaggtccaactccgcgttgtctgaagaagtcctttccaactctttcatttttgagggcgaagccctatcagtggtcacttcaaccatgtccttctcggtaaccacatcagctataattctgtcaatctctgacattgtggttccgagagggcctctgctattttcagcttcaagcgtagcctcatcagtttcggcatcggtgttagcttcgacattagtagacgcaacaattttttctgtcgagactgggggcagggtcttatagatagccttcattacagccatcatttgtcgtttcttct

SEQ ID NO: 129761 - DNA, 418 bp, Zea Mays
attgagaagaaatttgattaattatgctattgattttttgaaaaatgattgggtctgtcatatccgccggatatccaaaacctgcccgtaacctgatgggtacaggtattaatataaatttctactcatggatatagttgcaggtggatattggttgtaaccacggatatagttgcgggtggatatttgcaatatccgatccacatcagacctgttgtcatctctagtagaatctaagaaaaggagaaccaactaagaaaaggagaaccaaccaaatcgtatatcatccccaacgtgccctctagacttatttccttcacaggcatatgataacttaaattatgtgtgctcttcgtcactatgtgccctcagatttttttgctctcacctgttattctaatccttttggtattagttt

SEQ ID NO: 129762 - DNA, 1922 bp, Zea Mays
tttattttgaagtctgggtacatctgcaatgcttgtgccagacaaggccctgagagctttgcaatccacctagcagcggcaaccatcccaaaatgagcatatcctagtactaagtcgctaacaccaccttcctgtacaatggtatggtgaaatggaaccacagcaccagtggcagctgttaatgtatctctgatgctatgagttcccctaattaatagaagtatagactttttgtctctatcaagcaaaatggtgaaagctggcttcaaaatctgcaagtaaaccacagaaattctgggatcaatgccaagtagacattgttcttatgcttagctattggaatacaaaatcagcaaaagaatggccataagaaaacaatagaagttttcactcactcctgctttaggttcttgcataagaacatcctccgtagtgtagccagtcgcctccaaaaacaacgggaatggctttttggagaaatgccagcaaagtgtcagcaaattgagaagatactttaaatcagcaattacttcagctcctttgagctccacactatcatttccagcgtatatgcttgctacagataagtttccctgtaacacatttcagaagcagagctatcagaaaccttgtaggagtactggcaatcacagtgcaatctgcatttttggttcatcaaatacaggattaatcatttgtttacgatagacagctctgccctggcccctggttatgtatttttacagaggaaggctttaaaggatgacatgagcacggtatgagcgaaatgtgaaggaccaaactatatccactgcctagcttaaatgtacagcactccacattggctttcaacctccaagaatcagaactagttcaaacgggacaagattaccaacaaagtgtgagccaccaacctgtctcttgaggaggaaactgatcccgaaggcaaggtcgccgatcggccacttcccaagggtctctgaatacgtgaaccgcagcgtctctgacagcgtcgagatagtctcaagccaggtggcaggggcgcggacgtccctccgcgatacacggctcctgctgggagaaccctgtgcggccctgggtgtcacatccctgctatcgctgcactccccttccttattcagcctctctgtctgcaggcggcggttcagtgtgtagtaaagcagtgccgcggcccccgcggcggttgccattgtcgctgtcgccatattgtcggggagtagtctgcaggggcttcgtcagctgcaatgagccccggatggcctgtgggtcgcagcctcctgtgcagttgtaacccaaggttatcaatggcgcagtcagccagtcagataacgttacttagcagcccccgaggcttccactggtgatgcgatcttgatcctttggggcagggcagtatgaagtcaaacctgataccacagacagataaaccgagtttttttattccaagaaggccatcgattgggcgggcactggtcaccgatagctcaccctccccctctcctttttttggcagtggtatgaacagttggaccatccaaccacatcccatcaaacactactagtacactagatagagtaattcacacaaacaactaacaggttgaagaagtccaacgcatcaagtgaactaagaagaaatcgtccgacgcggaaaaaggaagtacggagaaagaaaacaagaaaatcatccaggtagagatattcgattggagacgttacctcgatggctcaacaattgcgcgcggcagcggtcgatctgattggcctgggaggtcgaaacccgctagggttttgggaaaagggaggggggagcgggagacgagtccgggtgagcctacctatcggtgcggaatgcgcgggaggtggggagtgagagagaaatagggagacgagagaggagg

SEQ ID NO: 129763 - DNA, 485 bp, Zea Mays
aaaacgggaaatatgtcatcaataaaaaagggcttcaagaatactcagtttgttcacgattgaccgacattcttatttaactcggggtgatcactatgccctgctaacggagcaatcgacttaagtcggcgacgacttaagacggtgcaacatgctcgcgcttacttaactcagggtgaccactatgccctgctaatggagcaatcggcttaagtcggcaacgacttaagacggtgcaacatgctcgcgcttacttaactcggggtgaccactatgccctgctaacgaagcaatcggcttaagtcggcaacgacttaagacggtgcaacatgctcgcgcttacttaacttggggtgaccactatgccctgctaacggagcaatcggcttaagtcggcaacgacttaagacggtgcaacatgctcgcgcttacttaactcggggtgaccactatgccctgctaacgaagcaatcggcttaagtcgg

SEQ ID NO: 129764 - DNA, 390 bp, Zea Mays
atttgatcaacatagatttatgcatatttttctgtcttatgggtagtatgcactggtaggaaattagcggtcttggtcaatctgtccacaatgacccaaatggaatcatggtgccgagaggtattgggcaatcccagaataaagtccatgcaaatgtcctcccatttccaagatggtatgggaaggggttgcaaagggcctgctgtcttcaaatgattagccttgatcctttggcaagtgtcacacttggatatgtacttggcaatttccctcttcattctggtccaccagtataaggatctgagatcatgatacatctttgtactgcccgagtgcatggagaattttgaaaggtgagcttcatccaatatcttctttctaagctcaggg

SEQ ID NO: 129765 - DNA, 387 bp, Zea Mays
ggttcctggagcttcatcgggcctcgtggtggatgtgtgcgtgcttgatttgggcggggtggaccgtgactatggcaatttgtcgccggaattggcactccgccgtgttgccgcacgtcgtcgtggctggttgtccctgcttcgccgtcgtcagtaagtttctcctctgtgtgatcaccatcatcccctccctgcgttgcaccggttgggtaggcaaactacgctctggtgcgcatttgggtgcggctccagcgaacccgccaccactgtcgctcgggcgccgccgccctgggcgctcggtgtagaagacagggcttcggccgttgatcccctggtggatggctctggtaggctctaggttacccctttgaccgagttgaattcgcg

SEQ ID NO: 129766 - DNA, 650 bp, Zea Mays
cttatatctgataatatatataagtgacaatattttacactaataataaagaaagtatgctttaattataatataaataggaacgaaaatcctcgcctggactcatgcgggaaactgggatggaaaacaaatatccccacgagcgttcgtgtgatccgtacaaaaaaatttcgtcgccagaacggacatgagagaagctattccccgacaggccccttgccatctctacacaggaccgatcttttgatttcaagagccacatagaaaaaagattgatggagagagacgacatgccgagaacaccaccacaccaccgtggctgtagcctgtaacttcattctacagtccgtactacgcgacgcttgctactgcttgtagatgaaacaactcgctgtccccgactcctgactgctgctgcgcagatagaggccgtcggcactgatcgaaacctcaaaaaatccgtccagctccaagaaacgtcgcaagcaaggactggtgaaaaaacaacaagaagaaaaagatgacgcgtttgcatgtgctatgcatgatgcgtctgcacctcggtacggatctcctcaccttggttggtccctgtctattcggagttccggagcgagtattccctcgcaggcagctgtcgtcctgtgcgt

SEQ ID NO: 129767 - DNA, 349 bp, Zea Mays
agcaatttgttgcggtatccatattttgtacgacgaagtaattaatgtggcaagagtacgacgatgaactcatgagcagtgccatctagtgttcttgcgagcaaagaatggtcgatgacctggtggcgtctatgacaagatctcgacgcgggttctttggcctcagggctctgccatttctgagagctactcgcactgactcccccagccccatattttcctttagtttccctttgagccttatctttcagagcggagcagaggaatctgtgctttgcttccgttagtaacctttctctctcagctcaatgaggcatctcttttctccttcaatgatggtttttgtgtt

SEQ ID NO: 129768 - DNA, 702 bp, Zea Mays
cctggcttcgcccgtgaagaatccccggtggcgtgagatagacgattggggggggaggccgccgagccgcccaggccgggagcaccatccgcggacgaacgacgcccgcccagccatgggagagcctgcagaggggaactcggattatatatcctgggcgcagccaaaacccaacgaacccagctgatcccgtatagtccgcgcaggggtcaattggttgacaggggtgggaaaaccccgagatcccaagcgtggccatcgcgagcagctgaacccgagttcgctacgagagtttagcatggaggaagaagagtctggccaaccgggcccacacggaagcgactccatgcgatagaaaagaatggggctggcgagcgggacccacaccacagtggcatatggcgtgcgggtgagaagacagcaagcgacgcacggtaatgggccatatgggccagaagagataaagtggagctgggctgggggagtgatttcagcccagaccgcgcaggaatccctttttttcttttctctatttcaaatctaatttaaattcaatcacctattttgaactcccaatttccaaatgctaaaattaatactagtgtaactataacttctactgtttatcatttattctttcccccctttttctatttttcctttgttttcatttaaattttttttgttttatttctatggaaa

SEQ ID NO: 129769 - DNA, 297 bp, Zea Mays
ctggcgtgatggtccagatgccaaccccttgatggtttgttcttctattgtttctccatgtggaatgtcatttaccattagccatgtgttgaaccgctgcttatgttgcttcattacccaatcagccgtatgcccaggattttgctcgtgaagctcattgatgtgttgttggataaatggctctattatcgctagctaatgtaggatgttgtgatgtgcctcaagtattgtattgtaatctggtgggatgaaagatttccgtcccatcctcccgcttccatacaatctaccctcgtg

SEQ ID NO: 129770 - DNA, 498 bp, Zea Mays
ccgccgtgattccctactgccatcccatcatcgccgatgagctagccacggctggggacacgtaaccacgacgccagacctcttccttatctccggctgccgcgttgctcgaccaaattgggcgccaccgatgaagatgcctataaattgagccctcccatagctgcataacatcatcatccacccagccaccgttaatcgctagcagtccttcgctagaactcgcgaattttggattcgccccaaatccactctccgccaccgtgaactcacctcaccgcggccagccttccccaggtctgctcattcccttctcgttcttgttctagcacccttacatgttagtgatgctccccgacccctttaatcgaactgaaccgcctgggatcgccgggaacacaacatcttagccgccatgctctcggtcaccgtggccagagctccgtagttgatcataagcgcaattaagttaggggaaatggacggggtggatccaat

SEQ ID NO: 129771 - DNA, 636 bp, Zea Mays
gggacggccacgtcacgatcagatcacaactgcacatgaacggaacgacgatccagatccaacctcgcgaagaggtaagctgtactctaatccagaccgctccctaaggatccgatggcgcgtgaacgctcttcaacctccgacgaccaggggaggtggagcagaggcccgcgacggcactccaccggcgcgctgcgattccggccatccggaccttcatttcctaattccttcgctcctcagccaattgacgacgatattaactcgcctaccctaccaatttctatcgtcgtcgagcacagggctcggtccacggcgcatggcggaaacgcgcgtccgatgaccaaatccgggccacgaactaggtgaatacgagtctaaccgattggaatgcaattgatggaggaagagggcacggaggatttattctcaccagcggctggtgcacagacgcaaatacaccgacgaacggcggacccgcagggaagtgcgattcgcggcggcgcccaaatcttcagggagaaattgcggtgacaccaaggatcttccccatcaacgacgccacgacgagcacccatacgcgtaggcgattctccctagccctcgcgcttgaggaggaaccgcacaggacgttcc

SEQ ID NO: 129772 - DNA, 731 bp, Zea Mays
ctcggctaatcgtgaattcgtcgccgtagtggagacctccgccgtgcgccgtgggcagacctcccggtgacctaatcctcggtaaaattcccacctctgtgttcgccatcttcctaattccatcttgcaccaactgatgtgacaaatcaactcatcgtgtgggcgaattgggtcgttccggccatggcgttgccgcggcgtggcgcggtgagccgccggagtgggtcgggaggtaagagagaggttgtgagccgttgatctttgtttgaacggctctgattagaagagagataccccttcgtcattttaatccgagccatcggattctaatcgtgtggctcggggtagattagatcgtgggcattcgtggaccgtcagatgctttccctgcggttgcgattgagctgggcgcgtgccgcttcgggtggagatcgtgcgccgtccgatcttgatcggtcggtagcaaatcaatatgggatatttaaatctgagacgttgatgttctatcgtgtggtgtggattgagtaccgtttcgatcggtggaacgatctaatctgcgtcgtctacgcataatccaatggtcaacattgtacgataccccttcgcttcgacacttattcaaaagagaccttatacttttggataatagaacccgccgtccacaccaggactttctgagtcttgggaatgttgcaccgtagcccctgcactttccataatttgaggcctag

SEQ ID NO: 129773 - DNA, 475 bp, Zea Mays
cccgtgcaatccctttcaaaaatcgagctatctagcagtagtagctttaatcttctttttctcgaatgtggacaccaattttggtataggcaatttagatttctttgattgttatgaatcccttgatggttgtggagaaagtggtggtgtcctaaatgttgatgcttgtggtggagatagtggattagaaagaggatgaggagcagcatgtgaagattgtagaggtgatgatggagtaaaggtactaaagtttgaggaggcgacgatggttggggatgagacgatgacagtgttggtggatcaaccaattcgacatcccttcgaggccaaaggatgaaatttttgatggcttgtccaagtgtctcgattccttcggacccagggatgtctagcatgtcgtcgtcagatcattggacgattgtcgtcacttctaccctgcaataatcatctggtatgtcgctttcatgaaattgtg

SEQ ID NO: 129774 - DNA, 379 bp, Zea Mays
ttcgaaggggtattgtagaatttgagccgcacgattaagatctcgtggtctggattagatctgagctctcgtaggcacgcgagccataagatcgataatgcacgacgaggattttattaacgcgtgatctgatctctgccctacgatcccgaattagcgacctagatttgatctcgcgaatggttacacattcctcaatcacagccacacgcagctgatccgacggcgaccgacccatcacctaccccagtcagagctgagcggcagcgtagctctagtctccgtggcccacgacgatgcgccattaccggggcaacagtcaatccccaccagcgcactatcccccatgcaaacaggtgcaacgctaccctaagatccc

SEQ ID NO: 129775 - DNA, 847 bp, Zea Mays
gtggaattattgagactaagatatgggtgtcatgttatacctgccaactagttcagccatgtgggcatgacaatcaaatagaatgatcttttgcacggattgaggtaatatcatccatgagatagtatcctccatcctttttcctatacctgtcaactagttcagccatgtgggcataacaatgaatgggaatgatctttcgcgctcgttgagatgatatcatccatccttttccttgatctttctatagacattttccttctgccaaatttatcaagcctaatgtgatgctgatgctctatccttactcaatgtggagaatccagctccctcatagctggattatccgaaagatgaagtgggccctccatttgtcatccttatatctggtgacatagttttggtagcatggactcactaccaacacatttagtacctgaggtatttttgccttttcttttgtgcaaattgatatctgaatcattcgcgagtgttatgccaacaaaatgaagccatgaattgatgttcgattagtttatttagcagcattgtaaggctatctccaaccgcgtactcattcatatcttctatttcaaactacactatatgagctgtgacagtctatagtgcaaaacaatgtttttgtacggccatatgcacgatcttgtaataccctgaatttgggggtataaattttcttctccaatatccaccaaattcgggcgttactctctttttctcttcatgtttcgttccttcttcctattttcaaaacaatatagagactgatgtccgtgtcacgtgtaaatcaaaaccctaagttgatattgttgttgcatcataccgg

SEQ ID NO: 129776 - DNA, 746 bp, Zea Mays
ggtgatcgtagcctgctcttgtttgtatgtgtgttatcctgtgcttgcgaaacttgcactgagccagatgtatatacatataactatgagcagtatggaaaccggagttaaattacttgactcttgtgctcgttattctttccgggagatgcatcttctggaagaatcgcttaatgatgaattctttatttgtcgaaatgctttgcttttttttccaaaatgtgggcacaaggaatcacttgatgtgtacgccactgggtcatccatgccatatagtagtatctacgttgtttatatctaacataataatctgtttaaagatttttttttgggtttacttaccctgaccccactgcatcttttggagccctgttgctgttggtctggtgctgattcgaagctgtagctgctgttcaactatctgctggtgaaacgtcgcgtggacgcctacagcccgataagatgctgacgtataaaatggtgttgatgtgtctgttgtaccagcatgaagtggcagttgtttcaagcaaagattagaaaaccaaaatcaagtgcagattcgcattaccagggccttgatttaagatgtggatttaatttagtgattaaattaatcatgctcataggataggagtagtgcctgctgatggacaaatcggatgatttaagatgcggatttgcaaggttatctccatcaactctcctatactatttcctatcttattccttattttaaactcgactcc

SEQ ID NO: 129777 - DNA, 441 bp, Zea Mays
catgaaacatcttttcagcagtattgtgcttacttcagtaatggatgtacagaggctactattttgtagaaaggccacatacactagcagttaatatatccacaaatacactagcggttgagtgattcttacataaacaatttgacaattatgttggcattttcacaagcacctaacgtgcacagatcaggctacatatggagacttggcatccaatgagagattaaaaaagatttgtaatgaatagaaacacgcagctagagggaatcacgaatcggtcaaaaaattcaatcatgaagagcacaatatcacgcagggtagagggaatcacgaacttggttcctccgatctgttgtcgcacccctaatctaggaaagaaaaaacgaagctggaggtgggagaagttgcacgaggaatgggggcggcgatcatggaagtttc

SEQ ID NO: 129778 - DNA, 1440 bp, Zea Mays
ctcaaaagatctcaaatatgtctaaaagattgcttagcatggtttagttcatcattagggtcattatgcatgcttttgattggggcacaaaactgtttagtaatgggacaggacctcatacaatgagtgacagaggaagtatttatgcataaaattgctatgcctctgtttctcgtttctgaatggaattgtttcatggtttgcagaccctcataatatatttatttatgatttatgaaatgaggtctatcttttactatttgtaaattcatatgcaattagttactatcctaatacactaaaagtattctgttctaattctaatggttgtagcagagttggtggattttaatcattatatatcttgtcggatcccttagtttctatttggcattcactaaaagctttacgagttgtctttttttgttcaacatccttcttcaaaacagtttaatggcttcattgatggagcttcttttttttatcctctcacaaaggaagatgagagaggtgaagttgaaaaatgtagctttgtacaactctcacatattcccctctgtcatgtatgaagctatcggtaaagttgttttgtcaaaaaaaaatccaaaactgataagcttcactaagaaagctgctcatgacgaagcttaactgtgtcaaatgaggctttatttgcccagtatcttagctactgtttggtaatttagatcatatgacatgattggtggaaatatgtacgtgaaatctagatgcaggtttttctagggcaacccactgacccagcccccaatttggaaaaactagccctaaatggaagatacttctaccttcttcatttctctcaagctgtcaagcaaacaacagttgccccttttgttttataattttatagccattttttattttatagtttcatgtttgtgtcaatagcacagtgctctatatttggacatgtcatttacatttccaggtggtttatacaattagatagtttcatttttgtgtaaagatgatctcgtggattttaggtatgttgtttctgaatacccattgtttccattctgttcatcctctggttcggtaaaatttcaaccataaagcaggtttagttcaattattatgatacactgatagtgtgacatatacctccattaaatggaatcttagtatggtcttgctcttgatgttgattggcaattaaaaatgagtatatgaaagaacaaattgctacatggctgtaggtattcacatttttatgcacatctattttctttgcagtgtcttggtgtgcgctcatgaactcattcagtcatatgaaagaacaaatataaatctgcaattattccactaagtctttggcgttaggagtgtagctgatatgttgtcatgtatgattatgctgaatatctggcactaagaacctttgtgtataacccactc

SEQ ID NO: 129779 - DNA, 445 bp, Zea Mays
tcttgcagttgtccacgacgaagtcgtccgcgcgcggctggtcccggctgctgtcgatgatggagcccaggaagtcgcggccgggcgccagcgccgccgctgccgccttgcgctcgctcgccagctgcaggatcagcgaccggatctcgtgcgtgagcttccagatcctccggttcttcctcgtgggcaggtgcctgagcgacgggatggtgaagatgacgctggtctcggacatgaggcccgacagcgccctgagccggaggaagatctcccgccccctggagtagtcgcccccgaagcaggccctggagatgacgtcgaaggagaagctccggatgtcctcgtccacgtcgagctccgcgacgccgcccggcgcggcggcgaccttgtcctcccacgacgtcagcagcggctgcgccgcgtccaccatcagctccaccatgcc

SEQ ID NO: 129780 - DNA, 387 bp, Zea Mays
gggggtctgaagctagcagagcaatctatatgaaggaatagagaactagggaaggaggggagaaaaggatgaggaggagtgcaaagctagaagaagaataggacatgaactgaatgccctcccccttgctgatgtctctcctcttgtagttgctgcgatttgttacacaggcgaatgggccatggcccacacgagaggtagcccatttgatgcaaatacctgtcattaccctcttcttgagaagctgattgccccaagcagctgtacgaaaaccttggagatatcttgtcttaaagccggtttgcagagacatccattgttacttcaattgtcccctggatatctctattgtttcctggtatgaaatgatcatgccttagttccgat

SEQ ID NO: 129781 - DNA, 597 bp, Zea Mays
caaaaatccaagatctaggcattgcaattctgtctgtcaggcgctctgaatcaggatttcgatggtacagtgttcagatcagatcgccaggttcagttcatctcgccgccggcgaccacgcgcttggattcgcgcctgacgctacgattcgtgctcaacgaagtactgattgttgctcggggtagtaaatatcgttgtgtggatgaacttgagccactgttcactccagccgccgtgtccgcctagctcacgtccgattcggatgaactcacccgagttagccgctcaacgatcgtgtgccacgtgccttggtgtcttaccacgtcgcagtagctcatattacacatttctggtgatctccggtgagcccgccacggtgaaagccaccaatctcttgcgatagtgctcttttctttctccgaccgccaccgcaccatctcaaattcacgggccaccactcgaggatcctataaattgagcatgtcgtcggttttgcaaggtagtcaagcactcaatccatcaactcgtgccttcaattgttcaccagagcccccaaattgctcacttccccaaatcggttttctgccgccgtgaaaa

SEQ ID NO: 129782 - DNA, 380 bp, Zea Mays
ctcacatctcccatcgtggagctcatagagcctatgaataaggcttcagcattagggtggacctatatgttaaattctgtccaaggtctatctggttgtgttttctttagccaaagccaactaagatttagagcccaccctaaaacttctaggttatgaatacccaagcctcccaaactcaaaggtctgcaaactcttgcccagcctacagcacagtgaccaccattgacatcccttcttccttttcacataaaacctcttcgtattttatctatcgactgaataacgcatttgggacactgaagggctatcagatggtaaataggaatgacggtgagtactgctttaaccagtgtcagtcgtcctgctggatgaatctg

SEQ ID NO: 129783 - DNA, 746 bp, Zea Mays
gcggtggcaactgctgctgctgagctgcatccgcctagggtgcctgctgttctggctaagcacgtcttgcacctctgcgcctgttctcagacatcagtaggaatcacatacatatcagatctaactctgcagtctttcagcataagaaaagatgtataaaaagtcttcataacactgaacaattgatcatcttcactgacaacttctcaaataaagagaaaagtggaaataaagggattacccaactaaatgactgactttattaataactacactaagttgcaggggatacccacaccttgatgacaatcattacaaagatcaaacttcattacatgttcatcatgacaagcattccaacaaatgataagcaaactaactctaacaaagactgactaagactaagatactaaattaagcattattacagactctgactctgtcgatctatggatccaaatctatctatgtcctgcagtctggggtaccatagtcgaagcgaccacggggcggtgaacggtaaggctgctgaatcccgacaggggcggaagaaccaccatccaaatagtggcgtgctgcgcactcagcacgcaattctgcaacctccggccgaaccttgcccaactcatcaagggtgtggtctagctctgtgctgagcacgacagccagattgaccatgttgttcagcctgggattgccctcaccaacaggcgagacaatcacacctccagcactgtcggtcgaac

SEQ ID NO: 129784 - DNA, 769 bp, Zea Mays
gtccaagataagatcatgccccacacctcttcagctgaaaatgggtaatctttacataaatggggcatgttttcatgagataagttgcaaaggcaacaaattggattacaaggtaatccccactcatgtacaaaataagaaaataagatcatgccccacacctcttcaaaaagcctgtctcgagatatccctaacctagactcactcatgtatgttggagcctctagtactgcatgatgcctttagatgttgccagcttggagataaaacaagaaactttctcccaatggtgattcctatgaatttaaatggtcggttcactactgtgtgtgtcatcgtgagcatatatggcacgagattataaggagattacaaggaggtagagaggttatatttgagaaatagcgagagagatgtggccgtagaaatagcgagagagagagagaggtggccataccgtacactcgcaaggtgggcgtggttaggtcatctccagtaggccgtgtaaacaatcgtgtaaaatattgttttatattatagattatactgtttgtaaaatggagtttaaaggaaacgtttgacagatctcctatagctctcttccagcgagaatcactccgcagagttaaacggtaaaaatctgaactgctccatgatgggagtggaatgaatatagtctttattttgttctataagtgggagccataaaattgcctcccatagttccgaagctgctccccactctctaactctcaagaatcacttcgca

SEQ ID NO: 129785 - DNA, 411 bp, Zea Mays
gtcagcgccgaaccgtttcccctgcgcatgtgcccgtgcctctgcgtcgtgggcctgccctgtcagcaatatccaccttgcaaccaccgctgacctgcacgcacgcacgccgagaaagccggccacatcgcctacccacaccccaagctcccttttaagccccgcccgcacccgctctccttcccctgcctcatttcgcccactcttggtctctcttgcgctcaaccaccgccgcccgagctcaccggagaagtgcgcccgccacaccgtctgcccagagctccacgcgccgtgttaagcctccccgagcaccatctccaggtaaggtaccatccccgtgcccttcctgcctcggttactttcgctctacgacgaatttgcgctcgtcggagctctgccgcgctggttcgc

SEQ ID NO: 129786 - DNA, 339 bp, Zea Mays
taaaaactggcctatgtgttcgcgcgtgttttttccttggtcacccgaaaattttgcaaattcgggtatcctggttccctgtggtatgggtgctgatcaaatcggttgtcataaggtttccgatatgattgccccccagggaccatgcttactccgagcttatctcggaacgccccagctatttcttcccttactatatcaatggcagccggtgcgagaccaccgactctctggtcaaacataggtggggtcggctagatattggcatgttgtcttcccccccattggtttgagctatgtggtgcattgccatttgccctatatggctcataggattga

SEQ ID NO: 129787 - DNA, 723 bp, Zea Mays
aacatgtctctcttgagctccctcgtcttttcaacgtctgttcttagtcgaaggctccctcttcttttcaatgtctattcttagccgaagctttatttgaacgccactcatcaaagtgggttccgatgatgcaacaacgcttctcttcatctgtgttgacgaagtctctcttattcctttgacttgccgaagtacaaaactgaagctcgcatcacctggctcccgaaacaaacttagtccccctttgacagggcttctctaagatgatttctgctctggcttcattatttttagcgaagccataccaaatagtgtttttaaaatactttgcctcaaaagcacttccctcattttcattggaacgatgaagccaaaaataacgacccaactagctttgccttgtgtacattttgtaaagtgtcccctcccaccacatgcatatgttctctgcaaaaatcttgctttgagttcgacatcgcataggaccacaccaccaacctccccggtaagctcctcatcctcgtctttagtttgctcgactctagcgaccacaagcgctactcctttatgtgacaccgctaggtagccatagaggatgcctcccgcctccacctcgtgcttgacagcagggttatccatgggctcactgttgacgacatagggtaggtcatggtcatccatggggacacgagacccagccatgggccacagatttgacaggtt

SEQ ID NO: 129788 - DNA, 368 bp, Zea Mays
ggtgcttgaggcgcttggcctcattgacgtcacttgggtggtaatatccttgcagaaacagggttattggggcccgccaatctttagtcataatgaggttgacgatgcgatggccctcggcgtcgttggttacttgtaagccctctgggttgcggacggctggtgtgccaatgacgtggtagaacacgtcggagggcaaggtctcgcctctggccgctgccttagccaacgcgttggcctcttcgttcctggcgcggtccacatgctgtagggtgaagcccttgaactgtctctcgagactgcgaacagccgtgagatactacatgagtgcggggtcttttgctgaatattctttttcgacctggcca

SEQ ID NO: 129789 - DNA, 656 bp, Zea Mays
ccgcggccaattcaagatcatgagttgggtaattcccctcatgcttcctcaactgccttgagccataagcaatcacgctgccttcctgcatcaacacacagccaagaccaatacgcgaagcatccgtataaactgtgaaacgcttaccgctctcaggcaaagctaggataggggcgtccacaaacttgctcttcaaagtctgataactgacctcacaatcgccggaccagatgaagggaacacccttctcaaagagtctagtcaaaggcttagcaatgctggagaaatttggtacgaagcgtcgataatatccagcgagccccaagaaacttcggatttcagagacactagagggtctcttccactccaccacagccgcaacattcttgggatcaaccacaatgccctgttgattaatcacgtgccccaggaaagccacttcagacagccaaaaggcacacttcttcaacttgccatagaactgattctcccttagagcacccagaacgagacggagatgctgctcatgctcggccttggtctttgaataaatcagaatatcctctaggaacacgaccacaaactcgtccaggaattcatgcaacatcctattcattgcttccataatggcagcaggggcattagttaagccaaaa

SEQ ID NO: 129790 - DNA, 283 bp, Zea Mays
cagagatatatggatatgtagagatgttgatgtatacgtagacgtagacgtaaatttggattgagaaaataattaaatagaaaagcaaaggctacgtacgtacgtacccactttttctggtacatcccgatggtgaggtgagtcggcgtggggcggccgtgcttgatggagtagccgaggaccttaggcatctgagggagcgcgtcgacgtacatttccagcgaggcggccaccttctcaagggtgtcctccgttaccgacggcgggccgcccccgcccggcc

SEQ ID NO: 129791 - DNA, 574 bp, Zea Mays
ggtggattcccttgcactgcatgtgggtttctctctcaaactcaagagcctgcagtaaacttggctttccgatccctgaccgagctagaccgtgctctgtttctgtttctgtttctgtttctgtttcttcttctctggaactgcacggagaacagggttcgatgtggacgagacttcactggacggccacgctgacatcgaaggcatggacgcttcagccgcgcatgtggcgaacctgctgtcctccgagccatctgatggtacgtaccgtacgtactagctaactctgaacaggattgcaatagaacaactaactgttaacgctgactgactgacgagaaaatattgcaatgcaatgccagtgagccttgggataggagggttcagcatgggcgctgccgctgcgctccactccgccgcgtgctacgctcacggcagattcaccaacggtgtcgcctatccgatcaacctcagggtcgtcgtcggtttgagtggctggcttcctagctccaggtatggtataataaataatccggaagagagagagaaaaaaaacaaaatatgcatggttatg

SEQ ID NO: 129792 - DNA, 651 bp, Zea Mays
ctgagttggagtaggtaggtcctggtgccttcaactgggggcagttattcttgaagtgactggggtctccgcagtgccaacaggcatttgctggcggttggttgcttgcgaccgagggggcctaaaaggagctctgactctactggctgaaatgtgacggagtgggtccagctagtctattgaagcttggtcccttgggtgaaagcccgaaggatcgagctctctggtgtcggtcttgctgctgagcttggagaacttggaatttcctcttgaggtgacctttttattcttcttttgccctttccacttgtatggctttgttggagaggtgcgagaagctgaggaaatcttggctggcaaggatggtcttgagttctggtcttagccctttcagaaaacgggccatcttcttggtttctatgctgacatcgtcaggcacgtaacgagccaattctgtgaatttgtgcacgtactcactgacagatcttccaccttgagttagttcccggaattcatcttccttgagctgaatgatcccctggggtacatggtgctcacggaaagcagtttcaaattccgcccaggtagcgtccctgacggtcgtgctgaaggtatcccaccatgctagggccatcccagaaagttgatgag

SEQ ID NO: 129793 - DNA, 712 bp, Zea Mays
gtggagccgcctgcttcaattgtgaacctcattggcttcgtgcgcccgaatccgtgctcgggtgatccgccgtgccatgtggaatattgcggtggcctcgctgctgcgattcggagaaggggggccccggaatttgtcatcggagcacggtcttcaccacgggcgcgcctaccatcgtggccggagttcgtctgcgcagcaaagacctggtgagctaccctattttgtctgcccttctctgagcatcgcgtagcacctttccgattgggaattaacgcactgcatcgcgggtgaggggtgggactccggctgtgggccgccgcgctcctggcggcgccgtcatagaccgacaggttggggaagaagaccctccggccgctgatacggtagtggacggccaggattagccccgtgtaccctttcgcatggattcaatctggtccattgacgttagttttgacggacaggatcggatctagggtaataaaatccaaaccgtcgatgtccgatctcgcggctgcgattacgtaccggttcggtgtaatgttgctctaatccggagcgtagatctgtgatcggacggctagaataccaccataccccttcgcgggtacactttacgaaagaaaccttacgtttttaggatttagaacccgccgtccacctattactattcactgtgcctagtacctcttgcgcagagacccccgcg

SEQ ID NO: 129794 - DNA, 769 bp, Zea Mays
agaaggggcacgataggagtcctcatgaaatgcattttttcggttactgggaagcaactgctagatgaggtccacgctgggcaatgcgggatacacgcaacatccaggactctggttgggaaggtcttcaggtccggtttctactggccgacgacaaagagtgatgcaaccgagttagtctagaggtgcgaagcttgtcaatacttatcaaaacagcagcatttaccagcacagcaacgacaaaccatacctgtaacatggccgttcgcgtgctgggactggatatgattggacccttcaagaaggctcaaggaggatgcactcatgtactggttgctatcgacaaattcactaagtggatagagttcaagcccattgcttctctaacttcagctaaggcagtggaattcatacatgacataatattcaggttcagaataccgaatagcatcataaccgacctgggatccaattttactagttcggagttctttgatttctgcgaacaaaaaagcatccagatcaaatatgcatcagtggcaaacccaagagccaacgggcaggtagaaagagccaacggaatgatattggaagcactcagaaagaaagtcttcgacaagaatgaaaagttcgcaggaaagtggattagagagttgtcgtatgtggtctggagcctaagaactcaacccagccgagctttgcatggaaatactcccttcttcatggtttatggttcggaggcagtgctacgtgctgatctcaagtttgg

SEQ ID NO: 129795 - DNA, 484 bp, Zea Mays
agtgcacggccacgaagtctttactaaaagacaaatccatgcaaaagtcgcctaagggtgcaaccggacagtcacaacacacacgaatttcccatctcattcaacaacatcgcactggcaagcgaagggtaaccggccacattacacaacaataaacaatagtcacaaattacattcacatatcgagggatcaccaaccccatcgcacaaataaatacaatcgcactttctcccctccctctttattgcgagctgggggagggcagcgttttcactcactaccgcaagacaagagtgagggcagcaaacatactacatcggctcagccttcgggataaggcccgcctcctgaatattaaacaacatcattttcaactcctcacccttaaaaagattcaacagatccccctcaccaatgctcgtcccaaacgacaaggacatcaaatctcgttggccaccccgatctacccgaaggcgggttcgc

SEQ ID NO: 129796 - DNA, 409 bp, Zea Mays
cggcagcagcctccttcggcatctcccactcacttacgagcggccatactctgtaggcgatgtgttcttgaaccaagtctcttgtgacaataaaggtgcacacagtgttgaagcttctctggcatgcttctatatcattcccaagagcagtggctggcctcctgatgctgaagcgagaccaaatggggcgttgaataatccctcttatatcttccctctcaactaagttattcttcacgtaaaaccactcttccatccaggctcctagccaccttttccgaaatgttggaactagagaacttacatcggagcgaggcacaaagccataacagccgaagttgttgtgatactgctccttgccagtagccttcgtttcatacagcagctcgtgcatattgcagaagcattt

SEQ ID NO: 129797 - DNA, 456 bp, Zea Mays
gcatcagcagggtgtgcaggtgcactagggtgtaattgcgagtacagtacatggacttcctcatgcaacgtattgcaatagacctgcaggtcgtcgacagttgagctaagttccttaattcaggtctgagcccttgcttccttagcacatgccagcagacgggactgtactgcccagtcgagtgctaagtcccgatcagcaagttgatcctataggtgacggatgtcccttcttagttcatttattctatctctgtccgcgacccaagcatcggtcctgtgttgcagcgccgcttgaagtcgactcactcgggcttcaagatctcctattgggtcattactcccactgctactgttttcatgtcgaggggccagttgatgccggggcacaccgattggtccagttgacttgcgcgccgttagccttgtgcgtggcggcatctttctaagggggaaa

SEQ ID NO: 129798 - DNA, 638 bp, Zea Mays
tagaactgcaagctgcgacaaagaaggagataagtgaagtagatagtgatcacaatttgtaaagggataactctctagtcctgtatataaggccgaggggggccctataaaatcatctcatcacacatcatctcaccccatcctcataaacagcagttgagccatcacaaagctaatttgtaatccccttactctagaaatcaatacctagccacaacaggaagtagggtgttacgcaattcaaagcagcccgaacttatataaatctacaagcaatattaacgtgcctctgcacgtaccattgagtcgcaatcaacggagtcgtcctacccaaaagcatcatgtgggtaaccccgtggtgcatagtcgggtcacaaacatcgacagctggcatgctaggtagggactatgacgttgatacacttggtgcatggcagcgtaagtcatttcatctcacgacttgacgaaagggaatgccattctatgagctgctcaagaaggaggacagatttcaatggactctacaggttcaagaagcactagaggcactcaaaatattcttgaccaccccaccagttctcaagccaccctaccaagctactgtcaatcgatcgattgaagatttactgctatacaaa

SEQ ID NO: 129799 - DNA, 519 bp, Zea Mays
cagggatgcaccctaaaatctcttcgtcgatgccaccaaagagcacggatccggacttgtagccgccagcaatggcgaaatctttcaattcagaaatatcttcataggagagttcttggccgcccaggtgtcgtaggtccaactcagtgtcctccgaagaaacctttttcaattctttcatctttaaggccgaagccttatcagtggatacttcagctatgtccttctcgggagtcacatcagctataattctgtcaatctctgacattgtggtcccgaggttctcaacttcaggcgcagactcatcagcttcgacatcggtattacctttggcattagcaggcacaacaatttcttccgccaaggctgggggcggggtcttttggatggctttcattacgttcatcattctccgtttcttctgacccccgaaatttcccccagttgccgaagcaatctccttccctctcgagctttgttcaattacattctcctttgactgcaataggctagtcagat

SEQ ID NO: 129800 - DNA, 359 bp, Zea Mays
aaaaggcgtcccttcaagagagcctcgcaatagcagaaggcgaggaaaccaatacccgtgaggcctaccgcaccctaaagatggattacgacaagaaactgaagaagctcgcccccgcaagaaaaatccgcaagaagaccaaaagccaaggatgtcagactgagcagaaggaggaagcccctccagccctaccccctgccgggataagaaactcgtccgacaccaaggagatgtccctagccagccttgatgaccttctcaaggaatttggggacactttagagaaagagttcggaagtaccctcgatagcactcgcgtgtaatgagtttatggtagttgtgtgctgcattatgtaatg

SEQ ID NO: 129801 - DNA, 435 bp, Zea Mays
gatgttttgtccagaactggaatggacaaggccaaaagtgttgatacacctcttgctgtgtccgagaagttgagactgacggatggttctgctcttgggccggaggatgctacacgctatagaagcgtagttggggcgctgcagtacttaacactaacaaggccggacatatccttttccgtcaacaaggtgtgccagtacttgcatgctccaactacaactcactggagcgcggtcaagaggatcctgaggtatgttagtgggacaaagaactatgggcttaagatcaggagatcacagtccatgatgataagtgctttttcagatgctgattgggccggttgcctagatgataggcggtccacaggaggattcgttgtgtttcttggtggtaaccttgtgtcttggaccgccaggaaacaagccacagtatca

SEQ ID NO: 129802 - DNA, 320 bp, Zea Mays
cttatattatgggactaaaataaaaagtgattacgccttagtccttacataccagaatggagggagtaatagattcactagcgtttatatctgtttggttacttatttaccaagatgtgaatggtacagaatcgtggtaatgaaacctagcaccctggagcactcaggcaaatagattcgcaggcatcgatctgcacctcaggctaccgaaatcagacacctgaggatgcgcatcaaagccaaacttgtctgggcttgaagcccacatgcacagtgcatttcacataaatctctgggtagacacaataccacaccccaac

SEQ ID NO: 129803 - DNA, 390 bp, Zea Mays
gcgctatgggatgaatgctcttgggcgatgtgaagcagatacaggaaaccggacctgtcgagccattgggtgcacctgcatgattatctaaggtcttcaggacaaggacatccgtaggtgggcctaatatcttgggaggttccgtgacagctcgtattagagcgatgcccatttcttcggacattacttagtgcttcaaaaggtttgaaactacttacctttgaatattctttcatccttatattgttcccttcttatagcaacttaccttttaagaagtcgagtaaagagtgcaaaatactaggttatatgtaggaagtatgggatcaattagtagttgataccatgatcgtagaatcatgcatgcatcatgttcaaacaatactaagt

SEQ ID NO: 129804 - DNA, 523 bp, Zea Mays
ctggcatcctcggccccttcactcaggctcaggcgcacactgcgctcgcccccgtccagttctccgacaaccctgctccagtgctccaccaatggcagagcagggcggctgggatcaggctggcctcatagccgcactgaaccagatgtccctccaggggtcctctccttgggtcctcgacaccggcgccacatctcacatgtcgtcttcggctggtatactcctgtcctgtctccccctccttcattcggcatcacagttggaaaaggcaccaccatacctatcacctgccgtggcacatccacactctcctcccccacctctacctatcgtcttaacaatgttctggtagcacctgaacttgtgcgcaatctcctatctgttcgtcaattcactcgtgacaactcttgttcaattgaatttgacgcttgcggtttttctgtcaaggacaaacagacggggcatgtgactcttcactgcaatagtagtggcgacctctacacctacccctccaccacagctc

SEQ ID NO: 129805 - DNA, 409 bp, Zea Mays
tggttgcatggcagtcaagccctggcgtcacacctgtgtcgttcggtcgttgcctagcgcctgggtcagatactcggatccgggtgtcatttgatttcggggtaggccttctgctcaacccaggcctattcaccaaggtcaacaacatgtcagtttgagacttcttattattatcgggtcgcgccttcaattcggtgatcgtgtcttggtgggtcggccactctcaattcggggctgagtcaccacttggctttggttccctattcgatctttagggttatgcacgactctcgtttcatcactgccatccatcaccggattctagagccgctccttggtcgatcaaggtcgcttggatgcgcttacttcatgtgggctgctccatgatggagactacctgctcctcggc

SEQ ID NO: 129806 - DNA, 462 bp, Zea Mays
ggcatcttaagttcaagcaagcctagtcatgttgagtttgggaaatccactatgaaagcagaagacttagttctactgaagaagcgtgggtattttggaaaaaatgatgatgaaatgataagatttactggagacgaagtgattctagagctgaaggacgatgaagtaatagttttcaaaagtttctttcaggtagggctttagttccctttgtatgagatgattggcgaggttttgaaaaagtttgaaattcatcttcatcagctgactccaaatgccatagtaagacttagtgtgtacatctaggctttgcagagtcaaggaaaaaatgccaatgccgaagaattctgcagagtccatgagctccactaccagaccaaggctagagcagatggtctgcacaaaaactttggatgctacaactttgcataccggaaagacacaaagactcctatgattggg

SEQ ID NO: 129807 - DNA, 1217 bp, Zea Mays
agaacgtccaccaggtgttcgacacctggcgcccacgcgtcgattcctccatggacgcgatgcgggcggagctcgccaaggtctcccgcttcctcgagcgcggagcacgctcggactacgacgcgcacaccggcttccttggtccgcacgagtcggcagcggccgggccttcggctcccgcaaccttcgccgacggccaattcggcaaccgcatcgactcagctacacgggagggtggtctagggtttgtctatacccaaaatcatcccccggcaaatggtatgcacgaattacctccgttccagtttattccccatacgcctatccaaccaggtccaattccacacttgcctttccagtatcatccaccgcctggtcctttcggtcctcgcccacacaatgcatccttaccatcacctttaggccatcttcccaaggtcaacttcccagtttttgatggggacagccccaaattgtggcaatctaggtgtgaagattattttcacatgtacagtgttgacccgagcctctggatccaggttgcaaccatgcagtgcaccggacccgcagctcgctggttgcaatccgtcaaaccatcgctatacaatatgtcgtggtcccaattcactcatatgctccttgaacgttttgggaagcatgaacatgaagtcctgatccgtcgtcttttccatttgaaacaatccggttcggtgtcagattatattgaccagtttgcccaattactcgaccaacttcgagcataccaaccagtcaccgatcctctctattataccatgaaattcatagatggcctgaaacatgacgttaaatcagttgttattattcaacgtccccaagacttggatactgcctatgttttggcttcattgcaggaggaggtgggcaactcggctaagaagtgggacagtcgacgttgggagcctgtccttcaagcaaaaccatatgctaagggacctatgcctttaccaccaccaccaggcaaatcttcgtcagggggttccgcgccatcatatactgagaggcctcaccaggacatgctcaagcatcctccattagacgattgcctggccaatgtgtatgcttacaggaaggcaaaagggttgtgttacaagtgcggcctcacttactccaagggtcacaaatgtgccgacattgtgcaactacactgggtggaagaaatttggaaccaattcacc

SEQ ID NO: 129808 - DNA, 705 bp, Zea Mays
aagcaatctatctttttgaaaaaggcttcccatctcaaaaatacccaacccaaaaggatgaactgaacaactaaggacatggagttcaagttcattctcaatgaaatcccaaatcctatgcacccacatgctaacgtccagtggaggaaccacaccttcaacgtcagttgcgatgacaaaatcatcacgccttacttcctacccgcgcgcaagatgaacttgtgcctgcgagcgacgatcattgccaccatcatcgatcaccagctcttgagggatataaggtcttggattggctacaaagttggccatgatcgaagaggtagaaggctgcatgaaccaacttttctctggagaaaaccctaggctagatgagcgaggagatgagggggttttctgagagtggaactgaacaattgcaaacatcagaatgcaaaaggttgtttttgctggtggattttgtgggaccggtaaccggctgcaccttgggtcactctggcgcaagcggaacaacttccaaagcggtttgcaccctttcactgtatgccactgcctcattaatgcgttgtaccttgggcctccagagcagtcacgtcgatgacttcacacgcctattgaaatagtgcttctcatagtggcctagcacaagacaacgactacatctgactggacatgggcatttcctggccaagtgagagcgcgaaaaac

SEQ ID NO: 129809 - DNA, 348 bp, Zea Mays
cgtactgcctgccaatggaatggacaggcacgccgcctgcgggatggcctggtcaccgcccgtcagcggagtggacaaggcacattaaatgctgaggcggcacatcgcctgctagtggaatgaacagggctcattaaatgccgaggcggcacatcacctgccagtggaatggacaggcggcgcgccttatccgcaataaatgcagaggccgcgcggcccagagtccttacgtcaggctccgcccgctggcttacgtcacgggcggtaggccacgtggcagcatcgggtctccgcctgagcggggagcagaagcgtacacggtatggtccagacacgtgtcggctccgg

SEQ ID NO: 129810 - DNA, 500 bp, Zea Mays
gcaacacgacacaaaggcacaaagacttatacaggttcaggccacgtggcgtaataccctacttcctgtggtgattctagtattgaaaatgaggtttacatgttcaaaactgtgagtgtagtgggttagatgagatgaaaatggtaggggtactttctggccttatatacacaacaagggagagttatccccgcacaagtgataaatattatccactcgcttatctccctgtttatagcaaactgtctccctacatatatggaatcttcctcattcatccgttcgagttaccgtcggggatttagcttgtcgggtgatcgcaactgctccacccgaaatgtccgtgctcctatagcgcttaactcgggcgttggtcttcgtcggcttagattgggcttgcctggcttggttgcgctcagctggcccatcccgtaagatgacccaggaggagacctaccaggcggcccaggacgtgttttagtgtgcatgaggacctgggg

SEQ ID NO: 129811 - DNA, 451 bp, Zea Mays
tggcgataaaacaccgactgaagtcgctccaatcgtcgatgcagtgtcggggcaggtgtcgtagccattgcagcgcatcttgcccaaggacgatgggcaaatacgcagtcatcacatcttcagttgccccagcggcccaggcggtggtggtatatacgtccaaccagcctcccgggtcctgcttaggctcgcacttatcgacgttggagaccttgaagttaggggccactgaatggccctgagacacggagtgagcaccgatactccacatgtgtcctcctgtcgacgattgtggtgtcggtcctagggaggggagttgtcgatgtgctgcctcgaccgtccccgggtcgtgccgctagttgaagttgttgctaactcaaccctggtggcctgacttcatgcagggatgccgtgatgccgatcatactcttctcggtgccgaatctcgttc

SEQ ID NO: 129812 - DNA, 495 bp, Zea Mays
ccgaaagaccagcccgcgacacaaagtcctccgaaacaaacgaatagctagcgccagagtcaaaaagagcatgggccacaaacaaatcaactgaaatcgtacctgtcaccacgtctccttgctctctgccatccgcagcgggtagcacataagctccggaaatacccgttgaagaggaagctcccggagtgaaattaacagaagaatcccactgagcagccgggtgaggcagacacggagctccaaactgagatggcataggggtagtcggtgcaggagtaggcgcaaccagatactgaggaaaaccctgcaccggcacgaactgagaagtcccaggcacacaaaactgctgcggaggaagtggaactgaaaattgctgctcagcgcttgacatcatgttgacagtgccctgagaagaggaggaagtcactggctcccatgtgagcttcccactgggattcctcctacacaccacatccttatggtcttgactgc

SEQ ID NO: 129813 - DNA, 702 bp, Zea Mays
gagagcttaaacaagggagcagaggggaagagctaaccggagttgggctgaccacggtggggttgagttcacggtgttttagaaccggattggggagaatccgaaattcgtgcttgctagtgagggatttgagatgcaggtgggtgcagtaggtgcttggatacatggcggagctgggggcacggtcaatttatagagcccgcgagcggtggtgatcaatttggccgagccgtgctggcggccagagatgaagaagaaggcggctcggtgaattcgtggctaacaccgtggcaagctcaccggtgttgacaggacagtggtagggagtcccggcgacacgatggcgcggttaggacacgcggcgcaaggccggacgacggctatcaccggcgttcttatcggcttctaccagggtgacatagtacggtggccggagttctttatcggttgaagcttatccacggcggcgtacaccggtgttacccacttaccccgagaacaacgtggaccggctgccgcacgaatcacggtggcaatcggtcgccggcggtgaagttgccgcgctggcggcctgatccttatcaggtcactgtaccatggccagtttccttcagatgaacctgacagtgcaactttaggtcctattttctccagattttctatggtaccaagcccaaacatctatagcaaagttgttctact

SEQ ID NO: 129814 - DNA, 435 bp, Zea Mays
gtttggtggattgctctactctgtggtgtatttcttgagtcggctgtttcctcattttgaccttggttgaacacgcagtaatgataatataactaatataattgagcctaagtatataggtaactagtacacgtctcgctaaattagtgaactaaattggttaaggtctaataagtgtttgcctagtaaataattgtaaagcccaattaattgtctagtgccctttcaactaagtctgtctacatatcactagtagcgaacttaggtacttaattaacttaatgattaagtaactaatggatgattaaagtgtacgtggtaaacacttgtgctcatgcttgtgtggtcatgtttgtattggttaagtaaagtaaacgtcgccatctttccagtgatagcgactacggatgtccgatgacgtgtagataactaatg

SEQ ID NO: 129815 - DNA, 516 bp, Zea Mays
ttagccagcagatcatctaattgccgcttcgattcaacctgctcctttggggccatccgatacggggccttatgaataggctgcgtacccagaatcagcttgatctcaaaagctgcatcgcgctccggaggaatgcctagaagctctgccgaaaacacgtcagcaaagtcacacaccacacggatgtcctgtacccgcaaggcagcctcaccttccaccaccatggagaaaaagattcccgacttccttgaccggcgatctagaagaaattgcgccaacaaggataacgtgtactttggggaacttcccaagaataccacctccctacctgacgacgcctgcaataacactgttttccaaaaacaggatataactgcgcgatactgagataaccaatccatacctaagataacatcgaatgcccccaaggaaatcacaacaagattggccaaaaagacctcatcagcaagaataacggaacacccctgacaagctgaacagctactaatggagcca

SEQ ID NO: 129816 - DNA, 1051 bp, Zea Mays
cggttttgctaacggcactctagccgctctctcgctgcagttccgtgccgcggaggctcacaacacgtttgaagaaatgcgcaggagccatggggtcatcgtcccagtggtgatgggtcatgattcttgcggtaacctggctcactcaggctcttcatcggtgacgctcgtgcgatcccggcaatttgcaacggccgtggcctcgtcactgtcgccgcctgtcagtcgaagcactcctcgccgccacgcgcgcggaggggagcccgcgcggatatttgggttaaatagcacctcatacggcgggtttatcaagatagcggaagctccatcgcgaggtcgaggcagatggggtgcgccgaggggttgatgccttgaggggctgattgattgattcagattgaagttgtgggaatcaacgatgggtagagtgcgatggatgtctagtccatggacagtgtgatagtccggatgagtaaaggtgggcgccagagtcctgtggaggaaacattgaacatgtgttgagggatgaaggtttgttctcactgtttcataggcaaagttttttttactgaatttcatgtgagtatatatgaactacggatcaagtagtttagagtctgtttacttggtttaggattatgattttctcagatgagattgtactgttttcagattaatatgactgcacttctgcttcctataaacatatttgaatgtttccacgtgttaaaataatctcttgatttgaaactgggaaatattttaatgatctttcaattcggacagtttttataaccttgaccggactttgtaccttatatgatgctgagttattactattcagaacagaacttgagatcattgtactagcatgctttaccaagttttgcaacgatacctgtcatatactatatatgtgctctttgagttgtatggctacatgtttttttcaatccaagattttctcaaactgtctctaggctttgcattgcaggtaataatgtattggacaagtctgatttcctgcacgttgatcccaatgtatgtcaag

SEQ ID NO: 129817 - DNA, 1457 bp, Zea Mays
caaggacaaacctctcgatgtcactttccagcatggagaaccaggagtcctctatttctgcttcaaggactgcaatctcacaatcaatataatcacatttattgatgttctttatttccttttgcaccataaagaactgttcgcgggccttctgtagttcacaccgaagcttcatccaatcctcatcggatttcagcggcgcggttgccttgccatagttcttgggtttatgcattggtgcagtggaagtatccaagttatcaatagcaaacaggaccttttcttcctcctttctttgagctccatacgcgccaagtttcactttaaggccatcaattttgcttctcaactcagtttcagattcacgtgctcttcttcttgcggcagatagttcatttttgcgagtttggagatgattgaaccgttctttcttctgattcattgattcaaagctggcatccaacctggactctgcaggacttttggtcttcaaaaccatgttccaacatgatgctgcaggcaagaaatacttgccttcaaaagcaattatcttctcctgtgattctgacagcacagacttaaggacagtgatgtcttcctgaagacgctgtgcgcctagatactgaagctcaattcttgaataaagttctgtggccttaccactagccatttctagtagcttaaaatattttactgcatcctgagtagacacaaccttatcttggacaagctccagcttactccgaacaatctgcagcacatctttcaaagctacaattatggagtcatgaacatgtttcacttcaggattctcagctgcttcactcatttcagcatctttctcgcccaataaaatatcttttacagcttcagagtcgctttgctctaaaatcttccgtttgaatacatctctttcctgcatagttttctcatgcaaacccataagtccttcattttcctcatccatctcctccagctgaagacacaattcaacggatgtaactcttgagaaattgtcctcatttgtgcatttttcatctactatcttaggctcttcttccacattggatgagttatgtgcatgcaaatctgatgttgctgctggttgggcattgagcagatcttcgttcacagggtttccatcttggtttgcctcgacattgacaaaagcgtgttgatagagctcaatcaatctcttgttatcctcaatcaaaaccttaagctgcattctcaattcttcattatctttggccaaaccaatcacagtttcatgagcttctgcttcccgttgacttgcagaagctatcgcgtcaaccaaagtcttaaattccatctgagcatcagacaagttatgtaaatctgcctctccttgatcctggagctgggcaggcttggattctttatctgtgttatcatgtttctttgtaagctccaactctgtggtcaactcatttaca

SEQ ID NO: 129818 - DNA, 717 bp, Zea Mays
atatccgataaattcctcaactaaatcgcgcctgctactcatgcgggcagcgtatcgaagggccccttcgtcctcgtcatcctccgccacctcgaatggagggaacgccacataacagtgagagcacataatggctgcagggagcccaggcagatcttcgacttccccataggaaacataaaaccaaaagtcacaccagttgccccacttgttcctggcgcaagggactatctccacgacttccgacgaagtctttccagtcctcggcgtaaaggtgcacgatccaaattttgcaatcttgtttcctatcttcctttttgccagtgcagataatagttctttgcgaagacctccacagatagctacccgctgtaagtagcaaccgcccaaacatacttcgctagcgccaccacggcgttaggcgtcaactggtggacctacacgtcaaacctccgcaagacctccgccacgaagcgatgcgccgggagacaaaggccatcaacgaaaaacacctcaaaaacaaccaattcgccctcaggctcagggatttcttctacgcccggaacccgcccgacaccatcaccaaaatatccaagccactgcatctcctgcacgtggaccgaggaaatcctcgaagtgccgaactccacagtgtggcccggttgcaactccatcaccgccaaatcactcaatgtatccacggacgttggatcgacc

SEQ ID NO: 129819 - DNA, 380 bp, Zea Mays
agcgtgttgagaataccccacttttgtgtaaattccaaatgaaaatgtccctatcacctgtaaggctagtgttgaggacacatgccaccaatttgtaccacgactccaagttaacgcccgttaacgcccttcgaaaggtcacatttagcaacgtggtgcttagcacctcggctaccgttgcggactttttgcgcacaatctgatagaggttaggataggcgattttaagacgcctatcacctacccagttgtcttcccagaatctagtttcctttccattatgaactttgaaacgtctgtaatgtaagaattggtctttcactttcatgagtccagaccagaaatgggaatccccgggctgtctttgagcttgggcaagg

SEQ ID NO: 129820 - DNA, 612 bp, Zea Mays
ttttcgataaaagtgtaccttgtttcagcatccaccagcctccgacttaggtaggtcaccacatgctcctttcctccagtcacttgtgtcagaacagccctaataaccttatctttagctgcaatgtacaatctgaacggtactcctacttgtggtgcttttaatacgagagccgaagacaaatactttttgatgagatcaaacgcttcctgctgttctgccccccaagtgaatttggcatcatccttaagccgaatgataggggtgaaggcatcaatcttctcggctaggttagaaataaaacttcacaaataatttatcttgccgagaaacttctgcacttcgaccttacaggttggaggtcccacattttgaatagatttgattcgttcagggtctatctctataccatgttcatgaatgatgaatcctaaaaacttactagccgacactccaaaagcacatttacgtgggttcattttcagaccataccgacacattttatcaaaggctttgcgtaaatcagctatatgagagctaaactcagccgatttgactacaatatcatcgatgtagacttccacagtgtttcctaacagctcgtgaaagatc

SEQ ID NO: 129821 - DNA, 614 bp, Zea Mays
ataagatatggtattaacaatcagcgtacaaagaaagtagccacaggccttgcgatcccaggatgcaagttccatgaaaacgacattccagaagaatattgcagggtagaagtgacgacagtcgaacaaggatccgaggacgacatgctagacatccctgggcccaaaggtatcgagacacttggacaagctatcaagaattttatcctttggcctcgaagggatgtggaattggttgatccaccttgacagccgtcgtcgcaggcccaaccgtctccaccttctcaaattgttgttcctattgtacatccatcatcacctcctcaaacttcacatgctgctcctcatcctctttttgaccctccttctcctcatcctcatggtggcccaccgtctccaccacatacatcgcccttcagggatccaccttctccacagccatcaagggatccacgaccatcaaagaaatctaaagtttctataccaaaattagtgtccccgttcgagaagaaaaagaagagtaaatccactgctggcatagctcgtcttttgaaagggattggacggagcctcacgtcagacactgttgatttggccgatctcgaggagtccgc

SEQ ID NO: 129822 - DNA, 327 bp, Zea Mays
ggcttctgtcgagcacatgagcttcattatcagacaaaagctagagaagatgggctgcatgagaacttcgactgctacaatttttcttatcacaaagatgtgaagtttcagttatcagctatcgtaccaaatggccagctggctggaagactgaatggttttatgtcaaagttgatgagaaaaaggagaagctggttcaaagcccattagaattaatcttcggagagactaggccccggtgcgacatgaaaccgaagagtccatgccaagttgcactgggcgaatttcgagttattgcggagcacattggtactagggatctggtgc

SEQ ID NO: 129823 - DNA, 500 bp, Zea Mays
ggggaacttgcttctgccgccgctgctgctggcgtggctgcatcatctgtgcagcagctgcgatttgtgagtgtaattattatttatatgtgtatggtgaattttttatgttgtactgagtttggatgtttgatgttaggtgactgccttcgccgagcaagttgcctcgggggccctgacctcgtagtttgtttttgagaggatacagctcgagggaaggattgagcacctccaaacgcagcatactgaggcggtgagggataagtcagcagctgagaataaaagtcggaacctcttggagaagttaacaatggtggagaaagaggtagaggacctcggccgccgattcgctgatgagaaggaagatgcggaaaaagcctgcatggaggctcaggccgctcgcgcggaggcccaagctgcccacaagcgcgtcgccgacatggagctggagctaaacaatatttgcggccatagcgaaaggacagagtcctccatccgtg

SEQ ID NO: 129824 - DNA, 417 bp, Zea Mays
gcacatcacggccgccaggagtcctgggaggtcttcgacttcgcctcccgccacataaaaccaataatcataccagttgccccacttgttgcgggcgcagggaactagctccacaacttccgccgatgtcttcccagtcctcagcgtaaaggtgcatgatccaaactgtgcaatcttgcttccaacttttcacttctgccagtgcaaacaataattcttggcgaagacctctacggagggctgaccgccatacgaagtcactgcccagacatacttcgctagggccaccacggcattaggtgtcaattgatggatctgcacgtcatacctctgcaacacctccgccacaaaacgatgcacaggtaaccgaaggccggcagtaaagaatgcctcaaacacaactatctcaccctccag

SEQ ID NO: 129825 - DNA, 748 bp, Zea Mays
ccccttcgccgccgatgacccacacgccgtgattcacgccgtcgttgggatttgtgttcgctggcggggagataacttcgatgaagtaaagatctcgcggggaggagtggataggatcacacatcagagcttatcgccgtgattctagtcactacgacgtgggcggtctgcctgagccgccgtggaaacgccggtgaacccggttgcgccacgtcgaagcttattgctccgcggtaacaagcgtggcacccttgggagcgttatccatgcgctgttacaccggtgaccgccacggttacagccaccatgttcttccccgtctccggccgccagcacaacatgctcgaattgaccgccaccgcttgcgacgcctataaattgagccctcccctagctgtgttagattatcgcgaacccagacacgaagaatcgttagctatcatcccctagtgagtcccaatttccaatttcccccaattcaagcttccgccaccgtgaaacgagcttcaccgtcgccagcccttttctggtcagaccccgtcccctgcttcctcgtttaagctttctcacatgcctacgatgcttgctgaaccaccaatttgaactgcgggctcaccaatcaccgagaacacgatcaactgtctgccacccattcggttcacgcagatagagcttgatagctcaccatttgtgcaattaggttaggggaaacactcggggtaggtccgatgtgatgtccgccgctcgg

SEQ ID NO: 129826 - DNA, 731 bp, Zea Mays
tgtgtcaaactttaagctgtgagagaggtcagagttcatttctgttttctatgaagtgtacaatcactcgggttgctatcaaattattttctcagatgatggtatgacaccagaacacaacttttgatggaggatgcaaattaaaaagattagtgcgtacaagaaggcaagagaagacaatagtaaagtactgtcactgcgagagcgccactaatagtaaagtactggacattgcaaatccccgttactattgccttctcttgcgtgctactgaaggatgggcggcgtacctggctgtagtcttcctaggagagcgccgagaaggatgggagttggtgcctcaccaacgcatgacattttatcgcctcaatgatgacgtcaatgcaaaccttgccccggagccttgattgaaggttaggacgcgtggattgcgcgggcgaggccgatcgggtgcggcgcgagactttggggagggagtaaatcgcatgtatggggactccatggagcgtccacgcgatgcagatcggtcttccagggagagattaggagcggcagatcgagggggagtaaatcgcgtgtacggggactccagggagcgtcgacgcgatgcagagagtgagagcagcacatcaggtacttccatggaggtgaagcggatggggggagtggatcgcgcgggtcgacattccagagagaaattgggcgcggcagattgggtacttgcatggagg

SEQ ID NO: 129827 - DNA, 427 bp, Zea Mays
tgtggaaaggccacatagcaatgagagcacaaaatgcccgggggcaaggtaggcaactcttcgacatcatctggcgccacataaaaccaaaagtcccaccagttaccccatttattcttggcataaggaacaatctcaaccacttcagtcgaagccttcccagtcctccgcgtgaaagtgcaggacccaaactgagcaatcaaaccacatatcttccttttctgccagtgcagacaataatttttagcgaagacctcaacaaacagttctccaccatatgaggatactgcccatatatactttgccagtgcaaccatagcattcggcatcagttgatgaatttgaatttcaaacttccacaaaacctcaaatacgaagcgatgcgccgacaagcgaaggccggcagcgaaaagcgcctcgaacacaa

SEQ ID NO: 129828 - DNA, 273 bp, Zea Mays
gatcttttcacgtcgagcataatccactagctcaagacatgaatcgcgacgaccggcggcgtgaatccggacgcgcagatcatcggcggcgagagactgaaccctgagatatttagtgtactgtaccatcagaattgcaattcagagcccctggcaatccaagtttggcattgattttctcctaaatttacatggcaagttgttgatcggccagtagcaaagttgttgtctaacgatccagctataaaccgactgtggtaaccatgctcaaac

SEQ ID NO: 129829 - DNA, 333 bp, Zea Mays
tggcacctacaacaccaaacaacaacacaccaacaggggatgacctcacaatccccacgaacgaagcatctaccgctaccactgtgtgcccgaccgaaaaaaccaagagggttaaccttggtttctccgacgagcgcaagactataatcatcagctccaacctcactgccaaataggaaagcgcactcgtccagattctgcaagacaaccgagacatgttcatgtggcaacccgtggacatgccaggagtcccaagggagctagtcgagcaccaactgaaagtgtatcctcaagcaaaaccgatccggtagaagctacgccatttcatgcccg

SEQ ID NO: 129830 - DNA, 365 bp, Zea Mays
acggcatcactgacctcccatgaagctcctcgagcactttgatttgactctaccgccgtgagcaggctggagcacgcaccaccgacgagcccgaccgcctgcgcacgtggccagcccacctccggacaccaccgtcgatgactcgcacctcgacgtgattgccagagacccccgaacctcacccgacccttcgccggacctctaacgtcgccggtaagccacgccaccactttttcctcctcggctactattcaggcgagggaggagcgcgggttagagggggtaaaaggccagggggttaagtgttaagtcagtgagacatatgaatagttcttcagggacacggtttaaatgactcgaataag

SEQ ID NO: 129831 - DNA, 326 bp, Zea Mays
ggatgatcccaacgactgtagagagcctatcattaggtacataaagaatgaagaagagctggatgacaaggctgcggcagaatgcatcgcaaggcagtcagcccactacaccatcatagggggcttactatacaggagaggcgcatgaggagtcttcatgaaatgcattcacttggccactgggacaaaattgttagatgaaatccatgttgggtagtgtggggtgcatgctgcatcaaggaatctggtgggaaaggcttttaaatccggtttctactggcccattgcaaagagtgacgctgccaagttagtccaaaagtgcaaag

SEQ ID NO: 129832 - DNA, 486 bp, Zea Mays
tctgaaacatatgtaattaaaggcacaaatctgaagcagtaccaattcctaatcaaagttttggagaaaccatggccagatctagatccaaatacatatatatcaaggtttgggggtttgatttcgcaccggatgaagggaataggtgcacgtacctgtcgtatgttcatcaccgacgagatccgcgccaacgctagaggaggagaggagtgctgcttgactcgtctgatccatttgcttctacacgcagggaggacaagcagcaactgacagcgtcaagaggtagagatgacagatataaagtaggatgacagaggagcaagaagccaggaaagtcacgaaccaaaatagcagctcgggagaagctagatgtgtgcgcgggaaaaaagattggggccttcccacctcccgcacaaatgagggtcgccaagggatgttttcgggctgtgctacttttccaaaatattttggggagctactgaagga

SEQ ID NO: 129833 - DNA, 781 bp, Zea Mays
tcgccattggcgccaggaaggagaagatgaagcagcagtcgcacggcttgttaacactctaaaagcatgattgatagccttcactcgagtaggtgacctcttgggcaacacttggtttggatgtctgctctcgtagtgcttgtacgcagaagaactgggatggggccattgactaacaactaaagtagaggcaaagaaagtcaactaagaaacgataacaagatgaagcttaaataggcaaggcagaagaaccaagcaggcgcaaggaactgagcggacgcgggagattaagagactggaaacttaactttaggagttacgatgagccaaggattctataacttcacatgtaactctctaagtggcaaaacaacgccacacggcgtcatatcgtgatcgtgccacgcttcaagtaacttcacaatcccataactctacatgcaactctgagccacaaccgcgaccatgcctcggctcggcggtggcggtaacacacgcgtgtgacagacatccgtcctttttttaaaaaaaccttaacatagaccgacaaaatcaactatagcttataagttattctaacatttatgtcaactagtggcttgcacgcgcccatgcgcgcgtagtgccatgtatgttctttttgtaattttacaatgttttggttcaatccataattcacatggaatgtagataagggtgtattgcatttctcaggcgcatgtagaagaagagagccatttgctattttgtcactctaagttgtggacttcactaatttacc

SEQ ID NO: 129834 - DNA, 397 bp, Zea Mays
ggaaattctattcgtagctcatcttctctctcccaaatagcttcatcttccccatgatgacttcattgcactttgcacattttgtttactttattccttgtaatccgagtcaatgtgtcaatgatcttgataggatactccgtgtaagttagatcaccttccacactgagttcttccatcagtaactgttcctctaggacacggaggcacttcttgagttgagacacgtggaatacatcgtgtacatcagacaaatgatctggtaactcaagctggtagaccatttccccaaatcgcctaaagattctaaagggtccaataaagcatggggataacattcccttaactttgaatcttctcattccacgaattgatgacaccttgaggtacacgtggt

SEQ ID NO: 129835 - DNA, 326 bp, Zea Mays
tggctgccctagcataggagcatgagcacacgcgacggatgccctcggctatcagttcgctgaagctgaatatcacctactcggctactacgtcgtcgagccttccccgacaacctcggtggttccacccctcgtagtatgagaccatggtcatcactaacctccacgctcaggcggtgggggtccaaaacatttggtcgctcatctctgtcatccttgacctcgcatccccatctatgcccgctggtgcgacaaggtgttcctcaccctaaagcgctacaccctctacaaccatgtcctcgtcgacaccatatcccacctactca

SEQ ID NO: 129836 - DNA, 857 bp, Zea Mays
acgagttaactgagaccgtacctgtcaccacgtctccctgctctctgccatccgtaaagggtagcacatatgctccagaaacacccgtagaagaggaagctcctagagtgaaattaacagaagaaccccacagagtcgtaggatgaggcaggcgtggagctccaaacttggatggtacaagagcggttagtgcaggagtgggcgtggctaggtactgaggaaaagcctgcataggcacgaactgaagagtcccgggcatatagaactgctgctgaggggtggtatagaaaattgctgctcagcgcttgacatcatgttgacagtaccctgcaaagaggaagaagtcactggctcccatttaagtttcccattgagattcctcctacacaccacatccttgtgatcctggtgcaagtatttaacaagttttccaaacgaacgggtatcggctgatctcgatcgcacgatcattgatcaacggccaagattagatctgagcgcgagcgtaaacgggggcgcgcaggtgagcactgacaagcgagccaggggtgtcagtgactagggagggaggcggactgaccagccaggcccaggggcagagtgcgcggacgtgaatcgatgttcgcagatctgaaccgttggattggggacagacggttgtgatggggtgtgcgatggtttttacagctcggtgactggcgttgctccctccacagcggtgaggtcgccggaggtgaggtagacgcagtcacagggggtctagggttgtcggtgagggctagaatgggtgaagaaggttcggcgaactcactggtaggattccggccgcaagaacgggaccggaaacgggagaacga

SEQ ID NO: 129837 - DNA, 514 bp, Zea Mays
ctagaccttccaacaggtcacaaagatctagaacctgcgcaaacgccctaactgaaagcgcaccccttatgtcagccaccaaatttagatcagttagagcatctttcaccaaccttttggaagcaatacgcctaggaacatgctcaagaacctcaggtgccacctctccgatgcatctaccgttcagccaccgatccttccaaaaaaggataacatttccatcacccaaatcagacacaactgcaatattgatcaaagcctgcactgctccacaagcctgaacagggaggaccgaccatggcttagagtggccagttttttggagccagggccacctagcccgaagagccacgctcaacagccgcagatcagtgatccctagcccacccaagtctttaggcctagtaaccttgccccacgccaccaaacagtgacctccattggcttgttttcttcctttccaaaggaagcctcttcttatcttgtcaatatctttaacagaccagctagggag

SEQ ID NO: 129838 - DNA, 737 bp, Zea Mays
tttctttggtgcttctttcttagctgatgagaagattgaaagttatatttggttatttgagacttttctacgagctatgggacagaaggctccaacattaattgtcaccgatgaggatgctagtatgagagcttctattgctattgttcttcctaacacaatacaaagattgtgcatgtggcacattatgaagaagttgcctgagaaaattgatgctcatctactaaaggacgacgagtttagaaaaatgattaattcgtgtgtatgggattcagagactacaaaagagtttgagactagatggcaagcttggataacaacatatcacttagagaataatgaatggttggttggacggtatcacatccgtgagtcatggattccagcttattttagaggcatttctcttggcggcattcttcgaacaacgtcaaggtcagagagtgcaaattcatttttcaactggtttattggtcgtaagcttgcactaattgagttttggatacgattcgacaccgcattgaaatgccaacgacaagaggaactgctagatgacaatacttctctgcattcgcacccaaagttatatacatcatgggatttagagagccatggtgcttctgtttttacgcctaaggtttttataaaattccaagaggaggtcttggcagcaagagagcattgtgatgtgcaacgcacgaatgaaatggccgatagaaaaattgtttatatagcgg

SEQ ID NO: 129839 - DNA, 601 bp, Zea Mays
gctctggaccgggcgcaacatttgcagaaaatacaggggtcttgggggaactttcccaagacacagcgcacagctatataggatggcgagttgatttctataaactacagggactcttttgaatgtttgctcggccgaaggggtacggggcgatcaccgtcgttggattggatatgggcgcgccagattaaaacactactccagcgaactggtactcagtgtgaccccttggattcaaatccgacgacctagattttaaacacacagatctcaccgtagccgcgggatatgagatctacgattcattttccccacacgcgaggggttacggaagatctaatccaagccgcataatgtcgatctaacggctagaggctttccccccactcccctttctcctaccggcgtcaacacgacggcgcctgactgaggcacagcggcgccattacctcggacccgaatcccatcaccctgtgcccgaagctcaaatctactaggtgcaacaccatcacagggccaaagcgaatacagagcggggcgtactcaccagtcacgagggtggagaggactgcacccacgatgtcgcgcaatccacgcacgc

SEQ ID NO: 129840 - DNA, 513 bp, Zea Mays
ttaagaacaagaagcattgaagtaacctatatcactatacaaacttactagagtaatttatctgtgtaaagagaacaagtcgaaggaaaaaaaaaagcaacagttggagtgaaggatcaagagatccacaatccacagcttaagccaacattgactaacctatgaaaaaaggttttgttgattggtgccattgcccattacagttctcaaggatctaaaagatactattattaatcacctattcaaagttaaatcattaggctgtgaccagcagactgtgcatatggctatacaaatcattgttttgcactgtcaaaagtggagtttgaaataagaggtgagattggtaaaacggctggagatagccttatagttcttctgaaaaatgccttcagatgcagttggaccaactgttgtattttcgtattgcccagaatgcccctacgtccaccactctctttctgtcactgacgcatgggccccacagggcacaagtcatcttctcccttcttg

SEQ ID NO: 129841 - DNA, 843 bp, Zea Mays
gaaaatcccatgggaaattagtgttcccaaactagcccttaggattttttatatgtcggtcggtatcgtttacattcgggatattacagatttcgcagccagtctaactgcgtccgctgctgcgtgcttcattctgaaacagattagatgtccatacaacagtgctgaccgattatgtgtattttcagttacagaggccgaggtattatttttattatctttttcgataaaggaagctttattaaatttttaagctaatatatcaaggtgatacaatgatgtattgatgtggcctcctctcgggtctcttgggtgaccgtagaggggagaggagcctagaaccagggacagatctgggacagatctcagggtgtaggaactatggctaggccgacggatgtagttaccgtggctggcagcttgccgagccacgatgaccaagacagtctcgcccaactgcagggagactttattccttgatgatccttaatacaaactacggtctacctttatagtacgaggcaacctccttaaaaggaactaaataacttattctagaagtaaactaatgcatctcttattctggaaataaactaatgcatatctccctacaataaaagctttcctactaacccgattactagccacttttctgatcactttccttgcttgcttctgctgctccttggctggatcctggcgccgtcgcctctggtattggcagcccacaaatgcatcactaacatacaaagtcttataaaacacttctagcttctgcataacacatggcctaaaaaataacacacggcctaaaaaaggaaataccatatggtacaactcaag

SEQ ID NO: 129842 - DNA, 297 bp, Zea Mays
gcgaaaaatggttgcatgtattgatctcacctacgggaaggctgtcagcacagccttatctgtggaggccaaatatgcaaattctaggaaaagtaagggattcagtggtgataggcctaatcagggcccggtaaagaggcaacggtttattctccggccctctaaccagaaccgttcaagtgcaccatctttccctttcaagcagcccgtaattattcgtcccaacaaagcccctactgtccaaagtcagccgggtgccccaggcactcgattccctgctctgccaagttcttcaac

SEQ ID NO: 129843 - DNA, 695 bp, Zea Mays
ccccactgagccgccgggtgaggcagacgcggagctccaaactgagatgacataggggtagtcggtgcaggagtaggcacagccagatactgaggaaaaccctgcatcggcatgaactgagaagtcccaggcacataaaactgttgcggaggaggtggaactgaaaattgctgctcagtgcttgacatcatgttgacagtgccctgagaagaggaggaagtcactggctcccatctgagcttcccattgggattcctcctacacaccacatccttgtggtcttgactgcagattgaacacctgccattccactggcactctgcacggtgatgcgcatcaccacaacggaaacacaccagccccagcccgggcttaggaacagcccgaaatctctgagtacttcctcccaaagtacccaagttagaggattttccacgatagggatggtggcgctgatgctgagacttgcccctcttatgggctggacctccagtgttgcccctcctcacatcctggccacgaggctgatcaacacccgaagacttctgcgactccatggtatactggtgttgcatctccacacctagtgcttgctccactgtagtacggaagtccaccaacggaaaggctcacagggcatgcctgatggaaggtttcaggccctgacggaactagctcgccttctccatctcatt

SEQ ID NO: 129844 - DNA, 1975 bp, Zea Mays
gggggtctggggcgacgcttcctcttctgcggcacaccaaggatagaatcgacgggctttgacatcctatcagcgaagcactaataaagcacatgaagaaaaaatcatctaaattgtgttgtcaaattggatccctcccggtctgagctcatctcaacagaccatgaagtttagatttgcacatataaccatatacatgacacaacttctagacaatgatttcacatacagaaaagagcatgcttacatccagtcagattttgactactgtgttgtacgttaatctctctgtttgagtaaagggcactgtttagataatctttgttaaaagaaaaggcgttcaccaagagcacatgaggattcataagtcgaacatgtttactcaatctttatttctttgtttcaatctcactaattcgtggatttatgcatgatcatattgcacatatatatatatctggtcccgtcctcgtgagccagcaaagactgatcgttcgctttcgacccggccgagtccactacgtgatgcttgacgccgcaccgggacaatcctcgtcgtggaccacggaacaccacgttttgtagcgttctggatctttccccaagcgagtcatgagttaacgggatcacggctaggcagcacaccaccatcgtttctagtggctgggcaggccagaggttgatgaaggagtgtgacagctcgcaatagcataattgcataaatatgcgtccggagacatagatgcctgtccatgatggatcgaactagcgttaggacattctactgcaacttaatcaattaactgaatacaatttcttattgtcagttctcgatttgttgtaaaactgtaaaatcaagtacttactgatcctaacactaaagtatttagcattaaaaaacaacaaatacagtcatatattcaatgaaagcagacaatatgttttctagggctaccaagtcagcaaactaaatcaagttaagcagcaaaactgatatgagagaactctttcatgttaagatttagccgttaaaaccatcaaaaacaggatcacatgacaataatcgctaaggcaaattttgcacacattacttgccattaagcaagactcaactgatggttacatcaaaaggttaagataagccagcacatacagaagacaacatcaacaactattctcagagcctcaagatcactaggttcatccggcaaaagtacatcttgaaatcagataacaacatcaacaactattcatagagactcaggatcatcgggttcatccagtaaaagtacatccttaaatccaagttctggaactggtactggtttgtgcctggtcgccctctccagctcagccaactcctcattgctaagtatcattatgctatatgaccttataaacaacagctcccttctagatcctatcacattgtctagtgtgtcaagtactctcagttcatttgatccagacattctgactttgatttcttggaaatatgctggagcggcattactcaaagctgtcagcggcctttcttgtcatagtgccagcaagtgtcgttaacagtgatctcagtcatgaagtaggagccagtggctacaatcaatctcagatgaattctcgtcatcccgaattctctgtcccacaacaaggtatatggatctgaatcgaaatggctttgcaaatatcacgattacttttagaagatatgttatcgctcgatcattatcattcttattaagtaacctttccctggtatcctagttgcggtcttcaaacctggcgagcacaccaatcatatcttgcaaaacaaccataggtctgagagttgtttgtgaacttttagatgaatgtattagcttgtgtaaccgatatataacaacatgtgtatacgacaacaactctagataaagacagcgacagatccaagaatggattaatgagagtagggggactaaatttttttaaactagac

SEQ ID NO: 129845 - DNA, 616 bp, Zea Mays
cgtcctcggcctctagaatctctacttcctccaccacggttgccgcctcttcctcgggaacttcctcttccacgggtggcagcgttgacggagtaggagtctgactcgcgtaggagatccagccgttgctcataactgagcagttgggagtacacctccccaatggtgagcggatcagctcgcgcgacgagggaggtgatgaccggattgtagtcgtagtcgaggctggtgatgatgtacgagatgagctcgtcgtcgtcgatcggcttgccggagtttgccatctcatctcccagggccctcatcttgccgacatattcagcaattgtgaggtcccctttcttggtggtggcgagggcgatttttgtgttgatggagtgtgccttggtcatggaggagtaaattgtttcgatgaccttccaggtttctgtggcagttttgcatgccgctacctgggtgagggcttccttggtcatggatgagagcaagaatcctaggacctgttggtctgtggtcttccagtcctcccatgccggattgggaacgtcgacgtccttgtccttgatggtggtcgccggagctgcagcagcacccgtgaggtaaccctccaggcgca

SEQ ID NO: 129846 - DNA, 360 bp, Zea Mays
cgtggagaaggcctaaggccgatttcatcctaagcagggcctagaggaaggaagtacttcagtggatcaatatgttgatgttccctgatgggtatgtagctaatctgagtagggggggtgaacttatctactatgcgagtcttagggatgaagaatcatgactttcacatatggattgaacggattcttcctgcgatggttcgaggctatgtccctaagcatgtctggctagcgctttcagagttgagctatttcttccgtcagctttgtgcaaaagagttatctcggactgtggttgcagacttggaaagattggcacccgtgttactgtgtaagcttgagaagatatttccacccggc

SEQ ID NO: 129847 - DNA, 616 bp, Zea Mays
cttgggcacttaagctggaataatctgcgcggttctgccacactatcgtcgaacgctttggtagcattggcgaagtttgtctgggatgtgaattcgtatggtggggaaccgttggttgatgtcttcgccaagaattattgtcttcattgacagaaaaagaagattggtggattgatttcccaatttgggtcgtgcacgtttacgttgaggactgggaagactttggccaaagttgttgagattgtgtcgtgtgccaagaacaagtggggtaattggtgggatttctggttttatgtggcaccggagggcatcgaaggggtgcctgggctacccccgtctatcttgtgttcgcactgttatgtggcgtttccacattttaaagtgaagaaaggagataagagcgaacaggcccttcagcacgcaacccggttgagcagcaaccgagatttggtgaagaattcgttgcctatggtgtatggccgctggcacatgggtggaatctaggcaaagtcaagcttcgttcgatgccctttttgagtggtcggatggtgcagagccctacctttgccattgatctgccagggcgggatgcgactgccttcgttagggaagtgga

SEQ ID NO: 129848 - DNA, 489 bp, Zea Mays
gccatcacttcaccccacaatcccaagtaacaaaataactctaactgaacttggcatttagtcgatcgattcctaacccatttttcttaccaccactacacgacatgcctaatacgttaaatgacttgttcacaattcacatacatctttaccaaaacattcccacatcgcttgcaacttaacctaagcttcactacacaatttcaggacatctacttacttcatgaatatcatcgtcacacacattgactcgatttgaattaaccacacatgtctatcacatgaatggagcatttcacaaatatcctaaaacaaactaacttcatcacacatctaagacatcttgcattacaaacctacttgacttatttgaagtgtctacttgaaaccgtgagcacaatcatacactatatgcgaagcataatttaacgaacgcataatacgcatcgtcacgacttgacctataaatatagagaaagcgatgactac

SEQ ID NO: 129849 - DNA, 939 bp, Zea Mays
ctttatatctgataaatcagtactgcattagtctagctaacactcaagttaacagtgactcaaatgttataacatatggatgcctataatttatgccaaactatgagcagtattttggaactcattcagctatgtacatttccttctaaatgatatacataattagccctagattggttgtacatggtgacacatgtaccaatatttttgtacttcctagagaccttccactttttccatttttagctgttagtacttagtaagcaatacaaatatgaaaacatattttgcacttaaattacctttttgtatgtgctaatagatataatgatctaaggccagctcatcgagtagctctcacaagctatcctaccatggaaaatctcgtagaggtagcaaagcaaacaaaaatgcagaattaaatacatcatttttagattttcctagaggccggaggctagagtctagcgattcttaacgaagaaaaaaacaaattaccttcccccatccacatcggggagagcacgatgctgagatatgggatgacgtcccagacaaaaaggagaaggaattaaatgacatcaacccaggtaggataaataagagaaggtggggacgtgaattcagaggaggttaggctgggagaggagcactcgctttccctcgacatagagctacctcaagcatggacatctcgcacggataagtcgaaaagatggcgggctcgtaccttctactgaagcacctagtcgaaggagcaacgattggggaagcgcgttggcgttcgcaggcgttggagaagggcgtcgttggtggggagaaagcaacgcatggggaggaatttgtggtgcggctgccggcgttgaaggcgagcgaggatttggggagagggcggcaaccacaacgtgtgcatctcggcagccgttggggaagggcgcc

SEQ ID NO: 129850 - DNA, 560 bp, Zea Mays
agcatcgggcatatcagcacaaacatccatcgcgccaccatctgccggctctgacaacagatcttctggaaccatgtcttcaagagtttgatcaaagtttgctagagataattcgggggggggaaaaaaaaaaaaagacaaggcaggagaaggaacaccactacttccccactagctatgtaacgccggctgttcttccgaatcagagggatttcatcctcttcttcatcatcttcatcaacagcacggacagtacacccattggggtcagcatcagacgggtcacacccattggggtcagcatcagacgggtcacacccattggggtcagcttcagcaaattcaggcattggcacttcctcagcagcaggaacagaaggaccagcaccctgatctaagctagacactcgacgaagacgtctcttcttctttttctgcccctcagcaggaaaagtgggttgatcggcttggcgagaacgtttcgggcgaacattgtcagacctctgagcgtccaaaactttgccggcctcagggatgggcgccaccaccagtgtttcagc

SEQ ID NO: 129851 - DNA, 516 bp, Zea Mays
ggcaggtatcgcactcggatatgtacttggcaatttccctcttcatcctggtccaccagtataaggatctgagatcatggtacattttgttgctaccagggtgcatggagaatttggaaaggtgagcttcatccagtatcttctttctgagctcagggtccttgggaacaaccaatcgatctccaaaccataaaattcccttgctgtcctgacggaaacacttgtatttttctgccttctgcttgatcatttccttgataacctgaacacccttatcctcaatttgtgccctgactatttgctcttgcaatgtgggctccaccgagatatagtttaagtcacctgaagaaacaacttccagattcagcttgcacaattcatcgcacaaggtggtaactcttgcatccatgctcatacaattgtactgggcctttctgctcaaggcatctgctacaacattggctttgtccgggtggtaatgtacttccaaatcatagtccttgattaattctaacc

SEQ ID NO: 129852 - DNA, 324 bp, Zea Mays
ctctctgtttcttgaagcctgccagagcccattagaccatgtcggagcccactgatgcctgttagaccatgcagtccacgctagagcccactaaaggcctttagacctcgctggagcccactaaagtccgagagaccccactcctggtttgttgtccgcctttctgtttagagcctagtcatctgatgtacataagaccacttggacctggcccctctctcgcctgaccccacgcctgctcgaatcccaaccatctgatctggatcggagcgctaccgacccctattcttgctcgctagaccctatctttggtcgatctaatct

SEQ ID NO: 129853 - DNA, 702 bp, Zea Mays
agcttttatatgaaacgaaggctactcgcaaagaatagtaccacaacaacttcagttgttatggatttattgttcgccccaatgcaagccacccagtgccaacattccggaaaagatggcccgaggcttggatggaggagtggttttacgttaaaatgatttaaggaaagggaggacatcaaggaaattatccagcgtcccatctggtctcgcttcggcctccgaaggccgaaggtgaatattgatagtgatgttgaagcgtgccagaaggcctttagtactgtgtgtgcctttgttggtatgagggatttaattcaagagcacataaccttcagggtatggccacttgtggagaattgggaaatgccgaaggatactgttgctgaattgagtgaaggtggcctggttcgattaaagtatactttcatatttagggagaagtttgatgagccatatgatgagtggctgaaatgtattgaagctaccagtgatgagctactcggggcatactccaaggccgaagataatgctttctccgcagctttcgggggtcggggcaagaaaagattgaacagggtatttgatgcaattggcttcgtataccctgattaccactacccgctacgagggcaagggaaaaagagaaagactgccgcttcggccaccccagctgagccgaagagcaaaaagatgaaggttctg

SEQ ID NO: 129854 - DNA, 711 bp, Zea Mays
ggccggctgggtgaagatgttgagtcttatgttgttggcaaactgcacagctgcgcacaaactccctgacacgttggagagctttagaattgtaaaatgatgtgcgccacctgtgagctgtcttctgcacgccttcatgaccagactcatgtgcttgggcaagaagtacaggccacaaagtggatgcatccgggatgaacaccttgccttcgaaacgtagtaagccatctgccattgtccagtcaggacttgcttttccctctgctagctgagcgcggactgcagccacttgagggtccgagtcaacctccgtttccaaagtagagaagagatcaaaggaaggggaagaaagggtatacacaattcctgtatcttcctctcggcgagacaagacatttgttgcgccattcaacttgtcgggcctgtattccactgttatatcatacccaaatagtttgctaacccaagtatgctgagggattgttgacagccgttgatcgagcaagaattttaagctatagtgatcagtgcggactgtaaagggtcggccccagacatatggccgccagtgtcgaactgcctttaccaatccaatcaactcccgctcatatgctggcaatttttggtgatgaagggacaccggcctgctgaagaaggctatggcaccatcgccttggtgcaggactgctccaaatccggagccggaggcat

SEQ ID NO: 129855 - DNA, 680 bp, Zea Mays
ggacacactcccacaggccagaggaagcgccaaggcacagcgcaagggctcgatcaggacgcggcgaagatatcacagcggcgatgttatgcggtggtcaggacccgattttcccccaaatttcacggtggtaattggcttctttgtctgatttgttaaggggcgagttgcggatgtatttatagagctagggatgggtcgaggtgattctgttggcgaggatccatgcgagtttttctccgcggtttgttgagcgccgaccgagcgggggaagatggtcctacgcgtgcgggcccgcagaacggtgacacaaggcgaaggtgcaaacacgcgcggagacgacgactagtgagggggcccggtcagttcagcgaaggcggaccagcgagatccgcgcgatcccggcggcggacttcgcggcagtggtgcagacgaaacgcgagagagagaaggaggagctgacagtgcggccccacaagtcagtgtattaggtgcgtaagaagcagctggtgtgcgcacggattcaagattgaggggccgacatgcgggtcccgcacaccagtgagagaagcagagcgcgctgcaagttagttgggtcagtagaattagtacatgggccgacggcttcaaattaggcccaagtagcaagtattgatctttttcttttattctttttattt

SEQ ID NO: 129856 - DNA, 1065 bp, Zea Mays
ggcctagggaccccccggtctcgaaacgctgacacaactacacatcaacgtcaatatacaagtgtttgttgtttcttggtctaagctaatgaatcatgggtcattagatgatactagtcgtatctgggtctattgcaggagtcgtatgtgtagcaacgctcatcattaatacattaaccacaccatctcaacccaacatatcaaaacacacacatatacactttacatgctaatgccatcttcagcatgtcgtgtaaataactgtaaaaagtattgttttacactgtagattgcattgtttgcatagtagagtttggaatatggagtaaggttgggagtgagatatggagtatgctgaaaatagtgtaactcatctatacaagccaccactccatatatggaagcaggggcgaaccgagagggaggggggcaaagtaggccatgcgcccctcaaattcttataaccttttataaatatgtttatttaatgtcatgtatagaaaaaaataaatatttgagtcggctaaaacaatatcattataggtcttctcattagattgctctagttctcctaactattgtcctactcttcggactagtcctcacatctgttaacaactacaacgacccaatgcccaatgctcatatgactcttctaactaagaggaccatgtcacctgctcgcggtgctcgcttgcgcaatgaccgcatgatgcattagacattgtttgtatatgtataaatattacacttgagatcaatataaagtgttgttgatccaatcactcttacaacatcaattcgcctggtcccattcttcctgacgtcgctcgagccagtccgcctcgatgccaccacccctcatcaatgcgcaacatcagccccttctcgatgctcttgtttcgctcgttgtcatcgtcatcggtgagcttggcgaactaacgagccctggctctcagccagagacatcacctgtcacatctttcccagtgccctcgcccttcaatgagattgacaatcgtcaaggtacatatggttttgattcgatcagcaaaaatttataag

SEQ ID NO: 129857 - DNA, 348 bp, Zea Mays
ctggtcttctcggtgtccaacggtccacagcccaaccctctcgagtctcgtcttctcccccggactccgagatcttgccgatctgcaccgacgccgcggtccgcggccatggcggtgccctctcccgccccgcggtccccgcgccgaccggatgccattgtggccccggacccctcgtccgctgacgtgccaccatccctcgacttcggcgacccggcctccctcgccgcgctccgagtcctcaccgacgcgggtgccgccacccgcctcctccacgagtgcgtggcctaccagcgcgggctcgacgcccgtctcgacgctctcctcgcccgccgtgctgacctcgac

SEQ ID NO: 129858 - DNA, 598 bp, Zea Mays
gtggggactggtgaggaagatccggagagtgacatacctgccaagccggagcctggagtcggagacgagggtcaagtgcacgacgacggacgacgcgagagggagagccggagaagaggagattagggttagggattgggatggccgactggagagggagagccggagagggacatatctgccaagccgcagctcggagccggagacgatgacgcgggagggagagctagagtccagagaataggagattagggttggggagggaccgagccaccgagggagagctggagtatggagaggggtgccgcacggaagggggccgatgacgaagattcgacagagactacggcgacgggccgacggtgaggcggtgccgtggtgagccgagagcagcaggcggaggcgcggtgcggagccaggagtgactgagcgagcgaatcgattagggagacggagaggccgagagggagtggagtggccgagtgggagagggaggccaggcttatgcccccgctcctcgataccaggtcggcccgtgcctgccgttttctggtgggctgggccgtgccgcccggcgggcgctgaaggcagcccaggc

SEQ ID NO: 129859 - DNA, 829 bp, Zea Mays
ttcaatttgaatccttgtaaaattggggaaaagaaaggggcaaaagaaaataaaaagaaaaggaagagtggacctcagcctgtgtctgggccagatttcggaagtcgcggcccatctccacaaccttgcgcgcgcctgccttcaccccgcgtgggccaaaaatttcctgcacggcccatcttccccttcgctgtcacgcctgctctcgccgacagggcgcgcccgcgcgccagtcactgctttcgcgcgcgagtctaccgctgcctctacccgcgggtcccgtgtgtcaaccgctgcacaccctgtagatcttcctcctccccgcggagttcgcataacagaacgcgagatcccctacatggctgaacccgtcgcatccacagcacggccgagcaatgtgagcagggcgttttaggcgctggggattaaaggctcgagggctccgcgaccccctttcccccttctattcaccactcgagctagtgcatcgctcccgcagtcgccgtcgtctattgagaagaagaagagacactaaggacgtcgccgccggtgacatccgtctgtgtcgcatccgcatctcgggtgttcggactcgtagcttcaccaacctcctgggagcacgtacgtggagtcacgaaacttgggagccggtcgtaatgggggaatttctcgccgtggttgaagaccttccgcagtttcgcgccacctcgaggacaggagggatcttcaccgtaaaccgaagtaagttgagtaccagtttgtttgttgtcctctcgatgtagcgtagcacgattcaaactagggtttaatgccctgctgcgcgggcggg

SEQ ID NO: 129860 - DNA, 437 bp, Zea Mays
agcttaatcaacagttagcaagtgcagttatatattagggaaacaaaatgaataatgtcatgaccttggctttctgctaatactactaagtaaccaacgtcattaaagtagtataatatgtaattgtgattaaactatctcctcatgtgtgttctctagggtgtatgcttgtagtagaatgctgtggatgattgtgaaacccgattaagcaactattcctttttaactaagtttgtctatgtgtaagtcatcgtaaatttatgtgtacttaactaatttaataataagtaactaatggatgataaaagtgaatgtggtaaatgcttgtacgtgtgatgccgtgttgcgttggttaattctagaaagtatttgtcgtctttctaatggtattgattacgtatgcccgatgacgtgtagataactaatgctaacgtgtg

SEQ ID NO: 129861 - DNA, 510 bp, Zea Mays
gacctgaagatcagtgccatcacactcgtggacgacgtccaccagctcaatagtgaccaatccaaggatctaagagattactacactatccatctaacactaggagaggagagtaagagacagtgtgccaatgaaaacatggacaacatagcgttgtagcgtgaggacgaggctacgttagcgggtataagaggaccccggttcaaggacggagattagggagcaaatgttccaaataccctacacctacacgtgaaggttggtgatgacgacagcctcatatactaaggggtgtcgaccatcgggtatgccgagggagtcaatgtcgaaacagccaaacagatggcgcttaacctcgacaagttgcctagcaagggtatcgacaacaacacattcatactcttaggcattgcgacgacacgttcatgctcctaagcaacatccacaatcgtcttggtagctcagtagtgtgggtttcctgaggcaaaagatgcctaggcctatggcagc

SEQ ID NO: 129862 - DNA, 568 bp, Zea Mays
acctcaaggaaggagggggctcaaaaaggtctaactccccacccattgcgcatcccgcaacgtgagatggtccggcttccgcctcagcagggtgtgcaggcacactagggtgtaattgtgagtataatacatggacttcctcatgcaacgtattgcagtagacctgcaggttgtcgacagttgagctaagttctttaattcgggcctgagcccttgcttccttagcgcatgctagcaaacgagactgtactgcctagtcaagtgctaagtctcgatcagcaagctgatcctacaggtgacggatgtcccttcttagctcattgattctatctccatctgcgacccaagcatcggtcctgtgttgaagtgccacttgaagtcgactcactcgggcttcaagatctccgatggggtcattacttccactgctgctgctttcatgtcgggggggcagttgatgccgaggcactccaatcggtcccgttgacttgcgtgccgttagccttgtgcgcggcggcatctttttaagggggaaaatgttattagcataattcttagcatgatgcat

SEQ ID NO: 129863 - DNA, 342 bp, Zea Mays
tccccatcctaattatagcttcgggggtaatatgatgaaggaagatctggaatatctttaatacctccaccacaaatttgctcagtgggaaccgaaggcctgccttcaggaagcttcgataaataacaacttcattttcctcaggagtaggggcagtgctgtctcctccaaccctcacaatagacatgtcgcgaaaatatctccctctcatggcgtcaatatgactttgtttaatgctcgatttcccgaagatggtatggcttggccgctagggctgatcctcagaagcttcatctccactctccacatcataactatcactgtcatcagaatcttcagaca

SEQ ID NO: 129864 - DNA, 702 bp, Zea Mays
gaacggagggactcatcgctattgcgtttgatcgacttgagattccacaactggacaggcttgtcggggagtgactagtaattggtgacgaagcggacggagaagtcggcccagcagttgatgcagtggtgggggaggtggcagagccactagagtgagtcttgccccaggacaattaagaggtaagccatcttgacatctctgaagcctcggcggcgtgggtcaccatcgagtagacggtcagccagcccccgggatccaccttggcctcatacttgttgacgttggagactttgaagttaaatagccacttgaccgtccatagtcgagggttgaaggccgagaccccaaacatcccctgggcttgggcgaccgtcgcgggtgcgggcgcggtggtggtcacgcggtggtgtcggacgacgtagatgttctagctggcccaagcatatcggtgtggcttcgggccgttcgttgaggcaatggagtcggctcagtccgcggcttgccattgtgggactacatggtccttctcgtactcctcctagtgcctctgctcttcttcgtgttgtcaggcgagcgacccattgatgctggctcatgtgtcatgatggttgttgatgtggtgttgcacattgctgtcgagatgagccgtctataggaggtggttcgttgcttgagtgaggatccgcttatagcattcgt

SEQ ID NO: 129865 - DNA, 516 bp, Zea Mays
tttgctcaagcttcgtaacaagaaaaagcttcgacaaagttaaaaattttctacttcatcaaaaaacaagaaattcaatcatcagatggctagggtactctcaacagctagggttactcactacggagaggaagccgaaggtgccaaaatcgctccaatctctgaagtgatgaaacggttagggctggtagtatcggaggatgcacctgccgctgaagttgagcaggttgatgctaaggaaattgaatctgaagatgattacagggccgtgccatctaaacccagccacctagagtttgggaaatccaccattaccgaaggtgatatgcctaagctgatgaagttgggctacttcagtgaaacaaaaaaggagctggttcgttttggcggagaggaaattactccaaagccggaaaaggatgaagtagtgttgttcaaaagcttctttaaagtaggattaaggtttcctttgaatgggatggttgctgatgttttgaagaagtttgggatttatct

SEQ ID NO: 129866 - DNA, 478 bp, Zea Mays
ggatacgttcttttttagcatgcatgcattaacaaattaaaaggattagaaattaatggggtaaaaatttgatctaactcgttcttttaaccaccaaggctatttcatttttctttcttccaccataacctttgcatctgatcctcttccatagatgacttcacccacccccgccaatggaggagacactcgtttcagttccgatttcctttctcaagagggttttccttccatcttgtgggaggtgctcaactccgccggttaccctacgccccctttgtacatggtgcagctatatgaggagcatcgggtgccatgttgctgagtctggctgactctggaggcacaccccctttagccgggttggtgttcccttgactctgagactattggatttagtaacgacgacaccaccgaggcggcagctatgaagaccctgacgactttatgcgactaccatcccctggagatggtgatg

SEQ ID NO: 129867 - DNA, 344 bp, Zea Mays
tcttcatgtaccactagttggggcagggaatggtgctcgggatgaccggattggggatgctcgccggcgcgatttctagcactagggcggcgccgtcgtcggtcgctggcaggcgaggaagagggacagtggatcgtcgatttcaccctcaacggccgcgattagagttaggcgtatcccttcgccgcatgctattgtgaccgttggatcgtgatcttgcgagtaggattagatcgtgccttcattaaatagtggacgtcgatctttgatccgacgattcgtatagcgtaccggttcgatgtatgggcgatctaatctggaccgatggttgcggatctaacgac

SEQ ID NO: 129868 - DNA, 387 bp, Zea Mays
gttgattcaatttccttccattcaataaaatccatgtgtgtgattgttgccctatgttaatttgaggccaaggaagtgaatgggtgaaaatgattttgtctattatcacatgatttggttttttacagcatactcttatagcacttcttgtgctattatattatttttgtccccttataattatgttaggttagatcttaatatgcaccaaggccacacttaattaggaacataacacactttcctcttgtgcacacacttcaaattagttagggaagtttgtctttagtacaacaatggttctttaatttgagtaaccttggtttggctaggaattcatacattcaaaaaacttggaacttgataactggtttgtaccaactacct

SEQ ID NO: 129869 - DNA, 1515 bp, Zea Mays
cgaacattggtgctcctgttgcatattctgcctggaatctgccgccttccaagtcctttttcgattatgtgtcaaatcctcctgctagtgacagtggtttgggtcttagagtgcaaccctctcttgaagaagttgaggttctggttgcttcacttggagatcttcccaatgatgagaggcaagttcactttgagatgcctatgagtccgggtgatgcagagataagcgctatgctggacatgttggctggggattcttctgactcggtccctactgaaacaatggttgttgcaactatcctagagcctaagaaaaccgtggatactcgaaggcctgagggtactcgcccgaaacttcttcgccaagtcagtcatctagctgctcctgctgaggggaagaaaaagaaaaagagatggcttcggcgagtgtcgtgcttggatcatgatgtcagcccttctgttcctgctgctgaagaagtaccagtggaactctttactggggctgatcccaatgggtgtgtccctgctgctgctgatcccaatgggtgtagccctgctgatgctgaactcaatgggtgtggccctgctgatgctgatcccaatgggtgtgaccctgccagagctgatcccaatgggtgtgaccctgtgccgtatattgtctgtattgttgacgaggacaaggaagaagaagaggaagtccccttagttcgaaagaacagtcagcgttacagagtcaatggggggagtagcgatattccttctccagctttgtctgctcttgttggtctacaagaattatccatagcaaattttgatcaggctctcgaagatgtcgttcctgaagatatgctgattgagccagctgatggtgatatgatggacgtttgttctgacatcccagaggtggggttagagttatcccgagtagtgtctcgtgcctcgtcgaccttggaaagcggtcttcggagtcaagaggttggtcaaggttgttcaattcccatggaggtgactgagagtccttcagccttagaggtggctgttgcggagaactcggtcctcaaggatggtgccagcgtttgctcagcccccgagggtgttgccggtaatgatctggctcgggtgggtagcgtgagctgtgacccagccaccgagggtgttgccggtggtgatccggctccgttgggcagtgcgggctgcaacccagcccccgagggtgtccaagcgggttccccttctcatacctccatggatgtccatgttgggtcttctcctccatgttccgatggcatggtaacagcgcatgcttcaaatgaggaagtcgccttagaggtcggcgcaccggatactagagttctgatgcctgctggtggtgctgagttgatccctggtgatgttcttcaaattgccccggttgatattccttcatcgagccaccacctagcttctcgtgacttgggatttccgtcattcttctctaatcttcaggtaattcgtcttttctggttctggcaatact

SEQ ID NO: 129870 - DNA, 1673 bp, Zea Mays
cgatgttggttacgtttacttacatagctattgaacattgtaattcttttatgtagttgtattacttggatcacctgcatacagccgctgccccccaaaataagactggcacatctcgcattaaattatttgataagaatagcataaaagctttgaccaaagctgacaagaggaaggtacgccatggggctgaacctttcggacattgtgaagtaagttattcatattttcacagttggttatgcacatttacacagttggttactcacaatcacttcaattttatttctagttccgaagctcgaccgagacatgctatgcagttggacctaagatcgatcgccaatccgaggcaagtttatgatgtattatatacattgtttatgaatatttatggaacaaatagaatagaaaggtggacatggattcttattaatttttgctgaacaaccagccggagtgcaggaccaatatttttgatgcaccgcgccctgcccccacgcctcggccaacttttaacatcaaacttccatctatcaaagagatgatgtcaagtaagatcaacgatctcccacatcgtcatcgatctaaattcacagacattctgcatatgacttggaggttgacaagtcatgcatagccataaaagacatcattgacaaaattattgaaaagcaatacgacatagcagacaagtttatagaattgatagacgaggtactacgtgtcgagtctgataatttagaaaacgagactgatgagccacagcaaccggggaattcggctaattcagcaagtcagtcatacaattatcccttattcagaacattttatctttcgacatgtgcatacggtttttgttatatgtacagttaacaacttatgtttttgtcaagtatacacagcaacatttgatatataatgcaagttttgacatatattattttcaatataattgtgtataaggacacactgttcatgccacccagcccacacccgatatgccatcccaagcttcgcagctcgagacccagctgggtggtactcagtttgaagaaattcatgaaagacaacagcatatccgtagagtgcttgagacgtgtcccgacgaatcggatatggttacagatcaacaggtaatttgtccaactccaatactatttttactcatcatacgtacattgtatgcatacttactttttagcagtatacgaaccacacttttttgtaacaggatttctgtttcgatgttcgaaacatcattttgaggaacacaaatatcacacctcaaaccacatcagcttgcacccgcttgccgaaatttgacgtgacaccggaaaaaatgtttgttagcagttcatgtctcatgttataattccattttactatacatactacacagttatactaattatatacctttgtgtagagaggtgaaatggcaacagaggaaatggaacaccatgacagtgggccagtttttgaccagaccccaactcctcatgtcagtatgataacatacatattacataatgcattttatgacattaaactgatttttttaatgttcaaccacttacaaccatgttgcatttcaggatgatacactgaaagggacaacaaactctggatctgatccaccccttacagagcaagagtgcgttcgttctctg

SEQ ID NO: 129871 - DNA, 549 bp, Zea Mays
ctgccatgcaatcagaatgtggaggagaagacccgacgtggacatccatggaggtatgagaaggagagcccgctcggacaccctcgggggctgggtcgcagcctgcattgcccatcggagccggatcaccacaggcagcacccttgggggctgggttgcagctcgcactacccacctgagccggatcattgccggcaacaccctcgggggctgagtaatcgctggcgccatccttggggaccaggttttctgcaacaaccacctctaaggctgaaagattctcagttacctccatgggaatggagcaacctagaccagcttcttgactctgaagaccgcactccaaggtcgatgaggctcgagacgctgctcgggataactctaaccccacatccggaatgtcagtgcaaacgtccatcataccaccatctgctggctcggacagcagatcttcaggaaccatatcctcgagagcctgatcaaaatttgctatggacaactcttgcagaccaacgagtgcagacaaggctggagaaggaatatcactac

SEQ ID NO: 129872 - DNA, 288 bp, Zea Mays
tagtagtatagtgtagcgaaatgtaatgtagtagtgtagggtattgaacaatggggagaaaatcagctcataatgagttgatttttaagtttggtaatgcttcccttttgtaatgaagaagaatttcgccccattctgtgtgcactgttttgcttttccgtcgatcgtcgatcgtatttatgcttactgcagatgttgttcttggatgtaacgtgatgcgtcacgatgcccgatcttcacgacgtaggatcaatcttcagataactagcttcaaagaagccaagataa

SEQ ID NO: 129873 - DNA, 430 bp, Zea Mays
atggtccttcccataggggtgacaacttgtgccgtccctcccccgttagaattcggcgggggacgagatctcctgctgcaaaggatcgacgtcgcatggccttatcgtggtagagcctcagagtttgctggtaccgtgctgattgaattaccgtgttcagccgttcttcttcgagtacatcaacatcctctagcctagtagcctcggcttctgctatgctttcaaagatcaaccttggcgccccaaacttgaggtcagcaggtagtactacttctgacccgtagaccatgaagaaaggagtatttacgtgcaaagctcgactaggttgagttcttaggctccaaacgacgtagggcaactcccttatccactttcctgcaaacttttcgtttttatcgaagactttcttcctgagtgcctccaatatcat

SEQ ID NO: 129874 - DNA, 566 bp, Zea Mays
cggattagcactacaagtgcgcaaaaccgaaatcttcctcaaaagactgttcgtgcaaaagtcgcctaagggtgcagccggactagcacaacaagtgcgcaaaaacgaagtcttcctcacaagactatccgtgcaaaagtcgcccaagggtgcagctggactagcacaacaagtgcgcaaaatcgaagtcctctttaaaagactatccgtgcaaaagtcacctaggggtgcagccggaccctccgtgcaaaaaccgactacgggtgcagccggaccaacacaataaacgccctagatcaagtgcacaagtcccctacgggcacggccggatcagcgaaggcacacagcctcatcatacaaattatagttacatacatacagcgagggcatcacaccttacattggttcaaccttcgggatgatacccatctccctgtagttaaacagcattatcctcaactcctcaccctcgaaaagatttcgcaactccccctcacccacactcgccccaaccggcgaggacaacaattcccgcttgctagccccgtccacacgaagacgaccac

SEQ ID NO: 129875 - DNA, 449 bp, Zea Mays
gtcaaaaactctgttcattctcttttttcctctacctccaaagactgcagatagcgcattatcttctgccttggaataagctccaagcagctcatcacttgtagcttcgatgcatttctgctagtcatcatttggttcattgaacttatccccatacctgaatgtatacttcagtcggaccagatcaccttcgctagacttggtgatggtctccttcggcatttcccagctctctacaagcggccatactctgaatgctatatgctcttgaattaaatatcttgtaccaatgaagaagcagacagtaccgaatgccttctgacatgcttcggcggcgtcatcaacttcgaccttcgacttttggagaccgaagcaggaccatatcgggcgcatgataacctccttgatgtcctccctcgctgtcaagtcgttcttcacataaaaccatt

SEQ ID NO: 129876 - DNA, 279 bp, Zea Mays
cccaagtccctggaactaattgaggcaagtgccaataccggaagacaagagaaactaccaagtgttcacccttccctggaggagtcatgaactaccctatttatacaccgagaggtgtacgctgtcgagccgagggccatcgtgctactaagggaggtgtcttggcgtcttgtgggtgacacgaccttgaactgtgttgttgacttgaatctatcgtttccccactgagagccgaggccgaggccgaggggttgatcacatgtccgagcctccaaggga

SEQ ID NO: 129877 - DNA, 455 bp, Zea Mays
atcctaccaaagtagaagctatgtcaaatttgaatcaacccatcaatgttagtgaaatcagaagtttcctagggatggtaggatactattgttgcttcattaaagggttttcaagcatcacttggcctttgaaagaactccttaagaagaaaaagaagtttatctggtccaaggattgtgtggaaagttttcaataaataaagaagctcaatacctcccctatgctcacactaccaaacattaaccagaacttcgtcattttctatgacgcctccaagcaaggcttggggtgtgttgtgatgtaagattagatggtaattgcttatgcacctcaactacttaagctacatgagcaaagttacccaactcacgatttggacatggtagccatagtgcatgccttgaaaatatgaaggcactatctgattgggaacaagtgtgatgtgtatacggat

SEQ ID NO: 129878 - DNA, 725 bp, Zea Mays
cccaaattaacggatgggcaagcaccaccgacccgaggcaaacctagaacgagctttaattggatcaatctgggccaggatgtgcctgaccacggtgacagcggataccgaacaccgatcaagatgttccggttgattaggtgaagtcaagctcaatgggctgagcaggtgacgatcacaagctcaacgcgctggcagctggagagggagaaggctactagcttgggtgaaatcgtggtactcaccggctgaggggctacagcggttatcggcgagctggtgcggcaagaagcgacgtggttaaaggcctggggcgtggcacaaccgcggtgaaagacgccaactccggtgacggccgtaaagccatgtcgtcggtgcaagtgattgaggaacaacgaggccacagtaacttgaacccatccgcgacgagatcttttcaccggcgaactcaatccacagactagacgcatgaatcgcggcgagcagcactaatcacggcgaagggtcaccggaggccagtttactgaatctgctgattttttggttactatacgatcacgatcttcttaagtcagcctgacagacagatttgtgacgccaaaattttgaattttcgcgtaagaacttactaatccgtttgtagcaaacatgtagccctatgatccggctataaaccgactgtggtaaccatgctcagacatacacgagatcatcttcaaaatggc

SEQ ID NO: 129879 - DNA, 456 bp, Zea Mays
atacgttcgtgaccaacactccatcgcgcactcagactttggcccggctgctcgcggctacagcgcaacatttgtgatcaatggcgcaccaatctgccgtatccctcccctctcgcctatataaggacaagctacctcccttcctccaatcgcaagcaacacaatagaccattttactattcatcttccccatccacgccattctcactgctgctgttcctgctcgtctctacgccgcgtcagctctcctatgtgacgttctcctccctccccctctcatctcccatccagtgaagcttgtggacgcgcctatgtcgcccagccgaatcgccaccactactgcgccgctctgaaccattcctctccctttcttattcatggcggcagttccttccccatctccattaacagccaacgctattattggagctccatcgctagcgtctctcggcctcc

SEQ ID NO: 129880 - DNA, 272 bp, Zea Mays
cgagggctacgtgtaacaccccaggtgttacttagggtgttcacccaggactacactaataaacccatcatcacatgtggtttaatttgagcaaaatacaccaaacttgggaatcaagatcctaagtaagtgcaacccatcttagaagtcatgtcttggctttatcatgcacatattgtggaaagaattgcccaaaccctaattcaaacccctttggacaattggagccctagaagtgagtatgaccaaaaggctatgaaaaccacatgatc

SEQ ID NO: 129881 - DNA, 529 bp, Zea Mays
agcttctttagcttcttatcgtaatccatcttcagggttcggtaggcttcgtgggtgttggcctcctcgccttctgctatatcgagacactcttggagggatgtcttatccttcttaagttccttgacccgttgctctaagctttccacccgggagtttaggtgggtgcagtgggagaaaaggtcatcgtagtggttatcgagagtgtggaggtatccggccatgtagacaatggtgcggtcatcctcggtagggtctctccctgacagggcctgaagtcttttcctccaggtaggggtatttttgttgctaggtgggaagtaacgaaggggggtttcaaagatctctctgctgtagttttggcatagctgtttaagggctttttgggcaacactttggcaagtgtctaggaagcggtgcccgatgaaggtgacttggaagggagggtggtttgggtaacttcggctttctcccaggtagaccgccatagagcacttctccattccattttcgcattattccttccaga

SEQ ID NO: 129882 - DNA, 1607 bp, Zea Mays
ggcaaggccacgggagtgcccgaatgttggtgtagctgctattttaccgggaggagcattcgtagtcaatgcctcaaggatgcaagcttgtcgctaaaccttgttaaaaaaaaacatcgtgtctcagtatgattctcgtttgcgtattttcttgtatggtgttatgcttccgtgttcttcggttagcagatccatttggttctagatctaaccatgcactctaacacagttaagttatatgcatattttttccttgttgagatgattatgttttgcaactgtgtttgtttgacattcttttctagtggtcgttactaatcatttcatctgtcaaggtgtatgcatattttgtccttttttagatgattagtttttgcaactgtgttcatattgctgaaatgaagtgtctgttggtggaacttctgcatttatcaataaatccacttataaacgcagctacccgttcatagacggtcaagttattttgacaggatgggaagaagaaatctctaatgtggccagcaatatcatggaggagccaagtccaaagcagtaagctatcccttgctccctgacgtcttatagttcagcaaatgtgtactttaaacgtctgaacagaaatgttttgatttgctgtgcgtacagactgtttcttgtccggggaaagatcagaaaaatgattgaacatgatgtgtcacctcatttcattttctctgtaagctttgtttcattaatgtctctatgatttctatagtccagtagcttgttttctccagacagattgtataactgttgatcttccctttttgttatcctttatctgacattgtagcacctggtcgcggaactgaaaagggacaaggatgaagacttccagcacagcgttgatgaattggcctcggacttgaaccatgtaagcattgctagcatctgcaatgagccaatgatcgtcggttttttttttttccatttttcagctaacaaacctgcaaccactatgtagtgtaggctgacttgcattgctttgtttggtcccatatggctagtttcaagattccaaagggcagtgcaaaggaaacaaatcacgggaggcaaactttaaaacgaggtatatgaacatagaaggttttaccgctgaggctcatgaccatggtgaaaccatccaatgcttcataaaaattgaaggtactagaaattctttttacagtttcatattctattctgaacttcagtctagtgaagcaactaaaccttgaattctggcagaattcaccgtaaggttcctgagcttctacagatctctagtggcaaaaaactcgaatagaggcagtgctcaatgaagaacaactcgtcgcttgggtctacagatccccttctgggggctcttgtacctatggtacctgaatatgatgcgttgtgtctattgtcttcatcttgtaaaatttacctgtatatgatgacatacagtttttcatatgttactatcatataaaataaaatcgtaatataaaaaaaagatggccttatggtttgctgttgcaaatggagaaaaactatactcatggctgaaccgttagtcaaatattctgcaattttccctttttggc

SEQ ID NO: 129883 - DNA, 295 bp, Zea Mays
ctactctctcaggttgcgaaagcaaaggcagaaggcaaggacggaagcgcaaatggcagggtaaagaaccactgtcggtccccctcccaggtatataaaggcccaggcaaaatccacccaaaacttcgctcgagcccctcgtgaattttaaagtcaaaatcaaaacggttttttcgttcctcgaatggctcgcgcacgcgcaacggacaccccgcgagtcgcccatcctgtcgcattaactctctggcaggacacgcgtcacccctgacaggcgagcgggcaccgtcccgcctcc

SEQ ID NO: 129884 - DNA, 576 bp, Zea Mays
gtgcaatagatatagtaagacacaagtttagacacacccaccgtattatattatgatttagttatgtctaatatcgtgcaacggtgtaaggttaacggtgtaaggttgtacatgccctgttaacagggtgaagctgttgcagcgtggacaggcaatctcgaggtgcgatcttggatgtaaaaaagggtggtggaggcggtaagacaagcttggcacaaggctagccattgcacgatgctccacctggcgcgaacggtggcagagttcctccatctcagcctcacatccttcccttttacataggacaataacggatgatgagtaataaggctctcattggataaaccttcacatgcaagatgtcagatatacctttccatgttatgtttacaaatataaagatgttttcagattagaaagaaagaagtataaagattttttttaatggtgctttattgtagagaagagaaatacaagattacgagcaactccaaagagacactatattctaataggtatgaacaaagaatcgaagaaaagaacatccttaaacgagctaaaccaaagtgactaaag

SEQ ID NO: 129885 - DNA, 383 bp, Zea Mays
gcccatgcagtggggtcaggcgccgtcctccgcgtggcctggagacatcgcgtgggtgcggcgccttcatgttgtagaagagggtacccctgatttagggtaccgacagcggagtatgtgggcaatcaacaacctacgacatatgttgcttcggtgagtcactcccaagcttcctgggcacagttgccaccaccgccaccgctggcgcctgcctggttcataatcaacaaccagaagggcctcgtcaggaacaataacagtgtgaccttcaggatgagtctgaagctcgaacagtcaacaacattgtgcctaagtcgagacatatctactgaaggtggcacaacgtttcggccaaagagtgctttgacccaatgtacttttac

SEQ ID NO: 129886 - DNA, 449 bp, Zea Mays
gttgcatccaaattcaatgttctaaaatcgtagtgttgattgcatctatgacttgctttgagcttcattgcatgttgtttcatgcttgatgtcaagttgtgtagttttcatagacaattagtctgaggtagaagttcttgtgttaattaagaccaataatggacccatgttttgaatggtggtgctatatggggtaccttggacgctttgctgggagtggtcgaattcgaggacgaattctttttaaggggggtagagtgtaatatcccaaaaataatgttgaccaaaatttgatctttgggagtggatgtgggaaaagggttgtgggccgttggatgctaagtcagaagtcatctgaggcgtcgtttcttttctcccacaaaaaaacccttggtggctgccccctttcccctttcttggccgccattcctctcccccttacttggccg

SEQ ID NO: 129887 - DNA, 397 bp, Zea Mays
tgcaagcaaagagccagttgttctttatgtgatatatcactagactcatcagctaaaattgcatagggttcttcaccaagttcttcaattattttctttctagtttctatggcacaacaatgaataatctgcttttgtatctttgggctagttaagatacagttacctagagcattctccaaaacatatttcttcacctcttcactgtttgatgcaagaaatttcaaaagttcaagaaagttgcctctgttgttagactcttcactctcatcatgtccacgaaatgccaatccttgacacaatagaaacttcaaacacctaagtgaataagtcaatctgatcttataaatacgaagatcctctttactccacttatcaatgtgataatcaattgttg

SEQ ID NO: 129888 - DNA, 678 bp, Zea Mays
gcatggctaggccgccgcaccgcgccgcacggtttggtgggcgcaataaacgccaagggcacgcagcccggcacggtgctctatcgcccgtgctccgccatccaatcctaagcgcacgtccactgttcgtttgcgtcacgttctaccgtttgtttctacggcaccacgcatgcacacgccacgcgaaagacgggaaacccatacgcatgcatgttatgtaaccctactaacgctacggtccggccaggccagcggatacacctaatccgtatttctctctagtctctaccgcatatggccacatgcctccacatgcacgcgcggtccggcaggcgtatggcggccatgcatggttcgatagtccggcctgaagcttgtaattttggctcagtatgagcacgacacgcttcggattaagccgatcgggattctaggagctctatcctcctctccctcctcacgctcctcgtcctctttcgttgctcgcctgatttggccgccattgccagctcatcaaggggcttcgtcctcttccccactcacccgattcgactaccatcactaattcactagtccgccgcagggctctgttcacgtttagtgctgcatagtccaccaccatcttcgtggtggttttagttcatagatggtctaaaggttgagtagcgatagtatata

SEQ ID NO: 129889 - DNA, 1238 bp, Zea Mays
aacaccgacataagtagaactttatactgcccgaaccaggataaactatttgtgttaactcgcacaccatatagactctagacacgcgatattatttactagttagttaggatctttagtctaaacaccgacaacatagattttatatattatagtgatatttgtcgttttatatctatttatttttactaattcttaatttttgtggtaaccaacgagcacacagtttgtagttcctaatactattgttgccgtcgtgcgacccttttgagttttgaccatcggcaaggggagggggcacgggcatgtcggctgcctccaatcgtccaaccacaaatcggccgcccaaattaatagattgccgcacgtccttgtatgaccaactagttacacggtacagaaacttgtgcggcagcgccgagtcattggcatgtgaccagaaaaagggcagcgccgccatgtggatggtggaatggaattggaactggaactctctactctccttgtgggtagcgagcgtgctgcccataccatacataaaacagatgagcccaaataagctgcagatgtggctgctggctgcaacctgatctcacgcacctccgcgcaagccccgcagcccgtaaaagtccgacgggtacggggtaccttgggggcacatttgcgaggcaacccgaccatgtgccacagtacacgaagctatggcttccatgtacgcgctccatttccgagacgacgtggccaccgtctccgggccgttgcggcggagccacgcgacgagtcacgacattaaccccatgcatatgcgtcctctctgatctttggctctcttctcagttctgaacttatcatcgccggtgcaaatcctctccacgccggtgcaaccatttacctgctgtcctgtctatctagctcagctcagcacagctcaggagacgccgccgactatacaagcagagtgcatacttttttttttttgcgaggaaaacagagtgcttacttcgtttattctatatatttgaatctcggcatccacggccggagtcatcctttctctgagtcggcaatggagcacgacgtcgcgcacggtgcaggcggcgctgtccccgcaggcgaagaagcgttcgaggtagctcatcagttgctggcgcaggaggagttcagcgactcggagtccatccagatctccgacctgaagcgccgcatgtggagggaccagatgctgctcaacaggctgg

SEQ ID NO: 129890 - DNA, 364 bp, Zea Mays
caccccaaatttactgtggtgttgctacagcaatacaaaagtatgtacgtaactgatattatgatcttatcggaacttacatgactttgtagaatgtgaggtgtgttttaatcatgcgccccaatatgtctcatggggatgtgttgatctgctcctaccatctctgccgatcttgtgttgtcatcaatatttccaggtgccctcaacgccgccgatggagtaacagctacaccgtctgcgtctccggtcacagcatcaggtacagctacgatacccatgctagtagacgtacctggttgatttatgtcctctgtatgtcctcccgccgccattaaccaccgccaagagcacaagaatatggtcc

SEQ ID NO: 129891 - DNA, 365 bp, Zea Mays
taagatgtttgaaggagatgcttcggacgccgagcctaggctagttaggcttcgttataagtatagattcgaagatgagtttggagagcctagtgatgggtggctagattatgttgaagcgaggtgtaacaagattcttggtaattatagcaagctcgaagccaaagctctgcaatgggccttcggggctcgaaagaggcgtcgattgaatcatgtctttgacgccattgaattcttttatcctgactatcccgtcatggttcaggactcgaagaagagaaagaagaaagtaattacgaggcgaagcaaagtttcgaaggttcaagccggatcaagtcctcaagccttagaggaaattctagtaa

SEQ ID NO: 129892 - DNA, 784 bp, Zea Mays
cccgcaagccattctacgccgcggcgactaacgcatccacagagagttgagaaagagagaggagggagtctgggcgcggcgtgatttcctggtgcgggccgtgcacgagcacggtgggtccggcgggtgatcaccgcaggtggagcagctcgcagagcggtcaccgtcggccaatcgaacggtggtcagttgcaaccgcgaagagagagtgaagcacgctggaatactgcgcctcgctatgccctgcatccggtcgtcgtccagttcgccagtggcggtaagacctcccctcccatgccctacttactcggcgccatagctaatgcgctgtcgtgggcgcgcgctaggaattcggtagacagcgagaggagaagaaggtgtacctgccgtcggatctaaatagttcgtcctgaataacctgtcaactgttggccattagatggggatcgtggggcacagaatctgctcacgctgcgtgacatctggagcgtccgattgagatctagcggtgagtacagtgtaacctgtagagataactacgatctaatctcggcttttggaatcggatacaacggcctagagtgcaccgtaccccttcgcgggtacgttttacaaaagaatccctacgctttccagaaaacaacccgccatcctcgccagtatctctctgtgtctaaggaaaacttatgtagaggcccctgacctttctgattattgaggcgcaatccagaaaagggaaaatcagattaaatgaattaggaaatacatttttaatacaaaaaca

SEQ ID NO: 129893 - DNA, 574 bp, Zea Mays
actatagagcttggtatagttgttatggccacttggtgatatataaatatacaatgccacacaacacagtcaaataaaatatagagccaaacaaaattgtttatgaaggttgcacataatgtgactccaggaccttgaacaacccaccacaatccacacgagtacaagctctagcgtatctggcgtcaacgcgtgtgcggccatcagggctacgacagtatagcaagccttcataataagcgcaacaggcacaattatggctcgataattggggtacacgataaatccacgcaacatgcgcaacaggcgcaattgtggctcgcgacagacagacagtgcctacagggcatgcaaaaaatatgcgactcaacgatgacggtctggctcaaccggagcgatccgattaatggagagcgcgacatagcaatcacatgacgcaaccaagttcgaacgacacaaatattgcgtcgtgttgccagggcgcggtcaatatccagctaatgccataactcagtcgattaccaacgcagcctgatcggcgtgtctgagtacccattatacaatttaatcgctc

SEQ ID NO: 129894 - DNA, 436 bp, Zea Mays
cacctattcacccccctctaggtgctctcaggcgtttctgacttaagccgattgctccgttagtagggtatagtggtcaccctaagttgtgtgatttcgagccgagtccgatctacgtcagttgtcaatcaagagtttgaatggctttggaagatgaaagctttattgatgatgaaaccttctggctacagagtacaactttccatcgggagttttgaggcatcgctaagggtagaactttctgaggtgctcaatgttccatgagttccccacttctgtaccatccatctgagtaagccgatatgatcccggtcgtgtgacctctactacgatgaatggtccttcccatggtggagacaacttgtgtcgcccctcccccgttagaactcggcggaggaccaagtctcccactgcaaaggatcgatgtcgcacagct

SEQ ID NO: 129895 - DNA, 558 bp, Zea Mays
tctccccctacttctgcttcccataatctggaatcctaaacgactccaatcttcctgcgaatctcctggaaacgcagcctgctcaaagctttggtgaacgtatctgcaagctgttcatcagtcccaacttgcaccaattcaatatcaccacgttccacacattctctggtaaaatgatatttcacatcaatatgtttgcttcgatcatggtgaaccgggttctttgccaacgcaatagcagccgtgttatccatgagaataattgttggcttagcagggatgccaacgacctcctcaagtagcttctgcagccacactgcttgagctgccgcggctgcgctcgccatgtattctgcttcacacgacgatgtggccactgccttttgtttctgagacatccatgacactggactccccccaagaaaaatatagcacctgtagtactgcggcgatcatcaatgtcaccggctaagtcactgtctgaatacccaatcaatttcagactgcctcttcctcgactgtactgtagtccataacctgctgtcgctgacaggtaac

SEQ ID NO: 129896 - DNA, 346 bp, Zea Mays
ctggcctcaagcatataggacaagggcactcaaaaacaggcgggggacaagcgcatttaatgtgtgtgccaacccgcgctgtggcagcggagcacagtggcggacaagacaacaatcacgtctggtgcagcagtatgattatgcctacactacagtgcgcgcacgctgcctgacaccctccgatgggacgcctaatacgacaagccgatcaaacgagccttcgggcgcaacctctccgcctcgcccgaccctaggctcagccctcaggcaagtccttcgccttgcccgagctcgacctcggccaccgatagcgccgcgaataccacagacagccactccacccgac

SEQ ID NO: 129897 - DNA, 675 bp, Zea Mays
atcatgtctaggagttttcctagaatttctagactcttcaaaatattattttttatgagttaaaaacaaatccttaaatcaggggaacccacctatcggaccaatccctcaaatctctaatatgcgtgtgcacgttgggaaagaatgaaccccctttgtaacccccgcctgcgctcgcacgcgaaacctcccctacgtaacccctccctaccacgttccctgtcagttgcttgatcatctgcatttcctctcgctagttcccattcgccctcatctctgtgcacggaggagttccccaagcgaggaggcgtcctcgacaacgatcaccaccgctataacaatcaaggaggagtgtcgtcttcctcgccatccctagagcattggcatcacgccacctacggttcctcggccaccctcctttcctcttcggtgagaaacctccaccttcccttctctttttcactagtgcatcgatcgtaaccgatgtctctatgatgtgtctctgttggtgactcaatcctgcccctcccctcattgggatcatagaatagataattttatcgcaatgtcagggtcagatttcattgtaccccaatttatttcctctctctcttcttccccgggtcttcttgttccttatgtgcgtgcgcaggcatggccgaccatggccttgcc

SEQ ID NO: 129898 - DNA, 396 bp, Zea Mays
aagggtgcagccggacaagcaccaacaagtgcgcgatacgaagtcttttactaaaagacaactctgtgcaaaagtcaccttagtgtgcagccggacaagcacagtaatgcgcgatacgaagtcttttccacaagacaactccatacaaaagtcgcccaagggtgccaccagacagttacaacatcacactggcaagcgaagggcaacaggccacattacaatacaagtcgcagattacatacacacagcgaagggtcaccagacccaccgcacaaataaatacaattgcgtcctccctttactaccgcacgacaagtaagggcatcacacatactacatcggctcaacctttgggataatgcccgcctcccgatagttaaacaacatcattctcaa

SEQ ID NO: 129899 - DNA, 458 bp, Zea Mays
tgaagaaagaaatagctcagtatgtggcccgatgtgatatctgccaacgaacaaaagtcgaacaccaaaaacctgctggcctattacaacccctcccgatacctgaatggaaatgggaagagataggcatggatttcgtaaccggactaccccggacgcaaaaagggaatgattccatctgggtaataatagaccgcctcaccaaggtagcccatttcatcccagtgaaaactacctttggaggagccacccttgcccggatctacctcaaagagatagtcaaactccacggcatcccaaggaagatagtgtcagacagaggaacccagttcacatccaaattctggacaagcctgcagaaagctatgggcaccaagctagatttcagcaccgcgtaccaccctcagacagatgggcagacagaaagggtcaacaaagtccttgaagatctgttaaga

SEQ ID NO: 129900 - DNA, 306 bp, Zea Mays
ctacgctgcacgccttctcggcagcagaatctatcccaatccaacttttcatgctgtgtgtgctagcttctaccactttcggccgtcccccggtcggtcggtcggtcgatcgatcgaaacatactagtacgtagtagtttatagctttgctcccacaaccgcgggacggaacttagctccaaggacacagatatatatatcccatgacacgtaatacggattgcagccaaatgccgttttgctgtgccagaacgaaatatctgtaccgaatctctcgtcaagagatgaaaaagatatgcatatcaa

SEQ ID NO: 129901 - DNA, 485 bp, Zea Mays
gcacctgtcgaggagaagaagaaaaagaggcgacttcgacgattgtcgtgcttggatcaggatgttggcccttctgtaccgatccctaacgatgtcccggcggacgtcattcctgaggttgatgccaaaggctgtgatgatgcgcgggctattggcaacatgtttgacgaggatgaagagggagaagaagaagagatcccgctatccgcaagaacagtcgtttctataggcagcgacgggggtagcgatattccctcccaagctttgtcggcacttgtcagtcttcaggggctttcgatatcagattttgatccagcactggaagaggtcattcctgaagacatattatcggagcctcccaaagctgacatcccaaccatctgtttagaggttccaaatggtgggctttcattgcttgattctgccgagcaagaggtgacccaggtggtgtcccacgcatcgtcgaccttggagggcggtcttgc

SEQ ID NO: 129902 - DNA, 1201 bp, Zea Mays
atttggcatcgcgcgcgcttaatggtgtttagcccttgtgcagtgcccgtgttgccctcgcgccgttagaaacttgccgccgtccgttcttctaccgtcgcccgtctctcgcccgttagtctctcgtattccattctccctgtctcctctcctccttattctcgccctggccgtcgtcttcctcgagctgctctgttcttctctgcgcactgggtgcattcgagccctgtcgtcgtccggatctcgcccttcccttcctcgccggttccttcgcccgtgctccattgccgacctccgacgctggtgagctttccttgttctgtaaccctagggtttgcagattaggaagccggcatggattctgccgccgagcattgtgcccagaagttgtccttggcggctgttgcagcccgtgacacactgaaagcttctgctgccgcgagtattgttgctggtgattattgcgccacattttcgttaggtaacgatgtggtttctactctggatgttcttgaatccgctgtggctgcggaaaatagtgctatgcgatcttacaaacaggtgactgcagccgtcgattgtgctaaggagacagtggccaaatattctgaggtttgtattcttaaacttatgccctgtgattgaaatgtgtagtgaggaaatgtgaagtggggaaatttgaagtgaggaaatgcttagccctgtgatgaaatatttgaaaatagtcaactgaatactacacttgttgttttgatgcgatgaaatttttgagggctatggctgtttgagcctgtttgttgctgtttcattgaataatttgacctggggcttgtgcgttgagattaacagtttgcttagccctgtgatgttttctttgaaaacagtgaactgtatactacacttgttctttttatgttaaaaaaatactgagggctatggctgtttcagcctgtttcatgctgtttaattgaagaaatttacctgatgcttgtgttaatggaagatgatctacttgattagccctgtgaggttttctaaaaaatgactgagggctatggctgtgccatgtttgcaaaattctccagttcagtattattgatatggctgttttcagtctgtttggtggtttcgaaagatgaccctgaaccctcagctcactttggcagtctgactgttgtggatgttttcagcctgtttttgc

SEQ ID NO: 129903 - DNA, 570 bp, Zea Mays
accacaaaatccatggtgatatgctcccatttccactccggaatttccaatggcttcagtaaacctgcaggccgcttatgctcggccttcacgcgctgacatacttcacaggcggccacatacttaaaaacgtcaaccttcatccgcttccaccagaagttttgcttcagatctcggtacatcttggtttcgccagggtgaacggtgtaaggcgttttatgagcttctctcaatatatccatcttcacctctgatttctgaggcacacaaaggcaacccctgaaacgaaccaaatcattctcatcgatggagaactcccggggtttaccatcgccaaccctctttcgagcttcctgcaataaacgatcccgctgctgagccacacactctctccatgagggaagattgaataagcatacgagtctcctcactagcggtgccaacatagcacaaggcgatccccaaacggtccacatcagcaatcaactgcaagaccacttttggaaccccggacctgctaagggcatcaaccaccacatttgccttccccgggtgataatgaatagacaa

SEQ ID NO: 129904 - DNA, 801 bp, Zea Mays
gtttattctgcaaaatctaccagacacaggcttcccacgcacaggacggcgagttgattatttagaaatccaggggctcttatgctaatccacacagccgaagaggtatcagagaagatcagtcgctggatccgcaaccattggcacagattagatcttcactttatcgaaccggtacgcaatcatacccgttggatcagctatcagcattctagattttatgaagcccagaccgatcctagcccacggattcagatccaatggccccaacgcgaccccgaaccggtacggcagggtttaatctgagccacccaagcccaagtggacggttctgattcttctcacttcctcgccaatcgcaaccacccgatagggatcagacggccaggagtcgtcctcctcccacggtccaaagtcggcggcgcgcagattcccccaacggtgcccatggccggcgatgagacatacggccaatcgagcccccaaaccgcacaccagacgcccctacgcgaagaggagaactaggcgaatcctatggttagcggctcacctccaattggtggtcaaggcgagctggccacggtatgcggcggctccacggcagtgacggcgctccggcaagaaattgccagtacaccggcggtccaaccttagcgcaggagccacggccaccttcgcggcaccacgacgaagctcacggacccaactccaggaccccaacgatggtaaacttgccaagccccgatggcgaccaactccacctctctcactctgtgctcgatgtgccacgggggttttctg

SEQ ID NO: 129905 - DNA, 653 bp, Zea Mays
atatgggtagcatgagaactttcttaatttattatcatgctctctcccgctctccgatccacaagttttacttggccacgaattcggcatggtagccgcgccggtcgatctgggatccggacaatagatatagtgaggattttatttaggggtagagccgaagttaaaaagtgatttgtgacttgagtgaagattttcttcctggaaatttgacccactcctagctagctctcagttcatattcttaataaattttttttgttatattcaattgtaggacgacttggttctgacaagagaaggacggcgggtaacatcttgatcaatgggcgacgagagaaacttgcctttggaacatctgtaagttctatttctatctactgctagagaataatgttacaagcagcggtggatggtgcaccatgcatacctgtcttctcattgcattgaaggcctacgtgacccaagagacgctgctgatggcgacgctgacggtgacggaggccgtccactactcggcgcagctgcagctgccggactcggtgccgccggccgacaagcgggagcgcgccgaccgcgccatcaagcagatggggctcgccgcggtggccgggcaccggatcggcggccgcgtgtgcaaggggatcagcggc

SEQ ID NO: 129906 - DNA, 691 bp, Zea Mays
cctcaacctcagcctcatcacacttctgcttgtaataagcggcctctacctcttcggcggcctaagacataaactcatcctcctcctcctgagcacgtaatcctgcctcagttagtgcgatgagctcactcaaccttgatgtgtcgtcctcctcttcccatgtaatcctgcctcagcgagagcgataagctcactcaaccttgatgtgtcctcctcctccatcagctccaccatcaccatttttttctgaacgtatcttacacgagcctcatctgcaagatagttcacagcacatccaatctctgcaaatgtaatgagacaaataagtttgcaaagtcaggataaataaattgtacaagtgaaactatcatgtcatttttctcactcacttccactgagacgatcagcatgattccccaacatctgtttctcggctctagccgcctcccattcccttgcatcatgtgctctcttctcatttgccgccttcaatctcctctgctctgcacgcatcgggctgtcaaaactcattgatttcgcgaaccttcgcatgtcctgtatgcgatcgttaatgtatgaatcgacgagctaagatccacaatgcatcttatgccccattagtctcttggactttattgtatgcatcacctcttatttgtcatcgtatctctcccaactgcatttcatcgtc

SEQ ID NO: 129907 - DNA, 401 bp, Zea Mays
taaggttcgtccttataaaatcttctacattttcagctttgacttcttttagtgcaacagcttctgcccacttagagaagtagtcggttgcagcaaggatgaatttatgtcctttagaagatggggggtttattggcccgactacatctattccccacatttcaaagggccaagacatattggttgggtgtaatggttcgtggggctgatgtatgaagttgccatgtatttggcattcatggcatctttttgcaaatttcatggcatcgtcgaacattgtaggccaataataacccaaatgtcttaattggtagtgcaacttgggcccagattggtgtgcgccacatattccagaatgcacttcatttaaggcttcgatcacttcgctaccagcaaggcaa

SEQ ID NO: 129908 - DNA, 957 bp, Zea Mays
caaaaatatctccaataatttgtattatatatgtcataatatgattgaggagaaattggttacaaaatttgaatttaaaccctagatttgaaaatgaaaagaaaaaaaaaagaaaagagggaaggaactcggtatgggccataatcaccattcggcccagatcagtatgagcaccgcgcagcccaaatggtgctgacactgaggacccgctgtcagcctcttcgtcgcgcgctagagccgtgatgactgcttccttcgtctgcgtacccttcactgcccgtgggccatccccgtcagtatctccttccctcgctcgatgctggcagtccttcttccctgcggggatcgggtcgcgctgaccggctcggccgtgatccccggaaacgcgcttacttgcttggacttcggtcgaagcctttcgcgcgcttaaagctgactggtggtccattcggtcagctcctccccacctcaccacgccgcaggaactgggtcgcccgccggagagatcggatctccccaacaacctccggccgcaaatcgtgctgagctaaccgtctccacgcgagccgccctgctacgtataagtcagttccccatacctttggaccgatccaaccaagccaccgaatcgctggatttcgtcgtggggggaagctcggtggaggtgtgtgcgccgcctcggtgaattcgcattggcgcccgcgtcgggttccttggacggggcagggagcttcgtttcgtcttcctgtggctgttgatcgccttcgagggagaaggggaccactcgcttggtggtaattcctcaccggaatttcatcgccgtcacataatcgcactgctccgtgagcagtcgactctactgctcggcgtccggtatgaacgcagcctttgcattctccgttaccctctcttgatttgtactcgctccgtaccccgataggacacctagatgcggga

SEQ ID NO: 129909 - DNA, 719 bp, Zea Mays
tgcactaatttgctttgctggagaggaagtaattctagagccaaaggaagatgaggttgttgtgttcaagagcttattcagggcggggcttcggttccccctttacgatatgatagggaaagttttaaagagatttgagatatatctccatcagctgacctgaatgctattgttaggcttagtgtttacatatgggcatttcgaagccaaggaaaaagtgctaatgccgaagggttctgttgcgtgcacgaacttcattatcagacgaaggccagagctgatggtctgcacaagaacttcgggtgctataattttgcataccgaaaggataccaaggtccccgtgattggctaccgcactaaatggccgaccgggtggactaatgaatggttttacatgaaggatgatgggaagaagagagagaagcttatgagcatggtaatgagtcccttaaagctaagcttcggcacgactcgaccttcatgcaatatgcagctagggtctccttgccaactggccgaagtggaatttagggtggtggctgagaacattagcactagggacttggtgcaggaatatgtagcaaacggaactttcccaacctctagtggatggggaattccaaagaaaaaggaagagggaaaaagtatgaacttgtacgccttccttatcggttcaaattccaaaaaagattcagcaaaccatgcactgaatggttg

SEQ ID NO: 129910 - DNA, 323 bp, Zea Mays
gccctattcacccccctctaggcgactatcatagtgccatccttcttttccacgaataggacaggggcggcccaaggcgaggtgcttggtctgatgtaacctttctctgatagctcattgatctgcttcttgagttcaaccaactctggttcggatactctgtaagctctcttaaagatgggggcggttctaggaagaagctctatggcaaactccacttttcgctccggtggcatgcctggtaagtccttcgagaacacgtccggaaattctgacaccactttgataatctcgagtggatctgcttcactgctatcaatagc

SEQ ID NO: 129911 - DNA, 691 bp, Zea Mays
ctcaattggcagagtgatatatggctcagattgtgtctctacatggcgtaccgaagaagatcattttggatagaggatcatagtttacccccagattttggaaaagttttcatgagaatacagatgtgaagttgaattttagttcagcctacctcagactgatggactgactgaaaggacgaaccaagtattggaagatatgttgagagctgtgcccttcagcatggaggaagttgggataaaagtctaccgtatgctgagttctcatataataatagttatcaggccagtctgaagatgtcaccttttgaagctctatatgggaggaagtgcaggactcctctatattgggatcagactggagagagacagttctttgggcctgaattaattcaagaagcagaagaacaagtccgtgtaattcgagagaatttgagggtggctcaaaccaggcaaaagagttatgctgataatagaaggagaccactggaatttgaagaaggagattatgtgtacctcaaggtgtcaccacttcgtggaatgaggagatttaaagttaagggcaaattatcccctcgctatattggaccattctgagtttttaggcaagttggagagatggcctatcaactcgagctacctgataatctatctgatgtgcataatgtattccatgtgtctcaacttaaga

SEQ ID NO: 129912 - DNA, 467 bp, Zea Mays
cggtaaggcttcaaccctacgccattatatatattagcatcaccagccagcagcagcagcacagccctggcgtacgtacgtacgtggcgttgatggcgtccaggcggcaaacggcgcaagtgctgctaaagcgacggcgctcgatccgatcctttcaatgatttgataatgatgagagctaggccgggccgcgggtagctgtcatgcacgcctttaattggttttttctagaggagagccagtgtgcacgtacgcacgcacgcacgcagagcttgcgcgctgttgctttcccggtggcgcctcttgtcatgcatcatgtgatcgtcaaacaaccatctcctgttttcgctgcattggttgcacttgcacgctcgcgcgctcctactgcaacaatatacctttagattgtttatgttagggcttgtggccatcgaataatctccgacggcctgacgtggccgtcggag

SEQ ID NO: 129913 - DNA, 335 bp, Zea Mays
agaaaactgtcagtagtaacttgacgtgaccgtggggtgtaatcatatcgtccaagcagttgaccttagtccaaatggtgtcatgttacgcgaagcggcgtctgctgcctgacttgcttccagacgatttgaattgcttattgaatacttgcgattgttcggtgatcgtggtaggagatgagcagttgccttcggcctccataaatagactacccaccttgttggtgtcttcacacatcttctgatcgtctgttgcttcttttcccacttttctcttctctgccaaccgacgatgggcaagaacaagaagggtcgaggttcgtcgcaccactccg

SEQ ID NO: 129914 - DNA, 418 bp, Zea Mays
aaaatttccactcagtgcagtggctttggctgaagggttcttaatgtcattggctgagatcgagaattctggctgaagtacaccctttgcatgctcgcagccaaccttctcaaggagtgacacagctccacgcccgccgacgaaggcgcagaagtctcccctatcactaagaatctcctcaaaagctttggcttcgccgccgatccatcgaataactccatcaggattaccacagataaaattttgctccgtagagaatgcaccaactttggaaaagcttctttcaatttattacaacattccatggcaacattgtagcattccacttttgctaggcgaaactcctcgacgtttttctgaactctcagccgtttagtattagatatttcacgctttctttgctcgacattaaaatttt

SEQ ID NO: 129915 - DNA, 407 bp, Zea Mays
gtcctttctgctcgactcagaaacccgctgctcatctctcttcctcctaaagcaaaaagaagttagatgcctatccctctcacaatactcacaatggtacctcacctctctcttgggtggattttgtttgtgggagggggctttctttttggatggctgaggagctctaggaaggggatcactagagatgtcggaaaaggtgtcaagtgtgttcctgagatggttaggttttggaagccacacttatttctgaggaggagctctcactggttcatcaatcacaccatctctcacaggggtgatagatttagcaggggtggttttgataagcttgggagtgggtgaaggtttctctaaaggtgtcaaaccactgcactcaccaaccttcccaaagcgagcgccacttc

SEQ ID NO: 129916 - DNA, 304 bp, Zea Mays
gctgctaatagtttttggattgaaacctgatcaatgcggtttgattttacctttggatcttgactgggctggttttagaatctgaatacacgcattattcaagtttgctgctgctgctaaatgcattagttggtgctcagtaccacgctcttaccacttaccatcatgttattaatcagacaaaagttgacctccctgacatgccatgggtctcaaaaacaaatgtatctggctgacgcgcatgtgtcagcgagcaacaacacttaccaatcaaacgaaacagatctatctatacaaagtttcc

SEQ ID NO: 129917 - DNA, 589 bp, Zea Mays
ccagcccgctccgcaccccgcctccctctcgctggcaaggcatccccacccgtcagccgccctctctctcgcgcgctcgctccctctggcagagtggccccgctggtcagttgcttcgtcgtccttccgtcgtcccctcaccgaagtcacctccggccgtcgcctccgtcctcccctccgtcttctcgccgcatagggaagtttggcaccgctccgtcctcccctccccttgaccagcgtcctcgccggtaccgccccgccgtggtgtcccctcggcggcgctgtgcagctttaatggcggcactgtgtagctcgccggagccaagaagctccaccacccccccttccctcgcgcgcctataaaaggctcgccccgagctccttcttcctcgcaccagcctcagtcatccctctcctccccttccccgagcacaattcgcaaagcgccggcgtcgtcctcctctccggtgagtcccttcctcctcttccctctccttctccgatggtcccgcaagaaattaagagagccgagcagctccctcacgaggccacgaacccgaagcaccactttccagcccccgtcccccac

SEQ ID NO: 129918 - DNA, 488 bp, Zea Mays
cagtgtcccgatcaggtcgccagctctatccctcgtcgccgacgagccgcgtgtggattcatgcttttgccgccgtgattcgtgctcggatcggttggatagcgcttggggttgagtaaatatcatcgccgtggatatactccggccactaaactactccgaccaccgtaccgagctagtcacggatgcttcggatgtgttcgccggagatagccgcttcacggccttgcgccacgtgcctgggcacatttaccgcatcgccgtgactcgcttaagccatccgatcatcgccggggagcccgccacggtattctccacgaatccactgcgctagtgacctcccattcctctgaccgccgcgtgtctcagtccaaattcaccggccactgctcttgcctgctataaattgagcccgtcgtgagctccgtagggtaatcacgcatctaagccgccaagtcttgtcttcaattgtccactaacgcccgtca

SEQ ID NO: 129919 - DNA, 349 bp, Zea Mays
ggttcaggattatgatgatgacgtctaccattacctcccataccttgtcgattacgtgcgaggcgttgtcgcagcggtgcataaacactgtcgtcatcgtcgacgtcgtccacaggagagtgagctggggctagagttggtggtgggagacgagcctccagtacgtccatgcgtgtaacaagtttagcaactcgtcgatcaagctgctcataggatgtcgccgcagagtccaggtattttttaaaagcttcagtcatcgcgcacatcatctccttcaattccagctgagagacacactcatcgtcgttaacctaggctccttgtccttgtccatttgattctttggtcc

SEQ ID NO: 129920 - DNA, 281 bp, Zea Mays
gccaaccaccagcagtacaccggtatagcctgagggagatccctggtaggaatagaaatcctatcaacatccctggtattttcttgctagaagatagattaccccaagaaccgtcagtgttagttactttgagtttaaggctcgtgaacataacccaagtatggatgtccaacagctatggatgtagtcatgtggatataatatctgacttggtttgtactttgtagccatggcatgcgttacacttcatattttaagtgcacaaaaggcttaggattttg

SEQ ID NO: 129921 - DNA, 478 bp, Zea Mays
tccactctagaatttctaatggcttcaggaaactagcaggccgcttatgctcggcctgcgctgacatacttcacaggcggccacatacttagaaacgtcaaccttcatccgcttccaccagaagttttgcttcaaatctcggtacattttggtttcgctaggatggacggtgtaaggcattttatgagcttctctcaagatatccatcttcacctctgatttctgaggcacacaaagacggcccctgaaacgaaccaaatcattctcatcaatggtgaaccctcgtggtttaccatcaccaaccctctttcgagcttcctgcaatagacgatcctgctgctgagccgcacgcactctctccatgagagaggattgaataagcatctgagtctcctcgctagcggtaccgacataacacaaagcgattcccaaacggtccagatcagcgatcaatggcaaggccacctttggaaccccg

SEQ ID NO: 129922 - DNA, 355 bp, Zea Mays
caaagcacgaacaactagctagtatatttatgtgtatcatgttacatgggccaggctctaggccttttacatttagacaagaagatacaatctaacacccccgcagttgaaattctagccgcgtcagacgttgagactggaccaaaactccgagaacaatgagggaagacccttactgaagatgttagcaacttgtgagctcatcaagacatgaacacggacatcctcgacagcaacacactcatggacaaagtgaagatcaatttcaacatgcttcatgccctggtgcttgacgaggttgatggagaggtagacgacgttatcgtagtagacaagcgtgctcttgatgagaggg

SEQ ID NO: 129923 - DNA, 510 bp, Zea Mays
aagggcgtctctctgtctacggcctgtgtgcgcgcgcgccgctcgaccctttttataaaaaggacgcagcctttttttttttgttgcccacccagatgaagtggagatggaggagcgcgtcatggtacagaactacagatacgtacagctgctcagtcattaacaacagatagttaggccggggcagggaattaatgtgcaattgtcagtctttgagatcagaggagcaaattgagagcgccgcccggccggtagtacaaggaaaacccgggcatgttttgcttgctctaatccttttttgtccctatgacaaggttcttttctggttatgagcctcaatgaggtttagctccacccccacccccacgctttctgtctgaccagccgcccctctttttgggtactgtctttatttgaacctgtaaagttaatagatcttatttccgagagactcgatgaattgaagttgcatcagtttgacttagggtagaatcaaattgaagcatatat

SEQ ID NO: 129924 - DNA, 360 bp, Zea Mays
ggagttccttctcctgctttgtcagccctcgttggcttacaggagttatctctggccaattttgatcagaccctagaggatatggttccagaagaccttttgttagagccagcggacgacggtgtgatggaggtttgtgccgacgtgctcgatgctgggttgaggtcatcccgcgcctcatcgaccttagagcgcggtcttgagggccaggagactgatttggatcatctcggtcccatgaaagcaactgaggggcctttagccttagaggtggccattgcagagaactcggctctcaaggatggtgttgacgctaacccagcccccgagggtgttgccgaggataactcggctcaggtg

SEQ ID NO: 129925 - DNA, 819 bp, Zea Mays
ccataaccaagatgaacgacattgaagagagcggatcctcccgtccgagccctcgccggtgcaaatgggctgtccttgggagccgttaaggagaacctagtcgatgaagtctaaagaagaccactgattcaaatccctctaaatctgtccaaagtccaaacccttacaagacttcaatgagaaaaggccaagagattgaatcgaacacatcagaaatatcaagtctgagaagcacacgtaactgtttttgctgatgtagatagtgagattttgttggaccatgtcgtgtagtatgctagccaaccaaatagccaaaagcttagctaaaatcttggcaaagttatgaactatgctaattggcctaaaatccttcacctcatcaccccttctttctttggaataagagtaacgaaggtcgtgttaagcaccccaaaattcatgaatttcctgctccacccaaatatcactcgtgcgctccaccccaaactctagcttcctcctaaaaagaaccattaatattggtatatgcacagtacagcgacatggtaaaatacatgttgataaggatatgttattggcacaggaactgcaggatatgtaaatcacatgttgataagcatatgtaatagacccaaacatcaaatcagtaggtgaaactagaacaccgaaatgatagatttgaagctggaatcaaaatcattagactggttaatagattaaggccacataaatataaactatggggaggacttaccaaatcctgcgagcaccaagagatccaagatgaaaaagtgtgcatctccagtaatactctctccg

SEQ ID NO: 129926 - DNA, 418 bp, Zea Mays
gccatctctttccacgtggtggaattccaatcctttgaatttgtcctctagcttccgtaccactgcacaatatctgttcattgagtcggttgagcaatcccagtctttgttcacttggcttatgaccacccatgagtcgccgtacaccattagtcttttgacgtcgagcgagacggcgatgcttagtccatggaccagtgcctcgtactctgcagcgttgttggatgttggaaacaggagctgaagtgcatacttgagttgttcacctccaggggcgatgaagagaatccctacccctgctccctgtagtctcagcgagccatcgaaatacattctccagacttcagcaacttctgggctttctgggacgtggtgctcagtccactctgatacgaaatccaccagtgcttgagtcttt

SEQ ID NO: 129927 - DNA, 573 bp, Zea Mays
caagtatgcagatgataagtttgctcaggagtttggcatcgaagttagcagtgatctagtgactgttccagcccgtgtgctgcctccacccctggtaaaattgctaagttcttttttgcaaaatgtgtgtccatgaatcacttttgttttattatttgaggaataatcaatttctttgttgtatttcagttgaaatatcatgactctggtagggagaaaacttgtgcaccaagtgttggacaatggaacatgatcaataaggtgacactatgttcttacttagaaatttatctctgatgttagttgagcattgccatcgttgtcaataaatttattgtgaacttgtccagcatcatcatgcactggttgtcaagcttttatgagtgtttgtttttctttaatgttgaaactattatcgccatttttctagaccagtctttttaacactgttctggtaccctttcccagaaaatgatcaatggtggaactattgataactggacttgtttgaacttttcacgcatgcgccctgatgaggtacaaaggttctgtatggatctgactcatatgtgc

SEQ ID NO: 129928 - DNA, 526 bp, Zea Mays
cgagcatcatcatacatcgtttatgtgatcaaaaggtcttgaggctacaataaaaagctacaaggtacccaaagtctccacttcgcatctgcgaccagcattttcgctgcaaggagtagtagctcaatctaccacaggtcaagaaataacggaagttatgctcacggctcccagagtcccccagctacagaaaactgcactccgcagatggattcaggtttcctttagcaggtgattgcttagtcccaaaggttcagccggaagagctcacgggcggcgatcgagcggcaattcctcttgcgaccacacacccttgtctaactgcccaagacttagctcgccagaaatgttgtgccacaacaatgctacccttcgttcgactttcactggccacagatgaacagtagggttgggcaagagaatcctttaggttaggccttttgtacttaaagcccatagctctagctaatgattgctcaactgtttggcagcagcatgcatgacctattcaccaagtcagaatatc

SEQ ID NO: 129929 - DNA, 1137 bp, Zea Mays
taataaaggaatgcaaatgagccggtgaaaaaaaaaatcgatccggatttctacgtctgacgtgaattgcgaaacatgcgttgtgcggtactctgtatggcaagtgaggagtcttggcagcgatcgtcacttgttctcttgtgtggttcgcggagcctcgaccgtatctttcgacgtgacatgcctccaactacccgcaggctccgtccgtggacgcatccgcgaatggaggaggggaacagtccacgatttcggtgaatctttctgagctaggcgcgccgaacggttctccttgatactaccgccgatatgtctacttcaaaggacaaaaaacaccaccagaagcacacatctctgcaggctgcagccggctattagtgacaacacgaacctctctaggtacagcgcgctgccgtccagctactccaataccaaactaagccgggctagtgacaacacgaacctctctacgtcgcttccgtctagccactccaataccttcttgcataaaacaaccgccaaagacaaacgggagaatctccgagtttaaaaaaagaagaagaagaagtagtagtagtagtgtatagtacaggacggacaattcaaagcggtttgcttcacggaacctcagcatctaatcacttccctgatagcccccagccccccactccttaaatttttagtttttcgttcctcagcgttttaggtgagagctttcgtacggcgtcatccccgggccagctggccagattgttgtttgtccgtgtcgatcgacaggtaaccaacgcaaccttccattccattttgatcctaccagtagcggggccggccgcgtgtgtcccattggtttctcagtgcgtgcgtgcgatgcaaggcgaggcagcagtagttaagcactggcatttcgtatgctaaagatgctaccggagacggatgaatttaaaagaactgggtgctgactctcaagaagggggatcaagtgagactgcaatagtacgcaactagaaagcaaaaaaaaaaaaaaaaaaaggcaaagtgtcagatgcaagtagccttgaggccgcaaggtggtcgcggacagactgaagaggttaatttgataactggaccaacttttttaaaaaagaaaaaaaaaac

SEQ ID NO: 129930 - DNA, 647 bp, Zea Mays
tgggcgttaaaagtcgcttcgtctttcttcactttgtctaccaatgaaagtagaattttatccttctccaaggcttcatttctcaacttgataacttctgattgaaggttgttgagagctatcacgcaactttcatcttcagcattcttctgcgccctcaaagcgttgctaagaattaagccctacaaaaagaagagaggataaaggattagcatgtgagtaaaatactttatttctgagactttatttttaagttcataacttctgtaccttcagactgttgtatgcaaggctgtccgcaaggtcatccttcgacatggcagaaaggccaacttcaagcttcggaaatcccatacttttggccatctctcgatagacgaatatttccttgttgtctgggagacagtataggaagtcatcttcgtctgtgccattatataccaaagcccccattaggtatttcagtttttgggcatagtgtttggcttctgcaatttcttcttcagatagtctttttcccgaagcatgtcgaataataaagtcaagatcttcggacggtgcttcgggagcaggagatttagctttttcggccacatccttctccgcagacatgttagtatttggaaattcttgctcagctctctgct

SEQ ID NO: 129931 - DNA, 857 bp, Zea Mays
aattgattgaggtgtgcgggtatatgccgtaatgtggttatactcgcgacgtagaaaagatgtatgtattgtgtaacccgacgtgtaggttgctattgtataatcgtgtgaaggatgctcccgatggtcatgtggctaaagggtggtgtagtggcgaagcgagaagtaagtttaatatgtttaaacgggtagttgatagcatccatcggtgccgtcatgatttctgttgtatggtggattgatactttgttttgtcaatcattgcattctatgtctgttggataaataaatgtcttgatgatcgattataggtcttatatgagcgttatcgcagccccataattattggaagcgagtagcgtgcacaagtcggtccttgttaaaattgaagaacaatccgctaagatatacacataagtgctttaggtccttcagtagccagtgtaagttttatggagtttatgccatgttttaatatctctatgttagaccccaacgaggtgctattttaggtgacttgtgtgttaactagtttaagttgagaaaaggttaagaaacattaagtaacctgctcccacccatgttttgagttgcaatgtctaaatggtttgctaagtcttatgttgtgattagccaactcatgttaagtaggagtcaattgcgttaagtgcttgttatatacatgttgtgtctcagatttcgataataataggctagtcgacaagtatgttgtatagcggcccaggttgttgctttggttaaccaacttgttagatggctttagttaagctcgtagtcccgatgaattgcttgttgtagtctaaatgcgtgtggttatggtcgcaggtaaaaattag

SEQ ID NO: 129932 - DNA, 1356 bp, Zea Mays
catcctgctatctacgcatatgagacaacgaagaacaagggcagcatagacaagtagtttagttggtgactttgtgaggagtccccatgagctcctgcttgctttgcgatatgcaatttactgtagccgaatcgagcactagctagcttcgtgatgtttaaacaaaggcgaaaacacgcgcacacgtgtgagcagaaaattgtgtggtaacttgtgacgaagcagttcccatactctccacaataaacttagaagaagaaccagacgaaactgattgatgattgatacgagaaataatatagtatgcacgcgtcactaattgttgttgcacgtacacacaagcagcaggcaacacctttgtctagctaactcaaaaaacaattgtgcccaaaagtatatattcacaacacacacctagcagtagcagctacatgatgataaagtaagaactgacagcttaattaagccactaggataccctacctttctgaacacaatttggttggagatcttatctcatccataagaatgaacaataacaacaagcagaagcccatgcatgcatggaaacattgatcagcacacacttgcgcaccgatcgatcgagtcctagagaacaacttttgaagacgacttattaaacaccagattaaaaattaagacaaggttacaccacataccaagtttcaagaggcacacgagaggaggaaaaagaaaaagaaagaagaagaaactaaaagcacgaaatcagacagaccgagcaaacgaaacactacggaagttgtacagagatcgagatagaagtagataagatatatccttgcaattgcaagcatacgtgcgctaaccttttgcaagctgcccttaacccttgtgccgttcattgcttttttgatgctttcttcttgacaccttcctgttctcccaaacctgaattacaccaccggcgcatcatggacttgtcagaacggtggccgtgcaccggcccaaccatggccgtcggcgcccggcgggatctgtgatccaccaccagtcatgttgttgagcggcaggttgaagaacggcagaccggcagccgacgggtcgggagggaacggcccaccgcccatgcctccagcgccatcgacaccaccgctgggtggctgcatctggaggccgggtggcgctgcctgctgagccgcctcttcctcctccagggggaggcgctcgtaggcgacgttggcgaaggacgcggcgatgacgatgacggggccggcggcgtagagcgcacccacgacgttcccaccgaccacctgcccctgcccccccgcgaggaagatggtgaggctggtggcgccggggggagccggcggcgga

SEQ ID NO: 129933 - DNA, 408 bp, Zea Mays
cacgcattggagaaaccttgaggtagacgaagtctccttcctcaaatatgagttccctccgcctgttgtccgcataactcttctgccgactctgagcttccagtaaccttctgcggatcagagcaactttctcttccgcctctttgacaaaggcaggtccttctagtgctttttcccctacgttggaccacatgagaggggtctggcatttccgtccatacaatgcttcgaacggtgacatcttgatgctggcctgatagctgttgttgtatgaaaattctgcgtagggtagactggattcccaatttctatcaaatgctagcacacatgctcttaatagatcttcgaggactttgttgactctttctgtctgcccatctgtctgagggtgataagcggtgatgaaat

SEQ ID NO: 129934 - DNA, 349 bp, Zea Mays
ctcattcatttattgtttctctttatgttgaggctttccatggagttgtgcttctaaatttcagaattgttagcaggacttctctactcatttccacataagttccaaccactgtctcctccatagacattgtttacgcttatgcaatgtttaatgtgaactattaatattaaacatgcacgtaattgtagattaattgttaatagcatattaagaatttaatgaagcatatgtgtagtcattcagttaatatttctctttatattgaggatttgcatggagttgtgcttccagatttcacaattaataacaagaatgttccgctcatctctacataagttacaaccac

SEQ ID NO: 129935 - DNA, 331 bp, Zea Mays
agaatcacgacggcggcgagctccgacctgcgcaggggagaggtagagcgcagatcgggtagaggatttaaggaaaggggaaacaaccgtgttttcccggtgcgccaagctcaggcaaagctcaccatggccaaagcgctgtcagaagtccagcggcgacagcagaaaggtgaagcaacagcggggggcggcgctgcggctgggtgagtgcgagggtagggaaagagcgagtgtgaggcaggggtgagctgagggagtgttcggggtcttcacctagcactcgggtgacatgggcaggtcgtggggacgtgggcacgctttgaccgcatgg

SEQ ID NO: 129936 - DNA, 831 bp, Zea Mays
ctttaaaccctgtggatcatctaggacatctcatttacaaagataattgggtgaatttcaagatcaaatcagctttatatctcattctctagttgagctcgtgcaaactggttgaatcggttttgacaccggttgaaacggttttacccagttcgtttctagtcttcgttgaaaaagtttatgcttgcctattcacccccctctaggcaactttcacaaattcattcgatctgccataaataagatatgggaacacaatttccacacacatacaaaaggatgtagttgttgggtctctgcgtgaaaccatgtgctacaagccctcattatctcaccacattgttttcattaggaaaacattattatggaaacatttactatggtaaatacttctcatattgaaatagagagattctccttaattgcccccattgatttgacccaattttgagtgtatggacactctgcctaggacttttggtctggatccagttggaggtgtatagcaatttttttggagagtgttgtgttgacattttgcagtctttatatgattgattccatgggaccaatatagcttgtggaaatattaacctttttcaactcaatgtcattacaacaattgagctaagggtgttccaatgacccagcgcctgaaatatatgcacatttgtgctgggcttttgaatgctttacatccataggctttggataataaataaccataaggtgtctatcaacctagagttgatttaatttgtatttactgtcttggaggatgatctctcgctattccgagtatgcttgcaagaagttgtatcccatgtgatc

SEQ ID NO: 129937 - DNA, 1176 bp, Zea Mays
ggaaggcttcatggccatggcttacctccccgttttcgtcttcctgttcatggttgtcttatgccaatccgatgacaggctaacacctgcaaagccactcttgcccaacgaggtgctcatctcaggcggtggtgtctttgctcttggcttcttctccctgaagaactcttcaaggtcttatgtcggcatatggtacaacaacattcccgagcgcacatacgtgtggattgccaaccgcgacaacccaattaccaccaatgtgcctgggaagctagtttttaccaacagttctgaccttgtcttgttagactccacaggccgcaccatctggacgacgacaaacaactataccgcaggaggaggcggtgaaactgcttccatcctgctcgactcggggaacttggttatccggttgccaaatggcaccgacatatgggagagcttcagttacccgactgacacaattgtccccaatgtaaatttttcactgaacgtagcttccagcgctacgctccttgttgcctggaagggacctgatgacccatccagtagtgatttctccatgggtggcgaccctagctcaggtctccagattatcgtttggaatgggacacagccatactggagaagagccgcatggggtggtgaactggtgcacggcatattccaaaacaacacaagcttcatgatgtaccagacagttgtcgatacaggagacgggtattacatgcaattgactgtgcctgatggctcacctagcatacgcttaactttggattacacaggcatgtccactttccgaagatggaacaacaacacgtcttcgtggaaaatctttagccaattcccctatccatcatgtgacaggtatgcctcttgtggcccatttggctactgcgatgacacagtacctgttcctgcatgcaagtgccttgatggttttgagcccaatggtcttgattcttccaaaggatgtcggagaaaggatgagctgaaatgtggtgacggagatagtttcttcaccttgcccagcatgaagactcctgacaagttcttatacatcaagaacagaagccttgaccaatgcgctgcagagtgcagggacaactgctcatgcacagcgtatgcttatgctaacctgcaaaatgttgacaccacgattgacacgacaaggtg

SEQ ID NO: 129938 - DNA, 409 bp, Zea Mays
ttggttcttcaaccaaacagtaactaactggaaaaaaaaagccgtcgacgtgtacatccgtcgctttcatttttcctgcatcagcacccacaccgcacataattaaggacaaagaccacgtaatatccccccgaaacaaatccgcccgtccccaaccgcgacccaactcaaaagcatcgcgcggctggcgatcgatggagacccgaccggacgttcggatgggcctgggcacgcacgtcaggtcgacgctttccgatgccattgccatgaaccacgccaccacacgacgggcccgagcacagctgttgttcctactgcatctgcatccatggaggccgacggagcagtctgccagtctcttctccatcggtagtcggtaaggaagatggagcgaggtcagaggcgacaa

SEQ ID NO: 129939 - DNA, 647 bp, Zea Mays
gacggcgaggtggccgcggctgagcgggacctcgggtatcagtcgcccgagggggacctgaaggatatcttcgccggaggctcctactccggtgaagacaactagacggaccccagagggacctcgggttcccggtctacaaaactgaagcatgccttcctccggaggcccttccggatcacccgcgggtccaggctacagacaggtacatgcagaagtgaccacagccagggacgagggctcctgtgtcaaatgcaggcgggaaccctgggtcgggacctagccccacggcaagtaccataccaaggagggctccgcaactctcccccagctgggaaggacccttcaaagtagcgggagtgcaccgacccaggggcaaccatctagctacgactggaggagtaccttaccctgatgccaaacatcgctataagttctatccatagagcaagactaaggggttgagtttgttcccctttttgtaactagataacgcatacgtgtacgacaactcggtagggtctgcccccatgaacccggtctattggtctgcacacatgcgcgacaagttataaagaggaactacccccctcagctctgctcttgtgatagttccatcttgctgctccatggtcctaccttgcagt

SEQ ID NO: 129940 - DNA, 356 bp, Zea Mays
gtcttcagcttcagcggtaaaagcagcaattccttcggatactgaagatgctggcagagacgaagctgaagaactcgcagccacaatgttcgaaattgacaaacttatatcagatgtggttgcggaggaagacatggccacagtgcctgagaaagggaaggaaattgacgatactcctccggaagggaaagattttgacctttggcacctgggtggccaggaactttctgaggaagataaattagtgctgaaagagttcgctatgtcttgcagctaccaaccggggtctatgctctttggttgggtcaacgaagaaatcttaggatgcattcgtgaccacgccggggcgaagattg

SEQ ID NO: 129941 - DNA, 755 bp, Zea Mays
caggcgcgcattccatcctcgcgaggacgagcgtccatcccgcagccgccaaatccgagccaaatccgccccaaattcgtcgcctcccttcggcaccgagaggggaacgctcttcaatctcatccatcgccgcctccctttccttcaacggtgccggagatggagtctgcgccaaatccgccattcaatcttcgccgtctcccttccttacgccgcgaggtgaacgggatcccctaccatcgagaaacccatacccatcctccatacacgccaccataaaccatatatatcaaggccaccaaactggagttcctctccttgctgcaaatcctccacgcgtttgtaagctctgggagtgaatcaagtgcaacaaggattgcgagctgctggtgggtactggacggcgcaacaaggcactggtcgacgcaacaagtgacgcccagactggagttcctctccttccaagccaggattgtggtcgcgcaacaaggcactggtcggcgctactaatctggtatgggaatttccctcacgccctgcattcttctgaaagtctgttattagtcccagaacacaccacatgaatacacaattttctgtccattttcttagtcactctcgaggattcttaaattactgctatagaaggtatgtgtttaacagatatgaagtgttgttctgaaagagcatggaacaacaaagaaaaagaaaaataaaaaaagaaagcacaaagtctgaacttatgaacttctgaa

SEQ ID NO: 129942 - DNA, 596 bp, Zea Mays
atgagatgggctaaacctttccctgaatctagctaacctgctgcggttgccttgtaaccttgctttgctgatttttatttttactttgacatttcttttgcaatttctgctcattcaaggatgttgtgtctcttttgcaggttgtcaagtattcttggtggctatgtattgcaacaataatttaaattgatcattctggtgagttttggtgtgctcttggccttttgtcagggtggtactgtgtgtctgtgcatttaggtgagatttgctaagttgcaagtatgtcaacttgagtaggaaaatttcaattaaaagtatctgagaactggtaggaaattcgtggctgaaagacatgtacgactacctagcctcttcaacataatcttagttacagttcggtaacctgtgaacctactggtaaagataaacatgtgcttgtttaagaaccattgtattttcttctattgattttcatgatcaattgctgggttatagattaaattccatgatcaattccatgctaagttgcaatttctattgattttcatgatcaattgtcttctattgatcagcagtgctgggcggggttgacagag

SEQ ID NO: 129943 - DNA, 433 bp, Zea Mays
gtttggtatattatgtttttccacgaatgaatttgttacgaaggaataagatgctccagaatcaaataaaactgatgcaggtatggagttaataagaaacataccatacaccacgtcggcatcctcaagaactgattctgctgtcacatggttgactcttcctctactctggttctgcagagtcttgttctatgtagatccacgagtaggggtgttctggtcattcctctggttgttgttcttctggggtgtctgtgggttacgtctggggcagttgttggcatagtggccaagttcgccacacttgaaacaaccattcggttgaactagagtagttgcattgtttttcttggccgatgtgttcactgtgcttccctgacgattctgctgttgcccactagacctttggccggtctaagtgttgcttctctgc

SEQ ID NO: 129944 - DNA, 490 bp, Zea Mays
tgccttccactcccccactagtgtatcctcccccatgctcttactgccaccaccacctccaccctttggtatcgtcacctcagtcaccccaaacttgatgtgatgtcctagctctcctgtcactcccatatctcttgtagtcaaggttcctctaggcacctctgccatgcctaccagctcagtcgtcaatctcgtcttcctttttccacttccacgtccagggctactcaagcctttgatcttgttcattgtgatctctggacctcccttatccttagtctttctggttacaaatactacctagtcattctagatgatttttctcattttttagactttcctgcttcggttgaagtccgacacgttcaccaccctcacccacttcttttcctaggtctccacccagttccgtcgcccggttcgtgccctccagtgtgacaatggtcgcgagttcaaaaactccgcctctcgctccttcctctcccatggc

SEQ ID NO: 129945 - DNA, 712 bp, Zea Mays
ttatttgcttgtttctgtcgcgtagactgctcgcggtgcggccgtgctgctggtgcactgtgcttcgttcgtcgcgttcagggaatttggggacgggagaacacctgcatcacgtgtttgactcgttgcctgtgctagtcgccacgttttctgttggattcagcttagtacgtgattttggagctcgtgccggatggttgacttgtgctttggcctttcggcttttggcagcgcgaccgagctttttggaagagtgagagaccgttttcctagttctgttgctatgaattatacgcaaagtggacagtatatacggcatacatacatgtttacgaaattctataagtaaggaatgggctatttcatacaaataattgagcctgcaggctgcagccatgatgaatatgttatttactgtcgtaatgttagctgaattttggtggtaacaaatggagctaccatgctaccttatctgcctttggagtgggtctatgcttattgctcgggcacacttgtgacttgtggaagaacataatcacagaaccctgtcggaatacatttcagaatgaataggtcaatggagtaagctttctagctgctacctgtatgaaattagatcaaacagaggacctgtcatgaagagtgatggtcccctgttatctcatgtactatattgcttgatgctgacgataggatgtaaattacttcaacc

SEQ ID NO: 129946 - DNA, 389 bp, Zea Mays
caatgattgaaaatggcgtagcggcgaaacccatttttatgatggcatttgggcgaaacccgtatttgataatggcgaatgggcaaataactccactatcatgcatagcagcaattatcttactccttagagcagaattattagcaatccagatttgattccctttcttaatcaaaccttggttcaaagaaaaaccttgttcatttggactatggacacttaattgagccaacatatcctgggctgcctgatccgtgacataggaattgataacttcttgaatccaaactgatgtcacttctgaaacagactgcagagccatcacatgacccactctggacaaagcatcagcagctaaattctctttgccttttctatacacaattctg

SEQ ID NO: 129947 - DNA, 773 bp, Zea Mays
aaaattaagtagaccgtttaagacgaaggtcgtgatttcaatacaagaataagcattctcgaaaaagaaacgctccctaatatttggtagttcaaaaggctcaacatatgacttgatctcaataacaaccactcgcgcctcgaaatccttctatgttttagcagtggagacttttcaccacttggacacaaccttcaccttctcttgttttctcttattccctccaccctaacttatacgagggtagtcagggaagacaaaccatatggcacaaaaaacgtggttcatatatatgacatttcttcgatccttcgttgttgtggtcagtgcttcgtcctccttgtttttgaagtttccaagaacttcattgcatttgttctcaacaacctcgagccatttgtagcatggctccacaaaaacagtctaaaacttatatgtatatctcaatctaataaggtcaggtttattttccgaaggaatgatatcctttagctctggcatagaccattcagccttcaggggccaagtattgaatgtcaaatgttcctagatgagatctcgactcccaacatgaatataggcagtgttgaaggtagccagagcttcaaaatccatatagcaaagtggcctcttgagcctgaaggcaagcttaataggcttctgaattaaacctttcacatcctcctttttctttcaagtcgaccttcacacagaaccattccttcgttactgctttggccatttgctacgatagacaagagctagaaatcgag

SEQ ID NO: 129948 - DNA, 766 bp, Zea Mays
gccctagctgcccgggcggcattcgtatagacagccaaccagccccctagggtcttgcttgggctcgtatttgtcgacgttggagactttgaagttaggaggccattagatcgctcggagctgaggggtgagcgcagagaccctgcatgtttccctttcctcctatcgatgatcatgtcgccggttctggggaggtgagcgagtctcatgtcacctcgaccatcccaggaccgggatgttggtggaggctgtcgatgactcagtcctggttgcacggctgcatgccggtgcactatgatcccggtcgtattcctctcgaagtcttatctcattttcatgtcggaaatcgcgtggagtgctgatgttgcttcgcgtctcgtcggctgttgatggcatgatgcagatggttcagtgggtgggcgagaggtaaaagatgattagccgcctgagtgagtagtcaccgatagccttccgcgtatggggtttgcgttaggtcgttggctatttgcgccaggacccctccaatctcgctcggcgtgtttagtgctcgagcgaagtcagggtataggttccgggtgacgagtgggttctctcgctagagcctagcatcttgttctgcttgctcccgctcgcgttcctgagcttggcaatgatcgcggcggcgggagttgcgccgttctgggagtgttctttcttcaggggtctcccccatttccgaagctttgtcccgagagatgggctgagccggatctctctcttcggcctc

SEQ ID NO: 129949 - DNA, 308 bp, Zea Mays
tggatggcgtaggagtgactagagcgggcgaagtgggtggtggagtggtagcagtgacgggagtggtaggtgtggaggagcgaggccgagaggcaaggcgacgaactcggtaagcaatctgatcggaaggaatctgtagctaagctcctcgctctgcctactcaatgactgtcgctgctgctagagctgctcaggttgctctatctagacgccgcttcttgtggccttcctgctgctctaagtaaaccgtcttccccttgacctgcctaaaggggcgaggagggtcctcgtcatctcctccccctagc

SEQ ID NO: 129950 - DNA, 490 bp, Zea Mays
gccttcgagtatccacggttttctcaggctctgggataattgcaacagccattgtttcagcaggaaccgagtcagaagaatccacaaccaacatgtctagcatagcgcttatctctgcatcacccggactcataggcatctcaaagtgaacttgcctctcatcgttgggaagatctccaagtgaagcaaccagaacctcaacttcttcaagagagggtcgaactctaagacccataccactgtcactagcaggaggatttgacacaaaatcgaaaaaggacttggaaggcggcagattccaagcagaatatgcaacaggagcaccaatgtttgataccttacctctaaggatcatttccagtcgactcaccaaatccacagcaggaatcctcttgttagtaacccgggttgaatcggtgacaccactatacaaataagcttggtatgctctatccttcagcggctgaatattcttaaaaacaaagtctgc

SEQ ID NO: 129951 - DNA, 851 bp, Zea Mays
gcatgtttttgcgcccgcaccggagcaacaagagaacctcgcccgccataagcaaatcacgccgaagtcgcgtccctgcatcctgacgaagttctcggcatcgtcgataggcgggagcaacattatcgcaccttgaaacgctcaccggtgtggggatggatcacgaatccacccctcatcgtggtcgggggttctgcgcgtctaccgccggtgagattcaactccttcccttgatcttccaccgtcaagttgggtctgtgtcaacccaccccgtagaccagaatcgcttgactggatcttgcagccgtcgtttcccgctcatccctgtggatgggaacctgtagatgtccgctcgagtataggaagatccgatcgattcgccatgcatcgagttatgtttgggacctgacagaatcaagaatagtcgcggtttgggctgaattgtcggtctctgcgaggttcaccatcgcagggcattgcgtcgctgggtctggtgttggctggggaagacaacggtctggccttcgatccgtagatggatagttcagatctggtcaaagatacctcttcgatgcctgtgatcctgggcgtcaaatcgggcaatggacggtgtggtgtagatcgcgtctcattaaaactgggtcattgatcgtcgatctgatggccgcgactgcgtaccggttcggtctaatacttgatttaatctggagcgtccggagtcgatcggacggatctgatcaaccgacaccctttcggtcgtgccattttgcgtaagagcccctgagtttttataaaataaacccctcatccacatcagttagaaagtaattgcagctgagtcctaatattta

SEQ ID NO: 129952 - DNA, 596 bp, Zea Mays
gggcagagaagcggcggtgcagggaattgagaataagaggatgagtcagttgttgttcgcctgtgacctccgactgaaggacgtctgccctttatagacgggtcgccataatcccttgattcgatctactaaattctaggaactggcccctggaatatctctacatgcaactgttcggagatctcgcacgttgtccattactcctagttgatgtgacaatctaggtgtaatatttgataaccaaataaataaaaggcaaaaattaaagtgccatttaggatggcagggcagagaagcggcggtgcagggaattgagaagaagaggatgagtcggttgctgttcgcctgtgacctacgactgaaggacgtctgcactttatagacgggccgccgcaaccccttgattcgatctgctaaattctaggaatcgtcccctagaatatctctacgtgcaagcgtccggagatctcacatttaacgtgtgtgcccattactcctagttaacgtggcagtctaggtgtgatatttgataaccaaataaacaaaatataaaaattaaatttcgtttagaaaagcgagcgagagcacgcgcatgg

SEQ ID NO: 129953 - DNA, 356 bp, Zea Mays
ctcgtatccttctcaagctagacatttcaaaggctttcgactcggtatcgtgggccttccttatcgaggtcttgaaaaaacttggttttggacagatctggtgtgatataataagcaggctgttagctacctcttctaccaagattttactgaatggtctacccggggaatgtattgggcatcaacgaggtctgaggcagagtgatcctctatcacctatgttgtttattcttgtaatggatgtcttgaatcagctcgtgcagcgagcctctgaggaagggcttcttcaacctctctctacaaggaatatgcagcactatatctcgctgtacgcagatgacgcagtgttatttcta

SEQ ID NO: 129954 - DNA, 1081 bp, Zea Mays
tgtcaatttgctaactggtggtactgagaaaagcaattgaaacatttaccgttaacaaaacctgaaaattttattgctcactctgtcagcctcgctctgtggttattggcttcactaaactaactttgaatgttctgtccctatcctccaccaatggcggggtctaactatcgatgagcccctctcactggcttccccctcttgaccttggtgagcgcagtggtcagcagcaatgggaggccactccatgaggcttggtcggtggctggtgtctagaaaagacacccttcttccacggcgtgatgtgatgtccgttgagcatttcggtcgagattgggcagcggcgcacctgcaattgaaagatgttcaaccaatttctctttccccttctaagcaacagtacacctttgcttgaaaaactctctgcgacttcaatttttggttccgcttctgcgcctagaaactcttgcctaggatcttttgtattggactaggttgatttcctctagagctgatcttgtagaagttgatctaggtacatgttcgagatttacgttggcctaggatggagtggtcgaatcaagtcgaacctgagctggcacagcaactgccgcctcacccgcacaactgaccttggcgcatggtgacatcggattcttccgcctagtaaagatgttgacggcaaccggagagaagcaagggggtcgacgggagaggcctgctgatgtctaggttattaggagatgcttgacttgatctgtgggtggggcttggtggattgtggctgggattgtgggaggggaggaggggtcacggggtgattcggtgggattttgatttgcgatggggcagaagagttgcacgagtgatctgccattctagatccgccttcgaatcgataggtcggaaggtggatttgtcaacgatttattagaatttcgtttctatgaacttatggtaactatataaattctaacagttccacgaggacaagagtaaggtcctgtttagaacctccagatcgaactaatagttagttactaaaaattagttgttggattccgaacactctcaattaata

SEQ ID NO: 129955 - DNA, 274 bp, Zea Mays
gtccaggaattttcaatagattttcccaagtagtcacatccatatagtatatgcaatgaatgtatcaagacagaaagaaagatatcgacggagatcggaggaaagccaaatatagctactgaagtacaagtctaatcaacagaagcattgaagcacgaaacgaaatgaagaccagctaagaaccatctaccagacgtccaatctgtcgccgatcaaataaatttcaaacctaacaggacatgggtagatctcgctgctgatttctaaagcagga

SEQ ID NO: 129956 - DNA, 322 bp, Zea Mays
acgacagttcgtgaatattgcaaaaacatcttgcatttggctctaacccctggctcttcatggcccaaataaaaatccccattctgatgatagcctccggggtgagttgatgaaggaatatttcaaaagtcttcagaacttcaactaaaaatttatctaaagggaaccgaagtcccgctttcatgaagcttctgtaaacgactacttcgttagctttgggcaaaggggcattgctatttcccccagccctcacaatagaaatatcgcggaagtaccttcccttcattgcatcaatttgactttgtttgatggttgatctccc

SEQ ID NO: 129957 - DNA, 521 bp, Zea Mays
cggccgaggacgcgtccatcgccgccgctgccacggccaccctgctgtcctcgccggtgccatcgtcatcgcgcagcagcggcggggaggccggccaccacgtgaggatggcgcactgccgcctcctgcagtggcgcttcgcgaacgctaacgcggacgccgtccgcaagaggaagacgggcagcgccgagctggagttgatgggcacgtgggcaagcgtgtcggagatgagagggaaggtggcgcggaagcgagtgcagcttgagaaggagaagcagaagattaaactagacaccgtgctctatttccaggttcagttaatacccaattgaattttgcgattttgtataccatttaaaaagactccgcattgatacttctgtttctgagacgacgatgagatggtcatgaatacgcctgcagataaaagatttggagagctgggggcagcagctgcagaccgcacatgactccgccctggcctcaacagtgggttgcgcccgagcagccgtttgcaggct

SEQ ID NO: 129958 - DNA, 521 bp, Zea Mays
gtataatctagtcataccaatctaatctagatcccatctaatctaatatgatctaatctaatgtgagttactcaaacttgttagttggtgcaaaaaaaagaaaagattagaccctactcctataaacatgtttaacctaaattggtaccttaagaacaactcgatcattcacaactacctaacctacctgatatattgctttatctacctatcccaccctaaaagcacatgtaaaccccgttggacccatcttataattctcgaccatctacctgtctaaaccgtctaaatcctagtggagacaccaagatcgaagatgatcgacctcatcaaatcgaggaaggataagattcaagccagatcttcaaaaggaatcaagatccacaatcttggatagaacctttcctcaccctaccctttcttaaccaaacctatctatgctctaaagacatcttctaccctacataataaagtggacatacatatatatacccatgctctcctaatcactcactaatgaa

SEQ ID NO: 129959 - DNA, 559 bp, Zea Mays
cttcatcatcttcatcaacagcacgaatagtacacccattgggatcaacttcagcaggatcacacccattggggtcagcagcagtcgggtcacacccattggggtcagcttcagcaaattcaggcactggcacttccttagcaataggaacagaaggaccggcatcctgatccaagctagacactcgacgaagacgtctcttcttctttttctgcccctcaacaggagaagtgggttgatcggctcggcgagaacgcttcgggcgaacactgtcagacctctgagcatccaaagctttgccggccttagggatggacgccaccaccagtgtttcagcaggagcggcatcagaagaatcctcagctaacatatccagcatggcacttatctctgcatcacttggattcaaaggcacctcaaaatgaacctgcctctcgtcgtcaggaatttctccgagtgaggcaaccaaagcactaacttcttcgggagagggtcgcactctaaggcccaaaccgctatcaccagcaggaggatttgacacgaaactggtaaaggcttg

SEQ ID NO: 129960 - DNA, 725 bp, Zea Mays
gacttgaccctggtcttcgacaggctgcgcgcaacccgcacaaagctgaacccggacaagtgcgtctttggtgtctctgcagggaagttgctggggttcctggtttcacaccgatgcattgaagcaaacctagagaagatcaaggcaattgaggcaatgaggcctccggcccgcatcaaggacgtctagaagcttgcggggtccctagccgcttcatctcaagactggctgagagggcactgcctttcttcaagctgatgcagaagtccggtccattctcttggacctaagaggccgaacgagcctttcaagtggtaaaacagcaccttgtgtccctgccaatactagtagctccggagccgggggagccgttgtacttgtacattgcagcggcttccgaggcggtgagcatggtgctggtcgccgagagggcgacacaacaaccccaggggagtcaacaggttcccccagaagaaggtggtgatccgaccaccacgttgttgacggaaggccaggaggttgaggactcaggatcaaccacaggggtccgaaccatccagaagccggtctactacgtcagcgaggtcctccgtgaggcaaaggccaagtaccttgagacgcacaaacttctctatgctgtacttgtcgcgtttaggaagttgcgccactatttttaggcacacagagttgtggtggtgatcgccttcccgttaaaggccattctc

SEQ ID NO: 129961 - DNA, 597 bp, Zea Mays
atactaaccctatccttcgtgtttctaaattttctgcacaaacaaatttcatcataacttacaagtgacagagacgatacttactaatccattattcacaacactaatatagttacacgttacataccagttgactaacatattcttcacataactcacaattcaaaccaatcttcaccatactaacaattaatcgcaaacaacatatacaacacccaccggctacttcatttgaaatactataattatcgatcatgccactaatacaaggcacttcggcgcacacactcacccactgatacatcctttgcataaactggtgtttcaaaccctgctcatcacatcaaaacacaagacaacgcgtatgtttctctgaaccacatacacattcacgccactgcatgcaatttgagaatttttgtcaaacacgtaatacacatcacaatataacatctaacaagagcctgagaaacacaaagaacatcccaccctttttcacttaccttcttttcccacaagatcgtccgtactcgcacaagcactgcctcggctaggtgtgggctcgcagggagacacgacgatgccacaaggcgacac

SEQ ID NO: 129962 - DNA, 280 bp, Zea Mays
gtggtagcggggcccatgcagcttgtgagtggcttgccgaagcgactgatgttgtggactattggttgcccacatactcggggatgtatggggaatagcatgaagcagtatgcaggacctgcttcagttgattctgtcatgctttggcttcagttatttccttttatttctagatcataacttggcacgtccttgttgtatgtcctttgtcttcttcacataataaacaaaacaaccttcttggttgggagctgaaccttccaccgaagcttcttcctcc

SEQ ID NO: 129963 - DNA, 503 bp, Zea Mays
cgaaatagtttagtttgctggggaagaggtgattccagaaccaaaagatgatgaagtcgtagtcttcaaaagcttcttcagagcaggacttcggtctcccctatacgagatgattggtgaggttctaaagaagtttgagatttaccttcatcaactcacccccaatgccatagttagacttagtgtgtacatatgggctctctgaagccaagggaaatgtgccaacactgaagggttttatcgggtgcacgaagtccactatcagacaaaagctaaagatgacgggctacacaagaactttggatgctacaactttgcataccgaaaggataccaaggctcatgtgattggttatcgcactaagtgtccgactggctggacgaatgaatggttttacgtgaaagctgacgagaagaagagggagaagcttatgagtatggtgatgagtcccttgagactgagctttggcatgacacgacctctgtgcaatatgcagctcggct

SEQ ID NO: 129964 - DNA, 410 bp, Zea Mays
gcatcttggttttggccgcaagtggtgtaatatggtcagtctgctgttgtccacatccactactagaattctggtcaatggtgaaccgggcagttctatactccatcatcgaggccttcgccatagggatcccttgtcacctatgcttttcatcctagtcatggaagttttgaactctatggtaaattttgcaactcaggagcatctcttacagccaatcgcatatccacaggccatacatcgcatttccgtatatgctgatgatgttgtgttgttcctctggcccctaagatcagatctctctttggtcacatgtctccttgatatcttcgggcaatctactggtctcaggacaaacatcgctaagagttcagtcactccgattcagtgtggggaggaagaattggctg

SEQ ID NO: 129965 - DNA, 649 bp, Zea Mays
gtagaaatcgtccagatctagggtttaaggtaacgccaacacacattcgatgcttgtaggcttcattgaccactcggtattgtcttgataattgctattgacagtgacaaaatttgattgtggtacaagctttgttgttgtacgaatggatgtgtattcacaaatacttggcgactggttttcacacactaaatcatcatcactaggttttgtcttcataattgatgttcacattaagcaaatttgattctgctagaagctatgttgttctacgaaacgttgtgtattcacaatgagttggcgaatggttttcacacactaaatgatgaccactaggttctgtcttcattatccaatttgacagtcacaacatttcattgcgatgtgtattgacaaatacatggcgactggtcttcataaccattttgacacactcaatcatcacaaatacacctgttgttttccactacattatacagtaatgttcatcattatttgaactgcctattggcaatagtagctggtatggactatatttaccattataatttatgaactaggccacagtatacataaaattttgacgtacatatattaacagaaccatatgttttatgtagaccatggattcggagaacgcaaagctccg

SEQ ID NO: 129966 - DNA, 313 bp, Zea Mays
gggtagggtcaacgctgcatgcagccatgcacaccgtcgccaaacgcccaccttaattcgctctcgtctcctgacgagcttggtgcgcgggtcaaaaaggctagctgggacgtagcgcacccgctcaaatctctgaatctctcgaccagtgatcctttccgatctatccgccttcccttcccgtacgtcgtcgaggccacgccacaagcgaccgcgctagcctcctcatcctcgcgcccgctcctctctgcgccgttgactgccacgatgccgaacgacgcgccgtcgccgcccatccacagcgcgaaggacg

SEQ ID NO: 129967 - DNA, 526 bp, Zea Mays
aacggagaagtggagagggaagaagagtacacggcttcatttgtatccagctcgggatggcggccaggtcgacccacggccgcgaatttcgcggcgaagcaaccgcgccagccagattctgcggcggaagggaggaacagaaggcgccgagacaatgaccaacgggcccatgttgtcagtgactcatggagaacgtccagcgcgcgcgtgaaggtaatgggccgcgcggaggtaaagaaatctggggccaaaagtgatgtagccggcccagtaagcgagtttgagattttcctttttcttatttctttttattttgccaatttctagttttctaatgaatttgaattagtgatttgaacttcataccttcatgtggctaattaaaccttattatgaatattactatctccttttgagataatcacttatttattggcataattattggatatcctccattctttaactctactattctcattttatttgatgccctaatttgaattcggaactagacttacctcct

SEQ ID NO: 129968 - DNA, 350 bp, Zea Mays
atttatcaatttcaataactaattatttctgagatggaggacaataactactgtgaacccctaatgagtcaacaccgatgagccatctcctcaacgactggaccacattatgaggacacctttgttacctatgtatggatacaagaaggggctcactaatctccagcagcggctacttagtaccctagtgttccaatcttagtttaccatactagatctcaacattctagtgtcccaatcttagttcaacatattagatctgatcatttaagagatggagaacaccatttcaaagggcatcaagtctcgtcaccagctttcatatgcccacatgatctcttatcgatgag

SEQ ID NO: 129969 - DNA, 443 bp, Zea Mays
gaagagcttcaatcttacattgaagggaatcgctgacaggaaggctaatcaagaattcgccaaagttagacaggagggcttcgcagtgatcaacatgggtggcagcaccaaacgccaataagcaggaaacagctagtgtagactccagtgtggtaaactctctagtgtaaagtgctacgtgatgtaagcagttattactgcactagtcgtatggaccgaatagtcatgggacatgtcccttcgcacgttctccactttcgcacgtcttcgcatctgccttttcacttgtatatatacgagaatgcaataaagaaagtgctctcggttcctattttcactttcaccagttttactttctcacacgtcatcagcacttgctttcacaaaaagagcaaaggccacagaagacaactccaccggaggcaagaagttcttcatcaaag

SEQ ID NO: 129970 - DNA, 757 bp, Zea Mays
aggagggcggtgctactcgttttagacaataccttacatcacgtggacgaaatgtgcaaggttgtcgcaacgttccgtcggacgtttgcaattactttcgacgggagcttgacaagggacaatatagaagggaaagcaagaatactggaggaggtatgaaagttagcattggcgggttcacctcaatgatgacgatgttgagttgcaggtcgcattacatgctttaagagatgaggaggaacttaggaggcatgcttgcgcgagtagtggcacgtatgagagggtgatggctcctcccatgggggtgttcatggcatgtttggaagaacaccttttaggaaggagaaaccacgcatggtccgaccaaggattgataaggcctcgttttcgaaggcagtaaggaatgacgtccatttcattggtaagcctattggacccccgagtctggtagtgatagacaaggttcatcttcaccccttcttccctatatcaattatccaattggtgaagtgactcagtaacccatgaggtgggtgtatcaatgggaggagcctgagtactaaatattaatggactcatggagtacgacttctgcgtggaccagacagacttggacggagtacaaaggaatgttgatgtgtgagcaaggtattatattattctcatcggaagggtataatgtgacatatgatcaatggaatgcttacccgtgggcatgatgttcaccggagggtgtattgtatctttgatgctattc

SEQ ID NO: 129971 - DNA, 478 bp, Zea Mays
cgacgtctctagctcagagacggggcgggggtggaggcgccaggaagggttgggatcgggcagcgttgcgtcaagaggaggcgacagttgaaaccggcatcgaggcaaactggtttaggtggcatcgaaaagattagggtcgaagtgatagatgcgaggactgggttggagaggatctgacgaggaggctcatgacaagattgttttaggcagctaacaactgggttggagaggatccgacgaggaggctcatgacatgattgttttagatagctaattgttaactggttttagctaggttgaggtagctaaggactaatgattatttaaagggtatagctaaaaattagttggtcaatcagttgattcattctaaatttctcagctaattttagtcgctagctatttgtttttttgggtttagaatatgactatatcatatcaaaacattgatttttttctccacttaacaataaat

SEQ ID NO: 129972 - DNA, 370 bp, Zea Mays
cggccatggtagggagcggtccacggtggaggaggaggtccggtgagcgattccaggggcccggctaaccaatcgcgcccggtgaggccttgaacgtcttccggggaaccgagtgaagctccacgagtacttttcgaggcccggacggtggtgttcaagtgggaccacaatggcggcgacactccctcccttccttgccaacagtggactatggcgcttgggcaacagatgtgggcgtaggcggatgagaagaggggtcacgatggtcgagcttttatggcccgaggaggagaggtcccgaccgacatattcccccgcgattcccgacggcgggtttagcggcgtttgttaggtccatgcggccgttgat

SEQ ID NO: 129973 - DNA, 1284 bp, Zea Mays
gagggagccgcggctgcgaaacattacttccatttcctgccgtgtctagcctgtttggcaagaaaaaccgtcttaatcgtatcgtttttttccagtttgcggttagaccattagaggattcctgcactatgtccttttgtttaaccaaattttttcggcaattgaggtagtgcatttcgcctctctttctaatgttcaggaagactgcttcttgatagaccaagatctatgcctcttagctgttgggtttccttgtgttccgttaggtgttcattggctgagtttctgtttagtaaaattggttttgggttgctttattgttcttctaggaatgactatgatctcgcccagtttgttcagtaataatttggttgccagcaaaactcacgccttctccttttccataggaatatggagaatacaggtgtgccccagtggaagcagctgctggcttcctttgggccaattgcgtaaccttggcatttgggaatagagataagcgaagcagcagcatgaatgtatgctccatcaggtgctgttttgatcttcccgtgttatggtctcccctgatgcctctatggagcggatccacaagtccatatagtgtgtactttgactgtatactgaatattcttgcaaaagaaagccttggtttctttgaaaagcaataaattatagcacaaatgaatcaacatattctagtgaaaatcatttgtctggctttgtgctgagagctttaacgatgaagtgggaaatcttttcgatatttggatatgtaaaataggatcatattatacccaaattgtgggacgttattctcaagtaaatgtgatttccaacttgtttgctgtttgtagtggtgatttgtgattctcatcattccttctcgttctgttctgtttttttgttctttgttttgtttgctgtgttgctttgcttttgcctaggtgcataattgtctacttcattccatgctacggtttccattaaagtttcattggaaattttcttattgtgaatgcttcatttgcaggtcataattatggttcctcctcaatggctactaggtgcagtagggattcatatgatgacagtgttaacaactgcacacaagttactgcttcgaaggtacagaaatgttttgctatgccatctagcatttcttatgtcttggaagcaccattgaatcatcgataattcaccttctctaatgcattttctattacgcctgttcaggatgtttcttctagggaagcttcaaatgtcttcacatggttaggagca

SEQ ID NO: 129974 - DNA, 288 bp, Zea Mays
gaagttgttgcatgaaccaaatccaactatcttttgtctctgactcgaagaaaccaaaagccactggaaacatccaattatgaccatcaacacttgtagctgagagaaggtgaccattccaacgaccatttagagctatggaatccacacttaagtagggcctacaaccttcacgaaaaccttgaagacaagggccaaaagcacaaaagaatctgctgaaatataattttccatcttcaactactagatcaaactcaatcactgagtctggcataacctccaaaacag

SEQ ID NO: 129975 - DNA, 403 bp, Zea Mays
acttaacagagtgtccgtgagagagagagagaaacacacacatacacaaccagacaagagaaacagagaggaaggatggtgagctgatgatgtctgtctgtctgtctccaccagtaacagtatacatgcaattttgccagctacgttaagggccagcccagtccagtccaatgcacgtagatgcagacggccggctggccgggtttgtcccctccatctccgcatcgttttcctttctccccaacttgcattcgcccgttcacgcggtgttgtgctacggatgatgaattcatggcagatccaatcgcctcctcccctactgaaaccggcgccgaaccattccttccggccgtggctgacgagtggtcccctacaccaccccctgtatctgaatggcaaacac

SEQ ID NO: 129976 - DNA, 632 bp, Zea Mays
gtggctagatgctacccagagtagtaaacaaacatccacgccattatccttgtggaggttgcttctgtgctcgtcgtgtttcttgagcccgtgcggcttggctatatatgacagtgtctctcggccctcctttttttttttgtctttgattcgtgtttggtagagcacggcgtgcgttgcagagcctaaactaaacactaggcgacaaaagaaccgcgtcagtgtcagagacttttgtatagtcttggctatgcgagctgcctctattcaactccaacagggaacaggcttaccaaactcgcttacaacaagtactcatcagaagcaaggggcaacgccctagctagttggctctttagatgtactctctcactcactcatgcaattttactataaaccatgtgtcagtgaaacaaaaatctgaaaataagccagcagctgattgcttaatataatccactgaaagcaacgatgtataggcgtacgtgtagccctgcgagccacgcatgttgccaccagaccacacagattgctgtcatgattccgcaaacattaggagggggggccccgatcgctgctgcctccactccactcgccgctccaaccctacaaagatttcggcctctttgccg

SEQ ID NO: 129977 - DNA, 1514 bp, Zea Mays
ggataggctttaggccatccaaatttttttctctagtacaatttcgaatacccattctctaaatcctgggcccgcccctgcggacaatcgtttcagggttggggttcagaaccggtctagggcgctgagacttcgccatgaattgagccatcccatcggcttgatgttcctgctgtcgaccggtgccttcccctttttctggcccaactcaatgtgttatggcttgagctagagattgctagctagtcaccgctcggaagagggggaacaggtccatcggtcagtcggaggcgatcgcgtctcgaaactcacgatgttcgttcgaggcaaaacagaggtcattatgcctattgcctctaacctcgtgtatcctggctaattgtactgtatcgccgatagggccgatggtgaccagggactggtcgcactacctgagggtcggcgagcggctggtcctagcaaggcaaaaggtcccgctccctatggccttttgttctccttaggtttgagccccctcccggatggtgtcgttatgcgtaagaattctctgagtaacttgtagtcctcatagccatgtcagactgaatgctgatggttcggacattcggcttcaaggagcttttcgaagtgatcaggggttttctcagctggaggccttcctcacgtccagcttatcgtagccgccgatacattggctcattttcatcaccctattctcctcttcatgttgaggtgattgtcgacatcttcatctggacccctatcacgcccagtcttccgtttgcgactaccagtggtggctctctctacgtcctctcttgatgcatggcccgtcgcaatgtcgaaaagcttctttggcgtttgtggggtcttccgtcccagcttatgcaccgaggttttgtcggtggctccctaggtgaaggcgttgataacgttggtgtccgtgaggttgggcaactggttgcattatcgcgaaaagtgtcagatatagtccctcggtgcctcgtccgactactgccaacaatcgttagggtcccatgggtttctcgggcgtacgtacgtgccctggaaatttctaagaaaaatctcttctaggtctacccagccctagatgcacccagggtcgagggtattgagccaggtcaacgccgaacctactaacaatagggggaggttctggattataaaaccatcgcaattcgctccccgcgcatgacacacaagccgatagtcctctagctagggaccggggttcgattccctagtgtacttcgcgatagtgagggcctgtagtgtggtcgtgcgggtgcccgcaggatatggcaacagaaagcctatagccatgacggctgggggcttgggtgtcgatcctcgtcagagtcaaaccggcctcgctgcgccggctgtaccgatggtcatcgtttggccccttccatacctccccgacactccctgggtcaggcgtgctctatgctccctcgcttattttcagttccaacggggtgggatccgct

SEQ ID NO: 129978 - DNA, 285 bp, Zea Mays
ggtctacgtaacaagataatattcagatcataaaggttgcaagctactaaatcctgacgaccagtagcgataaggcatatgcataatctgagcatgttctcgaacattcgcatggcactacggaagctgtccgcggccgcgtaggcgctcagcatggctctccaagcgacgtcattcatgtgggacattttgtcgaacagagcgcgtgcctggtccatgtgctcggccttggcgcaggccgtgaggagcgatgttaaggacgacgcatcgaccgcacaatagaca

SEQ ID NO: 129979 - DNA, 385 bp, Zea Mays
ggcaaataagtacttatcgacgaagcaaaaataacataccagtgcagagggaacttgtccataccataatgtggttctggtggatacatatatgacaaaatcgaatatgacagtggaggggtccatacccatacatgatcgatggtggtacttcgtgtggtagtctctaacccggttgccattgccatgcatagggttatagattgggccttgtccaaccgaatagttagaagaactggagctacttgagctatgaattccattctggacgagaaatgaaattgaacgacgtcggctgcttattgtctcctgttgtgaatgagatacatcatgctaagaatcttgtgtggcatgggtgaaccaacttcctccagtggacctccaa

SEQ ID NO: 129980 - DNA, 620 bp, Zea Mays
ggacgaggaagatggtcaccggtggacttgcggcggagcgcgaatctctttggcgagttgtcgaggtgcggtccttcacctcccgcccagcaccccgccgtcgagcgaaaaggacgagaatggcaacccgaagactccctgtcgactctcccttcacagcaggaggctccttcaactccacgacgtctagttcatggctcctcccgtcggttattagcggaataggagaagagaagcgcactgctttatgggcgagataatggccgacttggccgggtgaggtgggcgtatttgcggcaagctgcgccgccgatcccgcgtggcttgttacgatcccgcgattcttccgggaagacgacactgaccaggtagtcccacgcatcagagactggccgatcgtcgcgtgcgcccggtgttgaggctggtgcgtggggcccatgtggcagctggtaaaggcaggagtgggctggcggtcaactggctccgtgcgagagggagtgaatggccgagcgggcccaccagacagtgccaaaccgcgctagctatagttgggccacacgtgtatggtgcggggacgaattttgggccgcctgggtaggaaataggctcgagtctgggtt

SEQ ID NO: 129981 - DNA, 493 bp, Zea Mays
gatgtgttcaagggaatttggcacaactttgatatttggatctcctagctttgtgttttgaaaaacagagaacgcagatgatctttgggaagaggtctgaaattcagaaattcagaaatctgaatttctccaagggttcatagatcaagggctgatttggggatttatttgagttattttggctaagccttctcaatctttcttgttgcttaataaacatacttaaatttgtataattggctcaactaaaaattctaaacttctcattccctttttcttattttcttgaattttgctcatggggctcacttagggtttttaattagggttgcacattcttatcttttaaaggactcaattgttttgatcatgatacttttaagtatatacttggtgaattctttctcacttatattaatttgatgctcatgcttactttggctcacataaaataatgattcttgggttggtatttgagagaaaccctaggtga

SEQ ID NO: 129982 - DNA, 825 bp, Zea Mays
ctgaatggctggcaaaagtgcagtctgaagagcagaagtcagagcagactgcaaggatatgcgtcatgaattcccggtgctctgccctgtctaccaagagctgttgctgatgggtgttatggtggtcctaaatagtttggaacatagacaacatccgctcggacatttgttgttggatggctgcctaacgagcctcctcgcctgctaggtgagcctgctgctgagtgagagtctaaagtatggcagccaacgcagggtcaatcgctggaggagcagccggaggagcagcactagagccactagcctcatgatcatgggaacgaggtggcacaggaggtggtggcagaatccctagatcctcatcgtctgaagagatgtcagcagtggcaccctgatcctcaaactgacgaatagcatcatcctcatccttgaagtctagtgctggcggatctactaaagccggagcggtgtccttaggagctgggcggtagaatccgaactgatgtctggaggcatcaagagtggcctagaactgagggggactgatcagctgcgcgaagatgtggtagaggtagtgtgtatagggcagatgacgttgagctcatagtccatccaacaatgtgtcctcaatctcgtagatcaagaagtcgacaacatcgaactcagagtgggaaaccagtgctctgaggagccataactgaatatgagtggtggcctctctgtataccatcctcggtagcagggtgtgcctcatcaactcatagaggaacttctccactggggtgaagacagcaggagagcgtcgagatccatctatgaatggag

SEQ ID NO: 129983 - DNA, 636 bp, Zea Mays
gtccagcctaccggaatctgcactaggccacctcgagctctgccccgaggtgagacacccgttcccatgctcggttttcccaattatgcttcgttgttggccaatttcggctttgccggaggttggtcatggcggtccgccgcacccacgcggtggccgaccaaattggcccggtcgagtgcccctgtgccagtccctgaggttcccctcgctctgctaaagctatcccaggccctagcgcgcctcaaaccccctccccgcggctagaatccctcaccggagttaccacgacccactcggagcctttcccccgtcgttctcccctctctggccccggtcttgtggccacaaccccaccagtgagttcgccgtgccatccccttcgtctttggccagctctggcgaccccgaaaccgccgtagctcgcacccaccccaactccggtgacttcaccgccgcgagaaggagcggcgccgccgcagccgttaacccctccccggctttgatcttccccgtccaatctctatcgcacggcccagatcacgggacaccacttcacgcacgcacgccccacatccggacccgcctgtcagcgcctgtgccccctagcgctgggtccgaccagtcagcgcaccc

SEQ ID NO: 129984 - DNA, 564 bp, Zea Mays
cggtctggaagcctctggtagcggctacagaagaaaagagcacgcggaaggcagagtggaggaaataaacttggctttggacggctggatttggaatcctgtaggtcatcggacggcagaaaatttctaagacacgtggacacattcaatggccacggacgggccctgctttaatatagagaatatgattcactccatgttatcacatgaccttcttggttcatcaatctcaacatagcttgctcttcaccgttgctttatgtccattggtgccaaaccctttctcttattgcttcaccgccacgcggtctctcacacatgagactctgacttgcccttcacactagccgctcggcccatcgaagccaagacatatctcttgatcttctccatatagccacatgacaccatgtcatgtcttgaaatgcaatgaacttctttatcacactagttgagcatctcaatatcaccaagccacattaccaccatggctcaaataactcacaccagtgtacatgtggactaatcacctgcgtatctcaacataaacacttattagtccac

SEQ ID NO: 129985 - DNA, 394 bp, Zea Mays
tttttgcgctaggtcaccacataaaatttgtagacctgtcaaaagagaacaattttgcttaagagtgttagcaaggttgttatgaagaatttggagataattaaacctaaagtctggctgtcaggctgttaaagtctgaatttcagactgacagtgcaactgcagtgactttgggcatgaattcaagcaagattgagcaagaatttgcttaggattgctataacagtattgtagctggatcttagagctaaaactttgctaaagggtgatgatcatgttactgcacaaaatcgggagtaaacaaccctgtaaatcgctctatcaggtgactgaatgggctttcccatggtacagtatctgaagaagatcagattcccagctcagcttgccaccg

SEQ ID NO: 129986 - DNA, 529 bp, Zea Mays
catccgtgttcggcggtggctaccgatgacccaagcagaccctgtggacctcaagtatcacgtccggctctgcctggaggggattccccttcacgcttggaacgagagcatcgccaagcgtgtggtggcaagggcctgcgatctggactatgtcgagcttcagtcgctgaggaaggaggacatgcgtgccctctgtctctgggcctggacagaggacccgtcctgcattcctaaggtaacttggctaactatctcccgcaggttgtcgttggtttgagatggagctactccaccagctcgtcgctcctgctcccacttccgagtcatcgtccacctcgacctcgtcgaggatccaccggaaagtgacggtcgctgctccacccgcgagttcaggtgggcgttgggcgttgttgacggagagcacacaccacgggatcgccatgacctggctccggtcgccattgatggttgctgtggcgatgacgatgatgacgaagagcgtcgcggccgccgcagccgtaaagaggac

SEQ ID NO: 129987 - DNA, 390 bp, Zea Mays
gaacttctggcggcggccggcgcggccagcgcagatggagcactacagtgacggcgtgccccaggccatgttcgaggaggagttcgacgccgggtttccgtcggggaccacgccggaggcactccacgaacggtactggcgactgcgagggacggccactagcattcaggtgttcatcggtgacgtcgcctcgaagggcgagcgggtgcacgcgctgctggcgtggagggatggccgcgccacagtgatcgcgctcgttgtggtggccgcgctcaccgtcgtgacatacgcggtgccattcagggcgctggtgtctgtcaccggggtctacgtgatgaggcatccgttgctgaggcggaaggaaccgtcggcgctgatgagcttcttccg

SEQ ID NO: 129988 - DNA, 742 bp, Zea Mays
tgattaaacgctaatcagaggatgattgactgttaccatttagtgtttaggataacactgagtaatcctattgaacatgagcttatctgtcatgatgttctatgttggggtgatatagactttgaccttgtaactcatacatctggatctggccttaggcattttaacaaatctagcatagtttttcctagatcctttgtattctcatcatctgatcgttgctatcgccttcatgattggagggttgattcttttgacacctagaatctaccatggacacaaatcaagctaccgagtgatcgaagttcaagtctgagttgtagttgttgtctgaatcgacacgaagcccgagtccaaatagtagttgtggtggaagttgggctaaagtgcatatgggattggtttgatctcgaattcccgatgttaatgttgctcgggcttcaagtactagactaagatgcccgagcatgttgctgagaaatcaaagggtgatgaagaagatttctgatatcataggggtgtgaggtgcatgcttgagattcccaagcacatcgtcgacaaacttaagggtaccaaagaagatttcttctccatgtgtgaagctcatggcttccatccaatctataataatcagtgcgactatccctatctagcgtgccaactgtcgagaaatattgggtaatgaatttatagggtggatcacaagagcgtgaactgacggtaaatgcacaagggactctag

SEQ ID NO: 129989 - DNA, 793 bp, Zea Mays
gaaaaatacacgtaattcatcagctataggttgtcacgaccaatcacaatccctttatgggatgccgatggacacataccctgagcaaccacaacctcctacgcacatcggcaataaattagccgatctgcacatgaccggaccgtctgcacgtgagcgtggaccgtccgggccagcaatggtcgggcccattttcaatgagttaccaagatatgcgtccgagccgctacatgttacacaagccctaaaccacctagacagaccatccgcatatgatcactgacggtccgcacagccgaccggacggtctgtcatagggatgttggaggaagattgttacctagatcctcgtccatcccagcaacacttcccatcacactagacaatgcaccagcccattaatacagaatcccaagcccatgggagcgagtactttccggccccgcttagaaggccgaaaaggaacagtcaatcctatgaaccatatagggcaaatagtaatgcaccacataactcaaaccaatggtgggaagacaacatgctaatatccagtcaacatcacctatgtttgaccagagagccggtggtctcgcactggctgccattagtataatgagggaagaaattgtcggggcgttccaagataagctcggaggaagcatggtccctggggggcagtcatatcggaggcttatgacagccgatttgaccaccacccatacccacaggaaaccaggatacctgaatttgcaaaattttcgggtgaccaagggaaaaacacacttgaacaaat

SEQ ID NO: 129990 - DNA, 512 bp, Zea Mays
cttaagtcactgccgacttaagccgattgctctgttagtagggtatagtggtcaccctaagtcgagtaagcatgcagattggtaataaatagttcgagtgcccttgagaatgaagtctttttattgatgatgttcgagtgcccttgagattggcaaaacttcctgagatgctctatattccatgaattccctatttccgtgccatccatttgagtaagccggtatgatcttggccgagtgacttctgctaccatgaatggcccttcccatagtggcgacaatttgtgccgtccttcccccgttagaattcggcgaaggaccaagtctcccactgcgaaggatcgatgtcgtatggccttatcgtgatagcacctcagggtttgctggtatctagctgactgaattactgtattcaatcgttcttcttccaatatatcaatatcctctagtctggtagcttctacctcagctatgttttcgaagaccagccttggtgccccaaacctgaggtc

SEQ ID NO: 129991 - DNA, 376 bp, Zea Mays
agatggcgttcagcacgccgagctgcaggaggaggaagccgcgtagcatcggcttttatgcacaggaggaggggaagtccgagtgaatgttgttggttcacaacgagaaatttgagtggagtttggttgaggcgcccgtggaagtcgcacatttggttggagatcgtcacgggggagaagataacactgtcagctgggacccaccgttagagccatggccacgttgggagcaagggggagtgaggatggattgcgggccccacatggcagcggttgaaggaatgtgggctagtgcgcacccggttgtccacactgaatgggtgcctgatatgcatagtgtggctgacgttagggccccaccggtccagggagtgcg

SEQ ID NO: 129992 - DNA, 611 bp, Zea Mays
tcttctaccactgatatgctttttgttgctaaattaaacatcattggatcattggcgggtggctgagcctaataagagactgactttccttggtggtctgtgagaaggattgtcttgtttgcgtaacttatgatgcctttgtgcttggttaaccaatccattcctaagatcacatcaatcccttgggatggcaagacggttaagtctgccaagaacactaccccacttaaaagaattctgacttgggagcatttgagctggcatagaaggtctgaccctgggttcgggtgaccaaggtaatctctagaggggtagaggggatgccatgcttttccacaaaactagtggctataaaagaatgggatgctcctgaatcaaaaagtacagtagcgggagtaaattcaacaaggaactcaccgagcactactcccggagcttgttgagcctcttgagcatcgacgtggtttactcgtgccctaccttgatactgggtcttgttctgctggctgatggaggagggcgccttgagggcgcgtgctgaggtattcttgggggccattcaccgagttggagtaagcaggtcctgatgccttcaactgggggcagttgtt

SEQ ID NO: 129993 - DNA, 647 bp, Zea Mays
catatggccatcgcgtcctggtagttcattacatggtacctgcgcccgcctgtaaaagacaccggcacaataactcttccaccaaccgaatctgcactggtgagacccttgccaatggcgtcggttatcccctgaatggattcacaacgcaattccttttggtgatccgctatgaattgcaaccgagacgcctcgatcgtagaatatgcatcaaccgctagctggttgctcagcctgccgtagcaagtgaatgggttcggttcgttgagtctgtaatgggaacgatgtctaacaaattcaagcattgtaacatacttgcggcctgagacatcgcctcctcccacgtcagaatattttattccaaggtggtatccacgatcaccgtaagggaaaagaagcgggtactgtaaggccatgtaggatgggtgcaagcacgaaacatgtttgaggccaccctctctagcatgcacgagaacatcgtacttgaactgtgaaggtgagcaatcgcccactattatagcagcaacctcaccattggccggtaggttatattgtgcatcatgtcgtgtgttgcagcctaacaatcgtaacgtcaccttttggttgcctgcttcatctaaacgttctttagcaaagcgaaatgctgc

SEQ ID NO: 129994 - DNA, 553 bp, Zea Mays
cttctatggagttcggcgtggtgcctggtcaaagcgatgtcgcgcgggcaggagcctgagcgcctgagcgactgggtaaacggatagcggcgcgaggattcgttgctggcatccggccgcaggtcagcgccgcaagcagctccgaaactcacggcgaagctccaccatacgtgcttgacggttgaagacgagtactgggtactcgggcccacacgtcagtctaccagggagctggcacacgcggagacggccaaagaagcggctgaggtggagaggaggtaaggcggctagggttttggcgtgcaagagctagtgggctgaattgaggagccaggcccatttaggtttcttcctcttttcttttttttcttttatgttttccatttcaaagttcaaatggatttaaattgttggtttgaatctcagactttcaaatatcaaatagagttctaatgcttcttttacttggtatgatattatttatttgttattattatttattcccttcccgtttatttatttatagaaggaaaaatgactttattaacatttt

SEQ ID NO: 129995 - DNA, 400 bp, Zea Mays
agtccatgcaaacgtcctcccatttccaagatggtatagggagaggttgcaaggtacccgctacctttaaatggcctgctttaatcctttgacaagtgtcgcactcagatacgtacttagcaatttctctcttcatcctggtccaccaatacaaggatctgaggtcatgatacatcttattactcctggggtgcatggagaatttggagagatgagcttcatccaaaattttcttcctgagttctgggtccttgggaacaaccagtcggtcttcgaaccataaaacacccttgctgtcctgacgaaagcacttatacttatatacttatccaccttttgattgagcatttccttaatgacttgaacacccttgtcaccaatctgtgccatgattatctgc

SEQ ID NO: 129996 - DNA, 595 bp, Zea Mays
ctccatgtcttggtggtgcatctccaggtggtcattggcttcctcaagttcctcctgcacatcatggagctggatctccaggatatcattggtgttatcccggatttccacctgctcctctagagtcatgatgcgctggttcaactgttccacctttaggtctttttctaccagttctgaagacaagtcgaccacgaagtcctcttgattgtcgagagtgatctttgtagtctgagctagaccagtgaggtgtgccatggcgtcgctctacaaggcctgtcggcgatacagtgcgctcatacactgaacagtgatcctcccaacctggtcgggatgcttggcccacacgtccttcacgtggctcactcggttgcaccacatgggggtcatccttcttttcggcagggaagagtcctagtgggtgcatcatcatctccaggggatgttatccgcagaaggttgtcaaggcctaagtggtgtcgtccgccctgaacccgacagtctcggaatcgagggaatgccacctaggctacagaaggtgagactccagggtcagccaaaccctacaacctggcactcgatgctcctcgtatag

SEQ ID NO: 129997 - DNA, 499 bp, Zea Mays
caccactgcttaccgtaggacgctaggaccgtgcgatcaggtctctagcaaggagtcgtatatgggcatattgttcagtttatttcctgagtcatttaactgggaattagcctatcgtaaataagaaaggtcaggtcggtagcataaacaagcagatgtagtcgtaatcaaacttaaaaaaaataaacatcaatttcacattatgtgattgaagttggtgtagaggagtcatcaaatatttctacactgcttttgaaactgaatttatatgttagaagatattccttacgttcaaatcactactgcctcaaattatgatcaatacaaattaagcactggaaggccaagaccagaggacacaaagtattttggctatatttttctaacaataatagttttttgactgaccaagtgatgtatggttctctgtacaagttgcactggctgtaggactgacaatacatgtccataagctcaagttatttcagaataacataca

SEQ ID NO: 129998 - DNA, 295 bp, Zea Mays
caacaagtctaatcagccatggaaatttccacttggccctagcaaacaataatatatttcccacgaaccaactaagcacatttttagactttttctcagtttctttaatctttgaccaatgtccaatccaccacagccaacgagtacacgaacttgaagggtctagtagtatttttgtactgtcctaaactacaacatcaggcatttttctggaagaaggttgaagtcttgttcctggcttgggttgtgtcgtcagtcgccactcctttacctcgacctcgagagcgagaccgcg

SEQ ID NO: 129999 - DNA, 316 bp, Zea Mays
aggtggagggggtggttctccatacacgtacatgactaatgtggtacttcagctagagttgttggctatgcttaagggttgttggtgtggttggttggagtcacatagttataactggagctaacttagttgtggttgccatcatcaataagaagggaacactacagaaaatcaagtattttttacggccaaagtcgccaaaaataagcgtcttccggccaaaatagcttattttcgacgacaatcacttattttcagtggttttggcatgacgaccctattttgccgtggataaggcttttttggtgtttgtacc

SEQ ID NO: 130000 - DNA, 1387 bp, Zea Mays
agtgaacgtgccaaggacagacaacacatcgagggcacaacacgccgaggacagatacaacacaccaagggcacagcgtgccgagcataaagaaaaaagggagatgtggcttagacaatggggattcttctcttggccgagggtgcggcgtgggctggctcagacgactgacacactctctgccttgtctgagggcgtgacgcagatttgctcgggtgcggggctggctcgggtgcgtgcacagactgttgggtctcaggcggacggttaggtttaggctcaagttagttagaatccaacctttggatcatcagaaataaggggtgcagacgctctggaggtctttagagctgttggatggtctaggaagatggggaagggagcggggaacccaatggtgggggctgaaccggggtaggggcaccagagggtgagctccacgatggggtggctcagcggcggtgctaggaactccgatgagcaatcacgcgcaacagagaacaagggagggaaatggagggggcaggggaggttccttacctcatggcaagacctgggatcccctcgaaggcggcaatgacatggtggtggcttgggtcgacgatggcggctctgggactgcacggggaatgacggttgagcgtgggtagagcaaaccagagggagaaatggaattgggggcgagtcctgagcggctggcaccgaggcgaagctcaccgtgacaagggcgatgacaggagatcaaccgcaacgacgaaacatccttcgggacggcggcggcactgctgcgtgctgggtgggggtgcgctagaggtctgggtcctcactttgaatcccatgtaaggtgcgtggacgggggttgtggggtgcgggtgatgataatatggatctactacccagtcttctttcctatagacccaattcgatctgaacccgacccgacgtttaaataggtctagctacctagggatgataatgagtaagataccaagtgggcacacatcaccgtacccatacccatcagagaaaaataccccactactcatacccactacccatcataggtacaaaattgccccatactcatacctaccacgggtagcagtacacatcgggtacccatacccacaagcattccagtatacatgatcatttcaatcacaaaagtaagtaccaaatgcaaaatattgaagccctatatctcattaataatgaaaggtaataaaatagtatattatctttgtgtccaacatgataaattcattgaacctaacatacaaggacaacatcataacatcacatcatacagaatataacactcggaaagttcacaacgacaacatacaacattatgatagttatctaattattcaatgcacaatacata

SEQ ID NO: 130001 - DNA, 329 bp, Zea Mays
gtgagttgtactctttgtggatgctcataaaaaaaggttctaaatggaggcaggtcggtggagcggggtggagctcagcatggaggcagctcggtggatgtccaatcgccatggagtggggtaggtctgcgcgggcgctggtcagccataccgcgatggaggtccggcgggcgttggttttcttcgctcctcgcatctcggatggagacgacattagctatgctcgccggtgggtgttcccggagtccctgtgtctaacaaagataacccacagatacatatgacagtctacgtgacataatatccaaactactaaaagtactttaaca

SEQ ID NO: 130002 - DNA, 275 bp, Zea Mays
agtatttctagagcagaggagcagccctgaattcatatctctaagcgaggcaaattcagaactatctaagaagaacaagtaccaccaccacttaggcacaggtggttacaagtgtcaagtttctaaatggagacaagaagacgtcgagaagaaggtcgtagggttgccgacactttctgagcaacttggtgaaaggacggctaattggatctgtgctagaaaacccagagaaaatgaggtaggtgtatcttttgatgattcaaatgtcgaagaag

SEQ ID NO: 130003 - DNA, 585 bp, Zea Mays
attaaagtaaccaaacatgctacggagttatatctgcttttgttgctaccaatgattcattgccttatctgcttttgttgctaccaatgattcattgtctggtccatgtgtattactaacgtgtatagtgtttacaagggcattgtttgagatagttcatagttggttaattgcctgggctttggcattatgatttgtaaatttgttttctaaaactctttaaaacttgcagtcatgtattccaattttcgggcatgagttattcgtgatttttagcttggttacagaaatgacaggtgtttggtggaatcagaccttttgatttggcattatgagacattgtgccttttgctggctgtttcacaacaagttcttgataacatttttcaacctttatgactatctcctcctgtatattccaggatgaatatccataatacattttggaaaaaattgctacatcggttaatattcctctgtttgcaaagtattgtttattcttgtagggtataaaactagcaaatgggcatctcgacctactgcacgcacatctatcatccaaatagaccttgtagttcctgttgt

SEQ ID NO: 130004 - DNA, 679 bp, Zea Mays
tgattattattgtagctaacaaaagtgcccggcaccggcgcgtggcgagcattgcctggccgccaggccgtggcggagagagaccgtacgtgagctgttgaactcgactcgagccgcagcgagggtctgtcgcgacggcgagctggaaggaaccggcagtgtgcgtcgcgctgacgggtgggcgaatgaatgatagcttgcagccggggcgaaaagggggctgacgggccggcctcgcctttaacctgcggtacttgttgcttccggggtgtgattaccttatagcttcaatgcgctgcctcccctgcttgtgcttggaacggaaggcaggcatcgtattcaccgcaccctgtacgcgcgtactactgttagcttccatgcatggaccccatgacccatgccggagaggaggtagatgagaacataactccgacggatcgacgtactgccactgccacggagattgggatgattggacaattggctgggcaagttttcaactcgtggagattggaactgttctaggtttacttctacatcacggtataacaagaaagatcacagtcaattcagttcagagccttcatgttgccgccgatgccaccggcggccaaaggccctaccttttcgtgttctttcggccaggccaggacaatacatacgtacgtacctatctcgc

SEQ ID NO: 130005 - DNA, 388 bp, Zea Mays
gctttagtaaccaaaagagatattgacgagttatgataggaaagtgtttatattttacttattcaatcttctgaacgcggtggagcccgacctggcccgtaggagccccattcggccattcccgttcttcttccaaaacggatctaggtcccacaccggaggtatgctagggttccacctgagctattccttcttccccctctgctcatctccccatttgattcctcgccgcttgtggtttcttccccgttgtcatagagtcaggcaaaggtcctgtgcgccgtcgcagatcttagggaggtcagtgcgccctcgctattccctttgtctctgtgcgccctcgctcatcttctcttcgtctctgtgtgccatagctcctcttcccttc

SEQ ID NO: 130006 - DNA, 341 bp, Zea Mays
cggacgtggagggcttaatgaactcaggagggaaaatcttaacggtacccggagcagtcctgtgacttggagtggctccgtggcagcgaccaacatctatcagtaattcacggttccacagcagccaccggcaccaacaaccgctacaacagaccctgagttggccgacgacgctccccgtttcgcggacagcggcaacactccgctcctctccggtccattagcactctagtcgctcccccactctgtgttgacgatagggtgtcgagaacctaaaccagggaaactttggtcaaggcggtggcgtaatttataggcccgatgcaaagtatcggtttgca

SEQ ID NO: 130007 - DNA, 374 bp, Zea Mays
gcagacgcaacccatgatcattgtactagtatacacacatttgagtttcactccagttttcacctttcaaatgactaataaatagatccttcgtcgcaacaacctatttatatatactttactactaattttacggacattgtattccactaagtttcacaaaaaatatcaccttttagctttttagatgcttaattattactttacaccaatggaactacaaatcgcatctaaggaggaagtccaagtggatgtcggctaccgagttgcacggtgtcatgtcaattagctgctttttttaagggcaattagcggcttagataaccaatggcatgtgattttggaattatttggcttcgatactcatggccaac

SEQ ID NO: 130008 - DNA, 640 bp, Zea Mays
atagtggtaacgagagcgaggaggactacaacattctaaacccgacaaagcctagtcatcttgaatttgaaaaatctactgtatcggaagatgacatgactatgatgaaaaaactgggctatttcagagagtctaagagcaagcttgttcgatttgctggggaagagataattccagagccgagggatgatgaagttatcgtctttaagagcttcttcagagcagggcttcgattcccgctaaatgacatgataggggaggttctaaagaattttgaaatataccttcatcagctgacccccaatgccattgttagacttagtgtgtacatatgggctctctgaagccaaggaatggatgcgaatgtcgaagctttctgtcgggtgcacgaacttcactactagacaaaggctagagtagatggcctttacaggaactttggctgctacaattttgcgtatcggaagggtacgaaggccccggttattggctatcgtaccaagtgtccgactggatggactaatgaatggttctacatgaaagcggatgagaaaaagagggagaagctaatgagcatggtaatgagtccgttagagttaaacttcggcatgactcgacccttgtgcaatatgcaattggg

SEQ ID NO: 130009 - DNA, 434 bp, Zea Mays
catggtccatggcaccttcggtttgcacaggaggaggagcgcctccatggacatttttctgtgggtggaactgtaaccacactataagtactaatttacattaccagtccaaatgtcctatgcagggccgtgtgatatgtagcccttaggcatacagtttcactgaatatctagtaaaacttctcggctagcataaacaagagagataagactgtctccagtaaagtgtgacaaataagagacgtggaattgtagatgacattgtttgtagagagaagtctgaaataataagggatctgctggagatagcgtaacctcccaagcacaaaaattgaccaccaaaccaagtacgcccagcaggctgtaaactgcttgtattttggtacacaccttcacttgttatatatagccagtggaacagtcctggaatgcag

SEQ ID NO: 130010 - DNA, 359 bp, Zea Mays
gtttatttatcgtcaatgatgaaagtttttacatagagcaaaagatgttggctggcaaacaaatctaaaaaatatgctgaacctcaaacatcaacttagagcatttgaatgaacaaagtgttttaagacgaaaacttgtaatcatttgaactgcttcaagttggggtgcacatatggatgggttacaagagaattttgcaacctacaggaaccatggtgtcatgatcctacaaataatcaattctaggcattcagcactttacttttatccgaatgagaaaattattgttaggccaatcatcaagttactgcaataaatagaagggtcattctgaaattgtctagtaagttcttcaaag

SEQ ID NO: 130011 - DNA, 404 bp, Zea Mays
gtgacattggcttttatagtaggtgatgctccaagcttggggtctatggcaactagttgaaatcgacaccatggatgaagtctaggatcgattgaggttatcctccaagaagtgacatggaagtatgtccataagctaaaaaataaggacacactaaagctttactaggatatccttaagcccatgcatgtgggcttcaattgtgtgcccaagcgaggatgcatcatattctatgagagtatgaggccatcacgttctatgacagggaggtagtgttggactatgcactacatttgtagttgctcatggttttagtgttggacttgagcagtagatcattagtaagtacctatgggtgtttccacccaagttcgcataaatcgtgctcttgatcgacactctac

SEQ ID NO: 130012 - DNA, 413 bp, Zea Mays
cttcaatcagaatcacaatctataagtaactcatcttcggagtcatccgtcgcgcaatcctcaacgacaacctcattccacttgctgcattgtcctgcatcacacttgttaacagttctcttgtaataattggcttctgcttcatctgcagcttgggagaatagctcatcctcagcctcagcctcatcagacttctgcttgtaataatccgcctctacctcttcggcggcctgagacataaattcgttctcttcctcttgagcacgtaattctgactcaactggtgcgatgagctcactcaaccttgatgtgtcgtcctcctcttctccatgtaatcctgcctctgcgagagcgataagctcacttaatctagatgtgtcgtcctcctcctcctccatcagctcaactctcgc

SEQ ID NO: 130013 - DNA, 1081 bp, Zea Mays
gcttaattaatgcttactgcaacatggatagttggatacttcattgctcggtatatgatgctttggtattgaaattttttttgaactactttgtcttggtattgacaaaattgtgagatgatttagagttataagcacttaagtatatattgtttgaaaaaaactgttgatgaattagttactaccttctaatcacagagagattttatgctatcagctctaactatcatggcttgtcaggctattgtttggacaaaattggtttatgcatgagtcatgatgcccaaaaatgttgagtcaatttatgttgtgcctgtcatatttgtcgttagggaatatttagatgcttgtgtttttctattgctgatttgtatgctcatagcttagagctacctgacactacttgattccagctagcaagcatgcttattcaaagcttggttagaaactcttgctctatgcttgtatgtgaatcagaactgttaaaatgaaggattgaacatccactaataagatgttgtgctttattcaaagcttggttagaaactcttgctctatgcttgtattcatgtttgcacgctttgagagcagatgtttactctcatcgacatctgggtttccctgtttagtattgtctctgatgtgttccagtgtactgaatctccagaccttattttcttagcggtataatcactttcaatattggcaaaacatatatttttgtcatgtaaattctcgactactcatttggtttgaatctttgcttctgaactacatctgctggtcaatgagttctttactttctttagtactctcgtggttcttcaacagactgcacttgtattatcctaatttatgtcaaaaaatgtctgaaatcatggacacgtgattgttctaacgcagagaaactgtgtgtccagagtacaagcgagatagcaataaattgtttcttccctatgtgttgtcatcttgcttagtttctccagttcccacttgcctcagttatgtttttttcttccttccttgaggttatcttaggattttttcctctaaattatggacttgcaagattaaaaacatc

SEQ ID NO: 130014 - DNA, 734 bp, Zea Mays
gaggaggcggaccaaagaactgatgcgccaggtgagttgcaaagtgttcttccccagactgagctgggggaggatagctgcccgaaggatcttggagcggaggataagaagaggattgacccggatccccctggtggggaggcggggcaaactgctcacgatcatcaaagtatcgagagctggagggcgctttcctcagacgccctgctggattgtttggatcaatccagaagggggtgtaagatagatgtcttgtgcctttctcatagcgaaattgagtcaccacttcaatcatcttcatgatgaagggggcgtgaagacatcccttgagagggaagcaggcaacatgaataatttcttgccaaatcatgtcaaaaacattggtactttctgaactatttggcttcataaatgagagcaagaccttgctctctcccaggatattcatttggttacctccttttgtaatgagagtcattctgcaaagagaattaatatatctgtaaaacttatgcagattggtggactcccaaaatttaccagtctcagatatatgaagatcccgggcttcatccttggtgggttgacgaaagtcatgaattttaatcttgtccccagaaatatcttcatcagaaaatccaagtatgtgagcaaacctccggtagctcaccttgtaccagctgccttcaatatagaaattaagataaggaaagttataaggagtttcctcatca

SEQ ID NO: 130015 - DNA, 353 bp, Zea Mays
ggctatagaacagaaacaacccaaacgaatttttacctttgaaatggctgactgcggtgaatgggtggaaagaaaaacggcgtggtcaccaccttcagtacaactgacgaaagaaaacttgggcacctctgtgatggttagtagaggttttgaatggttatggaaacacaagtcattcagttcaaggtgacctgaatcgaagagatgggtgtgtagcagtagaggtttttagactccatactttaagcaaggtaaagtgtacactgctgagttcactggaaactggaagagtggttttgggagaaaactgcagcgcttaggcaactcagttcaaaagaaaagtcactgtgaag

SEQ ID NO: 130016 - DNA, 1049 bp, Zea Mays
tgaatgaactcctccatggtacagtgttctctgtagatcagaacaccagcacgacaacctcaccgccggcgacctctttgtgccaaaattcacgccgccgccgtccgggtttgtgtgcagtggggaacggataacgtcggggagggacaaccttacgtggcgccatcgccctagccctgccggagccttcaccggcggccaccatgacctgtgaattttgccgcggtgtcacccatgcctccatctccctcactgtatctctttccgacgtggtaggcatgcgcttgcgctgctatccgtggtcgggggtcgtctgttgggccgccatgcctataaatggagctaggagtcacggcgaggcgctcgctgttcttcaagtgagctcggaaacaaccagaaattcgtactgccctttccatcttctcccaaattgagtatgcacggtgaagctatagtttcttacggccgtgtagcctcaatccccgcccccaatttcacccagagccgccgtaacgccatttttccctaattcggtcgactgcgtcgccgtgaaccgcctgcttgcggccaactgattccaggtccgtcctcgcccttgttgctcgtgttttagcgcccctatgtgcttgggattgttatccacgcaacccagggagctttaccttacgtatgaaaccggaacgtattgatcaatgcttggtgtccgccatcaccgtggtcaagcgcatcctggtccgggttagtcacattggagcttgttctatgattgcctcaggtcggtgatgctcacccagcagctggtttgggtatccgccgtagtttttggccggaccgagcgacgggatggtcgacggcgagcacgtcgtggtcagggtcgtagttggggaagaaataaaagtttagggtcatttcggcaatatgtcagcgactaagtgtaatagtagatgaacctacttcgaattagctgataaaccgaggccctttgtgcaaaatagccagagcgtgcgggcgcgcgcaggcacgcgccccggtttcatgtgctgttgggc

SEQ ID NO: 130017 - DNA, 2706 bp, Zea Mays
cagggcagcgttagtgagagtgggaaggccagcgatggcagtgaacgacgaatgcccataaggggacagcgcgccggctaaagggagaggaggaggaagagacgacgtcacgacgccaggggagaagaggggcacgtcggccatggtggtggcagcagctacaaggctctaaggagaacctgtctcaggataccatgatagaggaagaaaaaatactacacattacagtgattggagatagggctacaaccctaatgggcctcttgggctgggctctaggcccaatacacactaacagtctaacaatgttgacaggttgttgttagttcaggatttaggatatattaagcaaaatattcctttggctatcaccagctttcaattttcaattgtttgttgttttcaattttatcttttgtgggaaaagagaagttcaagtagtttccatgaactcattatttgagttagagaaagctgattttttttacaattgtattagtctatccagaccaaataatggtcgaggctttcatcaggtctaaaaacaaggaaaaccaaaaacactacaattaaatgttttatgatggtttagctattctagaattaagctgctacttgtcaagttctaaacaagttccactgtgccagcaaagcttctaagaaagaagtcagtcaccactaacaacttgaagaaatgcatccaggagctaaagaagaaagaaggatttcattgtcaaccagctaaatccaataacaaattacaataaaacaattacagctgtttacaggaatctatttgtaagaaatataaacaagacaaagaaaattctcaacctgacgaaataaggcatacctctgcaatgtactttgagtaactgtcttcttctggatatttttcactggcatagaaaagcatatgctctgtaaaattggaaacattcataaggatagggagaaaaagaacaacccacataatattcaattttcatcaatatgttagtaaaactgtaactaaagcagtataaaagcagaacaataagtgtctatatatgtagaaatacaaattagatatattgtttatatattattaatcaagtccacagatatttaattatcaccttaaatgatcctggcaattgggtaaagcatcaaaccaagcaaaaaatgcatagataaaattcagggaactttatagaatgtcagacaacttgtagagttcatcaactaaaactaattcaactgaactttcaactagcatatcatccataaatgggagcataccatcaaaatgacaacatgtaaaggtattctcccagcatcaatcacattattgacgtttgttttgttgtcatgcatgcatggtttcagatgagtaagttgtcttgatgctttttcaccactaagccacaagatacttgcagattttatggataaaacttagtttctccaaactaagtgactctacgactcacgttttttcagggttactggagtatcccagtccagatatcatcaaacaaccgatactttctgtaaatttgaaatatagtgaaaaatgccaaggaagttctttattcagcacagcatgttcactccactcatcaaattcaatgatatttcggctggtggtaaaagttcattttgaaatgtttttttctcagaaaccagtacatacttgaatgctcaatggaatatagcaggtttaaggagagagagggggggaggggaggagtaacatatttgactggacctagagtatcgctcaacgctcatcctcctttttcatgtttatttgcacctaatgcctaatagtatagcgctcttgatttccatgtatgatcagaggaatagagaagtaatatctgtttgacaaccaaatgcacattcaaatgcagtgtaacaagcattgagacctaagttgcgataagacgacactacgacagtacatgcagatagcacagaaaaaaatactagtgttcacgtatttctcacttccaaactactcacaaccaatcagagaaaagctaccaacaaaaaacaggatcaagctgaagctcagtccagttcaagcagtaagcgagttcaggacttcagatgcagcaagatgaaaccgaacactgaccgaggaagtgtgcgagcccttccagcccatcggggtcgcagaagtaccccaccgaaacattcattgacgccgccgcctgcaaaacaaagcacaattcacaacctcgaaatctcgcaccaaaatccaaaacccgtcgccaaaacccccgttcggtccatcctagcacgatcggtgtagcagaccttatcggtgtcggggtcgctgatgagcaggcactcgagcgagttagggagcacgacgcggcggtacccacgcttgtcgttgcggggcctgatgatctcgacgtccccggtcgcggccgtcaccgccgcggccagcggaggggcggcgccgttggccgggtcgccgggggcgtcagtctcgcggggcctcgaatccatcgcaacgagacttcacgaccgcgacgcttggagcggaaattggcaacaaagcggagcggagcagtaagctggtttggtttggctttgctcccgctgttggatttggaggggaagggtgggggcagacggcgacaggcggcgcgggtcagtcagatatcagatcggctggccggtcgcttcacggcacacggcttcaagactcgt

SEQ ID NO: 130018 - DNA, 377 bp, Zea Mays
gtgatggttccatggatggcgcccgtgcctgatgcgtactatgcttggtgtcgatattgggcttctgaaggcttccaaaaagcgtcagcgcatcacaggcaatgtcgaggaacgaatcctaaccacaagtttggcggtgacgacatgctccgaaaagctaaaagaacggtaagtttgatctagctatgtcgatcaacaaatagtacgattgcttatgaatgttttttgtttatacaggaagctacaagtggccaaaagcctagtgacattgaggtctaccaggagggccacaaaggacccgaccctaacaaccctgaccagctctatagccagacagccacggatcggctggtgagttttggcccaaaagtacaaac

SEQ ID NO: 130019 - DNA, 1522 bp, Zea Mays
tcatttttttgagaggacaggaggggggaacccctaccgagccaatgaaaagcccctcgtaggtagtgcttcctgtaagcgtctatcttgattgtggcggcagggattttaagcgtgcacataaggaaagtcggaagagctgagaaaactgagttaaccaactccaatcttccagcttgagagatttcatttacacaaatggaagtgtcatttacaacaatattaatatctcttagatcataaccatctcatttattcggtttactttaattctgtgccagttattgtataagatattttgattgaattcaaccatagcattatgtatgcagtatttctattcaggctttctttagtactgttgtatctttttctttccatgatctgtgctgcatgcactgaggctacccttctctctagaatgtatgagtttgcacaaaaagcgtcagctggtataacaatggatgatgtgaagaaaaagctagtggtaccatcaacatatgcaccaaatctgcagaatgctgataacattacactggaaaatgtggaaatatatgttgaggtactttgctacactttgaagaactgaagattttccatggatttggttggtttcttatgtcattttgtgttttccatgcaggccgttaaaggtgctctgcatatgttagaaaatggtgcatctatagcagatgccaaatctgtctgcccacctaatgttctgtttcaacttgtaaagtggaaggtacatggcaatgtggaactctcctcttggttgttttacacaaattatgttttactactattctttacgtatttacagcttaagatggtatgcatatactattgtagtagcttgcaaagttctagcccttaacttgttagactaattgactttgttaccttcttattattccctccggtcacatataatttatgatttggacaagatctagtcaacatttagaactttaactaacatttttttaaaaatatttaacttggaaaacacactcactggttcaccaggtcacgggtccgaatcagcatcctcgcacttgcgaggaagccttgccttggtttatcccttccccaaccctcattcatgtgggagcctctgttactgggtctatcccttttttagcttggaaacacaccaggaaaagagggtttgtcttgaaaagtattttcattattaatcacataaacttattaagttttgtaaatatattctaatagaaattatcgtcagggttgcacctcaaaagccatgagaagtgaaaaatgtcaaatgttttttgactagtgggagtgttgctgaaacattgagataagccatttagaacaatagatgccttggatttttttgttattcgtagtgttataagcaaggtgcaatgagtggttgaatatggtgttttatgtacttgaagttgttttttggtaaatttaaaatttggcatccattataatatgagctattatctgcagaacaagttgagtgtagttcttgcaccatttc

SEQ ID NO: 130020 - DNA, 318 bp, Zea Mays
tttacttcgttcttcatcacattaggagtaggcttaatttagacctagtttagctttccccagcccccaatctttatccctctcgactctacgtcgtctccaacccccaatcttcatccctcttgactctatgtcgtctagggatgtccagaggcacatatagaactcttctctctaataggtccctcctgggaggtaagatttagggttcttagaccctttgcacgcacaaacagtccagccccgaagctcggacccaaccagaggagaccgactcctgcagcagggtcacggaccatcggcaccaccgcatagagc

SEQ ID NO: 130021 - DNA, 378 bp, Zea Mays
caggcgttcacaggggttgggccaatttgacctgcgggggcctatggcggccggtccgcggcgcggtggcgggtgtccgcgacggtgatgtcaatggtgcggttgccgggcacaataggagggggaaagtggtgccttgtgaccgtgagagtgtggcggagcttcgagcacggtttaattggatagaggatcactagaaagggggaaaggagctcaccagagcgacgggggaagcacggcggcgctagcccgattgtctcggggaagggcggaggaaatggtcggagctggtgtggtgaagacggggctcgggcaggtccttttataggcgcccgggggaggggaagggatggaggggacggagagcaccgacgagat

SEQ ID NO: 130022 - DNA, 464 bp, Zea Mays
cgccgtcgaagcgtgtcagaaggccttcagtactgtctgctccttcatcggcacaagagatttagttcaagagcatatagcattcagagtgtggccgcttgtagaaagctgggaaatgccgaaggagaccatcactaagtctagcgaagatgatttggtccggctgatgtatacattcaggtttagggataagttcgatgaaccaaacgacgactggctgaaatgtattgaagctacaagtgatgatctgcttggagcatattccaaggcagaagataatgcactgtctgaagccttcggaggtcggggaaaaaagagaatgaacagagtttttgacgccattggctttgtctaccccgactaccgctacccgctgcggggacaggggaaaaagagaaaggctgctgcttcggtcgctctagttgagcctgtgccgaagggcaaaaagatgaaggttcttaccc

SEQ ID NO: 130023 - DNA, 449 bp, Zea Mays
gactaaccggatctttatgagccagtaccgcaggaatttaagcggattttttggttgctttatcacgtacgacctgttattgctgagaccgagacaaacacaagccacgaagaactttctctagatcgaccgaggagagtgggcgcttgacaggtacgcgtgaaactgactgacacaggacgctaacgaaaagaagagaagaaacagaggggattgggagcttcagagacgacggacatttgcgcagcgggagcgagtttttacgcacgcgggaacatagggatattagatacagtactgctggatggttatttttcctttttcttcctaaaatctggattgggacgaggatattagaatctattggagatgctctaactacccgctgccgtttactagcccatgaagtcatcccagtgctaatgggtggggccggacggctagcctcc

SEQ ID NO: 130024 - DNA, 642 bp, Zea Mays
tgaaaactgaagataaatgagtctgaagttggactgtcagactgcttggattctgaaattcagagtgacagtggaatggcatgaatttagggctcaaattcaatcatgatccagtgggaatttgactagggatgctataacaaagatgaagatggtttgtagggctacaactttgctgcagagcattggttgtgttaccatggaaaattgggagaaaattggactcaaagttgatctgtcaggctaactgatgagcaatccaatggtacagtgaaccggataggatcaggttcagccccctcgctgccgataagccgcgcgcggattcgtgcggttgccgccgtgattcgtgcttgggtcagctagacaataccggaggggttagtaaatatcgcatcgcggatatgctccgaccaataatttactccgaccaccgtaccgagcttgccacgaccgcttcggatgagttcgctagaggcagccgcttcacggccttgcgccacgtacctgggcacattcaccgcatcgccgtgactcactttagccatccgatcatcgccggtgaggtcgccacggtatattccacgaattccctacgccagtgactttctgcttctccgaccgccacgcgtcgtcgtcgaa

SEQ ID NO: 130025 - DNA, 562 bp, Zea Mays
tgagaagagaaagagcaccacatgtgttgttttctttctaggcaaaaacattatcacctggtaatctcaaaagcagagggtagtatcattgtcctcttgtgaattagaatatatagcagtagccacgacagcttgttagagagtgtggctgagcagacttataagggatctgttgggcactaaagtgaagaaattcaaccttcgaattgacaatagatctgctcaagagctgagtaaaaatacagtttatcatgagaggagtaagcacattgatacaagatatcactacatgagggagtgtgttagcgatgggagactggaaatcagtcatgtgagttctgaagaacagctggccgatatactgacaaaaccactgggaaggatccgttttgcagagctaaggacgcagctaggcatcatcagaattgaagattgacaagattaagggggtgaatgttgagtaagtagcatccagtctgtaatcgtgtcaatgtttgtcagaatataggtgtgcattagttagcatgtttatggcttaatcatatttgtaatagtgcataga

SEQ ID NO: 130026 - DNA, 348 bp, Zea Mays
gacacggatctgaaaaagaagaattgcttcatgagaggtctatatgatcgactacaacgaaagatggccacttgcttagatctcacttatagcagggtcgtgagcacaacgctcttggtggaagctaagaaattggggcacggaaagacaaagagatatgggcatgaagggggtgaaggatcctctcaaggatccgagaagcggtcgaggttggtgattcgtccttttaacccaaatcacccttttcctcgtccacccgcctatcctttcaagcaactagttttcatccgtcccactccttcccctgctcaaaacaatcagccgattgcccttgttactcgtttcccc

SEQ ID NO: 130027 - DNA, 398 bp, Zea Mays
cacggatgaaaagtagtagtgctcaggtgatgtctaaattaatatgcaaactattggtgaaaagcgcttcgatattgattgttatagaggatgcgtcgttgattggttgtagtagttttagtgcactaaatgacttgaataaaatttgcaagttgacttgttggtcctcatttgattgttttaactctaacaaatggtaaagtgttagaataattcaaatctctagatcatggcaattcttgaattatatagaaactgaaattcattgattgctgttttggactgcacgcactgttttagttgttctgtttgttggatgcgtcaaatcatgttttctgtagaaaagtcatatagaagagttgtagataacatgattatcttgcttgtactaaaatttg

SEQ ID NO: 130028 - DNA, 378 bp, Zea Mays
agccggttggccacttggtgcgatagctgagcaccggggccttcgtatccttgcgatacgcgaagttgtaacagccaaaattctcatgtaacccatcttctctggcctttgtttggtaatgtagctcatgcgctcggcaaaaagcttcagcatttgggtccattccttggcttcgaagggcctagatgaaggcgctgagcttaacgatagcgttaggggtcagctgatgaaggtagatttcataattatccaaaacttccccaatcatctcgttcaagggaaactgcaatccggctctgaaaaagctcttgaaaaccaccacttcatcttttttgggctctagagtggtttcttctccggcaaagcgaataagcttat

SEQ ID NO: 130029 - DNA, 313 bp, Zea Mays
ctggatcaagagatagagaggggagaaatctggtttgtctcactgccacgcacagagagaagatcgcgggtttgacgtgtccaaggcatgcgtctcgatgccatcttctgacatgagatagaggggttagttaggcacaattttgtcaatgggggcattaggatttgagctagggatcaaggtgaacacgctcggtctttggctcaagggctgaaattcagaattctgaatttcagaaatccctattgaaccctcacttgagaagcttgtttggagtttttattgaactattttggccaagcttgcataatct

SEQ ID NO: 130030 - DNA, 490 bp, Zea Mays
gaggaatcctcggttgattcgagcttcgctttatgccgcggcgatgcctattttgtccacgaggatgccacgaaagtggtagggcagtcgcacgcccccaatttgccacgtcggtgaagaacggctgcaacagaactccctttctcccacccccttacggcaatggcgcgcccgaccctcggatcgcgagtgtggcgagtatggtggggagttcgcgggtggatgagaggggcaaggaggggcggctcaaatacccacggacgtggccccgtaagcagttttcccctcccgatccatcagcgcgaagatcccggcgaggttgttagcagcgcgcgcgagctgaccgcggaggggataaccctgacaccagggccccacatggaagtcacccggcgtgcgtggggatgaaaaggaggccgaccaggcggcccacaggtcagccggttggcacgaggttaaggggaaatgggccaaatgtgcagactgaggc

SEQ ID NO: 130031 - DNA, 395 bp, Zea Mays
ggagaagcctggcgacccggttcgtgacaagggatgagagatgcggcatggagtgcgcaaagcccaggatttatatcctacagagagggtggagtccgcacggaaggagagagcggccgatccaatcctggcggcgaaatcttaggaagacgctagtggagtttgttgagatcctatgtctgcgtttgcgaaccagcggagaagacggagcacaaccaatgaggcccacacgtcatggaccgaacagacccgtgtgcagacgagaggagaccgacgttgcggtcccacgcgtcattgacatcacgcaggggtgagagcacacagagactgccatccatggcccgcaggtcggcgccgtttcccccagatggccagcgcggtgacgaggctaatgg

SEQ ID NO: 130032 - DNA, 473 bp, Zea Mays
gctgatcaagccttctggtgttttagtcctccctcttttgataacttgttgttgtgcctagaatacaaagtcgaagcttcttagtttcaccattgcataagtgtcacctagatgaaggtctcgtacaaaggatagcttcattatcgctttgaagcacctaaaacaactttaaaatgcaatgtcttgaggagcttttgttggttttggatcttgatgctgaatttttgttgtgggatataaggagaatagtacgaagatgtgtgaaagaattccttcggttgacttatttgtggagtagcaagctctttcttcttttgagtaacatcccagttttgatccccaggttagaaaccctaaactcctaaacccccctttttattcctcctaagaccccatcacatgaagcattttattcatcatatgcatacaccatgatttctagtggcactccacatagagtatctcattttggc

SEQ ID NO: 130033 - DNA, 428 bp, Zea Mays
gatctttgtattggtggaccagaatgaagagggaaattgctaagtatgtatctgaatgcgacacttgccaaagggtcaaggccagccatttgaaggtagcaggcaccttacagtccattcccataccatcttggaaatgggaggatatttgcatggattttattgtgggattacccaacacatcccagcaccacgattctatttgggtcatcgtggacaggctaactaagacaactcatttcttgccagtacataccacccacagggcaggaaagtatgcagaaatttatattgacgagatagttcgtttgcatggaataccaaggactattgtgtcagacagaggagcaccgttcgtagcacgtttctgggagcaactgcaagaatcacttgggacccatgtaataagaagctcagcataccatcct

SEQ ID NO: 130034 - DNA, 578 bp, Zea Mays
gtgcgcttcaaggcgacaaggtgaggctcgcgaggatcatgcatgtgaagacaaatctgttgcacaacataggctatgtctggtcgggtaaaagtgaggtactgtagtgctccagctaagctgcggaaatccgatggattagaaacaggagtaccagtagctgcagaaacctttgggtttgtgtcaacgggtgtagaacagggcttgcaatctgccataccagaccgatccagaatatccaacacatattgacgttgcgaaagaaagaggcctccatctcgtcgttgaacttgcatccccagaaagtgatgtagatcacccaaatctttcatagcaaactccagctgtaaggcctgaatgatgtgttggaggagaatagtagaggatgctgtgagtataatgtcgtcgacatagagtaacaaataagctgtgtcagttcctctatggtagacaaacagagatgtgtcactcttggccttgatgaatcccagggagagcagatgagtggcaaaccgactatgccaggcacgtggtgcttgtttcagtccgtagagggacttattgagtctgcaaacatg

SEQ ID NO: 130035 - DNA, 379 bp, Zea Mays
gcgctgtggttccagacagcggccgggtgccctcacctcagtcgtgcgtcgcggcggattcggcgccgacccgtgttcgtcccctaccgtggacccgctcgaccttcacgaattactccggtatgatgccctccatcgacctcactacccatatgcagtagtttacgcccctcggatcgattcacggcggccagagtagagttttaagtgtgattaggcaatggaccatcgtggtccagggcaccgccatgttttaagagaaccagagaagaagacacggtgttggtcgttgaacgtgtgatggacggccacgattaaatccagtttcccctttctcccgattggatcgcgaccgttggatctttcaccgacggtgtcg

SEQ ID NO: 130036 - DNA, 505 bp, Zea Mays
aaagcttccattttccaaggcattcaagttcttgttcaacaattgacttagatcgagctcaactcgaaatcagcacaaaataactcagggtgatcactataccctactaacggagcaatcgacttaagtcggaaatgctttaagtcggtgcgacatgctcatgcttacacaactcagggtgatcactataccctactaacggagcaatcggcttaagtcggaaacgccttaagtcggtgtgacatgctcacgcttacacaactcagggtgatcactataccctactaacggagcaatcgacttaagtcggaaatgccttaagtcggtgcgacatgctcatgcttacacaactcagggtgatcactatatcctactaatagagcaagcgacttaagttggaaatgccttaagtcggtgcgacatgctcacacttacacaactcagggtgatcactataccctactaacggagcaatcaacttaagttggaaacgccttaagtcggc

SEQ ID NO: 130037 - DNA, 546 bp, Zea Mays
ctagctcggccttagcctcgaggtgagttctcagtcacaaccgtcctcgatgggtccatggaaccaactatctggtgggcccaaggcgtaaatgctaaatgagtgggtgattgtacctgtagccaaaatgaaggtggcgacgaagcgggttgccaaccaaccccagacgccgaccgcgaaaaccaggggctcgaggagtattgcacgcaaggaggctggccatgcctcaatttgggtaagtattgtgagatatcaaggatggttttctttgaattttgtgtgagtttttgtttctgcatgccagccaaaagcacaaagcgggtgcgccaaccttggcacctgcaaaggcccataagatgagcgtgacttcgatggacaaaaactatgaccagtcagatcccatgggtcgacgctgcacgaggtgctctttaacaggatgcgaggaggctcggtttgctctaggagaccaggcttctcgggtggatgcccctgccgaggctactatgtcgttggggggagcagcgatggctgtggcgtcccctggcg

SEQ ID NO: 130038 - DNA, 407 bp, Zea Mays
ctatcaaatctccatttaggaaagctgatttaacatcaatgtgatgcactttccatccacttttagctgctagagctatgatcaaccttactgtctcaattctagctactggagcaaaaacttcctcaaagtccacccctcacgttgggcatatcccttggccaccagccttgctttgtgcttgacaatgttgccttcagggtccttctttaccttgaaaacccatttgagaccaatagctcggtgacctgctggcaaaactgcaagttcccaagttcggatggactgtattgactccatttctgcagtcatggcttttctccaacactcctctgtcagtgcctcactaaaactccctggctcttctgcagctacaaaatacactccactataatcaaacccatgaa

SEQ ID NO: 130039 - DNA, 359 bp, Zea Mays
tacccatgtggcaccatatacggctggacaatccggatataccttcggaccatttggccaggtcacggaccatccggcctcttacgccggaccgtccggatatgcatacgcagagccgagagctacgcaatacgcgcagttcccgcattcatcgcagcagcattatggtgccccaccagcaacacattataatcataccataccacctcatggacatagggctgaatactattcggccacaagagagcctgaggggtatagggcaggagctggtgacattaataggacacctaacacacacctcaaacatccttgggaggaaagccgacagagtaacgtcaggcaacctgaaatctcca

SEQ ID NO: 130040 - DNA, 790 bp, Zea Mays
ctcaaagttgaacctcataacaagaatcaaattcaaacttgagattcaaacgaaaagaaaataagaaatatataaaaaaaagaaaaggagtaaaaccctaattgggccaccaggcgccaattcggcccacttaccccactgcgctgcccatccgcgcgcgcttgcttaccagacaccgtcgcgtggagcccactgcacagcctctgtctactcctgccgtttgcacgtgcgtcgctgttcgttgggacccactggtcagctccaccatcttcttcatcctcccaaaccaaatgcgtaaatggcgggcgagatccgctgcctcggcctcgctcgttggatgatggattcaagccctcgtcagctctatcccctcaaaccggatcgctcgcgcaacccctcggccaggacttccggttcgttgcaacggctcccggactccgcgtccatgcccaggtctcggccacaatctcaagctcaccataaacccgccgtgaacctcggagtggtctggtatgctccggcctatcctccatgccctacccccatataaggagaccgccgcgaccctttcccttgtcccagctttcttctcgcgctcaaacaaacccggccggattcgccctcgtccgtcgcggcggacgctgtcgccatgaccgaaatccatgccgcgccgtggacagggcgttcagcacatcgaattaaggtattaacgctgcccttgcattcgctaactcatggggatagagtagaagcagggaatttggttacggggcctcaaatcgggcgcgcg

SEQ ID NO: 130041 - DNA, 447 bp, Zea Mays
cttactttttaaatcattttaagcctgatctcacatcatgcaagcaagaatcgatttaagcatactatgcctgcccatatatccatccaaacacattctatacattatatcatcccatcgaagaactctctctttttttaattatactatgcatatatatatccatccaataactcacacaatctgcatctccacctagacttcacacgacgtaactatttcatacttacgcaaacacgccaagaccagaaaacatggcttcacaacaatacgtactggcctattcaaatatcccttgctatctctctgtttcagtccacgctccgcatatacaataacaagataactatcacaaccacttcatctattccctcccaccatacaacataattaacatggattgcgaaggatctcaccatgactaaaccaagctcccaaagaaatatc

SEQ ID NO: 130042 - DNA, 536 bp, Zea Mays
gccatacaacaaaaatcatgacaacaccgatagatactatccactaaccgtttgaaaaactaaacttacttctcgcttgccactgcatcactcctcaatcacatgaccatcatgagcatcctccacacgattatataatagcgacctaagcgtcgtgttacacaatacatacatctttcctcgtcgcgagtataaccatattacggcatatacccgcacacctcaatcaattatcttacgtcaccaccactataatacaccacggcacacacacatacgtgtccccacgttacgcacaagacatcaaccacaccagtgactccaataggatttatcatattccccattcacctcgactatcacaatcgccgatcatatgcataaaacaaatacacctttcacgtagacacctatcgatgcattccccaacacataatccgcaatttaaaaatttatccgcacagcaaaccacacatcaaatacattattaccgaaacttaaaaaaacatccaaccctctttctaactcgtttcctt

SEQ ID NO: 130043 - DNA, 300 bp, Zea Mays
cacacttgggacttggtgccacctccccttgtcaccaacgtggtcaccatcaagttgatattctgccacaagctcaagtctggcggctccttggatcgatacaaggctcgttgggtccttcagggtttcactcagtgccccgtagtggactacgatgatacctccaagcctgccaccattctgattgttctctcctttgctctctctagggattgggcggtacaccagctgagcgtcaagaatgtcttcatgacactctgactgagacgatgtactatagctagcccaccagttttgtcg

SEQ ID NO: 130044 - DNA, 300 bp, Zea Mays
catggcttcactagattttaatctttccaccaaagagagcaggatcttatccttctcgagagcttcgtttctcaaagttatgacctccgaacgaaggtttccaattgctatctggttactctcatcttctgcatccttttgagcttttaaagctttactaagaattaggccctagaaaacaaagacgaacaaaataataataagaagaatcaccacaaaatcgttcatcaaaacaaaaattaccaaatacgaaggcaaaacacacaaaccttcaggctgttgtaggtgaggctgtctgcg

SEQ ID NO: 130045 - DNA, 786 bp, Zea Mays
catatataggacagcaaccctagggcatatggtgtcgctaagttggccaagtacagcgggtgcaaggccgcaggcctcgccgtgccatacagggattctaatactggccacaattccctgattttaatcacaaccaagctgccagtagacatcttttttgttttgagcttgcccaaacatgctggctttttacccctagtggaagatatttggacaaaaccatattacgctaaatcagtttcagacaaaattccaaaagaaacttatagaggaatgaatttgcaggttctaagggcaggggttttaatttgcaggttgaaattaggaaacaaagagcaaaacttagattttatggtcttggaacttatagaggaaggtctgctatcacaggatcaattccatgataaatcagctaaactagctgactgttgaacatactggaaaaatgggaaactatattggctacagagatcccatgcaacatggtttctcaaaggggacagtaacacagaatagtttcatggagttgcaaatagtataaaaaggaacaatacaattctcaaccttcatggtggtgaaaacatcatagagggtgatagtaaacttttccagttgctactaattattatgagaacttcggtccagcacctagaaatatttttcctattgatctcatctgcgaagctgttctaaaaattgatgaaaaagacaatatcctttgcaaacctcttttctgaaaatgagattaaagatgttactgcctgtcagcattcctatagactttta

SEQ ID NO: 130046 - DNA, 337 bp, Zea Mays
gggttttgttagcagaagttggattgttgaaagaaaggggtctgactgcagaagctgtggtcgctgactttgttttcaagaacattcagccactgaaagacagagcatatccagcttatctgtaccgaggcttggctgactcaacccgggtaaccaacagaagaattcctgctgtggacttggtgagccggctcgagatgatactcagtggcaaggtgtagaacatcggcgctcctgttgcatactcggcctggaatttgcctccttcccaggcttttactagtttcatgtcaaatcctcctgctggtgatagcggtttgggtcttagagtgcgacc

SEQ ID NO: 130047 - DNA, 648 bp, Zea Mays
gccttaggagataatcaagggggggtttaggagttttagggtttctaaccttgggttaaaaattgggatgttacaaacctaccccacttaaaagaatatcgccctcgagattcagactgggcttgagaaaaggtaagggtattccctcctcaaagagtcctcactctcccagtcagcttcctcttctccttctctgctccactgaactttacagagtctcacttctgagtttcaggtctttcggatggctgagtcaagaatcttcactggcttttctcagtactgcagatccttctgaatctgaattgcctcttctttgatgtgacttcctagcactttcaggcatttgcggagttgggatacgtgaaacacattgtggatatctgacatggattgtggcaattcgaggcggtaggctgcgggtcttattctgccaatgataggataggggccaacgaatcacggagctagcttccctttcacttgaaatcttttgactccgcacattggggatactttgaggtagacgaagtctccttccttgaacctgagttctctccgcttgttgtctgcgtaactcttctgtcgactctgagcttcgagtagtcttttgcggactagggcaactttctcttctgcctccttaat

SEQ ID NO: 130048 - DNA, 419 bp, Zea Mays
ttctgttttaagattcgtttacaacggaataagcataacaaggtcactagaacaaagtggtggaagcttaaaggggatgtggcccaaactttcaaggagagagttatcgaggagggcccttgggcagaagagggagacgcaaacatcatgtggaggaagatggcgacatgcatctgaaagatagcttcagaagagtttgggttgagtcaaggaaacagaagggaagttaaagacacttggtggtggaacgaagatgtccaaaaggctatcaaggagaagaaagattgctacaaacgcttaatcatgacaagtgtgcagacaacatagagaaatacagaatagtgaagaagtctgcaaagcgagcggttagtagagcccggggtcaagcctatgacgacctttatcaacggttggacaca

SEQ ID NO: 130049 - DNA, 352 bp, Zea Mays
ccggtgaccaccgtctcacggccttgcgccatgtatctggacacatccgtcgcgtcgccgtgactcgctataagcgtctgatcattgtcggtgagagttgccacagttaatgccacgaattctttgcgccagtgaactcccacttctccgaccgccagcacatcttgctcaaattgatcaccaccgctcaagcacgctataaattgacagcatggtctgttgcgtaggatcatcaccaagcttgagcacccgctattgctgtcgattagccactacaactctataatttctcatttcccccaattctgtttccgccaccgcaggaacaccctcaccgtggacagcttatccc

SEQ ID NO: 130050 - DNA, 422 bp, Zea Mays
ttgagcttcttgactggaccggttggtggtgctttcggtgatcaatgtgttctcagatggatagtctcgctcggtgcagttctgattcctccgttctctgttgtatctctgctggctttagcgcatctgggcagtgctataggttctctggcatgcctttgtatctctgtactttcagtttgtcgtttggggccgggcagtgtgttagctcggcgaacccttgtttgaaggtcctagctcctgttagtttggtgcagcagggtctcttgctgatttatgcgtggtggcagcgtactgtatcaagtagagtggatgtttttaccttatgaatccaaaatgtactattttttcttggaatgtacgggggttaagtgaccacgctaagagagaaagcgtaaggcatacaattctgtccaccagtg

SEQ ID NO: 130051 - DNA, 1102 bp, Zea Mays
aggaagatctcgcgcgcgccttggacattgtcatcctcggttcacctctgcgcgtttcccttttgtgccactgccggtggggcccatctaccaggtccgtcttcctcgcgagcgaccaaaacaaactccacgcgattgctgttgggattcacggtattcgcgcgagggaggccgagtccgtcgcgcaacggctgccgtaatccatgtattgcctcgggtgatttataccgcgttgttgcgccctgttcatccctaaccaagccctagcatcatcaccgtagaggaacaagaatccaaagcaaaactgcgccgttggggttagcgtgtctgggaccgtcgggacctcggtgacggccgggggggcttcaccacaccgttctggtcgggtctgtggcttcggccgagctgattgcgcccaggatcgtggtttgggcagtccttccgccgcggagcttctactcatcgcgtgccgcaccgattgcactcggattcacggtaagtttctgtgtatcaagttctaggcgcagcccgggttcgaatgacggtgtttagtcgcgagattgctacgtcaaggcgcggattcggtttactccgtcgaggtcgtggtcgtcgatttgggcggcgcctcctcgggtggataaggtgtgaaaggacgagtggctggagcgcgtgagaggtggaagatgatgcgatcaccgtccgatcccgtggtagcggtgcagattaaaacgtctgcgtaccgcttcggatgatagatctgagtcgtcggtgctagatcgtgcggctctggttcatcgacggttagtttgatcgtgggccgttggatcgcgatcggatggtctcgggtgaatcacgaagttttaaaatatgggctgtggatgtttgatccagcgactgtgtgggtgtaccggttcgcagggtagtgggtttaatctgggcgctccgtagtcgatcggatggctaggattcaaggataccccttcgccgtggacgttttgcttaagagtccctgttctttttatgaatcaacccgcagtcctggcgccagtagttctaagtcttgagacgttttacaccagggcccctacactttccagatttc

SEQ ID NO: 130052 - DNA, 392 bp, Zea Mays
ctcggctgcgaggagctgcgctgtagggggttggatatgcttcagccgaagtggagggggtggtgctgtccattggactgtgcaaaacagtgagccgacagagcgtggagttgtcgcggctgctgctgggggaatgctcgtgtgctatggaggtcggctggtttccatggtaagtggagcgcagagctgctgcgccgtagagcgaagaggagcaggggcgtcgatagagggctcgcggctgggagaggagcacagagacgccctgctctgtggagatgaagggcgcaacttcctgcaacccaacggcatggagaacagggagctcgacatggctcccatggcagcagcggccaccaagaccagccatccaactggaggagccaagcacctag

SEQ ID NO: 130053 - DNA, 463 bp, Zea Mays
ccagcacatctgcattttctgctcctgtccttttggtaagaaaagcagacaattcttggcgcttttgtatagattatagagctttgaatgactgcacaacaaaagataaatacccaatacccgtggttgatgaactccatggggcacactacttcaccaaattggacctccgctcggggtatcatcaagtacgggtacatcccgaggatgtggagaaaacagcttttctactcatcatggtcacttcgaatttctggttatgccatttggactgtccaatgctccctcaacatttcaaagcttgatgaatgaagtcctagggccattcctgtggcggtttgtgctcgtattttttgatgatatactgatttttagtactacttggaccgagcatttacgccatgttgcagcagtcttggacaccctccggagcaatatcctatttgtcaaacgatccaaatgc

SEQ ID NO: 130054 - DNA, 489 bp, Zea Mays
gcgctggcctaggcgagctagctctaggccaacctcgctcaggcggaggaggaaactccctcgttgttcatggcggttgtgcaaccatctgtgaaggctgttcacgacgcacaccgcgtcgagcatgtctacctcaacgagcacaaggtgttgctggacttcgatggcgacggtgaacagcaggagatgaagtggtacctcaacactggtgcgtcgaaccacatgaccggcaacgcagacatcttctccgactacacccacgacgtcgtgggctccgtgcgtttcggcgatggatctctggtggagatcgccgggcggggatcgatcctgtttgagtagaaggatggaggacacagggaggttcatgatgtctaccacatccctcgtctttggagcagcatcctcagtgtcgggcaactcaatgagaacggcagtaggatcgacatcgacgacggtgttcttcgtttgtgggatcgccgcagccacgaa

SEQ ID NO: 130055 - DNA, 526 bp, Zea Mays
tttagaagagggtggtaaaaacagttgggcgtttaaactcgttctgtacatttacgtgagtgtggtgctgttcgggattgaacttagggtgccaggagaagtaaaagtgaccacttagcagctaaaatttaatattatatatgtatatgctatttgttatactagatgataatcactcatcctaaaataactttaaaaagtgtatgtaacttaaaatcactgtgcttgtattgtatggaggcaaaacatgtatggtttcagtatgtatgtaacaaaaggaaggatcaggattcagaaagcgtacagacatacagtcagcaaggtgcaccaaaggggttttggcctgacccagcagcaagagcggtgaccacaagttgtcgttttgacctagctacctaacatgaaagaagcccagtgttgttttgaagtaggaaggggaagaaaaaaaaggtgaaaagctgcaaggcaaagcagcaatctccagccaaggaaagagtgaaaggcatgccgcaacaatgtaatggcc

SEQ ID NO: 130056 - DNA, 525 bp, Zea Mays
gcgacctttaaagcgctctggttccatgccggcgccgtcgctgttgccgttgcccgtgcatgcacgccacaatcctattccccgccccggcccctggtgcctctgcgctcgacctcggagccaatggatcgatcacctgcacacacgcgcgcgctcgagattgaaaattgccggctggagacagtagaccgatcgagcacacgtccgaagtcgacggccccgggttaatagtaataataatcagcgagaggagaggaccaagcggcagcaaagcgcagtgctgaaacacaagagcagaggccgagatcatatatcaaaaccggcacagctggctggaactcgaatctagagacataaaataacgcgcgtcggtacgtacgtacgtattgatattctccgtacacgcgaggcagtcagctggagcttgacctgtagcggtagctagagctagtaggttattacgggagtgaaatctggctgtcgcgcggaatcgaatcgattctctcgacaccgccagagctcgct

SEQ ID NO: 130057 - DNA, 457 bp, Zea Mays
aattgattaaccaattctgtaaccacaacaggcatctccatttgctgatcagacaaagtcacctgtaactccagcaactgctcaatggcttcttgtttgataagagaatcaaactgaatacaactaagtgttggatatgactgggtgttaggcaagacaccctgtaaatgtactggttttcccttatacatgaacttcaaccacttgtgtccccaatgtatcgacatgggactatatttctccaaccaatccattcccagtattaaatcataaccacttaacgacagtattttaaaatcatggacaaaagtattgcccccacacagccattggcaatccggcattacatgtgtactccataactttcttccatcagctacctttacctgcaacggcactgataaaggctgcactcctgtcattactcctgtcaaatgagtgttcataaagcttgctg

SEQ ID NO: 130058 - DNA, 307 bp, Zea Mays
caggaggtagatgaggcaggtgtgttgctagctgaagttggactgctgaaagagaggggtctgactgctgaagccgtggttactgattttgttttcaagaatattcagccattgaaagacagggcatacccagcttatctgtatcgagggctagccgactcaactcgggttaccaacaggagaattccctctgcagacttggtgagccgacttgagatgatccttaggggcaaagtgtcaaatgttggtgctccagtggcatactcggcttggaatcttcctcctcccaaagccttcaccctttttg

SEQ ID NO: 130059 - DNA, 390 bp, Zea Mays
gggcattgtctccggttaaggtcattgtcatcggttaagggcattatctccggttaagtgaattctcaccggttaagggcattgtctccggttaagggcattgtctgcggttaaggctattgtcaccgattaagggcattgtctccggttaagagaattctcaccggttaagggtattgtctccggttaaggctattaaagccagttaagggcattgtatccggttaaggctattgaagctggctaaagtcattctctccggttaagggcattgtatccggttaaggctattgaagttggttaaggtcattctctccggttaaggctattgtcaccgcttaagggcattgtttccggttaagggaattctcacctgttcagggcattgtc

SEQ ID NO: 130060 - DNA, 422 bp, Zea Mays
aaagttgtcatggattgaccggttctggatgaaggcgttctgagcgttggagataatttcgttcattcttggatcaagcctatttgccatgatttctgttataattttcatgaagctattgatcaggctgatcggcataaacctatcaattctgtcagcattttccccctttggtatgaggatgatgtttgcttcattgaccagatgcaggcttttggatctatgttggaaaaaatcatttattgccatggaaaggtcgttttttatcaactcgaagcagcatttgtagaacagcccaatgaacccatccggcccgggggccttttcagattgaagccccatcacgacgtccttgatttcactgtcatcaatcaagttgtccagctcagataactcaaaaggagcataccccagatggtccc

SEQ ID NO: 130061 - DNA, 422 bp, Zea Mays
taaaacttgatttcgaaaaggcgtttgatactttagaacatgaactgattctgcaggttctgactcataaaggatttggtacaaagtggattaactgggttcgaaatatcctacattctggcacttcttcggtgttactcaatggagtcccagggaaaacctttcattgcaagcgaggagtcagacaaggagatcctctctcaccgctgttgtttgtcttggcggctgatcttcttcagagtattatgaataaggccagacatctgaattttcttcagcttcctctgccagctagttgtgaacaagattttcctattgtacaatatgctgacgatactctcttgataatggaggcctgcccgaagcagttattctttcttaaggcaattctcaatccctttgcaacctcaactggtcttagg

SEQ ID NO: 130062 - DNA, 980 bp, Zea Mays
aatgactatgttcaatgattgagtatccagcatcaactgaaagcacttcatttgatcataagctctaacaaccatatctgaatcaccactctgggatacaaatttgataaggaaactgcaagcccaaagtgtaggaacaaatccaagcctgcaaaggtgacaaaacatctctactgtttcttgtacgtcgtggctgttagtgtatgccttgattaagcaattgactgcatatgagagtatgtgagaagtggcacaagttttgctcaagtgaccaataagtgttaagatttctgggtcaccattagcagttcccgaaagaatctcacaaaacaaggataccaacatcttcccctggaatgaatgggataaaatttgtatgatctctgagtaggttgagaagtcatggttaaaaccaaggctatgtatatctttaaagtaggcaaatgcaactgcaggcttcctccttaggcagcggagagcctgcacaacactgtaagagctcaaagacttctgctgtttctggataggctcattatcagaagcataattcagcctttcatcaccgcttgagtcatcatggtgaactgaagcgagtacggagtagttgcaagaaggaacttcccgcgataaatccttactgtgcctgaaccattcagcagtgcatttgagccaccgtgacaggatcattggagatataaatctttgtgctcttctaacgacccattagccatcaatgatagaagaaacattcctgcatcagaaaagaaatagacaaaacattttcagatggttcccataaccgaacagtcaaatgtattatttgatttaaatgctgattgcacataatgatttaagtcaagagatgattggaaaaaagacatgatttcctctgaatttctgtatgtccttgtgacaatgttacatcaaaccagctaaatcagttaaaaccatcaagaaccttctcttgtaaattgtaactg

SEQ ID NO: 130063 - DNA, 644 bp, Zea Mays
gaggtggagaaggcagcgcgaattttggcttctaccaagttcactggtgaaattgtgagtgcctcgccgtagtccatggcgctatttataggcacggtggtccggctaacgatcagtggccgcagattgtattgttcacgcatggatgccacgtagagaagaggcacagtaaggggaaaacaaggcatgggtgacaccgcggcggaagtgaccgagccacggcaaccgccggtgggatacctccggccatgcacggctgggttcgcgagatggtgccatgtccgaagttatctctccgcgatcgactccctccaccagatcactcgagcacatctggttcagtagtgcctcagatcttatccgcgttcttcagatatttacagtgctttgatcttcagcgttttactgaaccgaccacctatcatccccactttctcatgattcttgttaagaacagggtaacctcccttaataaaatttgttccccaaacaacagtctttaagtttgttatagggttcatggatcaattctgtatagattctcagatttggtgctctcaaagtgactgcatttcactgggaccatacttttctgaatccagtgttcagaactgcccaattggcttctgacagcgcaacttcac

SEQ ID NO: 130064 - DNA, 571 bp, Zea Mays
atcgtagcgacgcacgagcactttgttagtactagtgttgataatgattgatagttgatgtggcggtcgataaaggacatgggcattggacttaaaacacaaaagtgtaccgtcaccagggagccgcacgttgaccttgctattgaagtaaccaatcttcttcatagtttgcaaatcttttcccttcaggatggatcgacctatctcaatatagcttggcttcaatgggctatccctcgggagctccttcgcaggtctcaatgatgacgaagctctcatagcttcggaaatgggcacaatatcctaaagtgcctccgaagaagtaggagtgatcaacttagcagtcgagcggatcctcgccatctaagggaattacgccagaagatgttatgtcgaaactacttccgaagtggtgttagatgcagagtttcggagtaacagaaaattttggcagcaagtggttgggggcagtaaatgtgactcgctcccactcgctgtatcacttttatactgataagtgggcgcgaagaggtgcaagtcgtgaaaaatttcgcgcgcgcaggcaatgtcg

SEQ ID NO: 130065 - DNA, 314 bp, Zea Mays
tctaaatatgtgaaaaagaaggccgaccccagtgaccggccaccaaagcgacctcgcttacccacccaggagcaacagcaggttaggccgattggaccacctcaccaatcgtaaaggacatgaggtcataatgtttaattaagacctaacgcacctgcgtggacacttccacctccacatacacccatgtcatgtcattatacatacataccacttccaccatatatcccgaatcagatgtggtgcgccaccatatccatttgggataccacaataccccgcctgggggggcacctcaatcatctatttttgac

SEQ ID NO: 130066 - DNA, 587 bp, Zea Mays
cagcagcagaccagcagtgcagtagtgccgagaaacaggtagcgcggaaaagcgcgggattgaaaggagaggatacacaccctacgcctacgctaagaagggacggcgccaactcggggcaggcatctcgcacttctcgccgctggactggtactggtagtagtacaaaagaaaggccaggcaggcggcacttcttctttctgccacacagatatatagctcatagctgcagcgctccctccctcgtttgctttgcttgccttcttcagctggcctggctagctaggcgagggcattcctcgccagtgttctcgtcaagagttctcctcggctagctggtttgtcactgcacctggtcagaggtgagttaattctttgctcctgcatccgctgaactctgttgttgttgtgctgctaagtactacgaactagagagaggctacccttgttgtcgccttggctggatcaatcatcggtatgctgagagatcactcacgattgggcgtttgaagtgactttgttgttgtcatcgtttagcctcgaatcctgaacacctgacctacttcagcatcgactctctctctctc

SEQ ID NO: 130067 - DNA, 374 bp, Zea Mays
cgcatggcggcgcatcgacactgtgcaccgcattccaacccccagtgccaaaattgctccacaaatatgcttttcctgatgttgaaggtcacgtgagtaacatggatgacttcttatctaaaattgtggcgcaaaaccacaggccgacgaccggaagcggctccgccgtggacgaagacccacatcgaggaattctgtgcggaccaatggttcccatggtaggaagccctccccacgcgtttcactgctccgagcaccacaccctgaccccctccatgaagctccatcagtagtatgcgcccaggtggatgccgatggtggaggcgagcctcccttctttcgccaacctcccctccttcactgttgtgtcgccg

SEQ ID NO: 130068 - DNA, 316 bp, Zea Mays
aagaaggcaaataggaatgggaaggttaatcgtccttccaaaaatcctggtacaccctccaaaattagtttataatgaagggaattttttggaattgtagaggtctgggggatttggctaaacataattacctatcccagttatctagagaacatagacttgactttattgctctcatggaaacgggtcgtagctttctctgattccactttagacattttttgtgggggtgctgattttctttggcacctcatgccacatagagggagatcaggagggatgatgttaggtgtgaatctgggtgtttatgacattg

SEQ ID NO: 130069 - DNA, 315 bp, Zea Mays
aacaaaatagcacttccaaatctacaatcattgacaaaagctccttatatgtatttatataggaggtatatttagcttccacaccttggcagtgtcaattagtttagaaacatgtgcaaagtaacttcaagagaatttatgccaacaactaagcagatgggcacaaaatgtttcgttttacacaatagcattagtggacatgtccattgaattgaatagaacatgagtgatggattatacatttttcaattaggaactattgaggggaagattagaagttgtatgattttttgaagattagggagaggaagcatc

SEQ ID NO: 130070 - DNA, 374 bp, Zea Mays
gaaatttctttagcttcgctttctctttgaaataaagctgcacaatgtccctggtggaggttcttctagatggcacctggaaacgtggacaggccctagacatgaactttctaaatcctgccttctcaccaaaagcaaagggcaactcatcctctacgaccatctcagcaaaagcctctcttagtgcatcttgatcaaacctccaagtggttggagcttccccgtctgttgcttgcaaagtgccctgctttggatctttattgaaaatatttggattcctcttgcaaatgttgaagtgcttcctcaaagctgaagtaccatgtgaccttgtgtcggccttaatctcacgatgacaatacttgcatctaccagcc

SEQ ID NO: 130071 - DNA, 599 bp, Zea Mays
gtgggtgggaacatgcttcttgtcatatttgaccatattttggcatggtagtggtggctctttgtgttagtgtggtcttcgctccggctctcagagctgcaagtgtgggaacccttctggggtacgtgggtcgtcgctcggaggtagttgggtgtttcctgccttcaatttgttggtggtggtgttgtttgcttggctagctggaatgtcgtcggtgaaggtggccttgccctttttggtgatgagggctgcttttgtggcatcatactaagaggaggattttggccttggtgtttgtttttttgaagccatcgtgggttgttcttcgaacgcaagcacgatgggcaccaaatgttggatccaaaaactgtgggcccaagcactcgataactgggtgaccggtcgcaagaaggtggcacgacaaaatggatgcctaggagctcaaatgtcttatcaaccatgtcttgtccagctacaagacatgggtatttatagggaaactaggggtacgtggcctaaatacattcattcctccggttacctgctacattcttaaaatatactgcagaattcggtaattacagggtgggaacgacttt

SEQ ID NO: 130072 - DNA, 334 bp, Zea Mays
cactatggcaggcacacagctgcgtatgagttccgcttatcacccccagtctgacggacaaacggagtgtgtcaaccagtgcttggaaactttcctccgctgcttcgtgcacacctgtccatctaaatggcatcagtggctctatctggcagaattttggtacaacacatgcttccattcagcattgggtcgttccccattcgaggttctgtatggccgcactccccgacagctgggcatcaaacctgtggattccattgcaaattcagatttgtctacttggctatcacagcgcgagttgatgtctcgtgtggtccaccagcacctacttcgg

SEQ ID NO: 130073 - DNA, 468 bp, Zea Mays
ggtttggttatgatcataggcagagccatagtaggctcgaccgagtgttctctccaaatcgtggtggaggttgcatgcttcgtggcttcttgccccacaccggcgatgcagtgcaggatcctgcttttattggcgatgcaggtaaatgactcgtagtgaaatgtttcacttgacgtgaagtcgaaggcattggtgaagacgatggccatggagctaatctgtgtcgatgcctacctggcgtgtcggcggtcgatgtttagcactagcaatgcactatgggaggcttcacgcagtactttgtgattaaggacatcgactttttgcttgatggttcgtgcggtgcatgacgaaatgcaaagatcacggagatttatactggttcgggccacgaaaatgcgtagtaccctatgtcttgtgtgctactaaggtggaattgatctcgggtttgaggttacaatatggtgaagt

SEQ ID NO: 130074 - DNA, 1944 bp, Zea Mays
gtaaactagctgccaaggtgaagaaaaaagaaaagctaaatgcacagcttacctgcaccaaaataatattgagtttattgacataaagcctctcctgccgaaaggtaacttcattgctggaaagctgtcaacagtacaaaaagggcagtagcacaaaaacaattaaatggatcagattttattaattgataagtgtaatcaaatgttaataaaatgacatatactaatccttgcctgcacaataacatcagatatgtaattctttatgccatcacgttgatcgacgggcaatgcattccacctgtacttgataacactttcaagtatctgcatgaatgttggtacaaaatcatcgcatgctaaatattaaaacactcgaaccgcacgtgcagcagttagcccactcagaaactatcttccatttacatcattgatatgatttttgcctcacgttcctatgctagagaagtagagagtagaaccttagattgaaaaaaaataaagtagaaccttaaaaggctctgtatgcgacaattgcttagccttatttcatggggtacagttataactaatcttgaagataaagaaattgcaccttgtagtgataaacagagaaagttatcatgatacagatagccttgattatgcagttccatttgcggctggacatagttgcaaacttgcaatcatattatggaagtaatggaaacaggagttgaccttggtcagccatgcattctaaggtaattatgtgagtctgtagatatgatattgactgtacaagcaagccttttaagttcaagactggggtgaaaattgcatgtagtattttaaaccaatcaaaccagggcataaacatagcatccatcctcccttttgagcacaagctaccccccccccccatgtataacaacaggcagcagagtggacaaacttacttgcaatgcaaagaacttggtgttgaggttctgggaattctgcagaatgtgtacaacttgtagccacatgtctgggttgttttgtaggtcacgtagtatctgatcagcggcgctcctctggaacgaaaggcagcagatatagttatctgtgttcaatgccaaaaccacgaggctagaaaacaaatacacaaaaactagcaatgttaggcctctggtgacgagaaaggaccagtcagctcggagtgggggaaaccccgactattcacgtttgctttaacatttagtcattccgaaggtctagatagggtaagtgtgaacggagaaggataaggcggcggcggcgcctcagagacggactaacatatggcacgccaaaccatatcgccaacagaagaaaaaaccctaaacactaaagtatcctagtttagcaaaacaggtaccattcgcatttagcaagccgagctcggatagactcgaagctcgagcaaccgaagtaaaccctaaagtcggtcgggggcaggtaatccgcggatggtccggtggaagagattacctcctctttagatccggtgccgtagaaggcagcgacagtagcatcgaggagcgtcacgtctaccggctggcttagatccctgagcttctccgccatggcggcagcggttggagtgagcaggtgaaggaagcttgtggaggcaggggatcgtggggagcagggaaggcaccggaggcgcgagaaggcgcagccctagaagcagcgagcgcggcgacgctagcggcggcggcggcgggccggattcttaccggaagagggagtcgggggagaagaaagaaggcggattttaatttttggttttggggggtttaagagagagaggggcagagctgggttgggacgcggggagttgctgcaaaactacgccaacgtatggtatcggtatggacggttgagcgccgaatgcacgcagctccaccgttactttaaattttacgtataggtccctgctgc

SEQ ID NO: 130075 - DNA, 561 bp, Zea Mays
ataaagaatgctggaatccatgactcacgaattttaaatctattacccaaccattcgttgctatgaagaccataagcatctatgatagcagtccaccacatctcaaattcttctctagtttctgaactccatacacaattgtttaaagcagcccaaaatttgcctctttcttcctctccatttgtgccacaaataattgagcatcagcattctttattttctctctaagtccccgatagtagttctggaggtctcgcttcatacatccaatattgtcaaatttatcactaacctgtaggagtctatatgcttgagaggtaccaatacttgctttgtggcacatgaataaggtagtcttggctctttgactgattgttcggttcgatcggagaaaaggaattttatcaggcgagaccagaccatggttatgctcctcaacaaatgaagcgatatagtacctattgtcctgacccaatctcatatatatgcgtgcattgcatccacatcttgtttctaagtgcttcttttgcttgtttggttcagcacgtctctttgtaaaac

SEQ ID NO: 130076 - DNA, 734 bp, Zea Mays
tgcatctgacgatcctgcatctataaagaagagaaccaaacaaacaacactttaatgacccacgggtgcagctgcatgcatgcgagcagcagtcaaccaaacacacacagtgggtggatcacgccggcgtcggtgaagcccacgtccgccacgtacgttatgcctgtcttgtcgtctgtgtaactgggcctctccgtgtatccacagtcgatgcttagaaagcctattagcaaacagcgtcgtcaatggagatcagttaagttattaacaccagaggaggacagatcgatcgagcttcacactactgcatgcacctaccgtgactgtcaagctgggcgtgattcacgtcaatgcagctcaagatggacagggacaacagcaagatgaccttggccgtcgtccatgcgcaaacaagaccatctcttggctgcaccagcatttctgcttcctgggcgcgcgtcgtcgttcccctttccctcttcgcagcacaagtgagggcatgccatttgtagcaagcaagcgactcgtacgtgtcattgttcttgacgccatggatcgacgtagttctcgatgcaaaacacgcacggcttattagctgcataaccaagagcgccagcatatatgcagatagagagagatatatagcagtgtccgctacatgcgacgtgccaacctaggctacgtcctcgtttctgcaccaccgtaccatctctcacgtcatcagctgtcataaa

SEQ ID NO: 130077 - DNA, 1006 bp, Zea Mays
catctctcatcgaaagatcgggcacccttctacccattgggtttatcaagtagtatcaaagctcaggttgctcggtgagagatctccatcttccttgttttatttacctacagtccacttttgccaaagatatatttagagcagaaaatcacctcaaaacagtttgagcctttgctttactacttagttttcgacttgttgaattcacggttgctgcatttgggtcgagttgctggtccaaagttttcttaccactagagtttcgagttcgcgccaccttgttttcaatcacctgtttagacctcttgctgcaattcaaccaaaaaagaagagaaagcaaaaggcgagtgcataaaaaaagccgcactaatcagcaaaaaaaagacacgtgcaaaaagagagagagagagagagagaaaccagttctgaattttggtagataaaatttgtaagtgcgacaaaacaaaaggcagtttgtgcgccttctttttatagtttcagaaatccgattgctgttctgagcttttggtgatactatttgtgtaacggctcgcgtctctattacggtttggactaggaccagcacaacaccattgtagaacgtttattcaacttgttgtggctaacgtggtactagctattccttggaactattgaaattgcagctaccaataaatccacaaaattttctacaacaccaccaggttgtgctagctgccaccgttgttgttgttcttgctgtttgccagcacctcctgtattgcgtggtgagaatttgtaagaacttgcttaaccagtttgagaatgagagattacaacaatgattcctagtagtttataggatcaaagatatttttattgttttcttgtctttactaaacatggcaggtaatgtggagatttttgagccaaccgaacattatattcaaggcatcattcgacacttgccttcatataccggtaaattcgatcctcatgcatacattgattgggaactaaaggtaga

SEQ ID NO: 130078 - DNA, 895 bp, Zea Mays
taggacgtggggttgattcgttagaattttgagggtgtattcgcaaaaagggatcagtgaaggggtacgtgctgatctgtgtcgtctgatgaagatccgggggcctagatttacccagctgaatcggtattgaccagatatgatcctagctatccaaccccgatgggacggtcacaaagcattgcgacgaagggatatggccgtgtctaatccggactgcccatttaaatccaacggcccgaggccatcttcaacctcccgtcgtatgggcacggcgacgcgaccaagttttgccacggagttcaccggggcgacaccgcccgtcgcactgatgcccaaaactcaacgatgactggttcaaaacgttgtggggaggacgattccgagcatcgggatccacgcaccagaggcagcggacgacagcacatatgctggagttagcttacatgcgggcctgccctggtagcgtcggactgggctggtgagcgcgacagagtggtggcacagtgtggggctgacgagtggggcccaaatgtcggtacccgtgcacgtggacacgaggtagatgggccgcgcgggtgagggtaacttgggctgagggaaagggattttggcctagaagtgcaagtagctcatttttcttcttattttctctttttttttctaatttctctatattttttatctcgatttcaaatcaaaaaccagtttgaatttcaaacttgtgcctttagatgctcaaataagagtgccaatattattgaatatacttttatttgtgtatattttctttattgtgtatattcttttcttacccttctcttttctttcttttccattttcaaactttaaacttgtcccatagatttgaatacaaatgcaaccatacaagaac

SEQ ID NO: 130079 - DNA, 955 bp, Zea Mays
gagggctaaatgaccacgcgaagagagaaagcgttaggcatacaattctgtccaccggagcttccattgtttgccttcaggagacaaagatttcgaattggacaaatgttttattaaaggaaactgtaggcgccaagcttgctaatcaatcttttcacttgccttctctgggcgcctcgggcggcatccttatcgccgctgattcagatttctttgacatggctctcttaccatgttcagcagcatattctctatcagtcaggatcagctctagatcagaagcggaggtttgggacctcacgggggtttacgggccccagctggacaatgaaaaaaatgattttcctttctgaactccgtaacatccaaaccgtggtcaaaccagaatgggtattactaggtgacttcaacatgatcaggagagcaagggaaaaacaaagggtcaatcaacagaagagttatgagacaatttaataacacaattgatgacctgcacctcttagagctagagctcaccgatagagcattcacctggtcaaatgaacaacttaaccctaccatgactaagattgacagattctttgcgacaacagagtggcatgacctattcccctcggctgacctacactccatgtgcaccatgacgtcggaccactgccctcttctaatgcaaagccactctttgggttccttataccatgggttcagattcgaatctttttggcctcagattgaggggttcaacgaggttgtcaatcaagcatggaactctacagtaaatactgatgatgccatcctttggcttcatataaggatgtctcacacagccaaggctcttttggtctggaggcgcaacactgttggcaacttcaaagtgcagatggccatcattcagatcatcctcactctcctggaaaaagcgcaagagattagacaactatcctttgaagaattg

SEQ ID NO: 130080 - DNA, 863 bp, Zea Mays
atcggtttcagttgagggaaactggattctagtgcgttgagctcgagtttggggctgcgtatctatggatccatgcacttgcagccctagagtgttatagcaaaccttgagagctatattaggtgaataagtttgcttagatgaagtcggcatgtccttgttttgaattgtgagaaaaatggggatgaactggaggggtgcaggcgagtgaagaggttcctggttcagtggattccaagttggttaagaattctgaaaatggatatccacacactacctctgtactcagtgctccagctcggattttggggatacggtcgagtgcaaaggtgtaccaggggaggggataactcaagaagtttcaccgccgtagtgtttggatcgagtgagctggacacctctccaaactagtgactatgctactgatgttttgctgtcagcgttcccagtctttacttctctataacttgggcctgcgtggtgccctggtttcacggccacgtccaagctctatccatcttctaggttccagcacacatcggcttctcctgattcaagctacctaatccttatcccctccacgtaacctctttgttcagccctgaagactaccggacactcctccatcttgtgatattttctctcttccatatctccacggaagccgcgcattccatctccctcacagcgcatgtcttcctctcggtctccaccagagctcggtttcaccttgcctctttttgagccagtcccagcatgcctctactccacaagcagcagcagaacaccgggtgtcgtctgatgttgccaggtgatgctcagttcctagccgctcacttcccttcaccacaatcaccccagcc

SEQ ID NO: 130081 - DNA, 717 bp, Zea Mays
tcgtctttacagaaggactagttcattatgaattgaccactagcagaagataaccatcacccttactatactactacaataccccacactactaccatacaatactaacaaagctggtggtgcctcaccaccagcacgatcgctctcgtcgccgctaccgccgccctgaccgtcgcccatgccgctgcctccaccctgaccgtcgtccgcgccactatcgccaccgttgtcatcaccactcacgttatcgtcgcctttgccgctgtcaccattgctgcccccactgttatggctgtcctcgtctttctcctcctcctcctcaatagagtcttcctattcgctctcgtctgactcatccgagccggcaaggcctgagtgctccaccgcccggatgaaggactacttcgatggggtaagccctagggagtcatcgaagtcggtcgtcagtgagggaggaggaggaggctaggagttcccaccgcatgacccggagtactccttggagtacttagagggcgcttatgcttggctcccttgcccttgcaatccttacatcctttggcacctctacctccggccataggagctctctaggaaaagaagagcttgcaagaagtggaagcaaaagtgagtgaagaagcaagtagcgaccggtctgactacttaaagaaatagaagggtgcctcttcgcctcctactcgtataatgaacagtcac

SEQ ID NO: 130082 - DNA, 369 bp, Zea Mays
acgccctcgctaaatatactgtattgtatatgtctccacgcatatacaggcagcctggtttgaggccgtttccaagttcacgcatttcagttatccaccaaatgatttagtgccatacaatatgttgttattactcaagcagacagatagtaacgacactaacataaatcggtatgaagaataagaacaaagccaagtttgtgactgaacttcactcagttttatcctaccaatctagtgatccaaacagtttaacggcagagccagactccatgcagggagagagagagagtaagaaggaaagagacagatctgcggtgccgctgttgttgccggcctctgtccggcgttggtgttggcgtgaggaag

SEQ ID NO: 130083 - DNA, 332 bp, Zea Mays
ggagaaggcagtgtgcgtggccgcagggcaggggcgcgcctgggtagctcgggtcctcctggcggcgctccagagagagaagggaaggagagagaaaggcggcggccagagggaagcaggggagcgacggcggctgctgctaatttctgcgaacagagcgacggttgagagattggggagaagatgaatagtgcctggtggggcccgcttggaagagaaacaagggagcggctggggctctgtccgcaattgagaaagggaagagaaaaagtaaatgtcgtgtggggctcacattgtagccaatgagagggagagggagagttcatcacgca

SEQ ID NO: 130084 - DNA, 766 bp, Zea Mays
cctgcccgcccaagtcttcggtcgtccttctggttggtggtctcctttggcagatacatcttcaagttgaattcggtctcggttggtcatcttcttcaggttgcccttggtgggttcgccgcgggctttgaggtgcttcagctggctgaccgggtttttcggttttcggtctcttcgatggccatgggttttcatatttacaactcaggttgcattgagcgtaaggaattcatggctttcttcaacctttggaatcgtggtggacccaattggaagcatgaattcaagcttttttcggatgaggaagcggcttcctggttgaaggtccggggcaggaagaatccttcctatgcggatattgttaagctccctctcaccggtgccaatgttgttccgattcgcaacattatcaagtcccctagtggtgatcagcattcgactcgggctggatcttcggtgttcaatcgtttgaaccctcctttccataatcatgctcaggttcgtagtaattggaggtcccttgctgggcctcggcctcgtcccagagtttctgtgttcaatcgtctgaactttccggctttgggatcgtggccttcttcctctaaggggaggattggatctcctcggttcttgggctctaattcttctggtgtagttcttggaggcggaattcccaaccgtcctaaatttcaaatttcgaattccagctggtctcgccctcgcaacctccaatggcgccccgtgcgtgctcgcgggcctgttgggc

SEQ ID NO: 130085 - DNA, 501 bp, Zea Mays
atagttggcgcgctaggtagaggacttgagtgttccgcaacgaaattctccaagctccagatggctgaaaacaatgttgacgtggcacaagctcctataacgactgtttacgttgggaatacgggtgacgcccatggcaacgaaaagcaacgaacacggcccctaaagccccgactcccctgatgggtgattcactcgacatcattggaagcttcgaccaccttcaccctgatcccctagcaggtgggaacatgtggcaatgctcaccctaatccattttccaagcctgagggatcattaggccccgtttagggaccatcgtttggcctccccccccccccgtcgagatcaggaagcacacccggttccccatcgagtgagagcacccacgcctcagcctaggaatgcctcattatctcatcgactagggacccatctgtatccacggggagccttgaggagaccctcatcaatgccatgttgtgcgccacggcattagcc

SEQ ID NO: 130086 - DNA, 566 bp, Zea Mays
gtgcatttttgtgggttatacatctactcagaaaggatacaagtgttgggaccctattggtaagagactgttcgtgagtatggatgtaacatttcgagaggaagacccatactatagaaacaaagttgatctagatcaaatcctagaggacttctctccggttgatggaggtgaccgtagagagggggaggatgacaatggtcgaggtagtgattatgatgaggctagtggtgatgaggctagtggagcttcaggaggggtgattgttggaggtatgattccactagaagtggagatagggataactacataggcattgagtaatgatgaaagtagtgggggttatggtgatccaactattaatattcaggaggagacagaggatgatgatgcagtgattattggatcaatcccatgtcctactgcagggaagttgaatgagaaacaggggagcaacatgattgttccattggggtaaaggtgaatgacaaatagggggagcaacctatagtatactatcgaaagcggacgaagaagcaggggagcaaccacaacctgaacgtgtt

SEQ ID NO: 130087 - DNA, 483 bp, Zea Mays
tgaccaatttctttcttgttcctccgatccgcctcaacgatattcagttttaacgaattctcctgcagcttatgatcctacacagttttcacaccatccctacgagtgagcacctgcaccaggaattttcaagccaccatgagttagcctgcaagaggccttcctgaagtagaaaaatgacgacacctgctaattgctgccccctcgatgagctggcggatgaagtgttgtgtgtttaacttcccaccatcagatctatctgcgtggtggttctcgctgcacttccacccctcctgaactcatgtcacagcaggctctggcttccactcctcactgccatgcttctttattattcttgttagtccagattgctaacattcggcgtacaaacaagctacccatctcctccgaacaatatttggcatccaagatgtacttcaaacaagttcttgggtgtatgtgtaaatgctaaatcatgtatta

SEQ ID NO: 130088 - DNA, 314 bp, Zea Mays
tgaatgttcttgaaaacaaaatcagcaaccacagcctccgcagttagacccctctccttcagcagtccaacttcagttagcaaagccccagcctcagccacctcctgatctgtgggggactcggtccaactcggagtacgaacgtccggctgtctccccgaacgtggggggagagaatttccgtggttttcaacgataaaccactccaagcgccatcccttaatactgtccttgagagggatttcaagataatcatacttcctcccacggcgcatctctaaactagcacccccaaccagctgatgctacccccg

SEQ ID NO: 130089 - DNA, 1074 bp, Zea Mays
cgccattcccgctatcgcggagcgcgcgggggtcatgcttgttgcctcatctgcttcagaggcatcaaaggtgcgttgctactcctggcaacttttggtttctcattttctccatggtttcttcctagagctttttccccaaccactgatggagcagcaggtgattcagatttatcgacagccgttggaagagccggacatgttttgggcgccgattgagctcagcatcgcgagtgacagccaccacggactacaggtacgtaacgaggatcgcctcctcgattacacttatccattggtcttcagttgaatctgggcaaaaatgatgtatcgtgagcgatgcctactgacgacacaccgatatgaaaagttgtatcatgactgataggatttgtttgccctgtccacaatatgtatcgtgagcgatgcctactgttctccgtgtgaatggctgtatcatgactgattgggttcgtcggccctgtccacaagttgtatcgtgaacgatgcctattgttgttggccttgtccacaaaatgtattgtgagtgatgcctcggacatcatcaccaccctaagccacaagacaccgaccctaaaaaaggtatggggtcttagacatcatgagtcatgatacaaccattcacattggtgtgtcgtccctgctgaggcatcgcttacgatacatcatttgaacagggccatgaaatcctatcagtcatgatacaactattcatatcggtgcgtgctgaggcatcgaaggaaaatgatacaactattcatatcggtctgatagaaccatgcgtgctgaggatacaaccttaccgatagaattttacgatcaaaacaaacacaaagacaggaaaatggtcggtgggatctgcctgtggtggcctccgacgaaagcgtagacgtcggagaagatgcagaggacgccggagaagaagcagaagatgcagaggacaccggagaagaagcgtcgatgctagaaggattcttattttggaaaccacgaattgatttttaagtgcttttgttgatgacatgtgcttgaaagtgtactattttggactgc

SEQ ID NO: 130090 - DNA, 535 bp, Zea Mays
cgcaggccgtcgaagcccagcgcctggcccgccggcccgtagttgaagttccaggagagctggatggggccccgaccgtggtaggacttgcccgggtagcacggccactgctcgtccgtcgcgtcgcagtagttgctcgccggcttgatctcctccttgtagcacaggccccacgcgtactggccgtccggcgccgtcgcccacccgcctgtggtctcgtgagagatttgcgcgaggaaggccgcgacctcgcgtttgcgggtgctgaggtcgccagtggcggcgaacgtggggaacgtcctggcggcctggatgaaggaggcataggtgtagaagcccttggcggggcaggcgtcgtcgtccttgtgcaggaacagggagccgtacagctgctcgctgacgagggccgccacagggacaacaggggcaggggcaggcctcctccactgcccagggccgccgtacctcgcctctgctacgccgatgacaaggaaagcgaccacggaagcagcagtccacaaggcgcaagaatacg

SEQ ID NO: 130091 - DNA, 472 bp, Zea Mays
gcgtcttgggtcttgggtcgttgatgttgacaagaagatgaataataagctcggagtgctgtctgtcgtcgggtatggtggtcaggggaaaaccaccattgcgatggagctttaccgcaaattcggtcctcagttcgactgccgagcaatggtgactgtgtctcagaactccgaacctgagatagtgtggcggaacatactgagtcagctgaagcagcaggccgaaaatggtgtgaaggaaggcaaagatagcagcacgcgttccagaatggagaggaaaattcaagttatcagaagcatagtgaaccggcttaggcatccatgccgaaatgaagacgaagatggcagcactttgttgggaaggcacagacaaaatcatcaagcgggcctggtggggaacacactgagtcaggtaaagaataatggcgagcagcatggcaccagcttggagaagaaggctccagttaccgga

SEQ ID NO: 130092 - DNA, 1139 bp, Zea Mays
cccagctcctggagctgaggctcggccacaacagtctcaccggtaccatcccggaggccgtcgtctgcaactgcacctccctgacctccatcatcctgagcaacaacagcctcaccggcgagatcccgttctccgcacggtgccggctcccgcgcctgcagcagctcagcctctacgagaacaggctcgaaggcggcatcccctcgcccatgtccaacttcaccagcctcagctgggtgcttctgcagtacaatcgcctcggcggcgtgctgccgtcccagatgttcagcaagatgccgtccctccggtacctctacctgtccggcaacagcttctcgagcgacggcgggaacaccgacctcgagccgttcctcgcctccctggcgaactgcaccgggctgcaggagcttggagtggggtcgaacggcatcggaggcgagatcccggcggtcatcggcaacctgtcgtccgccaatctctccctgctctacttggacgacaacgagatcaccggtgccatccctcgcgccatcggaaaccttgcctcgctgacggatttagagctgcaggacaacatgctggaggggccaatccccagcgagctgttccatccacgtgggcttacaaagatagtcctctcgaataaccagatcaatgccgaaatacccaaatccatcggcttattagctcagcagctagccaccatcagcatatcgaatagcggtctccgaggcgagataccagagaccttgtcgaacctcaccaacttggactacgttcttcttgaccacaaccagctctcgggtgccataccacctggtggtcttagctgccagatgatcctggacctttcgtacaacaagcttacaggccagatccctagtggcatgcctgggctccttggtagcttcaacatgtaccttaatctctctaacaacctcctagaggggcccgtgtcgtcactggagttcggcagcatggagatgatccaagctcttgacttgtcgggaaacaagctctccggcggccttccgtcttccatgggcgccttgaaaaacctccgtttccttgacgtttcttccaacggccttaccggtgtgattcctcggtctctgcaagggttgccgctccagtttgcc

SEQ ID NO: 130093 - DNA, 1346 bp, Zea Mays
cttgatccggcgaacgtgggaggtttgagtctcaggaaatcccccattctgtcttgtggtcttccaccattcggccgttgattttctagatttcgagtgaggacctcgatgagtcgggtttgattggctagaacgtgggctagatctaagggtaatggtggaggtgcggggaggtgggtttcactttcttctctaacgacttccccttcagctctttggggaaacccttctccaatcccagaggcggtaggcgtggttttatccgaagccatctgccagggaagagagtcactattatgcacatgcaaattgtttttaaccaagttattttattcattacaccatcacattacaagcataagactactacaggtggaattacacgagagcgttccccgaggtactagcgaattccttatctaaggtgtccccaaatgccttgagaagatcatcgaggcttgctagggatacatcctcgtcgtcggaccaatcatctattctggggggaggtagggctagaggggccttcttcttcttcttcttctctgtctggcatccttggttggtggtcttcttctgtattttcttcttgggggcgagtttctttagcttcttatcatagtccatcttcaaagtccgataggcttcacgggtgttggcttcctcgccttctgctatgttgagactttcctggagggatgccttctcttgcttaagttctttgacttgctgctcgaggctttccactcgggagtttaggtggttgcagtgggaggagagctcgtcatagtggttgtcgagggtgtggaggtatctggccatgtagacgatagtggggtcatcttctgtggggtttcctcctgacagagcctggagtcttttcctccaggtgggggtgtttttgttgctgggtgggaaatatcggaggggggtctcggagatctctcgactatagttttggcacagttgtttgagggcttttcgagcaacgctctggcaagtgtctgggaagcggtgcacgatgaaggtaatttggaagggagggtggtttgggtagttccggctttctcccaagtagaccgccatagagcacttttctattccattttcacggtactccttccagacatattcaggattcttgcggatccccaagcgtagcgtgcaactccgaagaaggtgaggaaagccttcctcctctgagcaataggatgtcctaatcacccaggggttttccatctggtagacgaaaagaaaggtctattaatatcggggaaaaggggaagagtgtttcttgggggtaagaggtgttttcttgttaaggcaacttttaaggtcagggctgt

SEQ ID NO: 130094 - DNA, 490 bp, Zea Mays
gaaaggaagagtagtctgccaccgcggttctaccgttctgccgttctgcccactctcgaccgacagatgggccctcgtgtcagtgccctctcccagcctgactcctcacagcaaccacccttccatcctctctctcgccctcatcccccacgaatcccatcccgtgttctcgtgaccatgaatccccaccccgtcgtcgcttccatggcatctctctctgtcctcgccgcccccatcgttgtagctcccttcccctccctcactgatatggggagctggcattggagacaccgcacattgcgtagacggatctcactggggccggatcgaagctgaaccccacaacaacgccctcctccgaccctctgtcttcaggcatcccccaagacgcgacgctctcatcctcccactcatcagagtttgcggccaagaggagcacggagtggagtccgagaaggcctgaatggtgcgtcccgttcacccacgacgc

SEQ ID NO: 130095 - DNA, 1436 bp, Zea Mays
atcatgcatcatcccgggattttcttttgtgtgcatattgtggcaaaataaaatactaatgtgacaagaaatatattaaaacccaaagtgggattttaaattctaaaagaaatcctagaattttggaaagaaatgaaaacaaatatgatgtggatataaaaataagtaaaaacaaagataaattatttctacacaagggttgaatttgcaggattgacacaaaggaaactcataaaaggattcaaattcaaatttgagatttaaatgaaaaggaaaaaaagaattaaaggaaaaataaaagggaaataggaagacagcgtttgggcccaaagttttactcggcccacaaaccttccactaccgcgcgtggcccaactttgtttttttccccatagcgcgcgcccggccaactgccatgtggggctagaccgaagaccatcgtcttcaacagcctgggcggacctagcgcgtcgctcccgggaggttctcgcatggccgttgcgaaatcttcgccgctggaccaggacttcttagctaaactccggggtacaagtaacagaccatcccctatacgccggtctcgttctcgcctccttccatcaacagacccaagctcaccgagcaagaagtagggggggagagcgaagacgtcgcggaaccgggaccccggtgcgggtgtacccgcggtgttgggccagaaagctccgcttgactcctctattagtgctgacggcctcgtttggggagatcacggattcggaagccgtcaatttctcgtcgtcgacctgcgctcccccgcagatccgccttcgccgtggccggatgctctccgcgccgtggtgaccggtatgacctcctacaacgtactctccatcaattccgcatcgtgtaggagctttcgaatttagaattagtgacctagggcgccggtttgttgaatcctgggcaactcaccaccgtgtgtcaggtcgcgccgccgtgcaatgtgcccagcgccaccgcgtttgggcacgggttgggaagaaaggggtacgtgccgtcgatcttgcaatctgcggtggggattagaagccaggtgaacgactcggctaggactcggtgaccgttgatctggggcttcaatggataggattgaatttggggtatttagatctgggccgccgatgggtgatccagcggctgcgatccagtacccgttcacgatggcgccgatctaatctgggccaccaagggttcgatcggatggtggatatatcacgataccccttcactcgtctgttttgtagaagacccctccaggatttccgaaataaacccgcggtcctcgggcctgtttccctgagtctcgggaatatttatagaataacccctgccttctctggaaattgaggtccagtccagtaaatagaaaaatccaggaaaagagaatagaaatc

SEQ ID NO: 130096 - DNA, 308 bp, Zea Mays
ggcttcgtcgggcagtcctaagcgtgggacaagaagcttgggaggtttggctgatgggtcggggcgcatgaaatggtcttgcgggtgaatataggtgaggtattcgggcacagaggaggcagggtggttacggctgcatccgagtgagactagcacgtgtaaaaaggataacagtttgaggagatgaagtcgacacgcgagctccgaatgacaacgagaagaacaagtgaggggaaaacggttgcacgcacagcacgtgaggcactacgcgacgagacgaggcaatgtggtaggcgggggtagacgag

SEQ ID NO: 130097 - DNA, 617 bp, Zea Mays
gcgaaggagacctcgtactcgtccggacagctcgggcagagtcccggggcaagctagaaccaaagtgggagggccctttcatcgtcaagacgaaggcgtcccccaacgcgtacaggctcacaacgccatccggtgaagacttagaacattcttggaacattgacaatcttcgcaaattttttgtttgactcctcagggccagctcgcccttgtaactcgcaaaacagttttattccggctcgcactcttttcctcctgggggtgaggtttttaacgaggcggagccatgtaatatacacgcaaaaaatcccccgcaaaaattacgtcgaaaaagaccgcatcgacggtcttcagcattcgaccaatacaaaagtcaccgcgaggggcagcgctggctaccctcgcatgcgacactccgcgcaaaagtagcctaagggtgcagccagactagcacaacaagtgcgtaaaattgaagtcttcatcaaaagactatccgcgcaaaagtcgcctaagggtgcagccggactagcacaacaagtgcgtaaaatcgaagtcttcatcaaaagactatccgtgcaaaagtcgcctaagggtgcagccggactagcacaacaagt

SEQ ID NO: 130098 - DNA, 384 bp, Zea Mays
aaattgaagaaataacgaaaatgcaagatattttgaacgctccaacaagggcgacggtaccgaaggtacaaacgggttctatcgtgactcctaaaaggagaaggatggtaaatgtattagatgtattggaaacaactgactccataagtcccgctcccacagggaaggttgccgaagctgacaaaacgcaacccaaagctgatactaagcaaatagaagttgaagctacaataacccagactgaaaccgaggcagggcccacagtgcctgctgagacgaagcttgccacaaccaagcagagggccgaaggaataactacatatactaatatagcttttgagaaaagtgtggccaaagaagccgaatcccttattcccgaagtac

SEQ ID NO: 130099 - DNA, 344 bp, Zea Mays
ctctagtgcttcttgagcttcgagagtccactagaatctgtccaccttcttaagcaatttgtagaatggcattcctccctcgccgagccgtgagatgaaacgactcagtgctgccatgcggccagaaagcttctataccttcttctgtgatcacggtggatccatcctcggaatgcttcaatcttctttggttggcctcgattccctgctgactgatgatgaatttgggaagcttcctggctggtaccccgaatacgcatttctccgggttatgtttagaatggtagcgcctcaagctgttgaaaacctgctggagatcgtcgatgaaattttttgggttcacg

SEQ ID NO: 130100 - DNA, 483 bp, Zea Mays
tcacccgatcaagatctaatagctattagtggctcacgccttaatcaaatcgtatccactcattccgatctcgacggctccgattaaattaaatgaataggtatgcgatggtctaatcggagccctccatatacgagttgacggccaggagccatcacatccgaccgcgatggcccgaggcggcgccgccggcctccatggtggcgcacctcaccggaaatacatgaccagacgccctaagcgacaaacggcaatccaaacgatgctacgtgttctaagaaccgaggcgaatcgcttgagggaattctcacaggtggcggtgttgcgaagaagccggacgtcggcggacagaggcttcacggcgacgctggaactctggcgtcatatccccagcttgcatgtcgataataccttttggtgcgactatgaagacttgcagggacctcctgcaaagcgcccccgaccctcttctcccctcgagca

SEQ ID NO: 130101 - DNA, 476 bp, Zea Mays
gcaaaatggcaggctcttctctcttcagctctgtttaatttatagtaggatctgaaactttatagcaggatctgaaacttgtgtaacttgttttgcttcggatttagctggtggtactatcgtgaccactccgaatgtcattttcttctgagtcctctatgctctgtttaatttatttgatgtgcacaatgatatccagatttatatgaaactcatttgttgacctccagatttatcctcaagaactcgacgaaggaatatggcatttaggggtatcttgagttctctccttgtcacgtactattatgtctggttgttcatggggttagcatatagaagaaaatgtctgagaatagaaagaaggttaagaaatagagagtgtaggatggagaatttatttgaactcattcgtgaaagtgatagaaaatatatttttgccttttatggatagaagaactttctttattttgtgtgag

SEQ ID NO: 130102 - DNA, 668 bp, Zea Mays
ccataatccactttcttatctttctgcattttaccttcatatttggatctttttgcagctttctggtaagagtcatcaactctaatcccagtctctagagattgttcatcctcttccgagtgtatttccctttcaaagaaaaaatcatacaaaaacaatccaagagaaccttccacaactccaggaacagccgtgacatccctgcaagcaattctagctctcacatattcatttctgagtctggttctttcatcaatttcaatcaccttacccacgagcccaccaacttttttaattgtcaccagagacctttgctccataggaatgccactaatcctgaaccaacctttttgcaagcaacctttagcattgacagcaggtgtccaagggtcaattgtaatctgagctttagctgttctcatgcccaaaggtctaaagtatccaagatcccctatcatcttaggatctagaaatctcattacaaacttattgtcccccatagatctagcataccatctccataagttcttgcctaacatgttcatgaattccaattcaatctatttttctccaacattcccttgaacaaccgtgataatagcagtgctggatttttctttaatcatcatattatccactttttattcaatatagaaaaaactctgatc

SEQ ID NO: 130103 - DNA, 538 bp, Zea Mays
gtcccactctgccaatgatggggtaggggccgacgaatcgcggtgctagctttcccttcacttggaaccttctgacaccatgcatcggagagaccttgaggtagatgaagtctcctttctcaaatctgagttctctctgcctgttgtccgcataactcttctgccgactctgagcttcaagtaatcttctgcggattagggcaactttctcctcagtctctttgacaaaagcaggcccttccagtgccttttcccctatgttggaccacatgagaggggtctggcattttcgtccatacaatgcttcgaacggtgacatcttgatactggcctaatggctgttgttatacaagaactccgcataaggcaaactggattcctagcttttatcaaatgttaacacacaggctctaaataaatcttcgaggaccttgttgaccctttctgtctgaccatctgtttgagggtgataggcggtgctgaagtctagcttggtgcccatagctttctgaaggctcgtccaaaatttggaggtgaa

SEQ ID NO: 130104 - DNA, 298 bp, Zea Mays
gaagaaactggtagacctgtaggtccctcatgcgacgtagaatcatggcaatgttgctatctccttgcattcagtcttgttgtatgcttcccatcattgacttatgtggaatcctacagttgcttcaaagaaacactttgatcttgaagataagttggcatgctcccaggcggagttccgtcaagtgtttgtatttctcgatggtgcccatgaagcaaacaggtcattgcaatggaaattcaacatggaggaaaagaatcatgagatatttggagcacttcaactttcttactccttg

SEQ ID NO: 130105 - DNA, 299 bp, Zea Mays
caaaaatgtgctaaactaacccctctacaacatatctgaagatggcattgggattcagaacctagacacgacaaaaacgaagatttgcctcaggctcgggctgagagacagacccgacttgagagctccatatctttggaactagtaggccaatttctatgaccccgcacaagatcggtagcttatagagaggagaagaggttttgtgcactgaccaaggcaagagcaggctcggatgagtgacaacacgcgccagaactcgggcagaatgaacgcgcacacgtgttcgaccctggtcg

SEQ ID NO: 130106 - DNA, 271 bp, Zea Mays
ggaagagtcgtcggatgaggacttggattactttgcggccttggatgtggcagtggcggaggcttcgccgcgtgctgcggttgctgaagttgtgcctggtccaagtgctgggcgtaggcggcgaagggcggttgcgaagcgtagagtgagtgaggcggacggcggtcggcttcgtgtgggcagggctggcaagtaggaattgttgtcctcgccggccgttgtgagtgtgggtgagggggagctgcaaagtctttttgagggtgaggagttg

SEQ ID NO: 130107 - DNA, 1052 bp, Zea Mays
gccaagggtgaggtaagtaaaacaccgctctcaaactaggataggatattggagattttagaaaacgaacataatgtaattaccaaggtaggatcaagagatgagaaaagtaaaggtagtacccaacagaagcacaacaaaggatggagttgaaaactcacaagcgacaaggaagatgatacgaccaagggaaaataggtaaaatacaactataaaattgagatggaagagagaaggttttaaaggacatgtatgacataagcatcaaggtaagatatagaggtgacaagggtaaagaagataatcgtggaaagcataaccaaggatagagttaaggcaagactcgtgaagtggcgaagtggagagagtaatcaagggtaagataggtatggttccatcagaagggttgaagtaaaaattcattacccaaggaagttacaaggaaacaacgagatcaccaaggatgtgcaaaataaaatgaccgctcatggatcattaagaaacaagtgtggtaaagggcatgttaactaaaatgtcttaaacagacactggggtatgaagataagcatacataaaaacatgagagtatgcaagactccaaggacacgagcatattaagaccaagggaatagaaattgtagaaagataatgacttaacgacgaaataggaagggatctcaaaagacaagaaggtcaggggtatataaactaaaatatttaaataggcaacatagtttttagaggtaagtatttgaaacaagagtattgaagaatctagggatacgagcatgtcaatacccagggaatagagatggtcaaatggtagcaatttaatggtggaagaggaaagaatctcaaaagacaaaaaggctatggtcaggggcacctacaaagatgtcgcaagcacaagagtgagatcagatctaatggattgagaaaagtatagaccatactcgaatagaatactttcggcaaggggatatataggagcacaatatagaattagtcgagatgactaaaattttgaagtagaatcaaggatgaggtgaagt

SEQ ID NO: 130108 - DNA, 303 bp, Zea Mays
aaacgaggggacaactttcctttgactttgaatcttctcataccccggagtggtgacatcttgaggtacacatgatcaccttcctcaaactccactggtcttcttctattatcagcgtagctcttttgcttggtttgagctaccctcaagttctcccgaattatacggacttgtttttttgcctcttgaataagttcaggtccaaataattgtcttcctctaatctggtccaaaatagaggagtcctgcatttcctgccatataaagccttgaacggtgacatcttcagactggcctcataac

SEQ ID NO: 130109 - DNA, 881 bp, Zea Mays
acttaagacatatattttgcatttatgttggagatttttttgtgcaaattagaattctatttgaatttaaacctaattggaattggaaaatatgaaataaaaaggaaaatcactcaccggccgaaacacctgtactcgtggcccacctccattccatactacaggcccagcctactgctcacggtggccgagcgctagcatgcacactgttgttatgtggggtcaccccgccagccaccttactcgcgctcatctccctctactcgctgacgcaagggccccaccagccagaagtttctccttcaccatagcaagcgcgagcagaaccgtacccgccggataagtaacgaactccaccaaacgcgcaacagacccaacaaccagtgcggtcgtgccaaaaaatatacaagagccgatgacccccctttcaatccccagctctcagaacccgtgttcgccaccagatcctcgcgccgctcgccgcctggccatggcttgtcttcaaactatggtcatgccgtggggcacaaagacgggaggtcgagatgtgaggggcggctccgccgtggttgcgtcatgcagccgagccatcatctccagagaaaagaactggggcgtcgatgtcgtgtttggatctcggaagcatgctcgatcgggcgcgtgaggcttcggtgcagctacgaatcctcaccgatgatcgcctccgccgcagaactccatgatgccgtatgtgtgtgtgttggggggggggtgctatgcagtgtaatcactagtgagtcatcctctcctacgctgtagctcttctccgcttcgggtagctgctgtgtgcaggggcgtgccgagacaaaatgaggccctatacaaactattgaataaaaaac

SEQ ID NO: 130110 - DNA, 302 bp, Zea Mays
tctcgctacggcggttgtcatcactgtttttggtaatatggaagttgtgtctgccaatgatattgcggcacccctggcgtcacgtctggaggttgatgaaggatccctggttattaggcagctttctacttcttcgttcctgctggtgctgccttcggatggactggtgcaacaattgtgtggaagatggtcaattgtgcgtgctaattccttctcactttcttgcaaaagatggtcacgcctgatgaattcctctggaagcacccttgctcagttgttagaagttgaactggttggcatcc

SEQ ID NO: 130111 - DNA, 283 bp, Zea Mays
agccaaattgcgtgagtgaactgtccaaacataggttaaggttgtaagacaacttttttccaccatacagttgctaaaagttggaatataaagaattcaaaacaatagatcaccttttaaacctcaaatgacgtttctatgatattgtgggcattgtattcacactagagggtattagagtacaactagtggatgaagacgttattgggctagctaatgaccttttgtgatacctagtttccaataatctcgtctattcattgcatccttagatggtgtttat

SEQ ID NO: 130112 - DNA, 905 bp, Zea Mays
cgactttgtattcaagaacattcaacctttgaaggacagagtctaccctacttacttgtatactggcatcaatgattctacccgagtcactaacaggcacattcccaatgaggacctgttaagccgactggatatgatactgaggggtagggtatcgaatgttggtgctcctttagcttactctgcatgggacctgcctccgaatagtcctctctctgatttagtctccaatcctcctgcttgagatggttgcccgggccatagagtgtggccctccctagaggacattgaggccttgatcgccccacttcggaatcttcctgaggctgagaaacaaactcatttcgagatgtcatccagtatcgatgatgctgaaatggatgtcgtacttagcctgctggccggggaatcatctgactttacccgcactgagccgatgccaattgcgactaggcaagagtttggcgaagatgaggaaatccagaaacccgaaggtgcccgccggaagcgttcacgccgagtgaaccacccagctgcacctgtcgaggagaagaagaaaaggcgactccggcggttgtcatgcctagaacaagacgctgacccttccacattattccttggtgatggcccggcgagcgctatccccgagaacaatgctgaaggttgtgatgatgctcaggctgctggcggtatgcttgatgaggaagaagaggaggaagaagaagaaattccgctgatccgcaagaacagccgtcactacaggggcagcgacggggacagtgacattcccacacaagccttgtcagcactcgtcagccttcaagggttgtcaatatctgatttcgaccaagagctagaagaggtcatcctcgaagacattctattagagcctcctgaagctgtca

SEQ ID NO: 130113 - DNA, 1029 bp, Zea Mays
gggagattatatgtgggttgttggcttcatcctccactcaagtattccgtctatgggaggtggggtttttagatttctttggtctctgggcaccacctcatcattgccatcttcatcattttcggtgaggcaaccatttcgatgtccattgactgagttagccatgaatgtgaattggtcctctagtagatcgatcaaatcttaatttgaattgaggtcgatactagggttgggataacaatccaagttggattcgagtcagagtagaaatcgagaatggagtagaatccaagtatgagtcagcgtcgatggacctgaatgatccagtgtcaccataatggtggttgaatcacagtggtcttaatggtagggtatcgacatatctagggggtttaggacgtatgatcccgatatgatagatgagtctaggacgtatgattccaatgtgatagatcgtgaggttgtcgaccatgtcggtgttgaatcttaaggtttaagttgtcaaacataaattcatctcctggtgcaaacttcatagatgccatcaactcctggttaatcttctgtcgaagattgttcaatggatattttatggagttggtcacatgatcaaaaaatgaaggttaggacttataatacttgaggatttaaatcaatgtgagataataccttatgtcttatatataatggatctgttgtatcttgatcttgaggggtttctcaaccctccttttacatcctaaggagagacaacagttccatgaaaggcaccgagtcgatttcaagttggttaccaagttgtacatgaatctagctctctctctctctttgtgtgtgtctatatatatagtatatgtatatggtgccttggcttccaatagctggacgaaagccctgacccgatgttgccaaccggttcagccgcaccaggtccgaagcgtctataaaagaagctccagatcgctagggttcagtattagcaacgccgacagttacgcccccacccccaagaggcgcgcgcggcgacgg

SEQ ID NO: 130114 - DNA, 640 bp, Zea Mays
ttgagagccgaggagacgaaggtctgagtgtgaaaatgacctccttcgctatggagcaagtgctctcccttttatagttcaagggaggcacgttacaagggagttcatgccatgataggtgggcctaggatagtttacaatatagaatgggaaaaactggtcagagttgacaatgctagaccttcctgagcacgtatttctcctcgggtgctacatgatcttctagcgtccttatctagtcactttatctcatctaatcagaacataggccttgatgtaggttgtggcatagcctggtatgctgtcgtgcatacagtgtaacgggcggtgtcgtctagtcttcttcgtccatctcttcatgcctcggtaacacacagagaacaatatgagtcataatgaaaggcgcccaaacgacacaataggtcaatgcccaatgtctcggtaacgtgcgggtaacagtaaaaggtcgcatgcacttaatgtaggggatacactacctgctactcatgcaggcaagtatgcgtcacatttgtactgaatgctagtgggccctgtgtgagaggcctttgttaggcaccgtctggtggcttatgctaagggtgtctagccatgtgttagcatcggacccctgcctaggaga

SEQ ID NO: 130115 - DNA, 941 bp, Zea Mays
attcggcgaaggacaagatctcccactgcgaaggatcgatgccgtatggccttatcatggtagcgccttagagtttgttggtacctggctgactgaatcattgtattcaattgttcttcttctagtatatcaacatcctccagtctagtggcctcagtttaagctatgttttcgaagatcaatcttggtgccccaaacttgagatcagcaggtagcactgcctccgaccataaagaagggagtgtttccatgcaaagctcggctaggttgagttcttaggctccagaccacatacggcaactctctgatccactttcctgcgaacttttcattcttgtcgaagactttctttctgagtgcttccaatatcattccgttggctctttctacctgcccgttggctcttgggtgtgccaccgatgcatatttgatctggatgcttttttgttcgcagaaatcaaagaactctgaactagtgaaattggatcccaggtcagttatgatgctattcggtattccaaacctgaatattatgtcttgtatgaattccactgccttagctgaagttagagaagcaatgggcttgcactctatccacttagtgaatttgtcaatagcaaccagtacatgagtgtatcctccttgagctttcttgaagggtccaatcatatccagtccccagcacgcgaatggccatgttacgggtatggtttgcagttgctgtgcagttaaatgttgttgttttgataagtattgacaagcttcacatctctggactaactcggctgcgtcactctttgccgttggccagtagaaaccagacctgaagaccttcccaaccagagtcttggatgctacgtgtatcccgcattgcccagcgtggatctcatctagcagttgcttcccagtagccgaaagaatgcatttcatgaggactcttg

SEQ ID NO: 130116 - DNA, 1336 bp, Zea Mays
atcgaacccaaagaaaatgctcaacggaaatcacaagggttacttatggaaccactataaagtacaggtgtcctgaatcctgaaaagaaaaaaaaaacaaagtggacagaaaattttggcagaagccagcaaattcgtagggtgttgtgttgacaaagagcactaccaagagcgagtgactcttttaataattaggttttgtgccaaaagaatgggtgaatgacacctcgttgacagaaatatcattggttcagttgcatacttcagctagttctggcttctgggtatgccttcactagatttggaagtcaaataggtaattactagtaatagcataggttaaactgaacatatggcaataactcaccccagcctcattgaaattgaattcattccgcaacccaatcatctcagcgatttgatgggcataatcctccacaccgtcggccatgtgcgcgtccgacgggaacgagatctggtcctcctccaccatcatcctgttatcaatgagcaaccaccaaattcacaaccagtacaccaaacccaccacctggaattttagcgacggagcaagttttgttcgcgcacctcttgaacaggcttccggacgagaactcctgcccgctgatccgcacgttgtccttccagatgaagcccttgccgctgggccatcgcacgggaacccggtagctccgcggcggcgcgacgaggcaagtgaccctgccgtcgcgcgtgcactggcggtcgtagcttatgacgacgccggcccccagatccgagacgtcgacggcgtccgtgatgttgtagtagcagggcacgtagttgtcgtactcgggcgggcacacctccgcctccttggcgcggacgccgccgcccgcgagctcgccgatgtcgagcaggtccgtgaccagctgctcctgcagccgccggtacccgcggtgcgcggcggctgcggccgcgcgcgccgccgcgccgcgccccgcgtagagcgtccccgcccacgcgaccgagcccacgagcgccgccgccagcagcagcaggaccccgatcttcaccgccgcggccgcgaggtgccgcttccgcgcgccgccccggccgaagcccccgccaatgccgttctcgctgggctccttggggtcgtagtacgcctcgtccgccgccgccagcttgccgccgatccccgacacgcccctgtacagcggccgcgacatgcctgctgctgcggatggatctcacgaggcgcaccagtgccgcatggagcgcgacacgcgggccgccacgccactgggccgcagcagcgagcaattccgcgatggcctgcgctgctgccgccgcc

SEQ ID NO: 130117 - DNA, 538 bp, Zea Mays
caacctcggagctggtagatcaactctatgcacagcagcaaacgtggggaggcaaggaagggctgtctcacttgcatcgccgggagatgaatcaggtgggtgtgcgctgtactcgtcctccatggagccgggttaagggagcagcgaagcagcgtcgcgcggggatacagcgcgggcagcgagggcaggcgatggcggacggcccgagcaccagatgcgcggcaacgagggaaccagaggttgaagacgcaggaaccaactggtggcggcgcgggcaccagtggccagtgctcgtgggcagtgggcagggagagccgcgctagtttactggacacgagacgcaggaaccagatgcgcagtgctcgtgggcagtgggcacggtcgctaggggtagattagtacacaggaatatacgacgttcattaaacataacaaatcagacggttacagaagtaccataccaatttagcgtgttcgcgttcttcataataccatcctggcgaagcggagctgcggagtagtaatccggcgaaaccgc

SEQ ID NO: 130118 - DNA, 399 bp, Zea Mays
cttccttatctgtcctgaagtctgggagtggtcccttgcgagctttttccataagacctgctgtctaagtgtccaggcgttgagccttgcatatgaggtcttctagcattggcttgacttctaggctgccattgtctcctagacatacattcagttgagctgattctttcttccaatcttccaagaaggtggttcctttcttcccgaaaggttttcggctgagggcgtctgctaccatgttggccttcccggggtggtagtggatctcaaggtcataatctttgatcaattccagccatcttcgttgacggaggttgaggtctggttgagtgaaaatatacttcagactcttgtgatcagtgaagatgtgacatttgttcccaatcaggtagtgcctcc

SEQ ID NO: 130119 - DNA, 550 bp, Zea Mays
cacggccgcaaaaggttctagttttactgcgcacaatcaatttgagaggagggggcagagacagcgcaaatttggcttcgattcaacccacggtgtgtgtgatggtcgcgcctcaccgggaatcacagggctatttatagccgcggcggtccggcgatcacctcacggccacggatagcatcgcgagcgcatgctgaccacgtcggtaggagacacagtgagggagatcacgacatgagtgccaccgcggcaaaatttactggtcacggtggccaccggtgaggactccggttggactcggggaatggcgccacgtacgagttatccacccctggcgttatccactccataccacgcacgaagcgggacagcggcggcacgaatcatggcagcaatcatcaacggtgagctgtgttttaacctgatcttgttcaggtactgtactatgggagtcaccatcagccgacctgacaaagcaagttcaggtccagatttctccaaatcttctatggtaccaagcccaaacatctatagcaaagttgttctacta

SEQ ID NO: 130120 - DNA, 300 bp, Zea Mays
cgcatcgtcataccacgaaaatcatctaatacaactcatcttagctaaaagaaaactcttctctagctatcatttgtttacctatcaagttacgtaataatcatatgatttgttatatttgaagttaaacttatttttgtgtatttatttgatattttgagtggttggtatacattggaatttaagattttcttggcgggtacgggtatgggtaggattctatacccgtcagcgtatatgggtagcccgatgaatacatttttttatacatataggtatagaatgctactaccgatgggg

SEQ ID NO: 130121 - DNA, 482 bp, Zea Mays
gaggaggtgtcgatctacctgcatgtattcgtcgaagaaaggcaatagctaatctagaaccgaaaatgaatcctcttccgaatcctccgcctgctgggactgatgccatgggtgctgctcaaatacaactgctacaacaaatggccaacactatgacagaaatgcaagcccagctccgccaagacaggaagcagccaccacctccaccacctagggataagcatcacaaattcatgagtcccaacccccccatagtttctctagctccccaaacccactacaagttgatgactggctaaagtccatggaaaagatgctcaacatagcccagtgcactgacagggagaaagtactttatgcatctggtcacctcaccagccccactgcggattggtgggatgcatactatgtagcgcatgttgctgctgacaccatttcttgggcagaattctccaccaacttcagaaactaccacattcctg

SEQ ID NO: 130122 - DNA, 472 bp, Zea Mays
ccagaccctggaggcccagcgaacctagcaggtggaggccatagagaagatcagaaattgggagcaggagctagaggacaaggccagcgacatcgccctcgccgagaagaacctcaaggagaaggatgcatccctggacaggcgggcggcggatctcgccaggcgggaggcagacctcgccttccaggaggaaatgctcgaaaggcgaggcaagttgctggccgagcataagctcgaggcggaggagaaggagcggaagctggaggagcggctctggcagttccaggcgacgcaggcggcaccgggcccccaggtggtggaggccaccaggaaggctcttgaagaccttcaggcggagcatcgcgccggggtccagcgcatcgccgcatgggccggcgaggcgagcacggcactggtgccactagggatgagtcccatcccagtgtcagagctgccgacgtccatttccgat

SEQ ID NO: 130123 - DNA, 429 bp, Zea Mays
gccaaagctactagactagaggatattgatatactagaagaagaacggttgaatacagtaattcagtcagcaagataccaatagactctgaggcgctatcatggtaaggccatacggcatcgatccttcgcagtgggagatcttgtcctccgccgaattctaacggggaagggacgacacaaattgttgccgctatgagaagggccatacatagtagtagaagtcacccggcctggatcatatcgtcttactcaaatggatggcacggaaatagggaactcatggaatatagagcatctcaggaagttttacccctagcaagatttcaaaagctattgggacgacattgtattctgtaattgggagatacaccatcaataaaatgacttcattctcaaaggcactcgaattgtttattgtcaatctgca

SEQ ID NO: 130124 - DNA, 641 bp, Zea Mays
accagatggaaggctccttggtcattaggacatcctactgctcagaggtggaaggattccctcacctgttgcggagttgcgcgcttcgcatgggaatccgcaagaagccggagtacgtctggaaagaatatcacgagaatagaaccgagaagtgctctatggaagtctacctgggagaaagtcgaagctacccaaccaccctcccttccaagtcaccttcattggacaccacttcctagatacttgccaaaatgttgcccgaaaagccctccgacagctatgccaaaactacagcaaggaagtctttgagacccccttcgatactttccacctagcaacaaaatacccctacctggaggaaaagacttcaggccctgttaggaagagatcctattgaagatgaccccaccatagtctacatgaccggatacctccacacactcgataaccactatgacgaccttttctcccactgcacccacctaaactcccgggtggaaagcttagagcaacaggtcaaggaacttaaaagagagaaggcgtctctccaagaaagtctcgaaatagaagaaggggaagaggccaacacccgtgaagcctaccgaaccctgaagatggattacgataagaagctaaagaag

SEQ ID NO: 130125 - DNA, 382 bp, Zea Mays
atttgagatcaggttaccaccaaccaaagattcaaccggaggatgtctctaagatggccttcaccacaagatatggactatacgagtttctggttatgtcatttggattgactaatgcacctgcatactttatgaacctaatgaataaagttttcatggaatatctcgacaagtttgtggtcgtgttcatcgatgatatactggtgtattcacagaatgaagagatacatgaggaacacttatggctagttctttagaaacttcgcgatcactaactgtatgaaaaactctcgaagtgtgacttttggctaaaggaagtttctttcccagggcatatcatcactgatagtgggataaaggtagacccgggcaagatcagtga

SEQ ID NO: 130126 - DNA, 597 bp, Zea Mays
cggcggttcgccttcttcacctgcaagactatataaacagattggttggtaagaagttattacatcattccttgctattgcactattgtgctactgaaattttttactgaagtcgaagcttttggtgcgctatgcattcattaactggtcctcgaacaagcgtcaaaacaatcgaaagttagcttcggcttaagaactcaaatggctaggattaggtctactgctagactgacaagtgagggtggagagaccggaaccactgagacaactccaattttggagtttatgaggcgttctggactggttgtttaggagggagaaggatcttttgcagataaagacagtgctaatgccaaagctaaaaatgttgatgccgaagctggtagtgatgatgaggaagacgatggtatcttgagtccaaacaagcccagtcatgttgaatttggaaaatctactataaaagcagaagacctagttttaatgaagaagcttgggtattttgggaagaatgacgatggactaataagattcgctagggacgaagtaattccggagacgaaggatgatgaagttatagttttccaaagcttcttccaa

SEQ ID NO: 130127 - DNA, 766 bp, Zea Mays
tacgtccagcctactgggtttgttgactccaccaagcccaatcatgtctgccgtctgaacaagtcactctatgggttgaagcaagctcctcgcgcctggcacaatcgctttgcctctcacatcacctctcttgggtttgttgaggccaagtctgacacgtcgctgttcatctactacagaggtgctgatgtggcttttctcctactatatgttgatgatattgttcttactgcatcatcttcgagtattatcataactacaataaagttgacaaccggctatgtggttgagcaaactcataatatacaactcattttttgtgagctgcagcaacttggatgtgtcttgtctgatgtatttgtggtagagggtatcattgccaaattacctccaacttggagggattctgcaacagttctgaaatataggagggaaaacaaatccattgagaatctattagcctctgttgatgttgatgaaaaggcttgcataaaggacgatgcacccaaaacacgtgaggcatagttcagtgcttaggtcatacaacttgctagaaaaacaaagggaaatctaaagattgaaacttcacgaaaaaatgctaagaggataaacataaaagatatcatctgctatgttcgtaggaagacttggcacttcacgaaaaaaataccatggtagcaagggttgtaagaaaagtcaataaggatagaataattttatcaatatgactgtgagcaatgctagagcaacatagtatgataataca

SEQ ID NO: 130128 - DNA, 425 bp, Zea Mays
gcagtgtatggcctcctaatgccgaagcgagaccatataggacgttgaataatcctcttaatatcctccctttcaaccaggtcatttttacgtagaaccactcctgcatctaggcccccggccatctcttccgaaatgtcggaactaggtagctcacctcaaagcgacgcacgaagctgtagaaactgaagttattgtgatattgctccttttcggtagcctttgtctcataagacagctcatggatattatagaaacattttgcatctggttccaatccctggctcctcatggcccatataaagatccccatctcgatgatagcttcgggagtaagctgatgaagctaaatttcgaaagttttcagaacttcgaccagcaacttatccagagggaatcgaagccctaccttcatgaagcttcta

SEQ ID NO: 130129 - DNA, 882 bp, Zea Mays
tgacggcgtcctgttcaaaagcatcacgtggagaaccctgtggtgcgcagtcgggtcataaacacaaatagtcggtgagccaggtagggggtgcgacgtcgatgcatgacaactccaagactatcgtcttccgcaccctgaccatcttcaatgtctgggaggtttttctaatttggatccctctcctgcattgcagatcgagaaggcatcctgcatcgcatcacggatccatccgagaaaaggtcttctccgagggcatcgatcgcagaggcaggctcgtcccacccgacctcagcgaaaaccacttcgacgaactccaaggcacaaagacctcaaccaacctccgccctacacagaattgtgtccacttatattacctcagatcgctcgggttagtttaggatcgctcgaggtttcatattactcatactatttctattcaaactgcgcattacatgcatcgacaagttgaaatgttttctactctttgcgtactttcttgaattactttttggcacatggcctgcctcgacactattttctattgcatctcatgtttagctgaggcaaatcttctctgttccatctcatgtttcgttgagttatatggtttgttgcatctttctaaatacacctcaccaacccaaatcatctctgctccactcatgtaactggcgtcatgaactctatatggccgtcgctaacacggggtagtaggtctggtctgctgacgctacatgccttggcagctcctacagggtacctctgaaccctccacatgaggcaatcggctcaggcagtgaagtacgaccccattttggtggtacatgcctcatttgactcatgggtgacctctaagcccttacttacacaagggaactg

SEQ ID NO: 130130 - DNA, 581 bp, Zea Mays
ctcgacgacgccactgctcgccacgaccccgctgcagcgctgctccagcctctcctgtcgtcccaacacaggcgaccacagtgacgagcccactgcccctggacctgcccgcggcaacactaagtcctcggcgcagccgctgctccatcatctcctgccgccccggcacatgcgaccccccccccccccccctgtgaccgggccgagccgctgtttcagtcgtcccgatgcggtgccctgtacatctgtacgtgagcgccttgccgatctggtaattccactgccacgccctcactctatttctgtctccttaattgtttatactacatatttactacttttccacctttcagctaattcgtgttcgtatttctggatctgtggttaatgatctttctaattcaatatctatgtgcacaaactcaggcagtcaggctacatgtataccaccccctgtacccacccgttctccaatttcatatagaacaagttgttgcttgatattagcgtcccacttgaatgagtctctgtcaactctgtttgtctcttggtttctccgttataatgcttatatgctccca

SEQ ID NO: 130131 - DNA, 395 bp, Zea Mays
gagtctggacactaagttgcgagagagaaatccgttctttagttgcacttttaatttgaaatatgttgcacgtttgcaactacatttctgctgatttacaatgtcatccaaattccaaatcttaaataaatatgtgatttggcaacatgcatattgttaagcctgttacaaatattagctttattttatttattgcatgagatgaagttttataaaggaattgtatagcattaatacatgtgagtattcttcatgcttttcaagatctgagtgcattcgtattttgtgatgaataattaattaaaactatttatttgaactggccatgctcagagaaataaataattaaaattatttatgtgagtgtattcgctttcaagatctaagttccaatg

SEQ ID NO: 130132 - DNA, 408 bp, Zea Mays
tggaagcataggaatagatgtgtctttgatggttgtaatcccagcctggtcacaacccttagagtggctaggaaagaggcggtgctatggtccttgactggagccaaggccctgtccttcctccaagttgatgagttgctagcttagatcagcgttgtgggtcgtgtttcctccatgatagtcggtgatccttagttagtctctaagtggtgtgtgtgttctgtaccggggttctctccccctttcctattcttctattaatgcaatgatgcgcaactctcctgcgtattccagaaaaaaaaagttcctcgtgggttgaacacttacaacatgtcaacattgtgctgcaacagatgcacgctcatcacctcttcaccaagtgttccaagtgcttctttggcgaaccat

SEQ ID NO: 130133 - DNA, 324 bp, Zea Mays
gcactgttatgtgcataacccaggaagacacagtctatggtcttagggcctagctttctcttcttcggcaacggcacattcacctttgcaaggcagccccaagtccgaagatgcgaaagatctggcttccttcctttaaatccttcatagggcgtggcctcacggttgcgaggcggcaccctgttcaggacatagcacactgtgagtactgcctcgccccaccagatgtcaggcatccccgaactttgtaacaaagcattagctaagtcacacactgttcggttcttcctttcagctaccccatttgactgaggtgaatatgga

SEQ ID NO: 130134 - DNA, 505 bp, Zea Mays
cgagtttggagatgcgccgtcggaggaaaaccgagtacctcgacatcccactcaaggacagcatcaaaggatggcgtctagaatggtttatcgtagagaatcatgggaattctctccccccctcggttagggagacagccagatgttcgcactccaagctggactgaaccccccccccacagacttggaggtagccgatgccggggctctgcttgccgaggttggattgttgaaggagaagggtctgactgccgaggctgtggtcgccgattttgtttttaagaacattcagccactaaaagacagagcgtacccagcttatctgtatcgtggcctcactgattcgacctgggttaccaacagaaggattcctactgtggatctggtaagccggcttgaaatgattcttagaggcaaggtgtcgaatatcagtgctcctgttgcatattcagcctggaatctgcctccttccaaggctttcatcaattttgtgtcaaatcctcct

SEQ ID NO: 130135 - DNA, 598 bp, Zea Mays
catcgacgtatacctctactctgtccctgatcaggtccccgaaagtcttactcatcgcccgcacaaatgttggcaaggcattcttcagaccgtaaggcattatgacatagcagtaaagcccatccactgttacaaaagcggtatgcttcctatcttccctagacatctggatttgatggaaaccagagtaagcatctaagaaggacaagaggtcgcacccggaggtagaatccacgatttgatctatacgtggaagtggatacgggtccttgggacaagctttattaaggctggtgtagtcgatgcacatccaaagcttcccattcgccttggggacgatgactgggttggccagccatgcatactgggtgatgaacctcttcgatgaagccagcgtctagcagcttccggacctcctttcggatgaagtcctgccgctcaacggactatcttcgaggcttctgactcaccgatctggcgttagggttgatcttcacatggtgctcgatcacctccctagggatcccaggcatctgcgacggctcccatgcgaacacgtcggcatttgcctggaggaaggcgacgagcgtgagttcct

SEQ ID NO: 130136 - DNA, 1055 bp, Zea Mays
ccacaatgcagcaatcaccagatctccgcccgcccatgacaatcataacggacaaattagtaaagcttgtcgaatcaacaggtcttcaaaagattagcacaacacgccacttggagattgatgctcaggatccctctttcataacaactcgaccttattttgagccgtcctctactggtacgtcactggatggtgattcttatttcttcttaagctcttgttattacagttatcaaagtctcagcttgattattttcatcagtcagtcagggtggaactgagagctgcatctcacggtgatgaatgcccgttcttcctctattcttctgggtcttatgctgccttatatagtcgatggcactccaagtatctcgagttctcaaccgtcgtcgcacctctttctgcatttcttatcatgccaattggtgatggtcaaagctgctgtgatgcaacgctctgactaccatggacgactggaatacaggtagacaccgccattgttatcaacggagaaaggactagaacaaaccccgccatcctgtcctggagaaactggttcaatcttggttagcggttacccgtacagttactactacttacgggagttctttgcccgtctatttgggacaagagtaacctgagctcgcgtggggatgatattttggatgctcttttctggtttgttcatatacgcagcaagcaagccttattaggtgcgtgtctcatggcccttcacgtattccaaccatagttatacatatagcacttaaaccctcaccaaccttagttacacatttaacacttaaacccttcactagctcgctattagtccagacatgacactggtatgccctggtatgatgggaggtttaagtacgtacgactttggttggatgattggatcatgatttaaaatccaggaggctcacatacttgcacctaagatttgcttgtgtaaccgtcgttaccttgagacaatggcttttagattgtgatccaatcgtagttgctaattttagcatttaaacccccaccataccagtgcgtaccagtga

SEQ ID NO: 130137 - DNA, 555 bp, Zea Mays
ttgtcggccaatcctatttttcatcggcgctctaaacacattgaagttgattatcactttgttcgcgaaagggttgctactcaacaactggatattcggccaatttccaccaaagaccagcttgtggatgcctttactaaaccattagcaggtcctgcattcatgcagtttagaaacaatctgaacttagttttcacacgtccagattgagggggggtgttaaagatataattccttatctattctagtaaactaatctcctcatattagggagctgcgcctccgattgttgcgtcaatcacgcttgtaatctgctgccaaatatgtaaccatctgctgctataaatacaagacgccgtgccgtgaccctttgaggcaggcaattcatcccaatcaacactacgaacagtggaacaccatccttaaaaccttgttttcaccacgtcgttttctgccgagctggccaatgctgcgtgccaccgccacccaaaagcctgcttaatccagctagggccccttaacctgtccgcgcaaatcatgttggccacacgtaac

SEQ ID NO: 130138 - DNA, 346 bp, Zea Mays
gcttgagagatagcgtactgcactgtcgactagactactacccttgcaatgaagagggcaccggctgtgtgtcttctggccaccttgttggcattctacttcttggttccctccattgctgtagctctctcaagtgagttatctctctcaatctgcctgcttgattccttcctttgtctcttagctttgctgcgtcggcatgtcatcagtgatctggccacttgtttctgtggtttctaggggtgcaaaagatggccatgcaagaggatggtcagataccatcggttcaaagcagcactctacagccaaaggtaataccacacactgttgactacttgcctttttc

SEQ ID NO: 130139 - DNA, 1301 bp, Zea Mays
gtccagagacgtgccccaaaagtacctgtgggtgattcgcctggtcccgatcccatttgatggggtccaagggctcgattgcctccccccgatgggataccatcacgaatctctctcaagggtctcggatatgtcttagggtatctcgggatcatagcctgagcctttgatgtttacgaacatacccatagtcatccctgactatgttctggggcgattgtgatatccttccgaggggcgaaccttcgaaccactgatcaataacgggcctagagcccatgtgttctagggcaatctcccgagccttaccgggggcttgaccttctaacccctaagcagtaggtgaggtctctcctcttctttctcgaggaaggaagcccgaggtggagacaccctcttctgctacctgcaaagtggaaaaggaggcacatgagagagtgggagaggggtgcatcttttgatgcgttatgtgaagcggtgctagctggctgacgtcaggaagagtgggtatttaatgcaacgggaagcttcggcccgtaggccgatcgttgcggcacgcgtgcacgtggatttcgaagcgacctagcccattcctggtttggactcaggatggctcagcccacgcctcggtgattctgctcgcccctataaattcacccgagaggggctcttcggttctttacttccctctcttgctttcctaccctagcctccttctgccttagccgcaaaaaactcatgcgctcttctcccatcttcttcgttagctacgatggctaagaagttgagcgttctccctccttgcgacccatggctcatttcctcagttaccgacgaggatctagaggcgttggtggatgtcgggctacttcgcccccgctcccatggcctgcagcccaagtggaatgcgccgggcgacatcgctttccacgagcgggggttctgggtgccagcgagtcgcttcatgtgggcgctcctacactactacggggtggagctccacaaattcaaccctagctccacctcttccacacagaggcgttctccctctcctccaacgtgaagaaggtgcgccacatggctcgggctggtggctgcatgctcctgccgcgctcagatcgagcgtaactgtacatccctgccatcctcacctcatcaaacaaggggtggcagagttgatggttctacctccccaacgacgatgggcggctgccggcatatacgcagcgtgttgtctttgcgatggcagaacactggcggtggggctcccctcgagagcttcaggcccagctgaacccgct

SEQ ID NO: 130140 - DNA, 356 bp, Zea Mays
gcaactcacgctccacagtacgcaaccaatcttcggtgtctatggggtctgcggaatgggcaaagatagggggatggcccctcatgaactctgtccgcttgtctctgagcacttgtggcatctgaacttgcacctgaagttgaggtgagggttgttgttgctgcacctgctgcattgctgctaaagtctgaccaattgcttggactccttgggtttgcattaggaacatctgttcaatggtcatcgagggtggcaatggcaattgctgttgggctgcctcctcctggggtgcctgctactcctgttgagcacgccttccacctctgtgcctattctcagacatctgtagaaatcac

SEQ ID NO: 130141 - DNA, 302 bp, Zea Mays
cacggttggagcaagatttatactacttctaatcatcggcggcttgcgctacctacaccattgatgatcaaagctcgtagtaagggttacaagcgggcaagagagggaggagaggctcccaagtctcttaatatggtggaggtagtaatagaatggagtcctagctaagtcttggcttggtggtggggctctggcctctaggtcctcgttggtgcgtcctcctcctgttcgtcggtccttctgagcgtcttctcgtttggggtccttccttgcgtccgtccatgtctttggggatccaagag

SEQ ID NO: 130142 - DNA, 368 bp, Zea Mays
gagctttgtcatacctttccaacgagtacttatgcgctcgattcggagttatattttaggagatatcgctgtttgaatccgggtatgttgctgtccaaaaacagattgcaggggttatcttgtggatggttttgggctaattagatgttggaatttaattataatttgtatacaaaacttgtggggaattttatgtagatgcctctggagtttttgtttgttaccactgctgtcataattttaaagatatgaaattgttaagcagcgccgctgcagtttggtgggtgttggggagagtggtcgcccgcgacggggtttgaattgtgcgtaggtgcggcgtcgtttatgagcgttgttatgtgaaatct

SEQ ID NO: 130143 - DNA, 633 bp, Zea Mays
ccttggcttaagcctccatggtcctctaggtccttggcttaagcatatctgtgtgtgttcctttgtcttctggccgacctccccctttttataggccgagattggggtcggctaccagtaccttctcaaggaaggagctacgacgctatggtcaagggtacctttttatacaatctccccctttttatagtatcccccaagggaagagtgtctccccttgatggctttgcctaggtcaggcggagattgctctgcctctctcggcgtccgagtatagagggtagataagatttatgagacccgccattagcctttcaagggccagtcggttgctataaaatagagggtctctccgctctatccaaaatcagctttgtctgacgcctttttgttctccgtggatggcatcctatcggaaagctaccctacccgagtcctttagggggtccttggctaatcatggatggtggcaagcgccctaccttggagtctcctcaccagggctggctcaaagtcacccaatgcgggaaggtagatggttctctggaagcttgctaatagttccctcttttgttacttttcaggtatggcttcttttgtaagatggttgactcaagtgcccacggagaagtc

SEQ ID NO: 130144 - DNA, 285 bp, Zea Mays
tgctgctgctgcgcttatggcccgcctcgcaccaaaatccaaggtaagccccacaccctacttaccactcctttttcttctcaatactgcttttcatcatgttacactcattttctaggttttacgtgatggaacctggagtgaaatggacgcatctttgttggtgcccggtgacataatcagcattaaacttggagacatcattccggcagatgcgcgtcttctcgagggagatccgctgaaaattgaccaggtctttcttgtgtctcaatcatagtgttcttg

SEQ ID NO: 130145 - DNA, 502 bp, Zea Mays
gggcactggggttttcttgagatggatggacagcccaagtgacaaactaccctcatcagagcctgaacacactttgtactgactcactttggccaagaattttagagacaacaacaaggtctctatctgcacccagttctaaagcaaggaacagggagtatggaggtgggttcctagactctatatgctcacaggagaatagacttaaggatcacaactgcatgcccttgtgcacgtggacactctcacttaagcccacatagagtctaagcataagagaaaacctttgaacccattcactgcatgtttgacaggagagcacctaagcacacagctgagtcatcacatttggatatgcccaatcctgcctctgctgcccttgggctataaaattagttcacgtgagccccctcccttttcctcgggataaagttgttatcatctacatctctagagttccatggaagggtgtagtggattgagatcttttctttcagatttt

SEQ ID NO: 130146 - DNA, 560 bp, Zea Mays
agatttattttcacatttaaaccattttctaggtttatcctaaaagaatatcacattcttgggctgcgggtaaaactacagagaagttcaggactaaattaattaaatctaggacctaaatgtattaatctttacgccctacatggacagcgggttagtttcgctatttttcatggactcatggaaaaccggcttgctgctaaaatcacgaggatattccaagtcgtccgattcacaaccagcgatctggattagaagacccacgtgccgaactggtacacaatgcctgcctttggatcatagatcgatggtccgaaatccatcgtgaactactgtattactagccatccgatataaatcccacggtgactgccccgccttcgacctcaccaccaacagcacgcaaacagaactcgcactccttctctatcgtctgctaaacccagagcgacgactgacccagcggcatcctgcccggctacggtaccgcgccagcgctccaggccattagcctatgctcgaaaagcagaggaagatatcccgccagaggagatgctcac

SEQ ID NO: 130147 - DNA, 927 bp, Zea Mays
acatcgaatgaattcaatcttttcttggttggcttcaatgccacagtcggataccatgaagcctaggaacttacccttagggaccctgaatacacacttctcagggttgagattgatctggaaccttcaaagattggcaaatgtctcctctaggttggtgatgaggtcataagacttcttggttttcacgacgatatcgtcgacatagacttcaatgttgcgcccgacttggtcagtgaagcactagagcatgcaacacgagtatgctgccctgacattctttaaactgaagggcatggagacgtaccagaacattttgaaggggtgatgaaggtggtggcatgttgttcggtctctttcatggcgatctagtgatagtctgagtaggcatccagaaaggaaaggagctcgcatcctgcggtggaataaatgacctagtcgatgcgtgggagaggaaaaaggtcttttggacatgccttgttaaggcccgtgtaatcaacacacatcctctagctcccattctccttcttaacaagtacatgatttgcaacccacatggggtggtgtatctctcttataaaccatgcaactaagagcttggcgacctgcttgctgatggccttgtgcttttcctcgtcgaagcagtgaagccactgggcgtcgactagatattcagggagtgcttggtgacttcccttgggatccctgacatgtccacaagcttctaggagaagacattgtggttagcctagaagaagtcgatgagcatgcttccctatttgtaggagagcactgccccgatgcgaatgcgcttagatgtgtcgacaacatcgatcgtgacctcctttgtgtcctcggtagacttgaaggtgttgtagccagtcttgagagcatttgggcaccctaggggcagccttctaaagctcg

SEQ ID NO: 130148 - DNA, 508 bp, Zea Mays
ggtcaggctaactgaataagggatgccatggtacagtatctgcataagatcaactgccagccattcaccgtcgccggtgactcgccgccgcgatgagcgatgatcgtcgcgattcgtgcaccatggtcagaagataagcacgggcaggtaaaaatcttggcgcccggattgagttgggtctccttacgactaagcttgccgtactcccccccagctcatccgtcgatcggataaccttcaccgccgtcgatctgtcaccgttgcgcgccacatgcttaagctttagccgcatcgtgatgaaccatggggtgcatgtccggtgaccgccagagtgattgccacggtgaaagccacctgttccaagcacagagctccttttcccctccagctgccagcacaacttgcccaaattgatcaccaccgctcgagcatcctataaattgaagcctcagcacgttccgctaggtaattgtgtgtctagtaaaccaactatcatctccgatcgttg

SEQ ID NO: 130149 - DNA, 378 bp, Zea Mays
cacagcaaagcaattcatacatagacgaagaggtaagattatattacaaggtatggataaatatgtataatattctgctcaaatgtcgattacaatctttcgccaaacagaagtctaagtttttctacagataaatgcaagacgggaatcctagtcttcaggaccttcggaacatgcttcagtctaacggtcttcggcaccaccatcctgcagatagataaaggtataaggcggccgacaatctattaaaggtaaactaaggtaaaaagataaagataaaagcttcatactgagttaagcagtttccgagcttcgtctccagctagctcacgcccgccctttgcccaaatttgagtaataaacctgtttccgatgatt

SEQ ID NO: 130150 - DNA, 661 bp, Zea Mays
gtggtttgctgcgaggataaatttttaaaaatgcggattatgtgttggggaatgcatcgataggtgtctatgtgaaaagtgtgttgttttatgcatgtgatcgatgattgtgatagtcaatgcagatgagggtatgattagtccagttggagtcaccggtgtggttgatgtcttgtgcgtaacatggggacatgtatgtgggtgtgtgtcgtggtgtatttagtagtggtggcgtaaggtatttgtttgaggtgtgcaggtatatgccgtaatatggttatactcgcaatgaggcaaaatatatgtattgtgggacacaacgtttaggttgctgtcatataaccgtgtgaaggatgctcccgatggtcatgtgactaaagggggttgttgtggcaaagcgagaagtaagtttagtttttcaacggttagtggatagtatctgtcggtgttgtcatgatttttgttgtatgacagatcgatgcttagctttataaattattgcattccattccctttggataaataaatgtcttgttgatcgattagaagtcttatatgagcgttatcgcagcccaataattattggaagcaaatagcattcataagtcagtcctggttaaaattggagaacaattcgatagcacatgcacataagtgtttt

SEQ ID NO: 130151 - DNA, 332 bp, Zea Mays
atcaatcacatgacgccaaaacatctccccttggaatacgacgaccttcgacttcacaacgtacatctcctaggtgtataaatagggcaacatagttcttccaaagggcaagcggacacgcagggcgaacactcagtagtttcccactaagtctttagatattggcacttgcctcaatcagttccagggacttggggacttcccctctcccgttgtgcttgtaatccctactgcaggcactcaggtgcgagtaatataagccacatcccctctctgctggaagtagggctttacattgcccgaaccatgataaactgtttgtgtcaactcgc

SEQ ID NO: 130152 - DNA, 363 bp, Zea Mays
ggcttgtcctctctgtgatcaagtcgcagagacaattagccaccttctggtcggctgcagtttctccagacagatctagtttcacatactccaaaccctgtatatcccagacctagctcctggtttggctgatttttctttttctaaatggagtaaggtgactcgtgtggcgccacaggaaaagcgtagagggctgagcactctgatcatccttgcagcttgggaaatatgaaaacatagaaatagttatgtttgctcctggtttggctgatttttctttttctaaatggagtaaggtgactcgtgtggcagcacaggaaaagcgtagagggctgagcactctgatcatccttgcagcttggg

SEQ ID NO: 130153 - DNA, 769 bp, Zea Mays
cttgtgcttgtgtgcggtcaatcggtccacatgctcacgtgctctactctattgcgactggttgtggagctctgctgactttttttgggtcgagctctggttaaaaagagagagatgtcatcctttcaagttccttcatctaatggtggttaggtcccacactgtaccatgctcttcaatggcaccaactatcgtgatcgggtcttgcacatgtggtggcatgtgcatggtcttcgactttgggagttaattagtggcgagctatcatgtgcaccattgccttgtccttctgttcagccattgatttctacaagaacattagaaaacaactagaagaagctttgtgaagcttacgatgatgatatggcctcttatatgtcccaatttatggtttatcaggcatggatagatgaggatgctcgtgctgttcttgtcactagtatggatgagcgtttgactatagatttggaccagcttgatcatgtttctaaaatctaggctttcctttgacaacgctctagttagtccacctatcttgctgctttgcgtcaggagtagttattacagcagggtgacaatatagttgagttcttttggcagatatctatggtggtgtgagcttgacattcttggtctttagttgtcacttgccacttgtgattcctgatggaagcaatagagtcaccttgagctccgtcgtacgtacgttttcttgactcgcctttacgctgagtttgagcctctttgtgcttagttacttgctcatgag

SEQ ID NO: 130154 - DNA, 477 bp, Zea Mays
acgaaattgaaaaatgaactatgagatggcagattccaagcagaataggcaactggagcaccaacatttgatatcttgcccctcaagatcatgtctagtcggctcaccaaaacgttagtaggaattttcttgttggtgacccaggtagaatcagtaataccgttgtacaagtaagctggatacgccctgtctttcaaaggctgaatattcttgaaaatgaagtcagcaaccacaccttcagcagccagacacctctctttcagcagacagatctcagcaagcagaactctagcctccatcacctccaaagcagtgagagactctacccaactcggagtacgtacatctggttgtctccccgaccgaggggggagggacttgcagttgttttccacaataaaccactcaagacgccaccctttaatgctatccttgagaggaatgtcaaggtattctgtcttcctcccatggcgcatc

SEQ ID NO: 130155 - DNA, 708 bp, Zea Mays
cggccatagtgcctgagtttggcggggaaacttcttcagttactgaagcaaaagaagctgctcctcccacgcagaagactgaagagccggctgcattgccgaaggtgccttcgactaagcttattgaaacgaggattgacgaaggtaaggctgaaagatcaaaaactgaagaagcagcaaagatgcccgagattctaagtccttcagcagaagcaacagtgctgaaggcagaaaaaagttctgcgataacccctagaaggaaaaggatggtaaatgttttagacattttggaaacaacagactcccaacgcccctcttccataaagaaggttgccgaaagtgccgaggcgcaggctgaagctgatactaggcagataaaaggtaaaactgcagcaattgaggctgggaccgaagccgaacccatagtgcctgttgagacgaagcttgccacaaccgagcaaggggccgaagaagtacctccaaatactgatatagcttttgagagaaatatgggcaaagaagccgaatcccctgctcctgaagcaccttccgaaaatcctgattatatcattcgtcatgctttgggaaaaagattatccgaggaacaaatttttgaagctaaacactatgcccgagaattgaagtacccgaaaggggccctagtgtttaatggtacggatgaagatgacttcttgtattgcctcccag

SEQ ID NO: 130156 - DNA, 348 bp, Zea Mays
gtaaaaactatacaagaagtcaagctcttcctagttttgcagatcatcccctttagctatgtgtacaaacatttaatttcaaaccgctaaccacatgatacacctaaatatgcactcctatttctttacaaaatggagcatccatcaacatatatttacttcatgggacacaaacacggtaatccatgatgtgctcactccggtgtttactcactgctagttgatatcattactgtatctaagaatcattcactcccgatcactacaaaagtgagagatttcttgactctagttgtgtatattcagataagcaagtaatagaacctataagactataacaacaactcc

SEQ ID NO: 130157 - DNA, 386 bp, Zea Mays
aaggacttgaagatcaccgaataagcacatgtgcatcccacgagtttactcatggtattttccactagatgtggaattacggtatcctctaaagccctgatgggagaaacctataaggtttaggtgttactggcaaaatatcccaattgtgtcagaatgacagactataacgatgtatctaatcaatgaaaaatccctgatggattacgatctttgatggacttttgttacaccatcatagaagttgtaatgaatgaacgcctcgagcgatgagtcatatctagaatatgtactattacaactataatatctcctaagtcctatggaaggacaagttatttgctttgcacaactacgtatacattgtggtgtatgatagaatgaaa

SEQ ID NO: 130158 - DNA, 424 bp, Zea Mays
agcagactgaaccggaggtactgagacaccagactgctgaagcataagagccatgaatgccctactctcagcccgatcctgaagtagctgctgctgaagtgcatcctgcctgtcctgcatgttctgaaacatcgagagcatcctctcggataaccgggcctgctcggccgccaggtgagccagaagcgaagcaagagcagggtccatagtctgaggaggagcaggggcagcactagaactcccagcctcatgatcatgtgagcgtggaggcataggaggcggaggcggaggaggaaccccaaaatcataatcatcatcatcatcagctgttgtaccctgagagtcaaactgtcgaagagctgcatcctcggcctgagagtcaaaaacaggagcaaaagctggcacaggaatctcaggcgcagga

SEQ ID NO: 130159 - DNA, 718 bp, Zea Mays
aataagcgaaacactactgaactttgtacacatgaacagctctaaaacatccgagataaaaaagctgttgaatggctctacccaaccacaattaaactagtgcataagcgggctcgacgaagaacgaatcaatgtagtcgaagtccacgcggcccacgccaccgctgtccggcgacatccccacgggctggaacgccccctccgtcggcgacgacggcaccgacaccggaggcggcgcccacactgacgccgacagcagcctccgcgccttccagccgagcacgatcttgttcggcgacgtctcctccatcgtgtacccgtcgttgaacagaccgagcagcagcctggcctggctgtggttgaagcagctcaacggcactgccctgaacccgttgccgcgcatccactccccccacccggccctcgcctcgccatcgccgtccacggcgcggtacgctcggctcacggcgcctgcgatgtttggggcgaggatggcccgctccactaggccgcgaacacgactctgcgtagggaacccggcctccagcgagtcccacaccgccgagtaccggtgcagctcctccatgaaccgcgccacgaagccgcccgccccctcgtcgtccttctccgcgtgcccttgatcctcctcaaccaccgtcacgaccttggccccgagcgtggccatgccagccaagaaagacgccaccgagccggtggg

SEQ ID NO: 130160 - DNA, 993 bp, Zea Mays
ccgtcagggcctgaaaccctctatcagccatgctctaggcgcctttccactggtggatttttgtactatggtttagcaggcattggggatggagatgcaacatcaatacaccatggaatcttaggtgttgatctgcctcgtggccacgacgcgaggaggggcaacattaggggtccatcccacaagaggggaaagtcacaacatcagtgccaccacccctatagtggcaaaccctccaaatcgggtacttcaggagggagtacactgaggtatcgggctgttcctaagcctgggttggggttggtgtttttccattgtggtgaagcgcatcgccgtgccgagtgtcagtggagtgacaggtgctctatctacagccaggatcacaaggatgtggtgtgtaggaggaatctcaatgggaaacttaaatggtagccaatgacttcttcctcttcgtagggcactgtcaacatgatgtcaagcgctgagcaacaattttctgtaccaccccctcagcagcagttctatatgcccaggactcctcaattcgtgcctatgccaggtttcactcagtacatggccgtgcccactcctgcaccgatcgctcctgtaccattttagtttggagctccacgtctgcctcatcctgtgactctgtggggttcttctgttaatttcactctgggagcttcctcttctatgggtgtttctggagcatatgtgctgccctctgcagacggcagagatcagggagacgtggtgacaggtatggtcttagttgattcgtttgatgcccatgctcttttgactctggcgctagttttttgtttgtttcggagaattttgtgtcgcgtgctagtctatcggtgtagaggatgggtcacccaattgtggttagttctgctaatggctccattagtagctgttaagtcttcctgtgttgttccatcgttcttgctgatgaggtcttttcagctaatctcgtggtgatttccc

SEQ ID NO: 130161 - DNA, 551 bp, Zea Mays
aatctatctgatgtgcataatgtgttccatgtgtctcaacttaagaagtgtctccgtgtccttgagaaacagttaccaatggaagagcttagtgttcagggtgatttgacttacatggagtatacgatcgagattcttgatactttgactagagttacaagaaataaggtgataaagatttgcaaggtgcaatagagtcaccatggagaggatgaagcaatttggaaagagaagaagaacttcgcatagattttccccatcttttccctagtccttcctaaatctcgaggacgagattcttgttaaggggggtaggatttgtaatacccaaaaatgtatacaatgataatatggttgatctccttgtgtgatttgccatctacttcttgagacatgtgactaaacctaattaaaagagaataattctttactaaaacaaaaaaagccatacatcatgatggagttttgtttgtgcatttgattaaatgatgagactaataaaaaattacatagtaatgatttgaaaataaaatagaaattacaaaagaaaa

SEQ ID NO: 130162 - DNA, 737 bp, Zea Mays
cccctaaattaattttactaatggcgcacggaaacgtcctgcccacggtgaccgcatgggcaacagaagaacacgggctttcacggcaatctagggcgatctaattcaatcaaaggggtcgaggagcttgaggaggacctaagggcgctagaacaaacaatcaaggcactggaactgacctggagcaagctgtccacgacgagggtaatcgcgcggtgtttttgagcagattggaggaagtgtgaaattggagctctcgggtacaccattggaggcaatactttgtggctgggtgtgtgattatcctacggacctaacggcgcggtcaatttataggaagcaagagcggcggccgggaatttggatgacgacgcgcgacgaccggagaaggagaggagcactggtgcaagcgcttagtggttttcactgtggcgctccctccggcgatcactggatcccttaacgtgactaatcgtgacgtggtaaagtgtctggacacgcagcgcacggcagtgatcgatcaacgacggtgaggtcttatcccgatccaccgatgagcaagggggtacgacgggcttagccgtgaccgagctcgggctgatcccacgcccagatatttactttaccatagttatcccctcgctagtgaacacgaatcacggtgtgaagatcgtcggcggtgaggggggatgaatcgggcatcttcttcagttactgtaccatggcatacatctccg

SEQ ID NO: 130163 - DNA, 1417 bp, Zea Mays
gccgccacccccgcccgtatccgccgccaccttcgcgtcctcctcctccgccgtgccttgctgccgtgcctgcgtcccggcgagccgctcagccgcggagcgtcgacctcgccgtatgcagagaccgaggcgctgccggcctgccgcgcctagcccgcgagcagcgagccaccgttcgccgaggcaccgacgtcgaggggagggagctgggagcgcttgcgccgttctcgagccgctgcgccctgaccagctgccgcacaggcgccgccgcagggagactgcggtcaacaagttaggaagctgcagcgctgctcggacgcgtcttcccagcagcaaaggtacgtgtaggagtgcacggggctggggctgtccctttcgtgggatcgagtcgcagtaggagcggtgggaaagcaaaggaagctgctgttcgaacaggactgagttgttgacagcctggttttaatatcacatgttttccgtcttagtttttcctggctgtaccgatgatgagttcgtaggagcttgaaacaaggagattggaggaagaagctgcaaaagggcagcaaatgaacaacatggcagtggcaagactgaagaagatccactaattacaaaaagtgagatgaggtgcatgattcaagaactcatgggactaggtatgattggctccaagatggcgtctggagcatctgaattgaaattggaacttgtaccaaatgatgtgaagctagaaggaagcaagaattatttgagttggtctaggagagtgcaagtgctcgtaggacgtaaagaagtggagcactatttggaggagggttgtgttgaacctgttgagaggcacaaccctgaatggaaggtttggtataccaccaactcggttattgtggcatgattgttggcatccatgtctccgtgtgagtaaggtggttgaagccatgtgcactgcagcacaaatttggaagaccttgagcaatatgtactcaagaaagggaaatgtgatggtgatgatggaaattcatagtaaggcagatgcagtgaaatagatggggagaccagcggaacaatatgcgagtgagctccagtacttgtggggagaactagatcactctgctcctctccaaatggcttgtccacaggatgcacagactgctcataagtgggtagaggacaggagagtgacccacttcctaaagaacctggaccctgaatttgagagtaggagagctgctttttgtcaccaggagagtcttcctaccatgggtgaggctgtatcagctatgattaatcagggggaagcgcgtccgactccccagtggcacgcgagactcctctcccttgtggcggttgtggtcctaaccggagatggaccgaccgccgctcatcaaggggagtgcccgaacgtcgaggaagagaatcc

SEQ ID NO: 130164 - DNA, 416 bp, Zea Mays
gtcaagctagagtaaagggtgtgacgccgatggaccggatacaatggtgaagagcaagcgaagctgtgatcaatggaccaataagttcataagaatgaagtggatcatatcatttatgtaagatcaagcaagatgctgatgtgtgttgattatcaagtggtttgatggagggtgacaaaagagcttcacgatacgagaaatgatcattgctcatcatttggtgaagatggaggttgtatggttgtgtagcattaccaatgatggagatgaaataggatacacaaggcaaaggtaaatttggagggtatatttcatttcatcggtctatggttgagttgaaaagtgcttgactaggtctatgataggtatacatactatcacgagaagcttttgtgagctaaatgattatataatgc

SEQ ID NO: 130165 - DNA, 776 bp, Zea Mays
ctaattcatccaatatctcctctaccagaggcattggaaatctgttcttaattgtcatgtcattcaattttctgtaatccacacagaatctccaacttccatctttcttttgcactaataacactggagaggcaaaaggactcacactagggactatcgaaccagcaaccaacagctcagacacctgtttttcaatctcagttttgtgatgtggtgaataccggtagggtctggaattcactggtatagaacctggcaaaagtggtatatgatggtcatatggtctagtgggaggcaactaggtgggcacagtaaacacatcctcaaattcttccagaattcctgttagtgtctcatttccagccacatcttcctctcctttaacctcctccaacatcacaaacacccatacttcatatccattcacccacttctccaactacaacacaaacacctgctgcacctccctctttgggtctgcatccccctgtagtctgacctccaccccctgatcacaaaaggttagcaccttgttgatccagtcataatgcattggtctatgttgtttcaaccagtcataccctaatatcacatcataagcctccaatgccaacactctcatggcagttctatagacatgccccctagccttccacttcacctccctgacattttttcacacaccatgatctccccattagctaccttcaccttcacaggaggacagtcttctatgctcaaccccagtttagtcaccattctatgactaataaaag

SEQ ID NO: 130166 - DNA, 451 bp, Zea Mays
gagaaaaagagctctgaagttgctctgtcagctgctctgatgaagcgctcaccatggtacagtgtcacgactgaaggagatcagaccgccagctggatcgctcgtcgccggcgataaggatgccgcagtggcccagtatggtcgtcggcggccacagaaaacgttaccggcgacgtgtccgtgagttaccgaggtggcaggctccggttaaacggcgaccgccgcgctgtccccggaatccgccgcgtggtacgctcgccagcgcgatctcgagctccccaagcctcatccgtcgccggccagccgtctataaattgagtgcgtcctcaactccatcaagtattcaggcagctatagcacccactctcatctcccctcgttcaccgtagacccgcaattcaggtttctttccaaatcaattctccgccgccgtgaaccaagctcgtcgcgg

SEQ ID NO: 130167 - DNA, 593 bp, Zea Mays
cgaggaggtgcacaccgccaggccacctgccactagggcccgtggcgcaccccgcggaggggtacgaacaatggatgaaatcctcaactcccagtgtccgtaccacaaggacatgcgccacaccctgcgaaactgtagagacttcaagcactccgtcgggcatggccaaccattccaacccctactgcctcccccgccacgaggagagcctggcaagcctaggcagcctcagcagcaggaggggggaggggtggagctttcccgcgcgttgacagggaggtcaatatcatcttcagaggtcatggagcacaagaaaactggaggtagcaaaagctcaatgaccggtaggtcctagtggccaccaccagtgccctagctccttaccgatggttggagcacgcgataaccttcagccgagctgatcaatggcttaactttgataatcccggcaagaacccgctcctcattgatccggtgatctgagaaagccgggtaaagaaagtattggtggacaggggaagcagcatcaatgtcaccttccccggacgctccaggccctgggggtcacagtcaaagacctcactgagtcagat

SEQ ID NO: 130168 - DNA, 595 bp, Zea Mays
ataaattgagggcggggatagttgcgccatgtaatcgtcaagctatagcacccactctcatctccactcgctcaccgtagctccgcaattcgggtttccccccaacttcgttctccgccaccgtgaaacgagcctcactgtcgccagccatactccggtcagttcccgtcttctgctccctcgtttaagcgttctcatgcatctgtgatgcttaccgacccacccaattgaactgggctgccaaggatcaccgggaacgcgagcgccaagccacgatgttctcggccgccgtggccagagagttctagtgcgtgattggcaaaattaagttaggggaaacctcgattaaggtacgaattaggtgttagtcatcggagagcgccagtaatagtcccaatcggccgacgtaggtgctcgccggagctcggctgggcgtgaacgccgtcggggacttcgaaccgagaataaatggaagtgcaggggtctatctgtaaacgtcagagactctttagaatagtgtttgaacccgttcgcagttaaacagaaacgcgagggcccctgtgcaaatctgccgtcgcgcgcgggcgcgggcgcg

SEQ ID NO: 130169 - DNA, 761 bp, Zea Mays
gccttgctctcagcccccattgacacattagtccaggattctgaagaaataaagcgcatcattgaggaaatcaaacatcaccttctagaggcactacaagtaagactttggctagctggacatctccctttctttcgtgcgaaggtggaggtggctcgccagaggattcaggcttggcgttctaagacccctttgaaagctgaaattgcccggtgatgtaaactgcttaatgaacagagagcagctctggacgccaaggttgacacttctactaatgtcgccaaactcgagttcttggaaaaagaattggaggaccttgaggaacgcgtccgagtaacccgacaacttattcaagatgagaaatcatctatggctaactccaaacaggatactgaagccctgaccactcggttgaggctggatcgtgccaacctgagcaccttgagttggcagatagtagcaggcgaggacatggaccacgcatctgtcattgttgaggctgaccatgttcatgtcgaagccattcgtggcgtcgatggcttccttcgctaaactactgtggtaactcaatgtgtcattgttggtagactattttatgaacttttgtatttctagagtcgatgactgtgcatcggctaacccaaactcatcggggcgttggccacatgcctcttataattctgaattctatgactgtgcatcggctattcgaaccaattcggcgcgctagccgcacaatctctctttctctctctttttgc

SEQ ID NO: 130170 - DNA, 283 bp, Zea Mays
cgccaggcgagaaggcaaaaaggggatcacagacttacgtgcagtgcacctgatacgtgccatctacaaaatacatcataagcacaagagtaagagtagaactatgagaccagaaagtaagcagaaagaaaagtgagacaaaacgttttgagataagtagataacatagagttggtcaagatgaccaacttttgaaagaactctaaggtcaaggtaagagtagaggtctatagtcctcagggagaccattctagtctaggttagaagtcctacagtcagcaag

SEQ ID NO: 130171 - DNA, 458 bp, Zea Mays
cgacgacgatgggcacgtcagtgacgaacagctgcaggaacatgcatcaattccaaatgaggcagtgttaggatgctggaccttagcttcttgcttagtacctagctagtagtgtcgtttgttctgctaggccaaatatccactatcgtccatatatacatccggacgagctgtaggagggctcccaaatgcagcaacaacctgaaaattaattttaatttctacctagtatagttgtacgcatacgcttctgcatgtgaaattaaatcctggcattcaaattcaatattcattcaggaggtcgtcgatccagtaatgacgtgtttggattgcagcatcatgtagcccggagttaaatcatccgtcatgggttagagatcagaaggacgaggtcatccgctgctttttcaaggaaccagctcgaccgtcaacttatacctatggagaaagctacgaag

SEQ ID NO: 130172 - DNA, 349 bp, Zea Mays
tcctgaagatgctcttagtgagttatgctttaatgtgcctaggccgtgtcgtgttcgtccaatccggatgtacatgcatgcataggatatcctccctggtcgtgttagtactgcatcagcaagcaacaacatgccacgatcaagctcagctgctgctgctgccgccattcagatgatgaccaacatgatggcaggagcggatctaaacaaaacatccattggtgtcatctccattaaattataaaatcatcaattcatttatgtgctaacaaacatacattctaatggagattactaaaattcattggtgtcacaggacaccacaaaaagggcctggatccgcccctgc

SEQ ID NO: 130173 - DNA, 482 bp, Zea Mays
ctctggtggaagtgctgctatatcctttttaacaagagcaacagagccttgagcagtagaagccactgaactagcaccaggagcaccacctgatgcggccgatgattccacattattcataataactttcacttgtgcacgaccaacatcaaactctatagagggaaaacataatgcactagcttaggattaaaaccttgagcagtggcaacatagagcactagttgaagagcagcaagccacaatagcaaccatccactagatgcagagcatcaagctagcaatagcaaccatccattacatgattacagagaagggggagaagtgggggaacaggaggaaccttgagatgacaagctcatctagtcaattgtgcatgtctgctggagcttggagatgcagatagtctaccacatgttcacagccgccgctggtgtagccaccggtgactaggtctgaaggggcgtgccaagagaggagag

SEQ ID NO: 130174 - DNA, 321 bp, Zea Mays
gttttcgatccggttcgttggtaacagtaatttttaaaaacggaatcggtcaccagaaattttaatcgaaatcgacatcgaaattggtggtcttttaccgacagtaatttttaaaaacggaatcggtcaccagaaattttaatcaaaatcgacatcggtgtagtcttttaccgaccattttcttctattaccgattttggtcagaatttatcgatattataccgtggaatttatcgaaaataattcagtccaacataactcaggcaatccatgggatacagaccagaggccgaccagcccagtccaggccttgtcgccagc

SEQ ID NO: 130175 - DNA, 388 bp, Zea Mays
ttccgattgccttcatctgataagacaactcatgaatattgcagaagcatctcgcatccggctccagtccttggctcctcatggcccagataaaaactctcactctaataagagcttcgggggtaatctgatgaaggcatatctcaaacgtcttcaaaacttcgaccagcatcttgtggagcggaaagcgaacgctcgctttcatgaagctcctgaagactaccacttcatcatcttctagcaggggaatagtgtcttctcctccagccctcactatagacacatcatgaaagtatttgcctttcatcgcttcaatttggtgttgtttaattgtggactttccaaaaacaacctggcttggtctccacggccgatcttcagcattttt

SEQ ID NO: 130176 - DNA, 600 bp, Zea Mays
ctcgccgccggtgatctttacgccatgattcacaccgtcggcgcgattcgtgttcgctggtaagaggataaccatgatggagtaaaaatcttggcactggatcagctcgggctcgggcgcagatgacattcaccgtacccacttgctcgtcgtgcgaccgggatagatttcaccgccgttgatcgctcaccgttgtgcgccacgtgcttaagcgctagcccacgtcacggtgaatcatggtatgcatgtccggtgatcgccggagggctgccacggtgaaagccactcgtcccgagcgccagtacctctttttccctccggccgccaacacatcctcatgaaattggacgccaccgccgttggaggctataaattgccgcccccgtccgctccgctaggtaattgcgcaaccagtgaagcaactcgtgcctcaaatcctcccctagaactccccaatttaggatttcccccagatccctcaagaacaccgtgccttgggaccttgccgtggctagtccaattcaggtccgatcctaccctctgctttcttatttctgcacccttgcttgttcctgatgctcactgacccgttcaattgag

SEQ ID NO: 130177 - DNA, 482 bp, Zea Mays
cggaggagacgatggggaataaggaggtcgtgatctcactggtattcgacacatggagtttcctggccacgacgtgaggcggcacacggcggaagaattccccgttgagcaattcctgcgactccgacgacccccccgggtttggcagagcccttgctgaagtctcgtaggtcctggtaatccaatatgcgtcacccaatacgcaccataatcggaacagaggttggtgggatctggaggggataaatccgacagcttgggcccacgagtcagtgaaacttggcgtggagggccaaggcggtgtgggacagacatcccgggcccgcttggcggtgaccgttagtggtagtcatatagcgagggagtgaggatgggccgcggagtgagtttggcccacagcgcgccgaggacagttgggccaggacgcaataaatgtgcccaaacgcagatccacccacttttctttttttctctcttttttt

SEQ ID NO: 130178 - DNA, 399 bp, Zea Mays
aaggtagttttcacagggatgaagtgggctaccttggtaagacggtctattattacccagatagagtcgttccctttttgcgtctggggtagtccggttacaaaatccatgcctatctcctcccacttccattcgggcactggaaggggttgcaataggcctgcaggcttctagtgctcggctttcgttcgttggcaagtgtcacaccgggccacatactgtgctatctctttctttatccctctccaccagtatctggttttgaggtctaggtacatcttggtggttcctgggtggatggagtaggctgagttgtgagcttcatcgagcaggacttcttgtgcctccccttttggtacacacagacggttcttgaaccaaaggactccttgttcatct

SEQ ID NO: 130179 - DNA, 322 bp, Zea Mays
aggattcagtatcaccaaacttgggcaacctgacagattattattaaaccaaataactaaaaaagggcagacctagtactgaaggctcccacatgagtgtgatctagggaaaggataaatcgatgcaagcctcacaaatgcaaagaaaatgtttccaacccgcggcctggtgactcaatgagatagctctcaccactgcatcaggtctacatttctaaaccaagtattaccaccatcataaaatatataaccaaagacaaatatatcaaacaaggagaaatcaacatcagaagcttcattaacaaaatatcacatcgtccac

SEQ ID NO: 130180 - DNA, 552 bp, Zea Mays
ctcgatctcgccatggagcttgatcaggacgcccgcgccctgtacgtctccatcaaggccctgttccaggcgaacaaggagtctcgcgccgtcatcgagcatgagttccacaacctgtcccagggcgacctctccatcgacgcctatgcccagcaactgaagcgtaccgctgatgcgctccgagaggtcggccacactgtctcccctgcgcagctcgttcttaatcttctgcgtgacctcaaccctcgcttcgccaacaccgccgacatcatcgccaacacgtcaccactgcccgacttcaagtccgccaccaacatgctccgtgtcaaggaacttcgcctcgacaccgagaataaggaagcttcggcatcggcactcgctgtttccaccgccccatcctgcacgtcgcctgcctgccattccacctcctcctccagcaatgggggcagtggcaagggcaaagggcgcggtggcagcagggacggtggtgctcggcgcaaccagcagcacggcggcggccggcgcaaccagcagcagggtggtggccgccaa

SEQ ID NO: 130181 - DNA, 556 bp, Zea Mays
gtattgcattatagagtcaccgccttgctttagatgaacaaactcttctagcttcatctgaagaattccatctagaatataatgctccctgaacgcttgcttaaactttgcccacgtgatgagatggcctttaggctgaatggctatgaagtttccccaccatgtactatcggggcctcgcagttgttcagcaccaaacaggggcttctgagtctccatgcattagatcaatccaaatttctgttccatcacgcggatccattcatccgcctctagagcttcttctgctttaatgaagacaaggggacaagtttctgagaattccatataggttgtgtctcttagagcttgattttggccttggcctccttgcggatggatctaatttccttccatctcccggagaaatcgggtattgttagaagtagccttcagcggggcagcaatggcttccgccagagttggaggtgggattggagtctcctccccactaccccgagaagttcctaccccatcatgactatgggtccttgttggcatcttaagaagaaaacat

SEQ ID NO: 130182 - DNA, 408 bp, Zea Mays
cccacaagtgaattcggcatcattcttaagccgaatgataggggtgaaggcatcaatcttcccggctaggttagaaataaaccttcgcaaataatttaccttgccgagaaactagtgcatttcgaccttataggtcggaggtcccacattccgaatagatttgattcggtcatggtctatctctataccatgttcatggatgatgaatcctaaaaacttaccagctgacacttcaaaagcacatttacgtgggttcattttcaaaccataacgacgtattttatcaaaggctttacgcaaatcagctacatgagaactaaactcagtcgatttgactacaatatcatcaatgtagacttccacagtgtttcccaacagcttgtgaaagatcaaattcatagccctctg

SEQ ID NO: 130183 - DNA, 611 bp, Zea Mays
gcaacttcatcaggggcatatctggataactggataaacttgtcgaggtactcgctgactgacatacttccttgcttcagcgacagaaattccttcttcttaatcttcattaatccagctggtttatgataattccggaactgtgtactgaactctgcccaagtgatagtatcagcggcatcgtgggcagcagtatatgaatcccaccagtcagcagcaggacctgtcagacgtccagaagcatataaaaccttctcccggtcagtgcattgtgcaatattcagcatcttctcaacggacttcagccaatcatccgcgtccagtggatcaggagagcttgcaaatgtaggtggcttatgactcatgaattccctatgcttatcacgggatggaactggtggtggaggtagaggcagtggtacttgttgctgttgctgctattgctgttgttgttgcatttgctgttgcagctgctgttgcaccctcctttcttggcgtatctcctctcgctcctggcgcaattcctggcttatctcttctctttcctgatgcatctcctggcgttcttgctgcatctgagcacgcatatctgccatagtatccgccatttg

SEQ ID NO: 130184 - DNA, 473 bp, Zea Mays
gctaaccataggaggcatataaacgtgtatatatacaaaggcaaaacaccacatagttaagccacatttcttcacatccaaacttacgtacatatgtgtgtatatatagttgccacacacatcaatatatacagctagagagagcatgcatagttgtggccaaattgagattatgcatggcagtaactatcagtatctagatgtttaggtttgggcgccattaaggatagttttattcaggggttgaagagagtcacatgttttctgtggccatcttgtggcgtgacctagaataagtgagcaggtttagtggaacaacacacgatgatgtaaccactttcttataatgcaatggttctgtccttcacacgcttattcgcacatgtatctctcttcacttgacattgttgcgtcgcaattttcaatattgtagagaaacttccatcttgaaggccaatacatgtcattgcggc

SEQ ID NO: 130185 - DNA, 498 bp, Zea Mays
gagatcttctagcattggcttgacttccaggctaccgttgtctcccagacatgcatttagctgagctgattccttcttccaatcttctaaaaagttggtcccctttatcccgaaaggtttacggctgagggcgtctgctaccacgttggtctttccggggtggtaatggatctcgaggtcataatccttgatcaattcaagccatcttctttgatggaggttgaggtctggctgagtgaagatgtacctcagactcttgtgatcggtgaagatgtggcatttgttcccaatcagatagtgcctccatattttcagggcgtgcactatagctgccaactccaagtcgtgggtggggtagttctgctcgtgtggcttgagtaagcgggatgcatagtcaataactttctcattttgcattaggacacaccctaagccttgccttgaagcatcacagaagatgacgaaatcctggtgtatatctggtagtgtcaaaacggg

SEQ ID NO: 130186 - DNA, 554 bp, Zea Mays
gtttatcgggtcgggcactatttctaaaagtgccaggtcactactcgggaaagcaaagtttcaggcatgactcggtggttacctctaaaacgtcggcatcgtcaaacatgactcggtggttacctctaaaacgccggtagcgtcagacattactcagcagttaactctaaaacgccggcagcgtcagacatgactcggcggttacctctaaaacgccagcagcatcagacattactcggcggttacctctaaaacgctggtagcgtcagatattactcggtagttacctctaaaatgttggcagtatcagctatcgctcggtggttacctctaaaaacgctggcagcattaggcatatgggtgaactgtcaagcgtgtaaacataaaaagtagcaaaggcaacagtcactggaagcatctaaagtttttcattaaaattatggagttacacaaactcaaaggctgaccaattatgagtcgacctttttccccctttttctactacattacattacattacttcactacttacactacactatactactaactac

SEQ ID NO: 130187 - DNA, 376 bp, Zea Mays
ggtaaaggcaataagaaacaaaagcacaacaaaggatgaggttacaaactcgcgagccaaagaagaggatacgaccaagagagggaaggtatgagacggaagaggggcgattttaaagggcaggtatgagacaaacatcaatgtaggatatagaggtgttaagggtgcatatgataataattaaaagcatgacaaaggatatagttaaggcaagactcacgaaacgacaaggtggggaaaacaatcaagggtaagataggtaaggttccaacagaagggttgaagtaacagaaattattaccgagggaagttatgaggaaacagtgagatcatcaaggatgtgtgaaatagaatggtcgctcagggaccatcaaga

SEQ ID NO: 130188 - DNA, 427 bp, Zea Mays
gttcctgcggacggtccggcaacaccgaagagccacgacaaccacgtaccttcaaaccacgacgaccaaaaataggcatgtggaaaactaacacgttcaaggcaactggttggttggtaaaatccagcccgacctttgatcaattattgtctaaatatgtgaaaaagaaggccggccccagcaactggccaccaaaacaacctcgcttacccacctaggagcgacagcaggttaggccaattggaccacctcaccaatcggaaaagacgggaggtcataatgttcaattaagacctaacatacctgcatggacacctccacccccatatccacctatgtcgtatccatacacatacatacctctgccatatgtcccaaatcaaatgtggagcatgccaccatacccatttgggatgccacagtaccc

SEQ ID NO: 130189 - DNA, 454 bp, Zea Mays
ggtagccatcaccgctaccctttaccccaagagcgacgtccaggagagggtggttgctccgcgacgtacggcgacgatcgtccacctgcaggttgcagcacgcggtttcctagctcgtcgacgagtgaagcagatgttggcgatgctccattgcagggagtcgtagctgcaccagcgcggccaagcaacatggtggttgttcacctcaccgtacgagaggctgcaagacatggtgcccctctgcatcgctttgtccggcgctggccctcatctgtggcgaccgagcaactacctcgactactctccttcgtacaagggggtctggtggccttgccaccctctgctctagccacgccaccctctgtgcactggtggccatgggaccaagaggggttgcgctgcacgggatccacttgctacaggcaacaccaacgttgacctccacgggcccgcc

SEQ ID NO: 130190 - DNA, 311 bp, Zea Mays
ttttacgaataacccttaacacgagaggtaggaggtaggtgcaagctaagacagccccgcctaaaacccatcaggccgcctgcccgtgcgctcactactcactagggttttgaatcccttccgtaccctcccttccgccgactcctagggttccgaccgccgaccgggtttgttctccggcgatggcaccgcttccgccgcgcgagctcctctctgtcatcgaggcggcgctgctgggctccacggcgccatcgccggcgcagcgcgtggagctcctccacgccgtccgcgatgctgcccccgcgttccgc

SEQ ID NO: 130191 - DNA, 297 bp, Zea Mays
ccacgccgaaggcgagcaccaggatggtgatgaggctagggttttttggatctgaacaggagaggaaaaacaaggatcgcgagcgggtgtgcagggggggcgtgtatgcatcggacgaccgagggactctatagcgtatcggacggaccagatcactggaaggcagaacatgtcagaggcagcctaccccttaccgccttaatatagtagtatagatgtttgccatacctctaaatcaatcgcgaatgaacctcgtcagtcagacatctcctccctgagactgacccgactggctca

SEQ ID NO: 130192 - DNA, 409 bp, Zea Mays
gtggagacatgagcccagtgatgcgaaccagtgcccatcacaacaagacgcgtcatcaccacgccacaccctgaacgtgcgcacactacacaagacaagtcctagggagaccttagtataggagtctcaacagtagctcgcacatcgaaaaagacgagacaatacaccataccaagcgtatgtatcgcatacgatgggaggagatacagggcgtacaacagatggaaccacgccacgtacgatcgcatcccgggacagactcgcgagacccgccacatactaccaccaggacgtcagcaacaaactcgctataggaactggcatgagggacatcaccatatcaagggtacgtccacccagaggaaaggggacccaattcgttagaccatatgttgagtgcccattaaac

SEQ ID NO: 130193 - DNA, 927 bp, Zea Mays
tcttcagagcagggcttcggttccctctatatgagataataggagaggttttgaagaagtttgaaatataccttcatcagctaacgccaaatgtcattgttaagctaagtgtttacatatgggctctccaaagccaaggcatgagtgctaatgccgaaggtttctgccgactgcacgagttgcactatcagacgaaggctagggcggatggccttcacaaaaactttggatgctataacatcgcgtaccgaaaggacactagaaccccggtaaccggctaccgcaccaagtggccaaccgggtggacaaatgagtggttctatgtgaaggctgacgagaagaagagggagaagttgatgaccatggttatgagtcctatgcgattaagcttcagaatgacaaggccattgtgccatatgcaactcggctccccgtgccagctggccgaggttgaattcagagtggtggctgccgaaatcagcaccagggatttagtacaggaatacctggtaaacatgacttttccgacctctagcggttgggggatgccgaagaagaaagaagggggaaagaaatatgaacttgttcggttcccctaccgttttaaatttgagaagcaattcaagaaatcgtgcactgaatggctagagatgatcgaaactatgtgcaacgagattcttggcaattacacaaagaaagaggatcaactaatgactgttgccttcggcacccgaccgaaacgaaggctaaatcgagtaatggatgtactgaactttgaatatccagattatgagagacttgacaaaggggccgagggagcaaagagaaaaagagttgtcagcattctgagtagagaaactgcccggtccgtgaaagcagacgaaaaggctctgaagaaggcgaaagtggcaccgaagccgaaggcgc

SEQ ID NO: 130194 - DNA, 893 bp, Zea Mays
ttgtagaacatcactttaatcttttgtcctggtttaagtttagcaagattcttacatttgtttttgccacgaccccttttctcttcagttatatcagctggaacatttatatatactttcatcaataagttgtgtcccatacaaaaaagagaaaaatgcagaacgtgtgaaattatatttgtatcataccagtttttgcagcatccatattattgttctgaatatgtgccctgcaagagttcctccgctcttcattatcaggacttgtgtaggtatccatattattattttgaatatgtgccctgcaagtgtcgctctcctcttcattatcagctctggttaaggtgtccatattattgttctgaatatgtgccctgcaagtgtccctcccctcttcattatcagctccatttaaggtaccaacttcatggttcatggctgcaagacatatggaataacacataatactcaaaagaaataaatataggcattttagtgttgtactgaaggtaggaaatactcacatttcagcttctttcgtggcctgactcgatgcgactgtctatctcctttaaacgatgcatgctttttcttcaataccatattttctcttgtgttttcttcttcaaaagcaccttcagagttctccctcccctcttcattattagatctggttaagttgtcaacttcatggttcatggctgcaagacatatggaaaaactcctcataaaactcaaaagaaataaatactagcattttactgttgtactgaaggtaggaaatactcacattttagcttcttttgtggcctgactcgatgcgactgtctatctcctttaaaagatgcatgctttttcttcaataatatatcttcagaagcaccttcagagtt

SEQ ID NO: 130195 - DNA, 295 bp, Zea Mays
gaacgacagaacgaaaagagctaagttacctgaagattagaaaagaatgagggcaatcccaagtcatgagaagctgtgttgtagcttgacgaaggaagatcaaccggaacaatctgaagagcatcgtcgggggttgattcagctccactagcagatattagaattctggcatccggctcaccgacctccaaggcgacttcctcactcgaagttaaagaagcatgcatcgctatcactccatcagatcatggtggagacgacccaacgtggacgtccatggaggtgtgggaaggag

SEQ ID NO: 130196 - DNA, 553 bp, Zea Mays
caaatcctctgagtcctcacctatgatttacaagtacattatcgcgagttacaagggctcctcttccggaataagaccaacttctcggtagttatacaatatgagctcaagctctccgtcctcgaatagtgccgtaagctcaagttcattaaaacgacaagggccgaggaccccgccagttgtcctaacaggaagaatctgatgatattattccatttctgccctcttgccttcacaaatatgctaggacgttatactttacacctcgcggagcgagacccaagagccgggtccgcctagccccatacgacgccgtttacgaccaccttcgcgactgcaaacagacgcatcagcactacccaaccttcatttcgaaacaccaacatggatccttctaccccttattgtgggtagcggggccttatttgaaggcccctcagttactctagcctccgcaacagacgcaacgtctaatgcaacaaaaaagtctaactcctcttcagaggacacctcatccatctttgcgaagaagtctgaacactcttcaccgtcc

SEQ ID NO: 130197 - DNA, 755 bp, Zea Mays
gagccgtagatcttctgattaacgcctaggattcaacgcatcagatgggtatcgccatgatctaatctgagccgtcaacttaaaatctcacggcccacggtccaacggtcagggatcagtcttctacctctcaacagaaattggacagggtggtggcgccattacgctgagcgacggagctccaccagtgaggccccatatggcggtcccaggctcccaactctaatccgaaggcacatgcgcaaaacggagatgaaggcgaacatgcgaagtacggactcaccggcagtgatgctgcgtggaggtctcaccgcggcaaaaagcgatccgcggcggcgcttgagtcgatggcgagaaattacagccgcaccgcaggtccccgcgcccggttaggcccttgcacgcggtataccttccctttaggtcgtctggaaccgcactacagagcttgtggggcggcaatggtggtgattgatggcgtacgacgacggcggagtccgcaagctatgcagccgtggctcgggtggagtgcgaacgtggagggatagtcccgaggatagctgccgttcttgtagggcggctgggaggaggcccggtcaacaacccacaccgcgcggacgatccgtacgccggagatttcggcgcggacgttacgaaggagatgctgacaccgtgaccccacgcggtagcgactgttcggcccagctcgaatcagtggcacgctgaccccacggacccgcacgtcagtgtcttcc

SEQ ID NO: 130198 - DNA, 412 bp, Zea Mays
tctgtacgtacttctctgtcttgtggctggtatgcactggcaagaaatgagctgtcttggttagcctatcaacaatgacccatatagaatcgtggtgctaggaggtgttgggcaatcccacaatgaagtccatgctgaggtcctcccatttccaagatggtatagggagtggctgcaaggtacctgctactttcaaatggcttgctttaatcctttggcacgtgtcgcactcagatacatacttagcaatttctctcttcatcctggtccaccaatatagggatctgaggtcatgatacattttgttgctcctggggtgcatggaaaacttggaaagatgagcttcgtccaaaattttcttcttgagttcggggttcttgggaacgaccagtcggtcttcaaaccacagaac

SEQ ID NO: 130199 - DNA, 545 bp, Zea Mays
ggctgctcagtaccaaccgtggtattagagtgtatgccattacggatcaggtgcggtcgatatcgaccatcagtacctgacgtggcgtcacctaatggttgacgttatcttaagcgtttgagtttttaaaaagttcaaacaatttaatttttttgaacccatgctataaatagagggagatgtttgggttcatccgcataactctcatctattcattcacacctttccactatccattttgatattgtatccaaggtggagtcccaactttaatatgtttatagacttgttcaacgaccaatctccacaacatcttgagagttgagaccctatcgatgagaggcaagtcttcttcgatggtctttcttccgtccattatcagcgagagggcgttccagcttgtccccgttgtctaactctgcaacctcactttcgttatctatatcctcctatatattcataccaaccaaatactgacgctcctcccccatcactgagcctctaacaaccaacgacccttctcctaccactgaggctccatccac

SEQ ID NO: 130200 - DNA, 358 bp, Zea Mays
gaggtgaccactatgccctacctaacggagcaatcagcttaagtcggcaacgacttaaggcggtgcaacatgctcgcgcttacttaactcggggtgaccactatgccctacctaacggagcaatcggcttaagtcggcaacgacttaaggcggtgcaacatgctcgcgcttacttaactcggggtgaccactatgccctacctaacggagcaatcggcttaagtcggcaacgacttaaggcggtgcaacatgctcgcgcttacttaactcggggtgaccactatgccctacctaacggagcaatcggcttaattcggcaacgacttaaggcggtgcaacatgctcgcttacttaactt

SEQ ID NO: 130201 - DNA, 485 bp, Zea Mays
tcatgaaggttcttaatttagaaatcgatgcatctttattgatatgaacagtagacatttaattacagaagcccacacactcttgtacagtgataaaaatgaagaggttgtggattcaatattggcaagatcatcttcttaactgatggattatttttcatgagaagagggatgaaatactgggtttagtttaattgaatatagtttcaggtttcttagagacttgcaacatcggttaagcttgacttttgttcttgaacctgcatatcttttgttaatgaatgtagtgatgctttatttcacattttcttcattccctcatctaagaatgttaccgtaatgtaaatgactttgtatataatctttttcaggatagtttagtctatattacaaaaaagatgggacttcaaatttaaattttgaattggaacttgactccttaagtgtaagcaccttagctgtaatgaatcagcttataatatatc

SEQ ID NO: 130202 - DNA, 291 bp, Zea Mays
ctcgtgtggcttgagtaggcgggatgcataggcaatcactttctcattttgcatcaagacacaccctaagccttgccttgaagcatcacagaagatgacgaaatcctagtgtatatctggcagtgtcaagactggcgcagttgtaagcttctccttgatgatctggaaactctcctcacactttggagtccacacaaacttattgtcctttttgagaagttctgtcataggttttgctatgctggagaatcccttgataaagcggcggtagtaccctgccattcccagaaa

SEQ ID NO: 130203 - DNA, 381 bp, Zea Mays
attaaacatgtgtgccgaagtgcgttgtagtagtgattgcgtaagttgaaccgaagtgtcccaagtacatgctaggatatggttgtatttgagatatttattcgaggtgcgcaggtatatgccgtaatatggttatactcgcggcgaggaaatatgtatgtattgtgtaacacgacgtttaggtcgctattatataatcgtgtgaaggatgctcgtgatggttatgtgattaaggagtgatgtagtggcaggcgagaagtaagtttaattttcaaacgattcgtgggtagtatctcgatgttgtcatgatttttgtggtatggcaatgtgatgcttcgctttgtcaatcatcacattccatgcccctttggataaataaat

SEQ ID NO: 130204 - DNA, 312 bp, Zea Mays
cggctatcggccacgagtggactggacgcagcttcgcaattattcggagagtaccggctgtcgctggaggaagcggtggcgacaatgacaaaccgacgatgacacgacggtgaagaagatggagacagcagctaatatattattagcccagcgattctttcttctttcgatattatattattctccacagcggctggccgggctagctatatactagttgtagcatagcatagtacgctcgtcttgtcaattattagcctttctctctctttatcataagctcactcctgcctgacatgtggccaatcgtca

SEQ ID NO: 130205 - DNA, 348 bp, Zea Mays
gcggaaatgggatagcgtgacgacgaggtggtgataggagagcgagttgaggagagagttccatgaggcgaagtcgtgcaaggcgtcgggatgtccacgaagacgatgaaggatgcgtggagtaggggctatgggagggagcaacagaaagtgatgagattgcaataatccacctcttgaagttatttgataatctagcattaattgggcactcaccgaccacgatctactggacacccaatggagatgtcgcgtagcataggtgcgccacgtgaagcctccatgtgcgcccacacaatgccttgcccgcgccgctcgccgctcacgcaccctccctcgcagtcgtgc

SEQ ID NO: 130206 - DNA, 427 bp, Zea Mays
ctgttgtaagattgaaaccccgaaatctgttcgccatgccaaaatctgaaaaatcagaaattgatcttgattcaatagatgtgggattggaaggcatgagtgttttaagcagtgatgaagtattggtgaagtggagaaggtctgacatggaaggtgtaaccagtgatgcttgtgtcattgagaaagcgcttgatgaatttatagaagaaacgtatgatattgggttagaagatgaggaggatgaataagacaacacatacattgatgatggatatgtagcacctatggactcatcatgagactcaaatgatgatgatttttttgtttaaaagaaaagtcacagactattggcacacactgaattgaggcaaacacgtacaatcgtgtaactattatatatttcatttgtaatgatcttacaatcacg

SEQ ID NO: 130207 - DNA, 626 bp, Zea Mays
gcttcatcttcaccgtggtgactccattgtactttgcacatctttgtcaccttatttctggtaactcgagtcaaagtgtccaaaatcttgatagggtactccgcataagtcaggtcatctgaacactaaggtcctccagtggtagctgctcctcaggtaccctgagggcacttctttagctgagacacatgaaatacatcatgtacatctgacagatgatcgggtaactccaattgatatgcaacttcccccactcgctttaagatcaagaaaggtccaatgaagcgaggggacaactttcctttaactttaaatctcctcataccacgaagtggtgacaccttcaaatagacatgatcaccctccttaaactccagtaatcttctcctattatcagcatagctcttctgcctggattgtgcaattctcaaattttctcttatcattcaaacttgttcctccacctcttgaataagctcaggcccaaagaactgtctctctccagtttgatcccaatacagtggagtcctgcattttctaccatacagagcttcaaatggtgacatcttcaaactggcctgatagctattattataagaaaactcagcatagggtaagctcttctc

SEQ ID NO: 130208 - DNA, 1325 bp, Zea Mays
ttaggagttaaatgggtctgaagtctggctgtcagataatgcagagacggaatattgtctaacagtgaagttgggcaacctttgagatgggattcgactatgatccagtaattgtttggttatggttgctatatcaaggttgtagctggatcatagggctacaactttgacacaaagagcaggtcgagtcactacatgaaattgggaacaaatctccctgcaagttgctctgtaaggctgactgaatgagaatccaatggtacagtgcaccgaaaatatccccaatccactgaacctcgccgctgacgagccgtgcgcccggattcgcgccacccgctgtgattcgtgcccagcgcatgtggataacgcagaggagtaaaaatcttagcgctcggattagctcgagctcgctcaccgttgtgcccgtcgtacccacttggaccgcgactggtcgggatcatcctcaccggcgttagccgtgcaacgattgtgcgccacgtgccttggtgtcttaccacgtcgcagtagctcatattacacatgtccggtgatcgccggtgagcccgccatggtgaaagccaccaatctcttgcgatagtgctcttttcattctccgactgccaccgtgccatctcaaattcatgggccaccgctcgaggatcctataaattgagcatgccatcggttccgcaaggtagtcaagcacccaatccatcaactcgtgccttcaattgttcaccagagcccccgaattgctcacttcccccaaatcggttttccgccgccgtgagaaggctctcaccgtcgctagtgcgcttcaggtccgatcatgtcctctactctcttgtttcagtacccttatgtgcttctgatgcttctcgacccgaccgattaggctagagcccatttgatcgctgggaacacttcgtgttatttgttgatcgtacggtcaccgtgagcagcgaggttgggagctcgaaccgtgcaattgatcgaggggaaacgttggttagatgttgaattaggtatcagccaagttagagcgttgtccattgcgtgtattggccggtacaggttcaccggagctcggcctagcgccgttcaccgtcgaggaccacggactatgaagaaatagaagtgcgagggcctatctgcatttgtcagtgacccaaacaaatagtgcgcggggttcttcgctagttattcaaacccctgaggacctcggtgcaaactgtccaccacgggcgcgcgcgggggcgcatttgtctattcacgggctaacttgggccagttttggcccacactacaggaaactggttaaagaa

SEQ ID NO: 130209 - DNA, 343 bp, Zea Mays
aattcacaccttttcgtctattatatggatcggaggccatgacgccgcaggaaataaagcacgagtcgccccgaacaagcacatcagcggtccccgacgtcgacgaactaacgtctaaagacctcatcgacggataccgcgtcctcgccctgcaggccctcaacaaataccaagctcaaaccaaggcctggcgtgacaacgcggtcgtcccaagagagttcaacaaaggagacctcgtactcgtccggaccacccggacagaatcacgaggcaagctagagccgaaatggaagggtccattcatcatcaagacgaaggcatcccccaacgcgtacaggctagc

SEQ ID NO: 130210 - DNA, 328 bp, Zea Mays
aaaggttacacataaacaagttcggtacatgcctctcactcctagagtgaaacctttgtttctctcgaggaagaccgctatgcacatgaggtggcataaagattatacggatagacaagatgggttaatggtgcacccgtcagatggtgatgcatggaaggctcttgataactttgatccagattttgccagtgatgcaagaaacgttcatatcggcttggaaactgatggtttcacgccgttcaatatgaccgttgcgtcgtattcatgttggcctatcattgccataccgtacaaccttccacctactctttgcatgaaatatgag

SEQ ID NO: 130211 - DNA, 372 bp, Zea Mays
ttcgtggtggaggtgattacagagtggagtcctagctatgtcttggcttggtgaaggggctccagcctctgggtcctcctcctattcatcagtccttctaggcgtcatctcgtctagagtccatccttgtgtccgtcgtgtttccgagagaactccaccagctagccagctcggatccaaaataggtcctcttgtatctggggggacaacctcctccttttataggctaaggaagggtgtcgcccaacggtggcttccttaggaagaagccatcgagtgatggtaaaactgggcattctaccatggagtaaagccatgtgtgcttatggttgcctgactatcacgtattctttattgcagacgacatgggca

SEQ ID NO: 130212 - DNA, 447 bp, Zea Mays
tacaccccagcagccaccaacacaatcaccattcctgttcaagcgctcacccccgccgagatggcagaacgacgtaaacaagggctatgttacaattgtgacgagccctatgtacgcggccaccgttgtcccaggctattctatctggaggtcacagactttgctgacgatgagatcaagggtgacacagatgatgaccaggaagagcaggacccagtggtctccctacatgcaataactgggattagaagggaggacaccatgcagctgcgggtagtcctcaacggtcaggagctgctggctctacttgacacaggctcaacacataacttcatcaaccgcaaggcggcacaacagtatggggttactttggaacccacaccagggcgccatgtcaaggtggaaaatggagacccagttttctgccagggagtaactcgtcgcgca

SEQ ID NO: 130213 - DNA, 517 bp, Zea Mays
tgagaatccttctctccctttttggcaactagcaccaaagaaggagagagccaccaagccataaatcaccactgaggaggatgacgcggaccaaagaattgatgcgccaggtgagttgcaaagtgttcttccccagactgagctgggggaggatagcttcctgaaggatcctggggcggaggatgagaagaggattgacttggatccccctggtggggaggcggagcaaactgctcacggtcatcaaagtattcttcatcttcttcttcatcttctggagacatgaaaggcaccccatatgcctgctggtgccactcattgatttccggaggaggaggatgaagaggcacatcaggcgaacggggagcaaatggcatacccatagaggaagcttgacgacgaagattgtcgtcagtctcccgctgccgtcgagccagctcatgtacatctgaagatatatttctgcacatggaaaagaatgatgcaatgccatgggccagacgagcacccatcccac

SEQ ID NO: 130214 - DNA, 587 bp, Zea Mays
aggctctaggtgtagtgtgtctctcttattaggagtacccgatcatgcttagctcatatttattaggcatttaggttctttgttttattgttcattcttagtctttgttttgaatttttaactcttttctctttatgaaacacgtccgttgcatgttagcaaaaaaaaagcatcgaaaaccgcctacaccaagcatggttaccaatgcaggacaccaagactgaagcatatgtatcagaattcactggatttctctgtacatcacttagaagaaacttctttagactatgatatactttttttagctccagcatctggttctaatttttttaagcatggaaatgcagatgattaaaccattcatgaaacttcgatatactgagagcattgaactgcttatgcattctaaaaaggttacctcatttcctcaaatgtattcagctacgccttgaacttcgcaatacaattccaaattagtgaatataagcttagaaatataacagtaataaatagcccctatgaactgaaggtcaggacgttagtagtcttttgactagcatgattttataacacattatctcacaaaa

SEQ ID NO: 130215 - DNA, 637 bp, Zea Mays
accggcgccgccgcgctccggcaatcttctcgccggattttccggcacctcgccgctgcccccgcgttctctcgcagtgggctccaacatcccgagcgcctcctatcgtcgcagtcgtcgccggagcacggcgcgcgcggcgcggtgtccgggtcggagctggcgctgtacccgccggagcgggttcggaacttctcgatcatcgcgcacgtagaccacggcaagtcgacgctggctgaccggctgctggagctcaccggcaccatccagaagggccatgggcagccccagtacctcgacaaactgcaagtgcggtgctaattcttcccgctcactctccttgttcgataacttagagaaacaagcaaatgttggcccttaccgatcaactatcagatggtgagaggtgatcagtcagttaggccatcatttccgtattatgttttcatgatcagattccggaactgcattgatgtctgcattagttttataaatagttgttacattttggcattttgagcttttaccattgcactgccagtttcaaggtctatttgtgggcacaatgttacgctaattccatatcagttgatgactatactgctactagtttcatgactgaaacttctacaatttg

SEQ ID NO: 130216 - DNA, 600 bp, Zea Mays
atccaattgactaagtcctagaagcttacctctttctcaacctctcctcaatttctctgtttcttctcaaacggggccccgaatggcactttatctacaaaccaagttagagagaaaaccaaagtaccaaatgcaacatattcaaacacacaaacattgcatacttaacctttttcatcgctttgctccttttggcctgtttgaggttggggttggactccaaaactccaagtctgcatgacttgatcattatagtcatctatgagcttcaacaccctgtaatggtcaacaagaacatctccaaacaaagaaatgacccaaaactactagttaaagtttacttagctctttggtcccttctagtttctgcctttgatacttagctcgttcgtgtgtcaatgtctctacttcagctggatctcgagccttatgacttacaccatttagccatatgcatttccttaatggttgtaagtcacgtcagcatatctcggtcttcaatgcagcgagactctttttagcttgaccaaccttgacttcttgtaagccatcttctttgcacttggctttaggtaccttggtcttcttgaccttctccat

SEQ ID NO: 130217 - DNA, 465 bp, Zea Mays
accggcatcggttatcggaattttgtttcgaaatcggtatcgaaaacaatatgagatttttctgatcgttttaatcggttaccgttttcaatcggaatttaccgaatttaggtatcagaatttttccgaaaacaaaaaattaagtaggctatttaaaagcccacactcaataatggacgctcaggcccaagtgcctaccgtttcatctggctcgggctgttatatagatgagactcttcctcgatgacatttaggtgggcgaggtgggactaaataatgttgtgcactgtacccatccggcttcgctaacagctgctgggagaagtgggctgcatgtctgatgaatccgcttcgtgggcgactgggcggtgagctcctggtgggctgcatgtctgatgatggggcgactgggcggtgagctcctggccatgttcatattggcccttttgtgtgcgtgtgtcggta

SEQ ID NO: 130218 - DNA, 759 bp, Zea Mays
cctctgtgagggagagtggttcttcatccactagataaataatataatcatctcccaaagactttttagtcctttgtctcttactcctccttaactccaaatctggagtctggtcaaggacactcgagggcagagaatacgtccgagatggaccatctggggctaccacttccttatcccgcataggaaagatgctctcaaagaatgtcacatcccgagattccattatgacatttacagcgactttgctcgtctcggaatggaccactagaaatctataagctgcactgttatgtgcataacccaggaagacacagtctacggtcttagggcctagctttctcttcttcggtaatgggacattcacctttgtaaggtagccccaagtccgaagatgcgaaagatctgacttccttcctttaaatccttcatagggcgtggcctcacggttgcgaggtggcaccctgtttaggacatagcatatcgtgagtactgcctcgccccaccagatgttaggcatccccgaactttgcaacaaagcattagctaagtcacacaccgttcggttcttcctttcagctaccccgtttgactgaggtgaatatggagcggtggtttcatgaatgattccacactctctgcagtactcatcaaaaaggttggaaaggtattcacctcctctatcagaccacaaccttttaattttcttgtctaactggttttcaacttcagtcttatagatcttaaagtgttctagta

SEQ ID NO: 130219 - DNA, 807 bp, Zea Mays
cgagttaggacattttttttgtttatttctcacatactacacaatgccatatccatctaagggttcagatatatatttatagcccaatggactgaactacagaggtgctgtctgtcaaagattggacggcacatatgctaaaggtgttgtcctaactgcagatgctatctttagatgctaaaggtgctgtcttaactgcagatgctatccttagatgctaaaggtgttgtccttagatgctaagggtgctgtcctaactgcagatgctgttcttaaatgctaaaggtgcagtcaaactgtttttatatgctaaaggtacagtcaaaaccgtagatgctgtccttgtgcaatcaaaactgcagcaaggttgctgtccttggctgccaaaggactgttgtcatccacaaagatgctcaaagacttattccatcattctcctcctaagtcttgtgcgttgtcttgtgagaaagttgggtcatcccggacctggagcaaaactctaggaacttgatccttctagggggcgtgataagcaggtccgcaagctggttcttggtgctgatgtagcgcgccttgatgccctcttttgccaaacagtctcggattaagtgctatctcacccgaatgtgcttgctccgtttgcagaacacatggatcttggccaaagcccagagcagactggctgtccaccctgagttccaccgctccagtgtctctcctgaggagataatcgagcaagccagagcgcctgagttgaagcggtggaggccgctatgtatagacatagccaccacctgctgattgact

SEQ ID NO: 130220 - DNA, 537 bp, Zea Mays
gctgctcagggtgctggtggtggagtgcccgggggcgctgaccctaggggtgctgctccgagtggcggggctgaggcgcccctccccgttagtggtctttctctgatgcagtggatgggcatgaagctggacacctttgatggcagtggtactccggtcgaggcggtggattggctaacttatgtggaggataagattgatgtctttgagattgtgtatggtgatcatgttcgctttggcacacagctgctgaagggagaggctcaaatttggtggagaggcgtgcaggcagctcactcctctttaccaggagtcctgtcctgggatgttttcatcaggcagtttgagaggtggttctacccggtcaccttcctggagaatatgaagattgatttgcagtcctacaagcaagagaagaagtccgtcaccgagtatgaagtgggcttcaacaagatggtccgctttgttcctcatgtggcttacaatgagatggagaaggcgagccagttccgtcagggcctgaaaccttctatcagg

SEQ ID NO: 130221 - DNA, 848 bp, Zea Mays
gccgcctaatcagccgcatgcggggaggatagcttgggggatcaagtcagtgacacattgggcccactcgtcgttccccgctccgtccgctcttctcaactgaatcagccgcaccactggaggaccgagcaatctgcagctcaacgcgattcttgcgctagaccccaaccgaccccgtgactcattcctccctctgctgtcttctcgcgcgagccctttccccagggcagcagctccctgctcgccgagcggctcttccatggcgccttgatctggcgactccgctactccctccagccatctcctccctcacggctccccgcagaccggaccccagtaccctcctttgaaccagtcctccaagtgctccgtgtctatggactctccaccgccaccgggggagcgaggtaacgccgcaaccatggtccggcatctccgcctcctttcggtgtccatggtggggtctgggagaatctccagggcgagtggattgtgaccgggcatgtgcttagccgcggtggcattcggtgtccagtgaatcactcgccgcagctccaaggccgccgcggggtcacgcatctccgtgggcgtggtgaactgcttcacaaatcacggtaataatctctcccctgtctcctccaaacccttgatttgggatagcacccattccgcgatgcgtagggccgcgcttgtaccgagattggggagctcgccggcgagctccgccgtgatggcgagttctgtcgcctaccggccgcgtgggtagggaagaacaaacatgggtcgtcgattgttttagggacggtactgattagatcctaggttaccctttcgggatgagcggacca

SEQ ID NO: 130222 - DNA, 423 bp, Zea Mays
aatagttattacaaactgattgttcattacaaaaatagaaggtactgccagtctaataaaccttctccccctttttggcaacaagaaccaaaaagagagagagagacgccaatccaaagatcaccagttgggaggaggctgatgaggagcaaagaagtggtgcgccaggtgagaggcaaagtgttcttccccagactgatccgggggaggagcactgccagaaggatcctggggcggaggatgagaggatgattggcccggatccccgtgataaggaggcgggacaaactgctcacgatcatcaaaataagcttcttcttcttcttcatcgtctgctgtcataaaaggcaccccgtaggcctgctggtgccactcgttgatctccgggggaggaggatggagaggcacgtcaggcgagcgggg

SEQ ID NO: 130223 - DNA, 1179 bp, Zea Mays
gtgctccctgcacaatctgaatttccccagaaaatattctcaaatttccacgacacaccaattggaggtcattctagattcttggtaacctaccaaaagatcgagaggttatttagctggactggtatgaaacaaatgatcaaaacttggtgcagtcattgtccagtctgtcagcaagctaaagttgaaagagtaaaataccccggacttctccaacctctgccaatacctgatggtgcttggaaaatgatcacaatggattttatcgagggtctaccaacgtctgatcactcaaattgcattatggtagtggttgacaaattctctaaatatagtcactttgtttcgcttcgtcacccttttacagcattgggagtggctcatcacttcatggacaacatttttaaacttcatggattcccttcaactataattactgatcgtgatcggattttcaccagtgcattgtggaaagaaatgttcaaaattgcaggtgtggaattacgcttcacaacagcatatcatccccaatctgatggtcaaacggaacgagtcaatcaatgccttgaaacttaccttcgctgttttgctcaagcgtgtcctactaggtggaagaaatggctttctctagctgagttttggtacaataccagctatcactcatctttgcaactcacaccttttgaagtattgtatggctatcctcctagacacttaggagtggacttcagagcagcctgtgatgttccttctctgcaagtttggctcgacgaaaggaaagtagtagttcaattggtccagcaacagctagctcgtgcacaacttcgtcagaaaacacaagctgacaaacatcgtactgaaagaacctttcagataggggactgggtctatttaaaactacaaccgtatgtgcaggcatccttggttcgcagagcaaatcacaaactggcgttcaagttctttggtccttaccaagtcattgcaaagatcggctctgttgcctacaggttaaatcttccagactcttgccacattcacccggttttccatgtatcactgctcaagaaagctgtggggtcccatgatcaggctagttctcctctcccagttctttctgatttcttacatgcgcccgaaaaagtgttgcagcgcaggatacttcgccgttcgactggagac

SEQ ID NO: 130224 - DNA, 296 bp, Zea Mays
tggcggttgttagtgtttagacgctagttcctcggtcggctgtctaggtaacgctatcaaaccccctgcatctcccccttcttcctccttcggcctaggcgcaatggttgtttcttactcgtgggctgcggttttgtgctcaaaggcgcgatctttacgctcggaatggttttattacaagagatagggttctagaagaggtgccagtttctcgttgccagttgactttcgtttttcttgtcgcgcataagtcttggcgcattggttgccatttggaaagggcgttttatttgttt

SEQ ID NO: 130225 - DNA, 478 bp, Zea Mays
gccgttactctatagtttggtcagagaacttttaattcgtaatcactgttgagatttgcaaattgcagttgcttactattttctccgtatgttgatgtgttcgtattcaaaatggggtggatgggtagagaagacggaccattttttgtagttggttcaattgtgtatttgagtaagcttaattgcatgaagcccacgccaaaagattcttgtgaagtatagtttgaatgtttatcttttggtacacactaatgtgttaatggctcagtgctggtctgttagataaagaatctacaaacccatatgggagtttaaatgttcttatattgattgtccatggccaaatcagtgctgtgaaattgtactcagagtttgtttctgccagaaactacacacatttttgttgatatactcttataagatattgtacataaacagctgcatagcttcacccattgttccctatttgaactaagcc

SEQ ID NO: 130226 - DNA, 413 bp, Zea Mays
aaccgcgcggactctcccctcgtctctgcgatatagggtcacctcccctagccacccgttccttgcaaccagacgtgccgagcgtgaacgccaacgtatgagggagagttgctactgggcggagtcaaggatgccacctctggccaatcggaaggtgtgctgtcgtccgtgttgagaacgcggccggggaggctcggcctaccctggcggatgtgtctgtggcgtcgtttggaggggtgaccgatcgggggactggcaattgctcgccggtgaagaagcttcgtcgggggaccgcactgctccgcggatgggattttcgccgcacaatgcactggtatgccccccttcatgttcgcgccagcattcgccctcgtctgctctcggtagcgctcggatcaggcccttgaagttcg

SEQ ID NO: 130227 - DNA, 401 bp, Zea Mays
agctaagtatttgtcgactaattgttagccactgccaaacagttagctaggagcaggggtggagctacatgttcttattggggtcagctcacccctataaaatttcacaaacccctgtaaactaatgtagttagatgatgatcagtggagctgacattaatgacttcgttgcctggcttcgcggacaggaggatccaaacagggaattagtttattcaccctccttacacgagaatatatagtggttcaccccgttgagttagaaccggcaagctgtttttatgcaagaaagacagttttaatttgacaccaaaacacgacatagcagcaatccaataatccaatggctataacacccacacacccacggtgttggttgcatgcattgtccgcgctgcaca

SEQ ID NO: 130228 - DNA, 425 bp, Zea Mays
ctgaaaaagggtgtcgatctgatctgagttctgttctttttggtgttccactcaggggagacgctcggcaccgaagctgaagcaaagcaagcgctacataaacatcctttataacagcgatgaagctagagaaacttagaaggggggatgaggggtgctcttgctttgtgggtgcatatacattaacatgggtaacgaggtctattaaagatgttatttttccttttaggatgtgccacttcatctaagacaagttaatatgtgatgcaattgattacagatgttttgaagatggacagtgcaaacaggattaatgagaggtgcttggaactgcagaagaacaagaagagtaccaaaactaaggtttattgatcttgattaattagttgtactattacctttttgatgtgctttcctaatagttg

SEQ ID NO: 130229 - DNA, 1160 bp, Zea Mays
gtttaggtgggcatgcaaagactctaatgtttgtgcaagtcaacccagatgtttcatcatacactgagactttaagtacactgaaatttgctgaacgtgtatttggtgtagaactaggtgctgcaaggaccaacaaggagggcaaagctgtcaagaattaatggatcaggtaatcatatatttttcttttccttcacttgctagggcgattgatatgaaacagtagatgcaaaatgtcaaggtcatgagttgacttttagacatgcaaagaaatcaagaataccatgttcaatatatgtcatctaggtggctgaatttgatccagaagtaaacattcagttgttgacatccaacttttcacctgcagctttcactgctcaaagataccattgcaaagaaggatgatgaaattgatcgactgcaactagccaacagtagcaattccctactgaagtccacgaaacatggtgactccttgttgaagcattcgacctcttctcaaggaatgacatccctaggaaaagtggcaagctttggtagcggggcctgacaccagtgataggcattccgaagctaggtctatgctctctactgacgaggcctgacaactgagccagaactcggctgatcctggtggtgattcagatggaaggctaagtgatgtatcagatggtggtatacccgcgggtgtagaaactgacagttcagcgaacaacgttgtggaccaagaacaagacaaaacatgcacagctggaaaagagcggttgtgagtattaccagttctctatgatcttagagctaataatattttctctcatttgacatttagctcttgcaaattctgcggaatggtttttggccttggctgtcgtctgtaacttcttcattctttctcatgcagagccaaagtagtaagtcgagtccagaagctaacagtacccaaagtcggccaagcatcaagcttgcggtctaaaccaagagatccttctgctcctaaatcttcaggtaagatacctctttgcacttctgttacaatttaatttcatgggaatgctaatcttgaggagctggtatttgtggcaaatggatctgagtctgacacggtagttttagggttgattaacttgatatgactaagagaacactaatagaatgtgcca

SEQ ID NO: 130230 - DNA, 435 bp, Zea Mays
ggcttcggtggacgattcaatccaaggcatgtcataatccaagccaaggcaaagacaaaaacaaccatactcaagggcaacaaaatcactcccaatcgacaggaaaccagtagagttccctcggaccgctagctccaagaggtggaaggggaggaagaagcttcagggggagatacaattcttagctgagaagactattctgcttattctatggagaggataaggggcacacaacaaaaacctaccaagtcacaattcaaaagtagaaggaaattgttgacgctgaagcaagacagaatccatcgaagtaggtccttcactactttgtattgctctccatacatcccagaatatgtccacaaccaacagccaatcccgcaaccctcagctttagttgcttcggcaagccactctttgcccaaatgggtcctgccc

SEQ ID NO: 130231 - DNA, 492 bp, Zea Mays
ctgggtcggcccattctggtttcccgatttgtgggcttcaggtcgagcccatcaagatggttgtagttcacacttcagagttcaatccttggcccatgcgcaatgctgaatgttgccaccaacgttccagttgatcctgacaggatggttggcctgcagtctgcgtctctgccaatttgatgctattcgcctattcctcgggaaatcaagatacaagctccaaataaattgggtaatgattactagcaagcacacacttgacactagacgcacctcgtagtcacacgcagaaaattatgtttctccgcaactcagttttagagaattggaacctctcgtttacacctaagttgccatgtcatactgtaacgtttcgtgcattcgttctaaaatctctactacttattaagactgtaagagtagtctgccatcattccctgttctgtcattccgtgttctgccttctcatttcccgcttcccgcaaagcccat

SEQ ID NO: 130232 - DNA, 371 bp, Zea Mays
gaaggccggagctcggttgatttgagaaaagggggcgagggcggggtgaatttatagccgcgtgtgagccactgccgcggttacgatgataaccagtgctggcccaagctggcgatcagcgatggcaccgagcacgtcgctccccgagagcttgccacgttcaaccacggccgtaaggcagtcaaatccgtgatggcgtggccgaacagaggagggcggcgccggtgactggacatggccggaaggagagatggccgcgtggcagccggagttagtgcccttcaccgcggcggtcttatccggagcaaagaggtcttcgcggggagatgctcgccgcccgatcatctcgaccccggcgcaaatcgcggcgt

SEQ ID NO: 130233 - DNA, 325 bp, Zea Mays
ttacgacaagcttatatctgatgtagtaccatgtgcaatgaagtaagaacttcaagcagttcggggaggaaacgaccatcgatgtcgacaagagggatctgatgcattacgacaagcttatatctgatgtagtaccatgtgcaatgaagtaagaacttcaagcagttcgaggaggaaacgaccatcgatgtcgacaagaggagaggtgagcgagaggagagtgactaagtgaggcgacagggaaaggtgtcggggggaggtgtgttcctcgcacacctgaagccactttggcccataaggaaaaagccgtcgtgggctatgccaa

SEQ ID NO: 130234 - DNA, 557 bp, Zea Mays
cgtacacttacacccctttgtttctcttttaactcttccaatttctcagggtgtattggtatcgttacgcaacaaacaacaatgtcgataatatgccgtctatgtttgacatccttgatgtcggttctctgcgagtagggattctcagggacttgcacgttcgctcgcagcgtttggaggaccttgaggttttgcttgccgcgcgcccccactccatgcatggccgacaaaaggtcctatttgtcgatggctgctctgtctcaggtggcgccggccatgcctatcacttccagttccagcttggggtgtgggatcacgcttgggtcggtcacacagggacatctcttgctcggtcttgactggttcctccctccccctcgcttgcttgttggcttctgcctgcgtacgtagttgcagatctcgtgtagtacgtagttagcctcgatgcatgggcaggcatggcgctgagagttgtggcgtcgtatggttttcagcacccgcacacgtcgggtgagatgtgccaccagcttccagacatgagttcgagttgttcccag

SEQ ID NO: 130235 - DNA, 733 bp, Zea Mays
tactttgtatcggttgcctatgtggattagcatgtgatcaggcaagtcctgctctagtaccagaactattctaggcaacagaagatgtctgaaatattttattcagtgaacaaattttctgataccaacataatcctctcagcatactgaaggccttggctcccttgtctcaccgttcaccactaatgtgattgacaacattgttcggagtatgcctgctgataaagctccaggcctagaacttaaggatgcccttatggtcacacctgcttcgaggtgataaatcataggaatatactaattttagagtttttttggttgtatgtctgttgactagcctgattgataatctcattcttattttggtttcttaattcttagtgtagaagagttggagaaattgtactcttttgcagtaagtgggtcaccggaggaaaagttggcagcttcaaagattttgtgtggtgcatcacttcttcgtggttggaacattcaggtagcattcagtttaaaagaaccatattgtagtaatgttctacagaagaatgtaacatgtttgcatgcaattagtttttctgcttaggaacatgttgttcaaatggtgcttaagttgttatcgacattcctccctttggattctggatcagaagggcgatatgtacagcatatgcctatgctgcatgctcttgtatcaggaatttcttctattgacactgttcatattctctcactg

SEQ ID NO: 130236 - DNA, 584 bp, Zea Mays
gtctccttttttaactttgtagatggtgtacacaaagtccacctcttaagctggttagagtcttgcacttttaatgtgggattaaccctattttacttactagcattattattgaaaacaatcctttcattggtaggacgtgaaactttggtgaagacagtcctttcagcgcacctatctaccatgtcactgttttctcaactaaaaatggttaatcaagaaaatcgatcaatattggagaagtttcttgtggaaaggcaaggagatagaaaatgttaatggtggtcgctgcttggtaagttggccaacagtatgtgcaccaaaagacttagggggactaggcatcttagaccttgagcagttcgctagggcactaaggctaagatggtattggtttaaatggaagcatagtgacaggccctgagcaaacatggatatcccttgcgacaaaagcgatagagacttatttcacacttccacgattgttactgctcgtattggcaacaaatccctcttcttgcattcaagttggttaaatggacaagccccaaaaacctagcacctcatgtctttagcaaatccac

SEQ ID NO: 130237 - DNA, 332 bp, Zea Mays
aagaatctcccaatatgaattcagctgttgagcggcaccaagcatgcaccgggattccgataatctcaacttccaccaagttcgacatgattgaggaagaggcatgagaaaatctggaccatcttttgaaaaccaagttgaaccaaggtcctcggagcactttaccaccattaagaaccctcattgcagtttcttcattaggaaagaatagaagaaaatcctcaggctttgcagattggattgtcatgtcttctaacttaatgctgaaacaatgtgccacttcttctaatacctctgatccaaggacctctggcctagtaccagtaacggtg

SEQ ID NO: 130238 - DNA, 485 bp, Zea Mays
gtttgacttcgaggttgccgttgtttcccaaacatgcattcagttgagctgattccttcttccaatcttctaaaaagttggttccctttatcctgaaaggttttcggctgagggcgtctgctaccacgttggcttttccgggtgataatgaatctcaaggtcataatctttgatcagttccagccatcttctctgatggaggttgagatctggctgagtgaagatatacttcagactcttgtgatcggtgaagatgtgacatttgttcccaattaggtagtgcctccatatttttagggcatgcactatggctgccaattccaaatcatgggtgggataattctgctcatgcggcttgagtaggcgcgatgcataagcaatgactttctcgttttgcattagcacacaccctaagccttgcctcgaggcatcacagaagacgatgaaatcctggtgtatatccggtagtgtcaaaacgggtgcgg

SEQ ID NO: 130239 - DNA, 627 bp, Zea Mays
caaggactctccgattttctagcaggtttatgcaggatttgtctccctcttgtactccgatttttcttttaatgtgattttatgacttatttggtggattttaattcttatattttggctgcgatttgggacgaatttcttgaaggattttggtgatagaacatgtgaggagacttcttaatctttagttgatttaatcccctcaagcgccttcgtttttggtttccccaaaaattcccatttcaaatggttcctaaatctcttttaaaaaaatagtttgtttatggtttttgtgagtacgtggtgagggccttatgcctgtcagatttgattcgtttagatttaacatttttcagggaaatctgaactacagtatgttatgtatcaactttttagatgacaacaactagcctgctctccttaaaatttacagtccatttacctatgcctttcagtgtccatggggttgttgttgtgaagccttgcaattcatttgttgggttcagtagagtctgcaacatgaccatttaattctataccttcacttctctaaaacgtcaaatattcttcatatgatattttcctatccgagggaggctctgaaagcctatattcagaccatcaagg

SEQ ID NO: 130240 - DNA, 442 bp, Zea Mays
ttgagcagaataaagttgggacgtgttcttggtctttgccttcagcttcctgacatctacgatcattactaatccaataataatgttctgctgataggattgctctggctggcacatggtcttcccttcgaaggtctgaatttactgttgatgtcaccaaacccatcttagtgccatcgtaacttttaccccattatactggtttgcagatttctccgtccgctacacttcaccgtttttagtaatgtatcgcgccttatactgatcttgcttaatcctcttgaatcatcttcgttggaggctattttacggtgttatctgctaaggacaaatggatgatagagaaagcttaaccaatattctgtcatctatttttgacgtctggcagagtattcggttgcagagtcctctggataagttgacagagccgaaccaatgaacc

SEQ ID NO: 130241 - DNA, 1208 bp, Zea Mays
tgttcaccgacgcgagggaaaagggggaggagtgagggcggttgcggagctttggttgacgcgaagtccggcaccgttgcaacgattcggaggtccaggcaatattggcgtggccagatccacattcccacggactactccgtcttctacgcgcacgtcaggtaggaggagcacccatgacgcaaggcagtgggccccaccacgcttccgctgcgcacacgaagacgccccagctgaccatcaccgaccgcgctgaagccttcgggcagggaagatgagcagtaacaggggtcccatgcgccagagaggcactggatagctgctgccgtacacgtagagagatactgagaaggaggaaaaaaaagacaagaaacacccattacgtgggcctagcgggtgcaaaaggggaaaggctgatgggtttagatgggccacgcgacgcgtctccagcaggtggcccaagctctctctctctctctctcttctctttttatcattttctatctccttctattttctggtttttaattcaaatagatctgttttgcgattttcaaacccaattcacatgcacagatcaaacaaatcagtatgatgcacaagcctaggtttttcattcagttttagtttttttgacaaagagaaatatgcttcgataataaaacacatactcaaaacaaatctattattatttctcaacctggggtttacaaatcctaccccccttaaaaagaatctcgtcctcgagatttaggaaggactagggaaaagagggggaaattctatgcgaagctcttcttctctttcccaagttgcttcatcttcaccgtggtgactccattgaactttacacatctttgtaaccttattccttgtaactcgagtcaaagtatccaaaatcttgatggggtattcagcataagtcaaatcctcttgaacactaaggtcttccattggtaactgttcttcaggtaccctgagacatttctttagctgagacacatgaaacacatcatgtacatctgacagatgattgggtaactccagttgatatgcaacttctcccactcgctttaagatcaagaaaggtccaatgaagcgaggggacaactttcctttaactttaaatctcctcatgccccggagcggtgacaccttcaaatagacataatcaccctccttaaactcaagtaatctcctccgggtgt

SEQ ID NO: 130242 - DNA, 864 bp, Zea Mays
cgccatggtacagtgcaccggggggatcaggttcagaacttcaccgacgacgatctctatgttgtgattcccgccgctgccgcgatccatgttcactggtaaggggataaccaagataaggtaaagatcttggcactggattaactcgggctcgagcgtggatgaggttcatcgtacccccttgccttgcggccggcgcggataagttcaccggtgatggccgcctgctggtcttgtgccacgtgctctggtacctccactgcatcgtcgtgaccagtcataactatccgttgatctccggagtgattgccacggtaataggacaccaatccactgcgccagtaacttttcactcctccgacctccacgcgtcatcgctcaaattcccggccatcactcttgcctagtataaattaaagccaccgtgagctccgtaggatcatcacgcacccagccaccaagtattgtcctcagtggatcaccagggagcttcaattttggatttccccaatctgctcaagaacaccgcacagtttcaacctcaccgcggccagctcaattcaggtctgctcataccttctgctccctcgtttgagtgttcttatgtacccatgatgctcatcgacctgcccaattgaactgagctgccttagatcatcggaaatgcgcttagtggtccgttgttgccgctgtcaccgtgggcagagcactgtagggctccaatccagaaattagttgaggggaaacattccttagagctggaattaggtttaaaccaaagattagcactggtcttagtgtaatccgaccagtattagctcaccggagctcggctcccgccggtcactgtggcggaaccacccg

SEQ ID NO: 130243 - DNA, 1109 bp, Zea Mays
gtttctggttccgcaaccacatggctggctggtatcaactgcctctgttttgtgtacgccatactgcaagattgcctgttcttcttcagaaagtaggagcgactggtagacctatgtgtggtgttgaactcagtgttggagctgacagctgagtacaagaaacatccacagcaaacatgaatgcatgcatgatggtggtatggagggagaccaaaggctgtcacagttggaccggacgcacatagctctagcccttttccgctgctggtctcgtcactggatctccatggacagaccgagagcactggtccaggaccgcaggctctaatgagtgagactgctgcaccagtgtgacaggattattaccggtctcctcgtgagcgtacagttcggacaccgtgtgacaggtttttgacgaacactcaacactactatctcgtcgttttatcgatatcaccttggggaagattattgcgtttgggagcctaaaaaaatatacgtacgaaatatacaaaaaaaaagtttatgtaaatgaattccgcagacggtgcagagtgatgcgatctaggacagtctaggtttcgcctgtataggacgagtaagcttcaagaacaatcagcagtttgtcccgttagttagcgcttgagaatcattcagaaatgataagagacctgtcacacatcaccttggtaatacagttaccacacgtccgcgccctagcttggagatgacgactgacgagtcaatagcatttctgcagttccgcgggtagagaccttaatagcgcccaaacaatggtagattgagatgagagggggggaaaaaggaaattctccaggtttagatgacaaaggacttgttaaccgaacttcccactagcaacgactgctagctttgcggactcttacgccatgcaactaacgaatctgccgacccctgtcagtatgttcccctttcaccttctgtgctcaaggagtcggagagaaccacacgaatcgaagtgacagcaactccagatctgagttgtagctagccaggaggtatctcgtttcgataagcccatgaatgaatgaacaccaaacgatggaacgtggagtagttggtgaaag

SEQ ID NO: 130244 - DNA, 755 bp, Zea Mays
gcgggatctatttatgagggttttcagggtttgttttatgcaatcctgggcctcggtgtaagactcttaatacatgtctcatccgcgggttaatatcaaaagaacccacgggctctttacaaaaacgagtgggttgatatagtatgcggatcacacctgcccgttggatctaaggtccatggccttggttaaacacgcgagcgggtatgcaaccagggtcgcccatcaatagatctacgatcgtgaatgaatatgtcgaaggcgtacgtccgatttaatcaagaccattccctgtgcgatcaacggctcctggtgcaacactccaacttctaatcttagccgctcgccactggatctacgctctagcgttgtcttccttcgcccaacaacagcggcgacagcgggtcatggacgagcacgtgtttacgtcccagatgaactaccagaggtcgaatcgatgctaaaccgagtggggaatgatgcgaaaccaggaagggacccattactgacaatggtgtcgcgtaggagtcgacccacggtgtgtggaagctcgcgacggaggaattactccgacgagcaattaacgacgcgtgggtgcactaaatgtcaatcgacagggtgctacacatactaggggcaaaggagtttggtcggatagtatctcaccccggtggcagtgtaggagcctccgtgtccctcctcggacatcgagtggcaatggatgaagaatgcgagtgcggtggctcgaatcttcc

SEQ ID NO: 130245 - DNA, 830 bp, Zea Mays
cttgtttctagaaacatgttttcatgttcagatatattactaggaggtagcataagcttataaaatcttgtttctagaaacatgttttcttgttcatcacagattctacgcacattaaactgcgcatcaggctagcaagaattgaagataaacactactagcaaaaatgagtatctcataaaaaataatgaaagatgtaagactaagagttaaatgcgtcagtggtccataaacttgtcaagagatatcatttaggttcacgaatttcaaaattctagatccttaatcttgttaaatgatgtacatctctaaacttgtaaagatgatgcatcataggttcatttcaaaccatatcgaccactgcagtgtgccacttaacaagttcaaaaatctaaaatatgcattttcaaaattcgtagacttaagcggcatccctctgcttatgcatttaactcaagatgtaatgtagcaaaaatttaaaacttagaaacaccaaacattggacacattaaacttcatgccatcttaagttagagactgctgctgctagccttacttctaaacaaaaagatacataggtctccacgaggttgatatctaagctctgatactggcatgtaaattaaattccacagagctgaaaatggctacaagcagtaaagacttctgcagatagatacagaataactcaggccaagctatagccatggaacctaaggtgacctgatcattaaaattttgtttggccatgctttagcccaaaagctcggcaaatttcaaaaataaaaaaccgtatgtccaaaaaagaacacgatccgaccactaaagat

SEQ ID NO: 130246 - DNA, 406 bp, Zea Mays
ataaaaagggcaaatgggccgaccaactacttgaagtggtatgggccctaaacactacagaatgccgggcaaccgggttcacaccttttcgtctattgtatggatccaaagccatgacgccgctggagataaagcatggatcacccaggacaaacacatcaacagtccccaatgtcgacgaaccaacttccaaagttctcatcgacggagactgcgtccttgccctgcagactctcgacagatatcaggcccaaaccaaggcctggcgcgacaacacagtcgtcccaaaggaattcaacaaagaagacctcgtactcgtccggaccacccggacagagtcacggggcaagctggagccgaaatgggaaggtccattcattgtcaagacgaaggcatcccccagcgc

SEQ ID NO: 130247 - DNA, 284 bp, Zea Mays
attttctgacccttaaacatgaaagaataatgattcaaacgaccatgatgcaagctatcagtatcattgccaaggttgaccaagtaacaaagagcatgcttccatgggaataacatcacaatcaacaaaatcagaataagcacccatggagaaaggaacacacacggaacgtgtgatttttattttaccaccatcattaagccattgaatgtgatatgggtttggatgcttacgagtgggtaacaacaacttttctgtaacaccccaggtgttaccatggctag

SEQ ID NO: 130248 - DNA, 647 bp, Zea Mays
ccacgctgccctgggtgcgggtctctgaccggtgggccgcattggcatccactcaaagccactgacgtgtgggccttatccgacagctccatcttctaccgtgaccgagctcggatcggggctgttgcaactgaatctgccgaactcgccgggcgtgccccctgctcggatccccctcgtcgcggactcactagctataaagcgaccgtgccgcctcgcatccctaatcgctagaacaaaggccaactaaccagccgagttcgggagcgccattaccgtgaggaacaggagagagagagcagccacgaccttgcctctgccgtgcaattcgcctcgacctctgctgcttgggcttcgatgggtgatcacggagaatcactggtgtctggggatcgtgtgggcatggcgggccactcgtatgaccgctcgagaggggcgaatggagctaaggatggcgcctccgcaggggggaaaccattatacctggcgttgggtgatcggaatcgaccgggggcaatcgctggtcctctctgatgcttgtcgcggcttctcctgggcggaatcgcactctggaccaccggaatgcctcgccggagtgggaactccgccatgctgtcgcgcgtatcgtgggcagtagtcgtcgcgac

SEQ ID NO: 130249 - DNA, 509 bp, Zea Mays
tgaaccggtacacaaccctgaccgccggatccgatttgaacaacacagattttattatgattccacccatcccagtcgctcgttcaacgatctgtggtcacgatccgatcacatgaaaaggtacatacagattagatcaggaccgatgcccaaggatccaacggccaggaagcatcgtctacccatttcttcctccctacgaccattctatggtggcgcagacccccagcggcggcggcgccatggccatgaccgagcgaggagctcctcccagtggacaccttcaaatcgaaacgaatctacgcgttgttgagactacggcgagcaggtctagggcacacttacccgtagttaggacgtcgaggtaccccgaccatgatgagatgcggatccagggcgagggaaaactttgatgagaaattcccatccacccacggcatcacgagcttcgattcgacttcgattatcatcccctcatgctggcgacgctacttgactggaatcccgac

SEQ ID NO: 130250 - DNA, 271 bp, Zea Mays
cctagcttttgtttagcctttgtaaacacatcgctcaaggagggtctaccaacaaatagtacagacatgtgtcgcatgtcaatgaacttggcattttcatagggatcttcttccacattgcctccatgatataagctcataaaattgtccatctatttgaaacacgaattaaacattcaatatccactatggatggttattgcctaaccacaacccactaataactagctacataactataactataaccacaacccactaaaatactaac

SEQ ID NO: 130251 - DNA, 374 bp, Zea Mays
ccacaattggttccatctcaatccgatggtccggatcccgcaagacatgaaaaactgggtgtaccccaccatggaatccggcaattgcaagcgataagccaagctgcccacccaggccaagatagtgaacggtccaatatatctcgggctaagctttccggagacaccgaactgaataactcctttagtgggtgataccctgagaaggacttggtcacccactacaaattccaaatcccgccttctcacatcagcataactcttctaacggctctgagcggccaaaatattctgacgaatttcccgaaccttttcagaagtctgctatacccaatcatgaccaaccagggatctctctcccaaggtctcccagc

SEQ ID NO: 130252 - DNA, 348 bp, Zea Mays
taatgcaaccagaggctgaggctgaggctgaggctggggtcaacagcaacgaagattcttttgtcttttccacgacgaagactcgacacacccgactagggactgtcgtggaactaaagcaacaaaggaccaaatggccaggaccccgccggccgaaagccaaagagtcatcgcccacacctaccatccccatcaatacaaccagcatcaattccaaaatgaacatttttatcctcaacagcaaagcaacaacatatttctgcaacaacagcgccttcaacaccaacaaatcctagcactaccactgccaccaccccaacatccaaaccaaccactaccacctccccc

SEQ ID NO: 130253 - DNA, 1344 bp, Zea Mays
gaagccatcaggagccaccacactgagagagagggaggcggagagcgctgcagagggcaaccgccgatgatccgagcccacaccaccgtttcgacctcggtgtgtggattagagggctcatcctcgtgcctggagtgcgtgcatggcctaatcaagctagaatatggcttggtggatcgtgaattggtcgtcggggtatgacctccgccgatggaccgccatgcaccgtggctagagcatatgggtgcacgattctcggtaagactcccaccctctgattctctatatgcaaggcatcgattatgacctagggattctcgtatggtgagctggtgtgcgggatggccctcaccgagaggcactgccaaggggttgtgcacgtgcggccacgtgctgttcagggatgaggaagatgggtcttgaaccattgatttggtagacgagggtggagattagaacatcgataccggttgggagtggggaaattgggccgcacgatcgtggatcagtggatgagatgagatcgaacataataaaattaggagtgttgatccctgatctcatggtcggggcttcatacaggttcgtaagtgcaaggatttaatctgagccattaaattttgatcggacgacgtagatcagctgataccccttcgttttcgtaaatttgttaaagagacccccctggtttctattattcaaccccccgtctacctagttcaaaggaataaaagttgggtcctcggttctttgcaaaacaacccttggtatttcggatcaggtccctggtaggtgtttatagtataaaattaatatcaaaatcaacctaaaaattgtgaaattcgtatcttgcacattataactctcatttagtctgttccaattgtgttagcttcataataatattgtctacacagtaacaacatcatttataccttatcacatatctttataattagatattgcaaaacctatatctattagagtaactcttatgataaactatccataattataatctaactaaagtatgatctctaatcaagttataattaaatttgaattaattattcctttaggttatcttttctcatgatttataaaaccaacataagacctagtcttaattgcttaatcacgtaggtcttccgaaaaccatattttttaccttaactccgattttaatggttatcgaacctacgatctcgtagcgaagcgtagaatattcttacatattttattcttatgctttgctgtaatgttaccatatcaattatttgcttgattgtatgttttgctatgcatagaagcgaggtgatgaggaatctgaagatcaacttggtg

SEQ ID NO: 130254 - DNA, 596 bp, Zea Mays
tcttctgcaccagtggtgtggttctggggcttcgcaatcgcgcaaggaaccttcgttttgctcgtgcgcaacgtgggggtgatcggtgtactagcaatttctcatcggagtccagcctccgccgtgttaccactgtgcgccaccgtttgggctcgggatcgcataatcgaaggtaattaaccaaccgaatcacttcgtcttatcctccccacctaatagatgcgtgtagacactgaaaactagcatcgggggcccggtgcgccgcgctccggcgatgatccaccgtgcgggtgggcggcgccaccgccgtggctgcgtcttgactaggaagatggctagggaccactgatctggggataaacagtccagagtagaaatcatggtgtaccccttttgtttggatcacgacccttggattcagttcgggcgggtgtaagttgatccagcctaataaaatcatggccgcagatgtctgatccggtggtatgtggggcataccgcttcgtgatctaatccatgcccttgatctctgatccaacagcatgattgcgccgataccccttcgttgtcgcctgctttacaaaagagaccctgac

SEQ ID NO: 130255 - DNA, 395 bp, Zea Mays
ttgggccggtgcgtcaaaattttaaccttctttgacctcggcgcactagaagtcgccgaggtagcagtctttcttttctttccctgctttcgcgaaggataacaataatccggatatacgaatccaatgacatcaaacaccctgttcagccttttcttgcctcgagccctgaaggccatcgtcatggcatcatcttcagcctttgagtaggctccaagcaatacattgccggttgcttctatggcgtttaactagtcatcatttggctcatcaaactgactcctgtatttgaaggtgtacttcaggtagattaaaccaccttggctagagccagcagtagcctccttcggcatctcccacccatttgcaagtggccatactctataagcaatgtg

SEQ ID NO: 130256 - DNA, 577 bp, Zea Mays
atagaacctagcaagcccgagaaagcttcagacttgcatgaccatggtagggactggccagctatgtattgcctccaccttagcctaatcaacttcaattccctgtggtgtcacaacatagccaagaaaagagacacggtctgtgcaaaatgtgcacttgtcaaggttaccaaataagcgtgcttcacgtaaagcattaaaaacagcaagtagatgattaagatgatctactagacatttgctatagatcaaagatgtcatcaaagtagacgaccacaaatcttccaatgaaagcacgtaaaacctcattcattaatctcatgaaagtactaggtgcattagtaagaccaaaaggcatgactaaccactcgtacaaaccaaacttggttttaaatgttgttttccattcatctcctagcttcatgcgaatttggtgatatccactatgtaagtcaatcttagagaaaatcatcgagccattaagttcatccagcatatcatctaacctagggataggatgacgatacctgatggtaatgttattaattgctcgacaatctacacacatgcgccatga

SEQ ID NO: 130257 - DNA, 344 bp, Zea Mays
tcttctttggtactccatgtaaacacacaatccgagccatatacaattctgctagctgagaacctctataagtagtcttcacaggaataaagtgagccactttagtcaatctatccacaatcacccatatagcatcatatcctttctgggtgcgaggcaatccagtaatgaaatccataccaatctcttcccatttccactcgggtatcttcagtgggtgtagtagtccagctggcctctggtgttcagccttaactctttgacattcgtcgcacatagccacatgcgcagccacatctcttttcaatccataccaccaatactttcgcttcaaatcctggtac

SEQ ID NO: 130258 - DNA, 343 bp, Zea Mays
catcagctccaggaccacggcggccagggtgtccagcgtcatgcctggcgctcgaagcttgttgcggcgatgcgtctgctcgtctgccgatgcgccgatgcgcctgctcgaagggtcgctcgttcggtggcggtgtggccaggtcaggtctgcctctgtggcctgcgggctgaaccgccgagtgccgacgagacgggagtaagatacagaggcagtgagcttgccgcaatctccaatatttctaagagcatcaccaacagactggctaaacagactgtgcttggtaaagaaatggatttcctgtcctataagtctgacaggtttttgtccatgcgaattcagg

SEQ ID NO: 130259 - DNA, 338 bp, Zea Mays
caaatagtgagggcatagattgaggataagggtgttcaaatgattaaggaaatgaccaagcaaaaggcagagaaatacaagtgcttccatcaggacagcaagggaattttatggtttgaagaccgattggttgttcccagggaccttgagctcagaaagaagatactagatgaagctcacctttccaaattctctatgcaccctggtagcaacaagatgtaccatgatctcagatctctatactgttggaccaggatgaagagggaaattgccaagtacatatcagaatgtgacacctgccatagaatcaaagccagtcatttgaaggcagcaggccc

SEQ ID NO: 130260 - DNA, 513 bp, Zea Mays
gttttttgagtctgatgattctgggggttcgattgtgtggacagaggagtcttcggacgaggacttggactattttgcagcattggatgtggctgcgacggagacttctctgcgtgtgatgggtgatgaggatattccgggtgagagtgctgggcataggcggcgaagggcggtggcgaaacggagggtgagtgagttgtcgagaagtgataggcgtcatcatggtgaggtggagggcggtcgtcttcgtgtgaacgggactgccaaacgggaatagttgtccttgccggctggggcgagtgtaggtgagggtgagctgcgaaatctttttgagggtgaggaattgaggataatgctattcaactacagggagatgggtatcatcccgaaggttgagccattgtaatgtgtgatgccctcgctgtatgtatgtaactatgatttgtatgatgaggctgcgtgccttcgttgatcctgccgcgcccgtaggcggcttgtgttcgggtgcttttg

SEQ ID NO: 130261 - DNA, 529 bp, Zea Mays
aagcaataatatacataatatatcccggcagagaggtgacagcagccaaacaaagtcctggcaagagcagttctcgtttcaggaaatttgccaggctacttcaaactttagtgaacaaaacaaaattggtttaggtaattttggcacggtgtataaggcgaaactcagggatggatccatcatagctgtaaagagggctactaaggtttgtaggtgaatattccttcaacagaagaaatgttgtacatatttactccaccgagttacttgcagcaatcaaatcaagaaaaagttttgatgcaacatctggatttggcagatgcatggtgggcatctatctgaagagttcagaagtgagatccagagcctgtcaaaggtcgagcatttgaacttggtaaagtttcttgggtatgtggaatacgaggatgaacgcttaattctggttgagtacgtcaataatggaacactccgtcaacacttggatggtacgtcaaacatgtgcaatggacaagcttaaacacatactact

SEQ ID NO: 130262 - DNA, 719 bp, Zea Mays
gccgggtgtacgtatttccgtatatcacaaaattcaaataaaaatgtagttatctagcacagatgtagaatttagatccatagtctttattagcccacttggcaacaaacagacaataaacttaatccaatatgatacaccctatgttatgcattccaactttgcgaagtctccgaattctcagacgtccattgggcttttcacttgtctcttgtgatttgaacctttttggtgcttttcattgtgaaaattatctcctttagcactcaaattcgtttggtccctcttgtgttggcttgcttgttcatcttgatgctagcaccttgtcatttttctctttgagaagatatggtgttgtagtctttttgtttactttgtttatgtaggtgttgtcgagcttgcttgcttgccacttgtttactcccctattcttcaccttgcactaaaagcactagcaatcttccttgcggcacacgaagcaaaaccacgatttctcccttatcaagcttcttcacccccttggtgatgttatgtttatgatgttaggttgattttgccttgctttttctcttggccaagtccttattgaggcgagacatttcttgggtgagttgatcattctcccttacaatctcatttgagcattttctacaaaaacattcttaacacaaacttatctggaaaggtgagtttatatctaccaaatcattgcaacaagt

SEQ ID NO: 130263 - DNA, 714 bp, Zea Mays
cggctgcatgcaatgcaaggacaggacgacgacagagggtaagcgattgcttcgccaggagaaagcagatgccttttctgctgctgtgacctactagcggtcgtttctgttgggtgttgccatgaccagaccaaccttgtttgttgccattgtcactgtccggccgccctggcccatggatccaagaaccatccattccagtgtatttcaactgcatgtattatttattcactgtgtatctatctagtctgccaacacgacttatataaagtatacattgaactaatacgattgctagcgcctagcggagtgttcctatgtattgccccttccttcaattcgtgttcctagctagctaattaactaacagtaaaacaatctttgcatcgcgaagctgcgtctgcgtgcaatatatggactcatggttgcctgctctgcctcggcaacgacggtacgtgccagtgggcactgctgtcactactactgaccgtcgcaggcggcgccgacgacgccgacgaccgggatcggagcccgatccggcacatctcggcggggctgggcgcgtcccaccggtccgcgagggccctgaacgcctccatccgggcgacgcactctccggcgcccatccgcgccacggcccgcctggccctggcggcgtcgcggccggcggcggcgtcgaacagcgcctcccaccccggctcccaggggcccgac

SEQ ID NO: 130264 - DNA, 296 bp, Zea Mays
atcggaggcggggagtggttcactgggttcataacaagaagacgaaataggccgaggcatcaatttatagaggacggccacgaggagggcgaatttggacggggaagcgcacgcggcgagaagggggaagagtcactggagtttgctaacgtggcgttcactgggttacggtctacagcggtcactgccgagtcttcacggcttgcgatgagtggtgagatgacttaaggcgtgtcacaaccgagctagatggcagcacaatggcgacggtcacgaagccacgtcgccggtgcaag

SEQ ID NO: 130265 - DNA, 329 bp, Zea Mays
agcttctagacaccgccggactagttcggcgacctcatttggattatagtctatagtttgatgcctccccaccttttacactaacatgtgaagcctcttagtgaataatgtcttgtttggtccaatgttgttcaggccatgatccaacggttgcatccgacacgtctatgagaagaatagtatgatattatggtatgtcgctctagttgcgaaagtccggcgtcatataatcccttttgttctttgttctttgtggtcttcacattcgacttggttccatcatgtgtcttaggcatttacatgttgttgtacatctttaatttgtcttc

SEQ ID NO: 130266 - DNA, 449 bp, Zea Mays
gccgagtgacttctgctactatgaacggtccttcccatagtggtgacaatttgtgtcgtccttcccccgttagaattcggcggaggacgaggtctcccgctgcaaaggatcgatgccgtatggccttgtcgtggtagcgcctcagagtttgttgatatcgggctgactggattaccgtgttcagtcgttcttcttcgagtacatcaacgtcttctagcctagtagcttcagcttcttctatgctctcaaagatcaaccttggtgccccaaacttgagatcagcaggtagcactgcctccgagccgtagaccataaagaagggagtatttccatgcagagctcggctaggttgagttctcaggctccaaaccacatacggcagctctctgatccactttcctgtgaacttctcattcttgtcgaagactttctttctgagtgcttctaat

SEQ ID NO: 130267 - DNA, 415 bp, Zea Mays
gggatggggctgacacttgacaactttcagcagtaagtatgaaatctatgtttctaaaatggagtcatcatttgtagtttggtgtttttatctttgaatcaccctttctgaaatttcaagattgacgtatttattctccatctactctttgacacttacgtgtaaacattctgttctttatttcttgctcgctcactcactaagcaaatgtatcactggcaccaactttgtcagctttggaaaacccaggagttgaaatccatgtaaatgatctcaaaaaatcatcattaaaattaaacaaatcactgaacctggaagggatcagatcaatggtggaaagtgcgacacaaaagaacacagaactgtgtgtaccctcatgcatattgctgtcgcatctgtacaaagtcacgtgcac

SEQ ID NO: 130268 - DNA, 343 bp, Zea Mays
caacaatgatagtttcaaattagtgaacttaccatcacacaattcgagtaccaagaatccaagatttattcaaaaaattcagttaacctgttagagatgtgccctgcattatataacccctggagtgtcgcactctgcgcaaggagcctaccagctattgtgaagttgagtaggtcattttttctagtcccacaatgcagaatctttcaagttatcaaactctacaaaatcaaatgagcacaaaccatcaatgtggtaccaagcataagcacaacatgcaacaagcaaataggaatccaaaaaagaacaaataaaagagaaaatcaaaggatctgggcgtttg

SEQ ID NO: 130269 - DNA, 388 bp, Zea Mays
gccccgccaatggcgtcgccgcggttggccacctgccaccgcttctggggcatgggataaggaagagggttggcgggccgtcaatctcactatggacagctaggattagaggcttgtaccggttcgactcggcccgatctcgaccgcagattagaaatccaagggccggggctaggtggtgtgatggatggcgtttgtgccgtggattccggatccgatggccgccagcgcatagtagttctgttttattgagatctaatcatggcctctgaaaggagatcgaacggctctgattaacctgtaccctttcgccatggcgattttacgtatgagcccccgtgctttgtagaaatgaacctgccatccacccggtttaatcctgagtcat

SEQ ID NO: 130270 - DNA, 443 bp, Zea Mays
gggatttcatcctcctcttcctcaccatcatcaacaacgcggacagtacacccattggggtcagcgtcatccaggtcacacccattggggttaatagcaggcaggctacacccattgggatcagtttcagcaaatgcaggcactagcacttcttcagcatcaggaaaggaaggaccagcatcctgatccaaactagacactcgacgaagatgtctcttcttctgtttcttcccgtcagcaggagaagcaggatgattggctcggcgagaacgcttcggacgaacgttgttagacttctgaatatctaaagcttcgctagcctctaggatgggcgctaccgccagtgtttcagtagggactgcatcaaaagaatcttcagctaacatatccagcatggcacttatttctgcatcactcggatttaaaggcacctcaaaatgaac

SEQ ID NO: 130271 - DNA, 608 bp, Zea Mays
gtcgggttatgtcactccttgggctacaaaatgcaatgaacggtcttagcattcaacaaagaaatagcaacgcaagcgagggcgaagatggcaatgtagatagcgttggctacatatttgtaggcttggaaggcatcagggaacttgaggttgatcatcagattgtctattacttcttttctattagtaacattttgcgtatatatggcattgtcctaaaaatctgtcatcgtcatccatgaaatatcaggtcatggcgagcacactaggatgcagaccgccactgtgtagtagcacaacgtgaggatgcggagctgcgcagtgcttgattgaagtgacgtgctgctcaagtccattaaccccttgctttcaaaaggagcctgtggtgtcgtggacactaggaattcagattttggacgtgtttggatctcaacctcccagccagttgcctaccacgcagcaaacggtggtggactctgtacgtttggtgactctgctgcctattttagtgaagaatatcatgccatcatctaaaaaggctgctcgtctactttacgctaacttcagtagcatacacatatgcatctggaacatgtggcttcgtaggc

SEQ ID NO: 130272 - DNA, 343 bp, Zea Mays
cccatagccggagaatcgctcacttcacccaattcggtttccgccgccgtgaatcgtaccctgccgtggccagccctccacaggtctgctcataccctccttgttcctgttctagcatctttgcatgctgatgatgctccccgacccctttaattgatctggaccgccatgattcattgggaatgcgctcaacagtccgccatgttcacggtcgtcgtggctagaacaaaccttgtgaccattagtgaaattgtgttgggggaaatggtcggggtggatccaatttcgtgtccgccgctcgatagcgccggtcatggccccgttcggccagtctgcaagctcg

SEQ ID NO: 130273 - DNA, 334 bp, Zea Mays
gggctcatgtgcaaatcgccacggcgaaagggtaaggacaaatactggccgtccgatcaacaccggacgcgccagattaaatctctagggtttgaaccggtacgcgtcgttggccctcggatccaagatccacggcccacatttgatcaaccttgttctaacacagaccgttcgattagatcggacggacccgacgttcccaccaatcagtacgatcccgaatcaatcccggccctcggctgaacatccaacggactacacacgtctccacgatcggtccacactacgacagagtgagcaccctgagcggcggcgctccatggccggatctccc

SEQ ID NO: 130274 - DNA, 892 bp, Zea Mays
attggtaactgatcctcagggacacagaggcatttcttcagttgagatacgtggaacacattatgcacatccgatagaatagcaggtaactcgagttggtaggccatctctccaactcgcctaaaaactcagaatggtccaataaagtgagggaacaatttgcccttaactttaaatctcctcattccacgaagtggtgacactttgaggtacacatgatcaccttcctcaaactccagtggtcttcttctattatcagcgtagctcttttgcctggtctgcgctaccctcaaattctcccgaattatacggacttgttcctctgcttcttgaataagttcaggcccaaagaactgtcttcctctagtctggtccaaaaatagaggtgtcctgcatttcctgccatacagagcctcgtacggtgacatcttcagactggcctgatagctattattatatgaaaactcagcataaggtagactcttgtcacaactactaccatgctgaagggcgcaagctctcaacatgtcttccaatacttgattagcccttttagtttgtccatcagtctgaggttggtaagccaaactagaattcaacttcgcatccatattctcatgaaaacttttccaaaatctggaggtaaactgtgatcctctatccaaaatgatcttcttcggtacatcgtgtggagacacaatccgagccatatataactctgccaattgagataccttataagtagtcttgaccagaatggaatgagtcactttggtaaatttatccataataacccatatagaatcatatcctctcgggatgcgaggcaatccagtaatgaagtccttaccaatttcttccccttccacttgggtatcttcagtggatgtaa

SEQ ID NO: 130275 - DNA, 365 bp, Zea Mays
gggtggtggatgttttgttgttgttagtgtggaggtgggggtgggggaggtacgatttgtacctcctggtggtgttggtatgcgtggtgcggtggatgcggagcggggccgtggatgtatggcggagggggttgctgatatgtgtgtgcgacaactctagggttgtcggctggttgggcccgtgccatcctgtctctggtggccttcgtctctgggcagtctctggtcgggtgggcgcagtctttgccgtggaacaggcagtaaaatctgcgcggctgctgcgcacgtccctggccccgaccacgagttccgttcccgtggccctgggggatacttctggcggcgaggggcctcgccagcggggt

SEQ ID NO: 130276 - DNA, 775 bp, Zea Mays
gtacgatccagaatcgagggctctgattagatatgatcttaagtgaaacggtatgaaattgtggccatccgatcccacacggacggacaagatttaattacaccacggggtcactccgatccactcctaaccgttcgatccacgatcgacgactatgatccgacccggccgaaacaatatgtttgtcccaatcctcgctgcacatcgtgcaaccaacggacttggcacgccacctaccaccgatggcctaggacgacgacgcagggcaagggcacggcggcgccatggctagtagcggtcaatcccggccactaggtgcccgaatacacaagcgaaaagtgcaaaaagttgtatgagatctagcgaataccaaggtagagtccataccacatattggggcggtagtggccctgcccacgcggcacggtgggaccatggcgaaacccgtcaccagcgatgaattctctgttccccgactgctaaattcgtatggtgaggtcacggacaccgcccacgtttcgaggtgaagcaccctagcatgaatccggacctcgaacgacgacgcggatgaggattccacggcggcggtagcagcccaggttttcacttcctcgctgtggcgatgggcacgagcactgggcgcggcggcttcggtcgcgacccccggagatgaggcagggaactaccgcttaaatacccaagcaaggggaggtcgacgctcaacatcctgagcgatcccggcggaggcggacccgcgaacgcgcggactttggag

SEQ ID NO: 130277 - DNA, 402 bp, Zea Mays
accttaagtcattgccgacttaagccgattgctccgttagtagggtatagtggtcaccccgagttaagtaagcgtgagcatgtcgcaccgccttaagtcgttgccgacttgagccgattgctctgttggtagggtatagtggtcaccccgagttaagtaagcgtgagcatgtcgcaccgccttaagtcattgccgacttaagctgattgctctattagtagggtatagtggtcaccccgagttaagtatgcatgagcatgtcgcaccgccttaagtcattgccaacttaagccgattgctccattagtagggtatagtggtcaccctgagttaagtaagcatgccggttgacggcgaacaattcgagtgcctttgaagtctttttattgatgatatatttcc

SEQ ID NO: 130278 - DNA, 1542 bp, Zea Mays
gttggtggccggtagggtagaaccattagggtctaccgacgtcatggagagttgggcgttttcggccactcaaacgataaaggagatcagatcctcttaggaattttggtgtctagggttaccggagcaagaagcattggcttccgtgctgacccttgccttgattgatatagcgtctatgaccgaaggcaacaaccatggatagggttgtactttgatcggggcgcaattagtcaggatatgcctagacttggtgatcttgatcgagctagagaacacattcaacatattgctcataattggactctctgatctgacaatgttcacactccacagtgttgtgtgggcccttgtgtgactccacttgccataacactactccacccctccaagatagtttgttctaaagctgtggcggttgctggagtggaagacctggtagtccactcatgtagagtttgttgggatatctctccatgtggggtagatagcaagtagcagcgaggtagggtcaggtggctcatgaagcatgcacacaactggtggtgtggtggcttccctgacgctgccgcacggacgagccaccatgaaagaaaggaccgaaatccctgatcaagtgggtgccatcagaagtaaagagctcgaatagatgggcacacgtggcctagagaagatcaccatggcagccccgccggaggagacctatgttgtagttgtagtcgacgtggaagatataaggctccccaaaatcgacttcggtccataggatctgcctctgcaatggtgcaagatccattccttcctcctcgaggtccgagaattggttgttgcgtcttatctgctcgaaatctaatccgttcaggagcgcctgcacatggagttgatagtgccctccatgagcagccacccctctatgggtgcaaaagagtggggttgtgctagaggcatactccaagcagacgttggagctttgaaggcatgccactcagtcggtagggaatccgcgcgtgcaaaaatagccactaccctgctcgtgatagttgcaccgttggtaaatgaaaaggatcagtgatgtggttggtagaggcaatgacaaaggcaccatgacctccaatgttggtgtaggggcgatcgcctgtgttggtgatgctagtgttggcgaagttggtgatgagattgccgaagttgttgcatctatggccttttgctggtggtgtcacaattgttggggtaggggtgtcgggtcggagatactagtaggccgtacacgacgccgagcacatgttccacgcctgcgatatgtcgttcatgagcgtcaaggtgcttgttgagggtgacgatctgggccaagatgaggtcgagcttattagagatggtcgtaggatcggtgtcaagaccggtgatggatggcgatgtcatggtagtgggctttgataccaattaatatggattggcagaaggagagccctcatcctagtaaggttcttttttcttgcttgcttacgatcgacactggcttctctcttttatagagatgactga

SEQ ID NO: 130279 - DNA, 646 bp, Zea Mays
attatcgtaggacctaagtctaacctctttgttgaaatcttttttactttgaactggaaagttaaaaaccgcctcttcaaaaaaatctggaccaagagggccatcgaaacacattggagttaacttccttccatcctttcgtctctcatttcccgcacccttgcccctagaagaccctaaagccattgtattgcacaatgaagcaaatgtacaaaggatcgtgtatatataggcgaaaggataggtagtgtaatggattatgataacagatatgtacaaaaactctgaaaaggctatgttctggttctaaaaaggctacatgtcctacgataatgtaggatattgttgattctgaaaaggctatatatgcagtcctgaaaaggctatatatacagtcctaaaaaggctatgaaatggatctgaaaagtctagatgctagtctgaaaattgatgcttctgaaaaggctatgtaatagttctgtaaaggctacatgacataatcacagattttacaaaatttcggcagagttttctctgttttttgacaatccaacatatacacatagataagcataacatacaagttcatacaattgtaaaaaattccaagcaagctcataaaagtctaaacaagtgcattacaagt

SEQ ID NO: 130280 - DNA, 354 bp, Zea Mays
gcgatgtgtgtcaaagagttagggatgaacaccagaggccagctagactcctgcatccactgaagatacccgaatggaagtgggaagaaattggcatggatttcattactggattgcctcgcaccccgaagggatatgattccatatgggtgattgtggatagacgggccaaagtagcccacttcattcctgtcaagactacttataaaggctcacaactggtagagttatatatggctcggattgtgtgtttacacggagtaccaaagaagatcctgtctgatcgaggttcacaatttacctcaagattatggagaagctttcatgagaatatgaatactaagttgaacttta

SEQ ID NO: 130281 - DNA, 352 bp, Zea Mays
ctttcacaccggagggacacattgtatagatatgtaccatgagatcaatgaaatgacaagatattttccactcttgtcacttgggtctgaatgcagtcacaatggcgatggttcaaatgtaccctttctatcccacatggattggaaggaatttagaaattttaagaagcattttgaattgctatagatttaaacctatcccgcccataatctcatccaatccatatggattggcactaaaacgaacaaaccctaacatgtaacatgcataaggttcagcgccacacccacacctggccacagggcatcgagagggagggaaagaggggagacctgatctggcataaaattg

SEQ ID NO: 130282 - DNA, 314 bp, Zea Mays
gtcggaacagcctggagttgggagacgatcgcccgaccgttggatctccttttgatggccggatttggtgactgcgtagcgtttcggataggagtaacgagaaccgtccgatcgggatcggatgatggtcatcactctaggattcattaaactgagaccgtcagatctagatccgaggggccacgctgcgtaccggttcgctcgatttatgatctaatctgggccgtaggtataggatcgggcggctcagattggaagttaccccttcggcttgcgcagattgcaaatgaacccctgcactttacataaaacaa

SEQ ID NO: 130283 - DNA, 749 bp, Zea Mays
tgcctttagctttcttaatccaataagcaaagcttcgtactttgctatattgtttgtgcactagaactacaacttgacagcatacgaagttcttacttagatggtgaaacaatgacagctacagcaccagccccgaaggacccccatgaaccatcacaaaagaatgtccagacaactttgtctgattgggctgcttcatcctgtgaacccatagtccaattagcaataaaatctgctaatgcttgagattgaatggtagacatgtgaacatagtctatgataaactcattgggttttgttgcccactttccaattcaacccaaagtttctttgtttcttatgatatccttgagtggttgagatgatggcatataaagttgtgggattggaagtagtgtcgaagctttcttgaagccattaggactgcatagaggactttctccatctctatataattccttttagataggtttaatacttcggatacaaagtagacatgcatttgccttttcacaccttcattcactacttcttggaccaaggtggcacttacagttgattgtgaggttgatacatgaagtaacagaggagccccttgggaaggtggaaaaagtgttgttagctttatcatgtagcccttcaattctttgaaggcttgttgctaagagggtctgcattgaaaaacctccactgattttaggacctcaaagaacggcaagcttcgttcagcagatcttgatataaatctg

SEQ ID NO: 130284 - DNA, 492 bp, Zea Mays
actgaagataccctaatggaagtaagaagagatcggtatggacttcattattggattgcctcgcacctcgaaaggatatgatgctatatgggttattgtggatagactgactaaagtagcccacttcattcctgtcaagactactataaatgttctcagctagcagagttcggattgtgtgtttgcatggagtaccaaagaagatcgtgtctgatcgaggttcatggtttacctcaaggttttggataagctttcatgaaaatatgcatacgaagttgaattttagtttggcctaccacccctcataccgatggacagactgaaaggactaatcaggtgttggttcaaattggatgtggttcattcgatctaaatggacgggcgggattttaagtagcataccccttcgcaaatgaaatccgagccacaggttttagatctgacggcagtcgtagcttaccgattcatacgcatcgggatctaatcaaaacc

SEQ ID NO: 130285 - DNA, 621 bp, Zea Mays
attgaagcttggtcccctgggtggaagcccaaagggtcgagctctctggtgacgttcttgttgttgagctcggagaacttggaattttctcttgagatgccctttttctccctctttcgccctttccacttggatagctttgttggagaggtgagagaagctgaggaagtcttggctggcgaggatggtcttaagttcgagtcttagtcctttcagaaaacgtgtcatcttcctagactcggtgctgacatcttccggcgcgtaacgggccagctctgtgaacttgtgcacatactcactgactgtcctcccgccttgagttagctcccggaattcatcctccttgagttgaactatcccctggggtacatggtgctcacggaaagctgtttcgaattctgcccaggtagcatctatgacggcttcactgaaagtgtcccaccatgctaaagccattcctgaaagctgatgagctgccagttgaacacgctgattttcgggacatgtgatggcttccaacttcctcttgatcgtgcgaagccagtcatctgcatcgaggggattgctggaccccgcgaacgtgggggcttgagtctcaaaaattctcccatcctgtcctgt

SEQ ID NO: 130286 - DNA, 383 bp, Zea Mays
caaaggattctccagcatagcgaaacctatgaccgaacttctcaaaaaggacaataagtttgtatggactccaaaatgtgaggaaagtttccagatcatcaaggaaaagcttacaaccgcgcccgttttgacactactagatatacaccaggatttcgtcatcttctgtgatgcttcaagacaaggcttagggtgtgtcttgatgcaaaatgagaaagttatcgcctatgcatcccacctactcaagccacacgagcagaactaccccacccacgacttggagttggcagccatagtacatgccctgaaaatatggaggcactatctgattgggaacaaatgccacatcttcaccgatcacaagagtctgaagtacatcttca

SEQ ID NO: 130287 - DNA, 539 bp, Zea Mays
cttgtacacaacaacttcatcttttcctggcttcgattttatttcttccccgagaagatgcacattcactctgatactaaagtactgaagcctcctcatggactgcagatcttttcccttcagagtagaccgcccaatctctatgtagcttggcttcaaaggcctatccttcagcatttctgtagcaacgttccatgatgaggccctcgttgcctcaagaacaggaaaggtgtcttgtcgctcctctgaggtaggactaatcagttgcctggtagcaccaatataggccatttgagcaaagcaatgaactcacactaaaaatgatttagccgaagctagctcgtgaattgcttctgaacaaaaagcttcggaggcataacaaattttgatagcaagtaggtaagggcagtaaatgtgatctaccctcaccccctcgactgcttttatactaaaaatgtgcgtgaagcgatgcatgtcatagaaattattcctacacaacgacctctgctacttacctcgacaactcaacttctaggtca

SEQ ID NO: 130288 - DNA, 554 bp, Zea Mays
gaaaaatgtgtaaataaaagtgcttttcataatggaatccttgggttgaatacttaatctaaagtacaaattcacaacaaagatttggattcaaatttgggatttaaaaataaaaaggagggaaaacagaaaagaaaagaaaaagaaaaaaagaggtagaaacctaaatgggcctggctcctcaattcagcccactagcgcttgcacacgtcaaaaccctaaccgcctgacctccgctcgccgccatgcgggcccacgtcgccagcctcactcctcaccgcacgcgcgcactgccgcgtgggtccacctggccagaatccctatcacacgtcgcagccgcgtatcgaccgaccgtatttccattccgcgttctctcgccttgtgtcactggtggtggggccggatggccaggtccgtctcctccctcgaatccgcgctagagcttcttccccgcgtgaaccggatcgcgctgaccagatcctccacgatcgcgcgactccctcgccagctgaagtcgttacggcctccgccatttccgctctgacttcgccctc

SEQ ID NO: 130289 - DNA, 492 bp, Zea Mays
cccccctttaggcgactttcaggtggctaggtctcaagaagtgagaccacatggtggtcatgcccggtagggtgttgatcatgtgtcatatgaccaaagatcccgtggtagaggctttggttcccacagctctagcggaccatggtttcattctcgtggtgatcgctaccctaaatggggccaagaatgttaggtgttttttctaacactttttagggacacatgttgcaacactggtattcttcatagtttattaaccctagtgttatgtcatttgctcacctaatgtccttttattgatgcaggacggaattctagagaacatgtaactcatggattcttgatattcacgccgcatgaccagaaacactagatggttctctagcctcaacctcgtgatcggtaaggagtacatcactttcggggataattcaaaaggtaagtttgtcactcatggcaccattcgagtgaacgagaactttgttcttaagg

SEQ ID NO: 130290 - DNA, 399 bp, Zea Mays
gcggcccacgaccgcgcctctgcctctcgtgggtccttgggttcccgaccaggcatacttcgacgatctgtttgcgaagctcaatgcaatcaacatggtgctctccagcagcacgccagcaccagcggcctggccgtcgtcgcccgctccgacacctatatctttgtgggcggcgatgcctaccagttgcgttgcgcccttagggccgtcttcatcaccagttgcatggctgacgacgccaggggcaaccataccaggaccggtgtaccagcccctggcgccgactctcactgctactaccatgtcgatgactgcagcaccccctccttccccatctacgacggcagcggtgaccctctggggtggttcaactgttgcgagtagttcttctggtgccag

SEQ ID NO: 130291 - DNA, 311 bp, Zea Mays
cccgcgccgccgcaactccgtcggcaaggttggactcctccgtatcgcaactcgtcgtcaaggttccactcctctcgtatcccaactcctcgtcttcacaggtacattcgtaacttccatttctaccctatctcctcccccatgtgctgttacggatccggtcctcccccatgtactgattagggtttaggttgcatccacgtccgtcgtcaatacttccccctgtaatcaagacaatttcaccactgcttactaacgattatcgtgttacatttgatgttcagatttcggtgactgagcggttttcccct

SEQ ID NO: 130292 - DNA, 705 bp, Zea Mays
aggacgggaactacttccagcctgtccttggttagcagcccttcttttctctccaaactcacacctcttgttttccgcaccaatagctttgtcgagtagcctttggaaggatgggaatgtgtgcgaaacaagttgatattgcaagggtccaatcaaaccgtctagaaagagctcctgcttcttctcatcatcctcaacatccctaggggcatatcgagatagctgaataaatttgtccctatattcgctcacggacatacttccttgcttgagggatagaaactcctttcttttagtcttcatgagcccagcaggaatatggtaattcctgaattgagtagagaattctacccagataattttgttgacggcggcgtgagcagcgcaatacgcatcccaccaatctacagcgggaccagtaagacgacctgatgtgtagagcactttctctctgtctgagcactgagctatgttgagcatcttctctacagactttagccaatcatcagcgtccagtggatcaggagagttagcaaatgtatgtggcttgtggctcatgaactcccgatgcttgtctcgaggtggaactggtggtggtggtggtggaggcagtggtacttgttgatgttgctgttgcacccttctctcctggtatatctcctctcgctcttggcgcatctcctggtgtatatcctctcactcttg

SEQ ID NO: 130293 - DNA, 458 bp, Zea Mays
ttttcagcattaaggacgggtctggcagctgttagaaaccttcctgctgagctaaaaggtcctgggttcgacacagattctctgcgaatgtgcaaaatgcaggagcaaggcttgcctcgattattccttccacagacccctcatgtgggaaccgccagcactaggtctgtccttttttcagcattaaggacaatacataacatttacatgatataccaccgctagtaactattgaatccttgatatacaattatagtcagtaatgaaaagatccattaagtcaacatcttgatacatttaaccactaatacgtgtctttgtcttcctcttccctccatttgatagaggcaaacacaatagatataaccaacggtgcttcaaatgggacgcaatgagtactcacaacaggtactgctaactaagtatcacagagataggttaagtgtaccagactttct

SEQ ID NO: 130294 - DNA, 527 bp, Zea Mays
cagagtttgggtcgttctcggcgcgaggacggctgggaccggcgcaggggcgaccatggcagacacgggggccttcgtagcaagtccgacagcgcatacagggagatctcaaacgagcaccattgtgcgaacaggaagagatctctcgaacgagtagagagttagcatgcagagataagcgtaaatctgtctcacgaggaagaaatacacgtgaagggattatagaaaggaaggaaatacgattatggcagcttaatcaactaaaccatgtttatagtcccgtttttgcgacttaactgtttgtgatggtaatattgcgaagcaccatgtttggagacccaaatatgcaattgtctcgacaaagaagggctacgcagtgtaaccatacagaacgtccaagtggcgaaacaaaactgtcattacaaaaaggaaggggctactagtactaaaatggcacctcattacctttttacgtcaggccaactgaaaaaacaaatggaaacagtacgttctcgtacaatcatgga

SEQ ID NO: 130295 - DNA, 1269 bp, Zea Mays
atatcgttcatctcattttctcctagacttgtgccgcatcgtcccatcccaggggtaatgttgtgctctcccctcctctccaaatcaccccttcatgtctccaatcgatggggagctgatccttccccatctcaatatctccctctttgcttttccattgtgttggtgctaggcgtggtgttgcagggaggaagaaggacgaacggggaggagcagaaaaggaatataaatctcgttccctaaggtaatgcacgagttaatccttcccttgtcgccctgctgtttcgttgccttagttgcaatcgttaggaaatggcaagaatcgattcagctttgtctgttcgattggggcagcagcagtttgggtacattttgagttagtttcagacctaatttattctgaccactataaggaatttatagggcatgtttttatctctccgtagaatgcttagacgtgaattttggtgcagcaggttttgagatatgtatttttgaagtccactaggttgctgtctagtacagaaataggcaattagattgtaaccagttctgaagcagtagacctcaaaattcaattattctatgaatacaaaacttttagagtattgtaggacctttccaataagtatctattcaaaaattttcattcggttgtcgacttttttgttattgcagtagtttcagcagaaaattcagttttagtgcagttgcagttcggagttattttgagagatctagaagtcgtcttaggaaaaacataaggtataaacttgtagagaaatttgtgatctttcaattgaatggttggttgtaattatttgtcgagtacggggaaagttatggggttctgaatttagatagatgcgctcagtttgaatctatttcagttttgtgtcatggttttgcgatgcactttagaatatgttaggtgctgaatcaagcctgacttcaatgtaaagtcttgtagtacgttaattaagctttccatggagtgtttactcacccaatttggataagtcgtttgggagttatagaatttcaaagtcagattggttattgtccaaaacaaaccaattcagttaacatatacaatgacaagtattgagggtctactttaccgaagattttcaaatcacctcaccttcagatcaagtgaatgcgtttcaggcatataacaaagaagagacgaaaccagtcttcgcccgaagtggatagcgaagaagcttcgtccaagagcacgaataatgaagatgcacgtcgaggcgg

SEQ ID NO: 130296 - DNA, 329 bp, Zea Mays
cgaagtggtgacatcttgaggtacacatgatctccttcctcaaattccagtggtctccttctattatctgcgtagctcttttgcctggtgtgagctacccttaaattctcccgaattatacgaacttgttcttctgcctctagaataagtttaggtccaaagaactgtcttcctctagtctgatccaatgtagagaaatcctgcatttcctgccatatagagtctcgaacagtgacatcttcagactggcctggtaactattattatataagaactcagcataaggtagactcttgtccaactactaccatgctgaagggcactagctc

SEQ ID NO: 130297 - DNA, 376 bp, Zea Mays
gccgagttgagacaggttgccgatggctttgcctatagggtcaggttattttccggatatgacgtgaatggatatcactttcgcacaacaagctacgagcaaagttggcccaatcgaaaaaccacaagttctagagtttttacacctggccttgatgaggtcgagtattatggaagaattgaagaaatatacgagctcaagtttcatggttccaaacctcttaatcccgtcatattcaaatgccattggtttgatcctcaagtaatgatacagacgtattctaatcttaggctagtcaaaattcgacaggattccgtcttaccaggagacgatgtctatattgtggtccaacaggccacacaagtttattatctct

SEQ ID NO: 130298 - DNA, 277 bp, Zea Mays
cggagcttcaccaagaggaggtgagggctctcgaaggcgtcgtagtatgggactaggaggacctcgcccgtgggtctcactcctcaaggtgcttcgtatgttgcccctgcgccctcaagagagggagggggcgtggtcagaagaggggcctcactggattgtttgtgcgccaacaactgagtgaggttttgaagaacggggccttagggcgctttttgaagacagggagcttaggcttatgttgtttaattttcgggaggctggtctaatcccaaaa

SEQ ID NO: 130299 - DNA, 543 bp, Zea Mays
ttcatgtggtctgtgataactctcctccgattaattcaccttgatggtgatctgcctcacgaagaggttcatcttgatgatgaaattcctagcaatgcgcgcagtatcattgtgctgggaatacggaacaatgaatctttcgttttgggaaatgacggaaatcattattaaatgtggtagacaaatatgtcgacacctatcttgtccctctagattgcaaatggatccaaaacaaagtcctaggcatgagtgctttaagctctcttatcggatcattgataaatgcaatcgaggttgaaccaagaatcgcaaagtgaaagtcgcgagcttgaagttcggacattatgggcactattgaaataatgtgtggtgaatgcgatggttcaagtggtcttgtgagagacctatcccacatatgtgttgaataaacactgttccgatatatgatataatctggcaaatggcatgaattaaaatatgcagttataggattctgaagatccgtcatgaaatcctaggaggattcatatctttgaattataa

SEQ ID NO: 130300 - DNA, 559 bp, Zea Mays
tatggcttagtggtgcaacatcggtgagctcttcaagaaggttgtgtagaagcctgatgtttgattgttaaagactttgaccttgcctcgtcaaacaccctgcctcaagggcccccaagtgactggaacattcccaacctggtccatgcatagactggtgaacaacaatgctctggttcatacgtagactggcccgatatagtaatgacgaacatccacatcgttctcgaaggtctaactcactctctgtctctccctagattaattcattgctaaataacgaaaacaggttagacgggatcaacaagactccaccgaaaactatcgaaatcaactcgtagaatcaacatagtccacaaactatcaaagtttgactgattttatataaaagagtaataacatctacggtactaaataagaatatcataaaaagataaaaaggagtaataacatctacaactaattttcagcatgcacctatgagaaatcatatggaccccttcatcttcctctacacgtaatccccacgataatcggatttttctgatagctagattcc

SEQ ID NO: 130301 - DNA, 526 bp, Zea Mays
ctttcggttgaattttttgctacttcgtcggaagaatcttggattatcaccaacgtctatgcgccctgttccccaactgggaaaattgattttctccactggttttccaatatcaacatgccctccgataagcgctggttgattgttggggactttaacctaacgcgtaggcctgaaaatagaaattctgcggggggggggggggacattaatctgatgctgagctttaatgaggcaatcagtcagctagacctggtggaaatccccctccatggcatctcctttacttggtcgaataaacaaagggaaccccttctccagagactcgattggtttttcatatcgcaagaatggtcggtcagctaccctgatactctcgctacaatgttgcccagggatatttcagatcatgtgccctgcttgatttcttttaagtcaaagattcctaagcccaagatctttagatttgaaaatttctggttacagtttgacgagttcatgacaatttttcaaaattcgtggacgg

SEQ ID NO: 130302 - DNA, 616 bp, Zea Mays
atttcttggtagatatcttgtttcatggtcttctaaaaagcaaaattccgttgctctctctaccgccgaggcgaaatatatatcggccggaaattgttgtgctcaactattatggatgaaacaaactctattggattatgggattattttcaagaatgtgcctctcatgtgtgataatgagagtgcagttaaattggctacaaatccggtccaacactcaagaactaagcatattgatatacgacatcatttcttaagggatcatgttggaaagggagatatctctatatattccattggtatggatgatcaattagccgacatttttacaaagccattggatgaaacgagattttgtactctaagaagtgaaataaatgtgatcgatctctcaaatgtagcttgaagttgatcgcacatgtgtagtattgcatttcgactctaaatatgctctctacgctatttatttggtatttttgatgaatttttcattttaagttgatccaagtagtttgatatgaaaatttgcattcctcaaatacatcatgtgtatatgcatgcatactaacccttagattggtcgaaatgtccatatataagcatcaattcagatttg

SEQ ID NO: 130303 - DNA, 531 bp, Zea Mays
tatcgatctgatgctgggcccttggctgatcgagacgatttgatctgtgcatctccatccgcatccgctcggcaggtcgcgcatgcagctagcgggctggctattagctaatccaccctgcgcacgctgcacagtcgttgcacacagacacagtgcactgcactgcgcacggcggctgcgctagctcccaagtttcgcgcgtatatgcatccgccgctagagtaggcagtcggatgacctgcatgcattttattaattaatggcagagaaagattacccgcatcatctttattatttcctcacacactgtgggatcatcacgcatgcatcggtccaaaggcgcgcatgcacagtcttgcggcacctaaaatctctcgcgatggcgactccacacgagtctggacgcgaggacggatcacgagctcgccacttgtctccccggccgccggatcggagagcttagctaggacatgcgtgcgctcttcggtccccttgcttctagttctactagtagcttattagtcatgtccc

SEQ ID NO: 130304 - DNA, 324 bp, Zea Mays
atttcagttaacatgcccttgaccacccttgtttcctaataatccatgagcggtcatttttattttgcacatccttggcaatctcattgtttctttgtaacttccttcgctaatggattttagttcaactcttttgtcggaacttcacttatcttatccttgattgatttctccacttcgtcactttgcgagtattgccttaactctgtccatggattatgcttttcatcattatcacatttatccgtatcacctctatatcttaccttgatgtttacctattaccggccctttaaagtctcctgttttccatctcaatttgag

SEQ ID NO: 130305 - DNA, 618 bp, Zea Mays
tgccaaagaatcaaggctagtcatttgaaggtagcaggtaccttacaacctcttcccataccatcttggaaatgggaggatatttgcatggattttaatgtgggattgcccaacacattccgacaccacgattctatttgggtcattgttgatagactgaccaaaacagctcatttcttgccagtacataccacccacagggcagaaaagtatgcagagatctatattgaccaaatagtgcatttgcatggaataccgaggaccattgtgtcagaaaggggagcaccgttcgtagcacgtttttgggagcagctgcaagagtcactgggaactcaggtgataaggagctcagcatatcatcctcaaacagatggttagacagaaagagtaaatcagattctggaagacatgttgagggcatgtgttttacactatggtaagaattgggataagtgcctttccttggtggaattcttgtataacaatagctaccagtccagcctaaagatggcatcttttgaggccttgtatgggagaaggtgtaggacaccgctaaattggtcacaagctggagagaggtaaatatttgggcctgacctagtacttgaagctgagaat

SEQ ID NO: 130306 - DNA, 988 bp, Zea Mays
gtttccatgttgggctccatgaaagcagaaagagcccctaacaacagaaattttctggcccactcaaaagagtccggcctcataagcaggcccattaagaaagctgcccataactttggaacggagatgaggtccacgctgggggggcaaagctcagcccaggaggagaagcgctttctggccaagaaatcatcgtaggcagggtcctgagagggctgattcaggtgagtcatgaagcccacaatgatgttatcatcagcattcagattcaaattttgcacgccctggtcgttctgatcgttatttccctccaaaaatgggtccgctggggggaggggtggaagagcaagcacaacaacttcttgatcaagggcatcctcctgagggaagttgacagcttgcgggataacgatatcgttgaaaagacccacagattcatctgaaggaaggtcctcaagaccggagaattggtaactgaattgttcctcttcattgttgactaaaggaacaggagcaggcggttgttcttgctggacctgttcaaccggccaaggatcccaaccatcatcagcattattggcattggcatcctctaattcaatttcaccattggggggatgttgaggtcaaaatggaaattgggcacaggttgccccaatccaaaaaattccaccggaagttgatgcccattatgagggtacggaggtacaggttcttcatcctcaggcatgttaccaagcatgaactgctgcactacgtcgcactaaacagtccaggaaaccccatgaaaacctttagctactgaaaacacaataaactgtggaacctcctgcagagaagtcacccgtgctctaacaagcaatctagtagcattagaaatatctggatcccacatgagcacccgaccaaaagaaccaatagcattctgaatgtgctcgtgtgaccagaaatccaagggaaacccaaggagcagcaaccaacattcatg

SEQ ID NO: 130307 - DNA, 574 bp, Zea Mays
ttttgaggtcgtgccactctagtcggcatagtctctgaaagttgctgaaatcgactttcgccacctcgaggtacatgtcgttgctcaccatgttcattctgtagagaaccttgccgatccatacgtcacgacttccaccgtattgctcaagatacattctcgtctcaatacgtggcaggcttgctccccaagggaaatccagaccatagccaacctgctgggaagaacgtcaagtgcgtatatgcagtggacgttattggatacatagcccaaccaaacaacacatgtgttagttacctcgtcgggcaagccctcggagatgatccacttgtcgttaagctggcctgaggctcgtctctgccggaggaacgcacggctgtagctcctggcgcgccggaggacatggtcgtcgtcgtcaccggggaacgaggcctggtcagcagctcggtacaggttgtacatggcgcttaccgactggctcgattgccttgcgtagcacacgaactgcccgtcgccattctcgaaccgcttgaaaacaccttcatatacattgttcatatcaaaacacacgctt

SEQ ID NO: 130308 - DNA, 490 bp, Zea Mays
ctcctctagggtcgatgaagaggatcctgacccctgcttcttgcagtttcagcgacccatcaaagtacatcttccaaacttcaatttcctcggggttctcaggaagtacatattctagtctttgattgcctcggcgacccatcgaagtccattctgatatgaagtctaccagaatcttgggtcttgattgccgtgcgggggtggaattctatgtcatgagctccgagttacatgcccacttggcagtcctccgtattgcctctctgttgtggagtatatcgcctattgggaaacctgtgaccactatgactttgtgatcatcaaaatagttgtacaactttcgtgttgtgaggagtaccgcatatagtagcttctgaacctgagggtatttgatcttggagggtccgaggacttcgctaatcaagtagacatggtgttgaactggatatgcatgcccttcttctgcctgctcgactaccaatgtggtgct

SEQ ID NO: 130309 - DNA, 877 bp, Zea Mays
gccaaacacgccggtgtcggctgtgaacccgcgccggttgttggaatcttgtgtccatggtataaatcccaatcgggccgccccctgaccccaagccatgttaggattctgtagggtcgctagtagagagaggataaggagagagggaagagagagccgccgccactgtggatacatgacctggtcgtcgcttcggcctggtttgcggtcagggatcttcgtcgaggaactcaggtgcgtgtggttccctcggcaggcacgattgatgaacggagaaaagcaaatgtctcgccgatgtgaatttgtcatcttggggccgcaggggctatggactagagtgttgcgctgcacaagtcgatggtgagtcaaccctatctagttcgccaacatatgtaccacgttttgaaaccgttctctccttggattgggcaccggatcactggggcactcttctccgcgaactgcgccgccgtaggggcgttcctccgtcgttgccaagcgccgagggtgggagtcggaggggagataggctcgtgtcgttagatctctagggaacgatcgggattaaatcgtgaagaaccccttcggtacatgcaatctgtatcattggacgaccaatgaacggatcgggttgatccgcgcgtggtgtgttctcaaccgttgatcggctgttggatggcttggatcggatcgcgctatcgtcggattttgggaccagggatctttgatccggtggccctgggtgcgtaccccttcgtcatctaatccgggctcttgatcattgatcaaacggccagggagcatcaagtagcgcaacccggggtttattttctaaagagcccctccatttttgccaaataaacgccccgtccatttt

SEQ ID NO: 130310 - DNA, 478 bp, Zea Mays
atgcagaagcttcgactgaagggtttttattgtcgtcgactgagaaaacaaattttggttgaacaacagccttggcatgatcctagccgaccttttccagaattgatacagccccacgggcacccacgaaggcacaaaaatcccctctgtcactaagaatttattaaaaagttttggcctccccactgatccactggataacttcagcagggtcaccgcggatgaatttttgctcagaggagaaggctccaactttagaaaatagttttttagatttttagcacaatccatggatatatcatagcatttttccttgcctgcgcgaagctcatcgacattcttttgcgctattgatctttcgatttcgcatatctcatgcttcaccacttcaacttcaaacttttcagttgcttcagcaaccttcctctttggttcttgtacttcggttttgtgagcttctgcttgagcagacatcttg

SEQ ID NO: 130311 - DNA, 567 bp, Zea Mays
tcttttaaggaaattgcccaagtggagattggaaatggtaaatctactctcctttggcatgatcgatggaatgggcagcgaatatctgaaaaattcccggagctttggtcttttgcctctgtcaaggagattaacattagtcaagctcggctggcttccccgaatgaactgttccacattcccctttctgctgaagcgttcgagcagcttctctcacttcaggacacccttggtaatctacagttgcttgatcacaatgatatttggcgatgcagtgcctcttccaatcggttttcttctcagaaggtctatgctcacttgattggcacccatcagtcgctccctctcttctcttggttatggaaatctaaatgtcaacctaaacacaaagtattcttctggttattgctcaaaaatagattgaatacccgctcacttctcagacaacgttcaatgcctttagactccttcacctgcgacaactgtatactccagattaaagaaacgcctattcatctcttcttcagatgcaactttgctaggagatgttggctacttttgggcttc

SEQ ID NO: 130312 - DNA, 382 bp, Zea Mays
gtcaaatggtcaagatggaggcaatcagttggtgtaacaaaaatgtcactgaattcccccaacagcacctgcaattctggatggacctctttgctgttctcctcacgcacctcctccaacaatgcaaacacccatatatcattccctcgcagccatttctccacctgtagagtagaaacttcctccacaacctgctattgtacagtattgcccaccaactgaacttccacacctttgtccacaaagctaataaccttatcatcccaatcacaatgcataggactgtgtcgacgcaaccaatcatagcccaaaatagcatcatatgcgcctagccccaacaccctcatatcactctgatatgtatgcccattagcccaccatt

SEQ ID NO: 130313 - DNA, 381 bp, Zea Mays
gtgcagccggactagcacaataagtgcggaaaatcaaagtctaccgcgaagactatccatgcagaagtcgcctaagggtgcagccggactagcacaataagtgcggaaaatcaaagtctaccgcgaagacttaccgtgcagaagtcgcctaagggtgcagccggactagcacaacaagtgcgaaaaaccgaagtctaccgcggagactatctgtgcagaagtcgcctacgggtgcagccaggctagcgcaataagtgcgaagaatcgactatccgcgcaacagtccgcgcaaaaaccgactacacgcgcaccagtccagcataacaattacacctgaccaagtacgtaacgccttcgcgagcatagccgaatgtgcgaggg

SEQ ID NO: 130314 - DNA, 827 bp, Zea Mays
caaagttgtagatctctttgagctctacgatttttatataaactttatcttcatccgagtttatctgtgaaagttatgaatttataacaatattatgcagaaaaagaaaaatgggtacccgaaactcaggtaccgtattcgacctgaatatccaagcatttactagatagtactcgcttcgtattcaactgaaatccgaagatgcattattcagccagtaactcgtatctattttgagtataaaagtatctaaattcatattgaaaaatggataattttactattcgtatccggtagacgacgggtacagcaaagccattttcacccctatctctaattttcaagggacttacttttgatccctaaactcatcatgagtcccagaagacgtgatccagtagcatacgtggtaagccatcctggcgtctctatataggagtatgcttctgtccccatgtcgcattgccgagcttgacactggtaaaagtggtaactgagagttgtgccgccaaacttgtgctgatagggacaggcatgcctagccatagtgccatacccttctccagtcctccccaacccatcccgagagctcgctagttcccatgctggtagccatgagccacgcaggcgagttaaaactccaggacagagaactcgagatgagaagtaatgacgacagagctcttttatttactcggctgtttaatatctagcagtacaacacgattacatgtggttcatgctgctgtatgcttgtcgactaaagattagttcctttattttcgcctcatttagtccttaaattgtcacgaccaaacacatggact

SEQ ID NO: 130315 - DNA, 453 bp, Zea Mays
aaaacctcttatcctccctataagctaccgatcttgtgtggggtcataggattttgcctactggtttcaaagatttggagctctgtagtctgctctgtctcccagcccgagcctaaggcaaatccttggttttgtcgtgtctagggcttgcatcccaatgccatcttctggcatgtgacagaggggttagttagacacgattttgtcaatgggagcattaggattagaactagggattaaggtgaatacacttggttttggttcaagggctaaaaattcagaaatctgaatttcagaaatccccattgaacctccacttgaatggcttgtttgaagtttttaataaaatattttggccaagctttcatcatctttattgtagcttatttagtgtatttcaatgtttataattggcctaagccatgattttatgtttttcatggtctttcaccc

SEQ ID NO: 130316 - DNA, 390 bp, Zea Mays
gcatgaagtacactagatttagagaggttcggaccgttggagcgtaataccctacgtcctcttggttactagttgtattgctcgtaagtagaaaatggtaagtgttcgtttgtacgtttggacgtgtgtgatcagttatcccttagaagggatcccctcttccttttatagtccaagagataggggttacatgatgtgtgagttggcttagcaccagacgtctcctattgttgctattgaaggtgtaatcgtccatccatagctttttggcagcgtcggctccacatcgtgggtggtcgttgtctcccgtacgtcgtggatggaggatgttgtctctagacgtgacggtcgttgtccatgtgtgcacccgcaatggtgcactattgacac

SEQ ID NO: 130317 - DNA, 476 bp, Zea Mays
gtgcagtgagccccaggttggcatgatggtcagttagttcaagaggggaactggcggaccggggttaggctttgctactaaggatgggagtgtcgctcgctttgggaaggttggtgagtgtagtggtttgacaccttcagagaaaccttcatccactcccaagcttatcaaaaccacctttgctaagcctgtcacccctatgagagatggtgtgattgatgaacctatgagagatcctcctcagaaacaagtgtggcttccaaaacctaaccatcttaggaacacacttgacacctttcccgacatctctagcaatccccttcctagagcccctcagccatctgaaaagaaaatcctcttccacaaacaaaatccacccaagagaggggtgaggtaccattgtgaatattgtgagagggatgggcatctagcttctttttgctttaggaggaagagagatgagcgacgggtttctg

SEQ ID NO: 130318 - DNA, 328 bp, Zea Mays
cgagtaggcaacatgggcaccaacatttgataccttgcctctaagtatcatttcgagccggctcaccaagtccacagcaggaattcttctattggtgacccgggtggagtcagctatgcccaagtacagataggtcgggtatgccctatccttcaatggctgaatattcttgaagacaaagtcagcaaccacagcctcagccgtcagacccctttccttcaacaatccaacctcagctagcagaactcctgcctcagccacatcctggtctgtgggggactcggtccagctcggagtgcgaacatccggctgtctccctgaccgtgga

SEQ ID NO: 130319 - DNA, 941 bp, Zea Mays
attccgatgcagttcttgttcgagtaatttcacgagctctctcccggccttcttctccgttgcagggggtgtttcgaggcatcaacctgggcgttcgtcagtacgtattatttccaaacattttactgccgtggggatctgtcgttagggtttttttttctccatttccatcgcatgccacagtatgctctaagttaactcgtcttatcttgaacatgtgtcgtcgtcaatgcatgcagctgaagaagatttgcagggagggtgcgtactggggtaacaatatatcctcctttggctatgcactctcgatcgctagcctgcactgcactgcgcagatgtttgtttaatttgcttcacaaatgaaatcaaatataatagtataacgcaggggctgctgccggagcttttgagacccttgagtttggagcggagctgatgcgtggccgctctgactgggtatacacttgtgttttcgttttttatagatcgatagagatatattgtttctggtattaactgattgattgatttcattcgattgggcgcagaagaacgcggtgattggaggcgccttggcaggtgcagctgtctcagtagcagacggctactacaacaggagccatggcggcaatgctggcacgccgcaggtgatcaaggctgcagtcgccggtggcgccatcggagcagccttggagctcatcagccaccgcaggcacgtcgatcggttgagaaccgatggccagacaatggaactgacacatgaaccaaatccgctcacaagcggtcgtaaataaaacaatggatgtggagagattgccgtgctgaggaggtactcgaccaccgaaactcatgttagacacatactcctgtcctggtgttgcaattcacgccataaggagtgtgtgttgggattataatatgctcactcacattataccatt

SEQ ID NO: 130320 - DNA, 455 bp, Zea Mays
tggcaatgttgaagcatgtcagaaggcctttagcactgtgtgtgccttcattggcacgagggatttgattcaagagcatatagccttcagggtatggccacttgtggagagctgggatatgccgaaagagaccacgtcgattctagtaagggtggcctggtccgattgaagtataccttcagatttagggagaagtttgatgagccaaacaatgactggctgaagtgcatcgaagctaccagtgacgagctacttggggcatactccaaggccgaagataatgctttgtctgcagctttcgagggtcggggcaagaaaagattgaacagggtatttgatgctattggcttcgtataccctgattatcactacccgctacgagggcaaggaaaaaagagaaaacatgtcgcttcggtcaccccagctgagccgaagagcaaaaaggtgaaggttct

SEQ ID NO: 130321 - DNA, 325 bp, Zea Mays
ttagtgtatattattgggctggggaatatggttaatataggtatggatgagatagactacatgacgtaggtaaaaagtttgtttgatgttaggtggtggttgatagattatgcaatccattaagactctattggttgggttggtctatcattctttatttagtgtagggtgaagtaagttaaaacatgtggataggatctaatctatttcacaagtattaactggtccattaagtaactcactttagactagatcatattaggttagatgggatctagattagattggtaaaactaggttagactagataatatctaattacttt

SEQ ID NO: 130322 - DNA, 1180 bp, Zea Mays
gaactctggtcggtctcgtccctgcaacctgcaatggagaccggtgcgtgctcgcgggccggctgggccaccgggctctaggactttatgctgcaagttctgtaagggccggggacacgtggatcttttttgtcccagcaagttcacttccttcggttctcctctgacttcgttccctgcctttgggagtcgggcccttttggtgggaaaccaaatttctcctgatcgcagttcctggtttcgcacaccggatgtttctctgtcctgtggaccgcccactttcagttgcttcgaggagttcgccagagaagtattaaaaaaatctgaatcggcacctcctccgtccctgacgctttctctgggcgtcacttcagcaaaaccccaacttgctccgtcttcgcctgctggttgtcgatcctcgcctcctgctccgatggcgtttaggcgcgtggatcctgaacccttccttcctctgggcttcagcgcttcggtggtccttcaccgggaaattatggccaggtcagtttctcggcgcctcccgccattgcatgaggactgggctatcatcagcatccaacctttacctgaccatgagattgcgttcccggcggtgagggatgtggttagagaataccttgtggagcaccgtcaacttggggtgcgtgatatccagcggtcgcacctgggacaagttttggttcagtttagcagcattcttgaaagagacaaccttgtccttctcggtccgcagcagtaccttgatgcctccttcactgttcagcgacacaatgatgcttggaaccatagggccctgtattttaatcgggaatgttggctcatgttgttgggtttccctctggattatcgttcttctgagcacttgcaggtggctattggctcctttggcagattgattctgtgggaagaagacagacgcaacatttctaggactttgctcagggttcggatcacgtccctggaggaggtcccacagttcattgttttctcagacgctgatggctttcttggagattcgtggacggtgcagtgtgagatcatccagcaatctttgttgggaggtcagcctcaagatgaggacccagtgccagcggccccggcggacgggcaacagcttccctttgagttttttggcctgggtcaacctgtgccggcggcgggc

SEQ ID NO: 130323 - DNA, 359 bp, Zea Mays
ggaaaaccgaggagaagagaacacttacaaaccagtgggacaataaaatggctagcgttgtctgctgtcatgctgtggactgtcggccttagagagatggaatcttcagtcttgtgctagggacagtaggacaaggagaggaagccaccaagccgattaagtctgccactctatcgtctagattatggaacagtgggtggctctctggctgaccggtggaaggcgaagtcggaggttggaggagctgctgaccgccacggtggagccgagcccgttcaggttgtgaacacacatctgcagagataaaaaaggagtggcatcaatggcagccacagattggggcatgaagtgtaaccact

SEQ ID NO: 130324 - DNA, 417 bp, Zea Mays
cttattaagagacaagggaagtcgtccacaagtgaggccatgtccccgcccccgcgactccgtcgacccgcccttgacctagtgcgccatgtgcctctatagtccatctccgccccatgcacgccgccacccggcttacatgcctagagctggagctgagcgtcatcgtgtgcgtgggttatctccgcatcatcttgctcttgctccactccctcgctgaagtcactggatttgtcattgtcgtcgcctcaagcttagtggcagagagggtgacgttacgacctttatgtgggcatgcacacctccatggactcacctccccatgtgccctcacatcgagccaacccgcgttcgccctaatcctccattctcgcgccctcaccacggtccagcgaccccacgcctctataccctcac

SEQ ID NO: 130325 - DNA, 279 bp, Zea Mays
tagttcttgcatattctcgatgataactagaggacaccgtgaacacgagaaaccaaaacataacactaaaactcaccaaaaaactgaaagtgtggattcttaacttcaatcccattcaagcgagaactcgaaccaaaatcctctaaaccatctagtcgctggaggatttggaaaactttctccatatcccagtaaacccacggaagaaatcggtcaaaataggatactttggatcaccaaaacacccctgaaagagcaacctacactacacaccgtgca

SEQ ID NO: 130326 - DNA, 374 bp, Zea Mays
acgggattacaggaaacctattatcacaaaaggtcattagctagcccactaatgtcttcatccactagttgtactctaataccctctcgtgcgaatacaatgccctcaatatcatagaaacactatttttagtctcaaaggtgatctattgttttgaatcctttatattccaactttttagcaactgtatggtggaaaaaaggtgtcttacaaccttaacctatgtttggaaagttctctcgtgcaatttggctaaatttcccatggtctttattttattttgagaaatgatgtggtataatgatgtgcgatgttttacttgagtggacataaacaccatctaggtatgccttgaatagtggggattattggaa

SEQ ID NO: 130327 - DNA, 503 bp, Zea Mays
ctttgcgcagctgattcagccacctcgatttcagagcacccttgaggcctcacgccttgtgtttggatcttaccgccctgctcctgagattccagtgccagcttctgcttctgtgactctcaggccgaggatgcagctctacgacagtttgacactcagggtacagcagctgatgatgatgatgatgatgatgattttggggttcctccttcgcctccgcctcctatgcctccccgctcccatgatcatgaggctgggagttctcgtgctgcccctgctcctcctccggctatggaccctgctcttgcggcgattctggccaacctggcagccgagcaggcccggttatctgagacgatgctctcgatgtttcagagcatgcaggacaggcaggatgcacttcagcagcagcttattcaggatagggcagagaatagggcattcatggctctcatgcttcagcattctggtatctcagcacctccggttcagtctgctccgcc

SEQ ID NO: 130328 - DNA, 517 bp, Zea Mays
cgggtgatggactatgcccctaagtgatgaataaagcatacatacatatctttgttttgggagctaaaattaacgcccgcgttggcaccaacctaaaagacgcggatcacgaatgaactgcaacttgacgtggacacggtcgattttactgcaacttgtcatatacccttttgcgcgcgcactagtgactagtgacatgacacaaagtgcaggtatagattctttcttggatgctccacccctttccggtttccgaacggagggatatccttgtttttgcctgattgagatttccgtctcgtccaaaaaacaacacgcccattgaatcctttccacggaaaaataaggctcgctcgcactttgcactaaagatgacaatttaacccgtaaattcgagaactaacggatactcgacctgacggatacgaatatgggtgaagattttgaccaacaaatgcactcgtatcgatccgaagttccgcggatgtgagtgcaggttttcatttcaacccgcgag

SEQ ID NO: 130329 - DNA, 521 bp, Zea Mays
atcctcccatttcccttctgaaataggcaacgattccaatggtccagcagacttcagatgtaccacctttactcattgacatacatcacatttagcaacataacgagcaatttctattttcatctttgtccaccagaatcgcgatttcaagtcttgatacattttattactcccaggatgaatagaataccgggaggtatgagattcatcaagtatctgttgcctcaatgtcaggacctttgggactactaaccgattcttaaaccaaagaatacctttgtcatcaagttgaaaacacgtagtgggatccactgccatacattccttaatatgagttagtccggcatctgtcttctgagcttccataatttggttaattagagtattccaactacagattgacttgtagtgtgggttgaaacatactcaaattcaaccgttccatttcttgacagattgtggtttcgaacgaactagccgacagataacacaaatgttccttgcgactaagcacatccgcg

SEQ ID NO: 130330 - DNA, 757 bp, Zea Mays
gcggagctcactggggtggtaatttataggttccatcggcggtggcggctaattttgagaagacgcgcggtggccggagcgagagaagtgtcactggcggcgatctatcgtggcaattgcggggtaataagctacggcggtcactgggtaacgaccacgactcacgacgacgtggtaagatagccaaaggcgtggcacaaccgaggaaaacggaggtagccacggcaatggccgtgcggccacgtcgccggcaagtgaatgggtgacagagcggctacagggttctgagttcatccaaggtgaagatttttccatggtcgatcataatccacgccacagaggtcacgaatcacggcgccggcgcgaatctgagcgcgcgggtcaccggcggcgagggggatgaacctaaagatctttctgcgtactgtaccatgggatccttattcagagtgcctaaccgagcattttgctaggcttggatctctgatttctatataacaacttgttaatccacttgtaacaaagttgttggtctataatccaactttgatcttgctatagcaaccatacttaaattctcactgaatcatactcaaaatagctcccaaacttggtcctagttcactgtcagtccagtttcagagttacactcgactgacagaccaacttcaggtttgtttttcttcaaattttgtatgttaccaaggtttagtcacttaagcaaagttgcactcctatcatagctcttcgacttgat

SEQ ID NO: 130331 - DNA, 287 bp, Zea Mays
tgtcgattgggcaagtagtagagatgatcgaagatctacatccagatattgtgtgtttgttggaggtaatcttgtctcatggagaagcaagaagcagcttgtggtggctaagtcaaccacagaagccgaatatatagcaatggcattaaacctatgtgagatgatgtggctcaagcaactattgggggagttgaaagttctgaggaatggaactatgagactccattgtgacaatattgttgcaataaacaatacaaacaatgcagttcagtttgagcgtactaaac

SEQ ID NO: 130332 - DNA, 511 bp, Zea Mays
gctatgttgcttggggagagcacaagtgagcaggctgacttcaaccttggcagcaacaaagatttggatgtgtcgccaacaaagcttacaacaacaaagaatgcaaagcctgcaaaaaaaatgacaccaaggaagaagaagaagaacctgacagcaagtgtataccaccaagcaaagtctgtttggacttgtttgaaaccaagcaaagtcatttgaattgtgaacatctctgaaattttatttgaactttatcgattggtgtgctgaaatttctgtgctgaaaattgcaccgtgctgaaaactgtactgtattggattttgttgcagattggtgtgcttctctgtactgtgcgctagaaagcacagaatttttttgcgccaacttccatcagaacagcactagtcagcttggtctggacgctttatctgaacctgggttggagcaatttattggtctgaacgctactcttatttgaaccaagggtggagtagtttttgaacctggtctgga

SEQ ID NO: 130333 - DNA, 538 bp, Zea Mays
tacggtgattcaatcagcgcgataccagcaaactctgaggcgctatcatgataaggccatacagcgtcgatccttcgcagtgggagatctcgtcctccgccgaattctaacgggggagggacggcataaattatcacctctatgggaaggaccattcatagtagcagaagtcactcggccgggatcatatcgcctcactcagatggacggaacagaaattgggaactcatggaacatagaacatctcaggaagttctacccgtagctacatcacggaggatctcggaacgacgatgtattctgtaaattgagaaaaatatcatcaataaaaaggtatcaaaggcactcagatttatcaatgtcaattggcacgcttacttaactcggggtgaccactatgccctgctaacggagcaatcggcttaagtcagcaacgacttaaggcggtgcgacatgctcacgcatacttaactcgggatgaccactatggcctgctaacggagcaatcggcttaagtcggcaacaacttaaggcggtg

SEQ ID NO: 130334 - DNA, 589 bp, Zea Mays
gtgccttggcccttcccttgctgcttctgaggcatcgggggccacggcaccacccaatcggctccctttgctgtgttgccaccctctacactaacgaccactgactccctgcttcagaccgctgtggttgcgtccttccctgtcaccttgctcttcctcgtcgttcgccccgcgctctgtgcctcttcctcggttatgggtcgcatcgccctcacgtggttgttcctacgccccttctttgctccgcctcggttctcgtccctacctatcgcgtgtgcgtctcccttcatgacacttgcttctccgggggcacctttgcggcctttgatcgggtcatgaaccctatccaccgtgactgcgtggagctctatcctcgagagggtcaccacgccatcgggccaattatgttccctaacatcaccattatatcacatacgatcgaggccttgtcgtcttccacacacactcatactatagtcgagctccacttctcggcggtcatccacatcagccataacgctctgccctagtggccccgctctagcccccagcgcccctgctccagcccctagtggccccaatgtccccc

SEQ ID NO: 130335 - DNA, 753 bp, Zea Mays
gagtaggtgggtggaccggagccaaaaccggctgagctggttttcaaaaacctacacacagacttgtggctggctgagtagaaaggtggaccagggccaaaaccggctgagctagtccaaaaaacagctgagctggtatttgaataccagctgaaccagcctgaaaaccagctgaaaccagtattttccaaagagcaattttggccaagatagacttaaaaatgttgtactacatactttcactaaggattaacaagggtaaaatagaagttttggatcaaggattttgagctttagtacgtaccaaccttctttttggatcccccttgatagtacgacaattcctatactcaagtttgtaacagccctggtgtactctcactaaaacttgagcataacatcatgagcattggcatatcatgtgtttgttacacctagagtgcattcgctaggtaaaaatttcaaataaattgtactgatgtgacttgatgtgtggttaaccctaggataaagtgcttaacctcagatcagggcttatggagataactgaagcccaaatatgtgaaaacctcaaaagacatgagacatgatcctaagataacatcttggaaggactttagtgacaccaaaacccaaaagtgctaaaaaccctgaaaagacccctgaaaaccctaaactagaaccctagggggctaagtgtaaaattggtgcacttttggaccaaagtgcaaataccaaagtattataacacca

SEQ ID NO: 130336 - DNA, 321 bp, Zea Mays
ctcttgatagtacgactatctagcctactaatctggtcaatattcttctctaaacaccttttgaccggcaaaagaaaaaacctatcttttacctttgccttgactattcaattccatcttccttaaatgatgtacaatggtcatccataagtgtagccaaccatgctatcttttaccatttgtccgtagcatgaagttcttccatcatcatcaagccacttgatcaatagcctagatcaacacatggcttgataacactataatgatatgatccactccatgttatcacatggccttcttggttcatcaatctcaacatag

SEQ ID NO: 130337 - DNA, 414 bp, Zea Mays
tttttaatcatcgcaagcagaaggccaagcgtgacaaagagtccgacggggatcacggacggtggcccaataagagaaagaaagaaaggctgagacacgatgagatgctagtggcagtgacaagttagaagggaaataaaccaccaatagagggtcagagtgtgggttgctgagaaaattcctaggtgggggagcaccacccgagaaaggaacagaacccaggcagggcagcaagcgagagaaggcaagggttgccttgccagacgagactgggtgcctgctgatcttcgaagggttggagtactacgcgccgagaagatatcggaagtcggaacgacgcgaaatattctagactcgacaagcatctccgattgtcctcgactggtccgaccacactattacttacgaccgtac

SEQ ID NO: 130338 - DNA, 1231 bp, Zea Mays
ctataaaaatcgaagggtagctaacaaaaaatagatctcgtcttctaccttcagcacgtggccacgatacatggagcggatcgacggttttagcggagcggatcgacggttttagcggtgcggacgagctaagcgcagggatggatcttcctggcgatgatgacggtgttaggtgtggcgatggtgcgacggcggcagcaggcgtggagaagaacgtgtaggaatgcgacgaggctcttcggtggggagcactggcgatgtcaagcgacgcagcagcaatcacggcgacgacagcgagcagcggcaggcgagtagaacagaggcgaggagatgctgggtaagctgttgctggcagcgagggaggctcgacggcgtcgaattggcccagcagcgatggttggcaagcgacagtgcatggattatgctggtagcaggaatggggcatggggaaagcgaagaaggaggtcgagcacggactcaggggtcatgggcacattatttatagccttgaaagggggaagggacgtccggtgaagtagaatcgcggcggcagccattaatggcggagaaaatacagatgggttaatgggaaagagaaactgacagattaagggagagaggaaagaaacagacaggcgttggagactagtccactcgcgaggagatgaaccagcagaagatgagccgatgaggcgaccacggacccagaagaaacggcgacagctattaatggagggagctattaatggagggagagagaggaaaccgtcacattgcttgagtggggaagaaggagaagagtcgtcgggaaggtggcgttccactgcatagtgcgaggccacgagcaggcagatgatccagcatgacgcgaaatggcaggcatgggtgtggctccacgcagcgcacgagcgaacggtgcggcgagcagtgccagaactgaatacatgctaaaggttgaagaaatactgtcaagagggcccatgcgtaagtgagtaaagagaggagaaggcaaggtgcgattgggccaaggagattggccgacggttctaatttcttgtgtttttttcttttccaaattcatttcttatcatttcagaatatacactaatatagtatttttattccaaaacaaatagaataattcttcaaacattattaactcaaataaatatttatttggccgaaatattattttaaggaaaagtcaattatttaaataaaggatcttcac

SEQ ID NO: 130339 - DNA, 597 bp, Zea Mays
tccacacaccttatggagggagagtagtatggattctgtgttccaaggtgacaaacacaaatagagctgctctacaatctgaatctgaaaaggaacaataacaattctggtcagtatgactgcaagctgaaaaaatggtacattaaatgagtatgacgttgagcaatgcaaaggaaagcaaagatcaatatgattctgtgttccaaggtgacaaacaccagaaacgaattcagctccaaaacacatgcatcagagaatcagagatctcaaggtataattcaaagaatcagagatcacactggatacttagtttctatctatataaaatagttgaattatcataaccaactcattgtgccagtgttagttcagttagtagctattttttccgggtagagtattaggcatccacacacatgcatctatttgtaattatagtgctcaatcccccttcatacatatgttctctgcacagtaccctactcatgtatccagtaatgtctctagatagtgtataagacccagaaccaattcattgatttatgcacatcagtatattattctataatctaattttttactcagctatatccccac

SEQ ID NO: 130340 - DNA, 574 bp, Zea Mays
gtgacttcctcctcttctcagggaactatcaacatgatgtcaagtgctgagcagcagttttcagttccacttcctccacaacagttttatgtgcctgggacttctaagttcgtgccggtgcagggttttcctcagtatctggctgcgcctactcctgcaccgactactcctatgccgtctcagtttggagctccgcgtctacctcacccggcggctcaatggggttcttctattaatttcactccgggagcttcctcttctgtgggtatttctggagcttatgtgctacccgctgtggatggcagagatcaaggagacgtggtgacaggtatagtttcagttgattcgtttgtggcccatgctctttttgactctagcgctagctattcatttgtttcggagaattttgtgtcacgggctagtctttcggtggagaggttgggtcacccaattttggttagttctgctaatggccccattagtagctgttcagtttgtcaggggtgttccgtcattcttgatgatgaggtctttttggccaatcttgttgtgatttccttgggggcattcgatg

SEQ ID NO: 130341 - DNA, 555 bp, Zea Mays
ctacagtcccagtctagaggagcattacaaccatcttagaatggtattggccaaactcagagagcactagtttttcttgaagcataagaactgtgcatttgtgaaaaaggagctacagtaccttggccatgtgatctctagagagggggtagccacagactctacaaagacagccgccatgttggcttggcctagaccccagaatgtgtctgagctaaggggttttctaggacttacaggatactataggaagtttgtgtgtgggtttggcattttggcatggcctcttacccagttgttgcaaaaacagcatggattcaaatgaaatgaagaagctcaagcagcatttgaggctctgaagaaagctatgtcatctactcctatattgtctttaccaagatttgatctccttttgtggtggagacagatgcatgtgagaatggtatgggtgcagtgctcattcaacacaggaagcccatagcttacatcagcaaggcattgggagaaaggaatagacacttgtctatatatgataaggaatttttagccttaatt

SEQ ID NO: 130342 - DNA, 533 bp, Zea Mays
attgacagtacgggttttagatgcctccctttcgtccctttactgcaagtattgccttagaaacttggattgaccaccaagcacttggtcataaggaggtggtcctgggacgaagaaatcatgtggtgaccacacacacatcgctgggttacttgaggcatttgaggccaaaggcaatctttggcttggctcctacgactgaggctggacatactatgggatgtaaggtgaacggtatgaggatgtactgaacacctcttttgactgtgagggttgcgtggctaacgaaacaaactccttctgcttgtcgatggtatgatgagatgttcttatggtctggcctttgtccttgccacaaaacaagcagaatggtttccgtgggggtgcattcaatctaccaccaaagctttggcctccccttcctcctcttaaagcaggtggacaaaacgtgttgtgcgaaggttgctgctgagagcttgcatgttgatgccctgactgacactaaaactgggccatcttttcctcaccctaca

SEQ ID NO: 130343 - DNA, 561 bp, Zea Mays
ggaccttaaggatatctccgccggaggctcctactccggtgaagacaactagacgaacctcgggggaacttcgtgtcccccggtctacaaagatgaagcacgccttcctccggaggcccttccggacccccacgggtccgagctgcagacaggtacatgcagaagtgatcacagccagagacaagggctcccgtgtcaaatgcagacaggaaccctgggtcggggcttagccccgcggcaagtgccataccaagaggtgctccgcaactctcccccagctgggaaggacccttcaaggtaacgggagtgcaccgacccaggggcaaccatctatctatgactgaaggagtaccttaccccgatgccaaatatctctgtaagttctatccatagagcaagactaaggggtcgagtctgtttccttttttgtaactaaatgacgcatacgtgtatgataacccggtggggtctgcccccatgaacccggactattagtctgcacacatgcacgacaagttatgaagaagaaactaccccctcagccgtgctcttgtggtagtt

SEQ ID NO: 130344 - DNA, 939 bp, Zea Mays
ctattggggaggatctcaccggtgctggcaccctgtacgagccgggtcatgacgccaatagcttgaagattccttgatgaggaagcccgaccggtgccgaccgagtcgttgcttgagtatggttcccgcggtgtcctagcccgatggtgaagcttcttcgttgcatgccaaggtcgcagacgtggttcatcgccgatgcccaccttcgacctcaccatggttccctggtccatgatggcacccgtgattccagcgagcccatggaagaaacgcccaggtgaccgacggtggctgcgcggagaggatgtggatgggaggtaaggggaaagatggcttatatgctccaagaattggaatctggttgggagttgcacagaagccgcggcatccatggcggaaatccaacgctgtttattaggatggggaaggagcatctggcaatttgggcccacacgccggtgtctaggtgagacgcggccaagagtggctggagcaagggcccaacgtgtcagcggaacagactcgtagctggcaggatagggagggaattggccggcgtgcgatttctgcgctcttctgttcacgagcgagttcgtagcgcagagaagatgtgtctgatgacgcggccccgcagttagtggacgaggggagatccacacatcgtccgttttacgcgcggtgagcccgagcagcaggccccacgcgccattgacctagaggaaaaacacaagcgggccggcggggaagagatttagctagctgggccgcgcaggatggggaaaagatgggccagaaggggaagaaacggcccaaccgaaggtaagcttctctctttctttatttttttattctttttcctcaaaattccaaattttaaaggttcaaactaaatttttaattcctgttttgcactttcaactttcccaaagtgccaaaatt

SEQ ID NO: 130345 - DNA, 706 bp, Zea Mays
gccttgtataaaattacaaatatatccctaagaccagtacatatgatttacaaatgatgcgagggcaaagttgacttctgcctatttcatcttggatacggaatcgtgggcaccttctcccggctctgtccaccttcgtttccatatgttgttgtgacgaagctaacatctttatccttatcttgttctgaaggtactcaatgtcgaagctcctgcaatacttaaaaacatgctagtaaccaatagttatgtgtttttgaggaccttcgaaagatgaaggccccaacagaaggccataggtccctagtcttggtgtaggacagcacctaatccaaagcccgacgcgtcgcagtccaccacaaaggaacactcaaaatctagaagctacaatacgggcgctgatgagagggcctgattgagtgtttgaaatgctaagtctgcgtctagggaccacttgaggccttctttcttgaggagcttggttaatggagcagcgattaatctaaaatccttgataaatttccaggagtagcctgctaaccaaaaaatccccgcatacctcgtggtgattttggaattggccatgatgttactgcctcaaccttgttgttgtccatggtcacccccttggctgatattatgtttcctaaataaacaacagatgtagccctgaagtcacattttgactgtttgacaaagagcttgt

SEQ ID NO: 130346 - DNA, 765 bp, Zea Mays
ctctgtttcaacttcagtttgcgccttcgaggcttcgacaattttctttgaaggagtcgagttcaaagtctttactgtttctagcacatctagtacatttgccatccttctcctcttaggagttgcggtagaactttttttttgccttcggcactattacttctgacgaagggcttaaaatttctaacatttttgttccctcaatttttggctcttcggtcttatttttatcagtctttgactcagctagctcggctgagggtaccttcgacattatagccggctcttcaaccttctgcgtaggaggaatgggctcttttggttcagcaactgaagaagtctccccgccaaactcaggcaccacagccggttcaatatagcgtggccggtgggtaaggaccttcatctttttgcttgtagccttcggcataggttcgaccgaggcggccacagcagtagctttccttttcttcccttgcccccgcagcaggtaacggtagtcgggatagacgaagccaatagcgtcaaatactctgttcaatctcttttttcctcgacctccgaaggctgtggacaatgcattatcttctgccttggaatatgatccaagcagttcatcacttgtcacttcgatgcattttaaccagtcatcgtttggttcgtcaaatttatccccatatctgaagatgtacttcagccggaccagctcaccttcactagattcggcgacagtttccttcggcatgtcccagttctctacaagcg

SEQ ID NO: 130347 - DNA, 2368 bp, Zea Mays
gtccactctttactttactatgtacacatctggttcaacaggcctactacaaagagagcatttatacattattcttaagaagaggcaacgatgaatccatccatcaaaaaaaggtatggtactggtaccttctaaaccgaattaatcagaaacaccaacaactacaaacagcagccaccgtgaaacatttttggctcgccctattacctgcacatctgcattccttgcttttacacaactcttttgacgacgcacttcacattctgcacaccctgtgccctctccagatatctcagctgcacgtgttgcctgtcagcctaggaaaaaaaaaataatcgaaactgctagtgtaaagtcagtttgctagctctcgctcttcgcttcggggtgatgatctctgctacgcggaggaaggttcatctccatccacgctccagccgctgaagctgtcggtacggtatgtttctaagactgaacaatttcaatggaacccagaaaaatccatatcatctactcctctgaacccttttgcagaggcacccagggatcgggtttgagtagaagtattcctcctgccttgggcttgccccacgcaatctctcgtacggacctccgagtctattctcatgttgcttcctcaccacagtctggaactcagtccaggacatagaaccttcatccagcttgtcaataagctccacaaacttcagcctacagacaaaagaaaaaaatgtttcgtcaggctctagaaccaagatctgacgtcgtctctgaagcgtctaaatttcgcgagattgtggtgtggggatcgtactatcttcacgccaccaaaaaaaaactgcattccaaactatttctgggaaagaaagaaaacaaaaaaagaaaaggccggacctgtcagggttgatggtttttctgaacccttcaaatcgcctgtgcccttgcacggcccttgccatgttgccgtcgtacgtgtacacgaacacgtcgctctgcagggccacgatgtagtccacggcggcgagcctgttctggtacagctccagcggctccagctcgtccaccgtggcgaggctgtagtgcgtgtagatgttggggtactcggcccggagcgcgtccaggctgtgcgccccgtagatctcgccggcgacgatgtagatcttggtggccgaggggtaccccatggccttgaggaacacggccgcctcgcggggcgtcatggggcacccgccctgtagccgcctctcctcgctgttgatgtccttctccttccagtgccgcaccttgaaccgcatgtccgtcagctccgccgcctcatccagcgtcaggttgtggttgcacccggtgaaggccagcatgtccttctcgtatctgacgacgatcaaggcaaaccaatgcaagttcatccattgattgatctgcagataatagccggccaccgaacgctgtgaactctcagctacctcaggtgaagcgcgatgtaatgctgggactcgtttctcagccgatcaaccagcgtgttgccgagctcttcgatctccttcctgtactggagcgcctcgtagttcgcgcggcaccgaagcttttgcagcgaaggagcgaggccgttgttcacgatccgtgaatccgtgtgtgtaaacctcaccactttgaacttcctcaggattttcgcaaagtctctgtagaaggaagcctggaaaacggagctggcgatgcatcagcctattcagtacgtattcggttatcctctaagctgctgcaactgcaatgcaatccagtagagcaaacaagttgttgactcgtaccctggaccaggaggtgggcgctctcacgtacggtttcacccttctgtaatgtggtgggagggaatccacgatcacaatgtcttccttcaacgactccttgaagtgatcgacgtcgaatatatctttgaaatcgctacataccaaaaaaaaacactagtcgtcagtctgctcgcagtttcttcttcaggctggttcagcacagctagatatagagtcactgaccttgggtcagtccagaatgactgatgatccagagtagggatcaccagcgatgcgttcatgatcttcgccactgcaaccatatcacttatctgtaagaatagttgccaaggaattaatgacagttagctgaaagacgttgccacgacactagcacaagtgtatacgtactcccattctcatctggtttaggccaccgtttgcatcaacgaccaggtaaccgacagatgcattgtttttccctgaagcaagcgtgtcctgattaagaaaatgcagctgaatctgaacatgaaaggaagcaaatcaaacgatgagcgggggtaaattactgcggtgattcttcg

SEQ ID NO: 130348 - DNA, 710 bp, Zea Mays
accacaaagctttgagtttcttggatgatcaggtattgcaatcagatttgcaaaagaaggcaatgacgaattgatggggttgcaatgcaaaattatctataaaaaggggaaagaaaatgtggttgcagatgcattgtctagagtgggacatatgatggctttgcaaactttggatgaggtggagcctttgtaggtgtaagaagtgattaattcttatgtcactgatgaggaggcacaagagttgttggctcaactagttttgcatagtcctaatgaacatggcttttctgtacaccagggagttatcagaaaaggctctcaaatttggatagcacaaaactctgctcttagaactaaaatcatttatgctctacatgatagtgtgattggaggacattctaggagtatggcaacctatcatagagtgaagaagttgttctggtggaagagtttaaagaatgatgtggttgtgtttgtccaacaatgtgaagtatgtcaacatgctaaagcagaaagagtggtttctccagggttattgtagccttcgtcagtttctcaaggtgcctggcaagacttaaccatggattttgtagagggtcttcccaaatcagaaggttacaacactattttggtggtggtggataggtattccaagtatgcccacttctttcctttgagacgcccattttcagatgctactgtggcccaat

SEQ ID NO: 130349 - DNA, 641 bp, Zea Mays
tttaattcattggtagattcactaaaattctgaaatgatttaattaaggtttgcttctaccagtcgaagttgtgaaagttgtcatttttactaaagcagcaatttatataattgttaaacttctctgcaaggcttaaagtagctggccttcctaaggttatgccttttcttcctcgttattctttgctttaatttattatgtatgtctaaagggtttttgtttttcagatttacatcggctgtttaaggatttgtttatctattggtcaaatttcttagttgttcgatttataatcaaaagcctaaaatgatgggccaaccttgtgtcttgtaatgttttggacttttctattaggtttgtcttttgtatcaggtgtgttgtgtatgctatcaatcttgtttttttgtgaacccattttgtttaggcttgagatttatctcatctctcacacctttccttttgttattccacaaagacagaggaggggaccaagggactaagggtggcatgtggaaactgaaacaggtagtgcaactactatagcaccatcgggcaagcatctctccagctgtccagtgactgctctgcttttattgtctgtcgacttctatagatttatttttgcattgacttgtcaaac

SEQ ID NO: 130350 - DNA, 324 bp, Zea Mays
aactgctttatgctctactgaagtccatcagacaattatctgagctgatgaggctacgcaccacctaatctctccgtacatccgctttgcattgcaattccaatagtaagtttaccttaatctttatttgtttgttgacgaacttccacaaatctccagaactctgtgtaacaagtggtattgttgtggtctacattaactctttgggctgtggcataggccacgctatatgctccaaataattttcttccaatttgtactagctttttcttctagcatttatttacttgatcacatggaatgtattatggtcacatgtttttg

SEQ ID NO: 130351 - DNA, 618 bp, Zea Mays
gctcgtcggagcggggaggcatcaccgtcgaccgccttctaccgtggacaggtatctccgcggcgtaattggtggtatgagctaccccatcgcattcaccattctctggggatcgtgtagatgcacaccatttagccataggagccatggtgccgcaaactgatgttcgccggtgggtgcgccaccgccgagctcgccgctgttgctcggctcgatcccggggaggtaggacaggtctcggctgttggatagcctaggtgcggccgtgatctgtgctgtaaataacccttcgaccgagggaatcctagccgtagatcgctgatcggtcggatgcgatggaatcctgtcgcattaaaatctgggtcgtagatctttcatccgaaggcgcgcgctgcgtactgcttcattttaacctagaactaatctggcgcgtccctcgctgatcggacggccagattctcgtgataccgcttcggccgcgtatcttacaaatgagcccctgagatttcttagaataaacccgccgtcctggcggctgagatctgagtcttaggaagaactgcaccgagacccctggccttttatgaatttgaggcccagtccagagatcgtttaaat

SEQ ID NO: 130352 - DNA, 359 bp, Zea Mays
tccgttggtagggcatagtggtcaccttgaattaagtaagcatgagcatgtcataccgccttaagtcattgtcgacttaagccgattgctccgttggtagggcatagtggtcaccctgaattaagtaagcatgagcatgtcacaccgccttaagtcattgccgacttaagccgattgctccgttggtagggcatagtggtcaccctgaattaagtaagcatgagcatgtcacaccgccttaagtcattgtcgacttaagacgattgctccgttcgtagggtatagtggtcaccctaggttaagtaagcgtgagcatgtcaccgccttaagtcattgccaacttaagtcgattgctccat

SEQ ID NO: 130353 - DNA, 314 bp, Zea Mays
ctataaacatgttttaatccaaaactagtgccctagaccgattcgaccatacacacctacctaacctacctattggagttcctaattcacctaccccaaacctaagagcaacgttaaccgtgtttgacctactcatcccatgtacctcagctatcttaaatttatcgaatggcaacaccaagacctaagaagaaatagatcaacctcgataaggaaagttatgagtcgaacccgatcttcagatgaatcaagatccaccgtccgagatgtagtctttccttgccccaacccttcgtaccacaacttatccttac

SEQ ID NO: 130354 - DNA, 550 bp, Zea Mays
cagcaactggccgattcatcaacttgatgtcaagaatgcttttcttcacgtgactctttctgagactgtttattgcagccaaccctcaggttttgaggattcagccagcccacaacatgtttgcagactcaataagtccctctacggactgaaacaagcaccacgtgcctggcatagtcggtttgccactcatctactctccctgggattcatcgaggccaagagtgacacatctctgtttgtctaccatagaggaactgacacaacttatttgttactctatgtcgacgacattatactcacatcatcctctactgttctcctccgacacatcattcaggccttacagttggagtttgctatgaaagatttgggtgatctacatcactttctggggatgcaagttcaacgacgagatggaggactctttcttttgcaacgtcaatatatgctggatattttggatcgggctggtatggcagattgcaagccctgttctatacctgtcgacacaaacccaaaggtttctgcagctactggtactcctgtt

SEQ ID NO: 130355 - DNA, 438 bp, Zea Mays
caggtggcagtaatgcttcaatctggtctcattcagccgagcacaagttccttttcatcatctgtgttgttagttaaaaagaaggacagttcatggcgtttttgtgtggactttcgccatctcaatgctatcaccaagaagtcaatctttctggttcccatgattgaagaattattggatgaattgggtaatgcttcgtggttcaccagcctcgatcttactgctggttatcatcagattcggctgcttccatccgacacgcacaagacggccttccagacccattccggccaatatgaattccgtgtcatggcttttggactaacaggtgcaccagcaacatttcaacgggcaatgaatgtgaccttggctcccttgctgcgccgttgtgtactagtctttttcgatgacattctgatttacagtgagaattggaat

SEQ ID NO: 130356 - DNA, 551 bp, Zea Mays
actcctattcctttttttgtacccatgaatggagtcaattggcggctaaatttgcctttccttttctatcgccggggtgacactcacctcatgtgtatcccgaccaccaaatgtgaagcaatgtctctcaaagtagggcagcagtttagtgttcatgcttcctgaactgttcccatctttactccctattggccctggctctattggtaaggttgtctccagcagcttacccatcctatctcccattccatcccatattttaaacttcactaaacaatgttttatgcgaccatatgcataatttgctagagacaacctaaggacacaaaggagatctgctttgacctacacagcggccaacctctttctgtaatgatgtgctgatattgaaccaattcctgtttatatttccagaggttatgttgtgaaatggcctgagcttgcattgaactatgcttttaacattcatcactaggtcaaacctatcatcaggatttagctttgtaggttgggggaaagattttcactttttttagtataaacgggcctca

SEQ ID NO: 130357 - DNA, 518 bp, Zea Mays
caaaacaaccttcttggttgcgagctgaatcttccttcaaagcttctacctcctctgcctcttggggttggtggcctgaaggaactttgttgtgttcttgatgattgagagttgtgttgatgcccttgagtatgacttcccctctcttcacttgagctaggattatggatcgtcctgacatgccttggggtggagtcttcctacaaagccattggtcatttcagagtatttgtaggcttcttcccttttttgccggaagttgttgttggctctaatgtacttgtccatcttctatagaagcttctccagagattgtgggggcttcctagcgaaatactgcaccattggtcctggtcgtagccccttgatcatagcttcaataacaatctcatttggtaccattagcgcctaagatctgagacgcagaaatcttcagacatacacctgcaagtattcctcatgatcctgtgtgcattggaatagagcttgagcactcactggcttcgtttggaaaccct

SEQ ID NO: 130358 - DNA, 626 bp, Zea Mays
ctaagttccaattcaatcagctcatgaacatcaataatagaattaaaaagagaactccacttattagtccccccaggtttgttcttgtctgaatctcttctgagaatgttaaaatcaccaccaatcaacattggatgagaacacttcgaacagaaagaggataactcactcaagaatttctgtttttgctcattttgagcagccccgtaaacattaataaagttccaaataaatcctgattctttttgaatcaccagagtctgaatcataaattcacccaactctttttctctaacatcaaacatgtccgaatcaaatcctaccagcaaacctcccgacctaccattagggggagaccaaacccaaacgaagttcctattaccactaatgaaattcaaccacgaatcttcaaaatctttcttgttggtttcttgtaaaccaataaagttaatcttctctttcatgataatatcacgtaggaattcacttttcacttctttaccaaggccctgacagttccaaatcacaccaatcattctgaacaaatcagggcatgaccaccagtctggcctctcctcttaatagggatgttcctattattgggagatttaccagctttatttttt

SEQ ID NO: 130359 - DNA, 412 bp, Zea Mays
cacttgtctaggcagatttgttgtacccataagactatccacagcatcggttttctatcaagctgaaaaaagggagagagcgttcaagtattgaatcatcccattgtggtcaccgatgtttaatcataaaaagcatgagttgagtagttttcttgctttgatgctgagcaaataaacaactatttcacagccagcgtttgttcctaccaccagggatggttctgatgatttggtccaagcatcaatgcagaacactgttctgatgatcgctgatggttcttggcatcggcatgagcgggcgtgcggagaaaattttgaggaccaataacatggctagtcttagtgtcgatattggctcctcctttgatgctaaagtttaggctcaggagtctagaagctgccaaaatgtgta

SEQ ID NO: 130360 - DNA, 596 bp, Zea Mays
ggccgagaggagaacaactcaggagaagccagcgagtgctgcggcccaacaagcgcttcactggtgaggaatggcgacggtgagggtaggcccatggggcagtgcgagacgtaacctgtaaataatcctggtagttgtgcggggagagacagaggatatacgaactcggaaccggctgtgtccggaggctggcggctggcggcgcgccgtgtaaagaacctatagctaccttcaattctgagagcttcgagagaggcgacgggtgcggggagcggcgcccaactcctccccatatcagttgtcttacagtagccagggggttcgccggaggactaggatcggcggggggcgaggctggccgactacgccagaccgccgtgcgggcaccatggccgcccggccaaccgagaacagaggggagggagggaggagagggagatgactcacctgaaaaccgccgtgtgcagggacgtctgcttccgcgcgatctggatctggagagggaggcgagaagttatgcgacagtggggtgggtatataaaagagaacgcaggaggtggttgccaatttcgtcatcaattgtgtcacgaccgagc

SEQ ID NO: 130361 - DNA, 1020 bp, Zea Mays
gggagcccgaggagcgctgtggcgggagcggtggtggcagtggcggagaggcgaagctcctcgagaattagatcgttcttggtctccgcaaaggtgggaaaaggcttcatgcgggtgaggatgggcgtcacacgatcgaagcgagggctcaagccgcggaggacgttgagcacgaggcactcgtcggtgatgggggccccgagggtgcgaagagtgtctgtcatcgtcttcatctaacgacagtactcgtccacagagagatcgccctgagcaagctgacgaaaggcggtctcgaggtacagaatccgagtctggcggtggccaaggaactgagcctcaagggcaccccagatccggtgagcagtgtcgtccggtacgcgaacgatgtcctgacgttcgaccgtgagggtgccatgaatccaggagagcaccacctcgttcatcagaagtcgatcctctgacgggtcagagaccgctgagaggacgtggtcggcgagggcgtaccggcggagggtctgcaagacctgatcgcgccactgggggtactgagtggagtccggcgcaaggacgtctgtgacggttgcccggatgctggtgagagtcgtcgcctgagcatgaagagaagcgcgaagggttgaggctggggcggtcgcgggctcgaaggtgtcggcgctgtggcgagcggatgtgggggagccatccgacacgcccttgccagcgagacggcggtaggtctcggcgtactggcgctcaatagcgtcgacaaccgcctgctcctgctcaagagcacgagcggcgtcctgggcccgctggtgagcagtcgtaacggtcgtccgggtggcagcgagaatggtagcagcatcgtccgaaggagcacgcagggaggaggtgatcacggacggatgactgtagacagtagccgacagggggcagccacgcacgggggcccaccggtcgtgtcgagaagaatatgtggaaagcccggcgctagcagctgggagcgaagcagagctgcgtccg

SEQ ID NO: 130362 - DNA, 633 bp, Zea Mays
cagacaatagcaaacagaaaatgaatcctccaaatcttccaccggcaaggaccgatccagtggttgccgctcaaatgcagatactacaacaaatgaccaacatgatgcatgaaatgcaaaatcagatgaggcaacaatgccaggaaatgcatcaggaatgactggaaatgcgtcaagaaatgaggcaagaacggttggaacggcaacaacaaccacctccaccaccaccagatccaccaagggataagcaccggaagtttatgagtcacaaaccaccgacattctctaactccccagacccactacaagctgatgactggttaaagtctctagacaagatgctcaacatagctcagtgctcggacagagagaaggtgctaaatgcatcgggttgccataccggccccgccgcagattggtgggatgcatactgtgctgccaatgctgctgtaaacacaatcacctgggcagaattctccactcaattcaggaattaccatattccagctggactcaagaagataaaaaggaaggagtttctatccctcaagcagggaagcatgtccgtgagcgaatatagggacagatttattcagctatcacgttatgctcctagggatgttgaggatgatg

SEQ ID NO: 130363 - DNA, 412 bp, Zea Mays
gcagaagagttatgtgtcattttattgatggttcatgcccataaattcttagataatttattccatccttccataaattcagccagttgcaagattttaaatagactgccaaaccgtggagcaattgggggcacataaatactattgacatccaatccaggcttttagcaggcctaaccacaactagaagaatttatagagcagttgttcgcatatttgttgttcatgaccaggcacaaccttatttgtgtcaaattgcattctagaattttactttaaattgcatcctagaatttgcaagagttaagcgaaaagaacaaattgcaggctagaattttactttaaatagataaatcaaatttgcagactataactttgttgttctataatttgacatccaatctagactatt

SEQ ID NO: 130364 - DNA, 360 bp, Zea Mays
tctgaagtgagggtaagggtttcaatagcatttctttttggcaggaggacaagaaaaccccaattgatcctggataggtaagtagcgtcactgtggaaagcatgtaagagtttcatgacgtctggtttcactaagggctagaaggcagcatagaagctagggttgaagccgtcaaccttggtcgtggttgtaggcttcatagacttgacaacggtgagggctttagcctcacagaattgcaagaaagtgcaacagcatttgcatgggatgtgtcccagtacagactacagagcctcgacacaaaggcaaagaaggaggtctgggggtgcccatgacatattagaagtaagaggtggccat

SEQ ID NO: 130365 - DNA, 310 bp, Zea Mays
ctgcaaccatatctgacacaagcctatcaaattctgacattgtggatgctagttcttcagcttcatcttcgccagcatcttcgacatctgtaggaattgccgcttttgttgccgaagctaaaggcagagtttgttcaattgcttgcattacattcacaattcgtcgtttcttttatccttcagccatctcttctgtagccgagggcgtttccttcctctataaaagttttgtcagttccaatcctagagggcttagcagcttgaatggcggagaatcagtcattacctttaaaatttcaaccacttcggc

SEQ ID NO: 130366 - DNA, 393 bp, Zea Mays
tggatttcaggttcacccggctcagcttctactcctccatggttggcttgcccccggttgacagataggggctgactctttcctgctgaggcctgtccttgcttcattggagccggtgtagtgtaggcagccctattgggacagtagttggcatagtgtcccgattgtccacacttgaagcatgccctactggtggatgggttaggagcaatgggtcctgctggggtacttgcttgaggaggagcagttggtgcctgttgagtttgctgcccggaactgccacgagctggtgtactttgagtgattgtataacgaggacgggaactacttctagcctgtctctggttggcagcccttcttttctctccaaactcacacctcttgttttccaca

SEQ ID NO: 130367 - DNA, 328 bp, Zea Mays
ggttatgatggagcaagcaacatgagaggtgagttcaatgtcttgagagctttggttttgagagagagtaagtcagcatattatattcactgttttgctcaccaactccaattagtgatagtggctgtggctaaaaagaatgatgacattagtgacttctttgacatgatatctcttcttcttaatgtggctggagcttcatgcaaacgaaaggacatgattcgagaaagtcaacaagagagtaaaaaatgcaataggcactggacaaatttgtagcggtacaggattgaaccaagaacaatcacttcaaagacctggagacactcgg

SEQ ID NO: 130368 - DNA, 401 bp, Zea Mays
tgcgtttgcgttggacttgggtagctgcgcgccgcgccggccggggaacgggggagcttagcttttgcttggccgtcgccaacactcaactacctcgaactggacggttgcttggctgtattcctgcactgcacttgctctgtcctgttgccgtggttccgtctttgacgaacaagtgtgcagctctgtggttcagttcggatggcagagacgatggaacaacaacacatccatcgatgcagcatgacgcatggaactgatcgatgactgatgtgatcatggcagccctactggcaggggtgtgtgtgtgtgtgttaacgacgacgcacgctcctacaaatctactacgctagatctctaggtgacgggagcaagtaaggggtggcccggagaaataaatg

SEQ ID NO: 130369 - DNA, 606 bp, Zea Mays
tcgtagccttccagcggaatggcatagcagttggcagtgaaggtctctgtgccgatgaggagagagagtcccgggtgaatccctgacatcccaccgcgtctctgttggccactctgatgttgattgctgggatggtggcgaggtgcaagataagtcgagcggcaaggatctggtggatgaaattatgtgtggaactcatgtccagtagtgcgatgagctgatggtgattgatgtcatcatttgcatggtgtcttatgtgcggatgcctgctagcgcgtgcagagatacgacaagagggttagatgtgtcctcccgcgcggcctcctcgtcctcgtgctccggttaatcctccacctccatgtagaagagacattggcaatgatggccatgtacatactgttcatcatagttgtagcatatgccctacatgcgacgctcggttaattcggttggagtgaggtgccgtgtcatggggcggcagcctagatcatggaggccatagagataggctcagggttaggattagtggataaagattagataagattgagttagttacttgggattagattagataagattgatttagttacttgggggccaagt

SEQ ID NO: 130370 - DNA, 658 bp, Zea Mays
gcgttgccacgagagttaaaaattaatataaaacatagatagagaataacaacatcactatgatatgcaaggaacagaatactaatagtacgatgatgttgtcagcttaaaaacatagaagctagtttcatcaccgataagatcattgtggtccagtgttcttaagtcggtaaggcgagcaagtaaacatgaccaccatcttaatgcctaggcgggcaaggtgcctagaattatccaagcgcttggaggcctacaagacgccttaaaaacactgttgtggtcccagacaatgaaatgtggttgccttaaaaactgagagcattgacgaagggagctcacctccatcaaattgcagcgtggcgtcacaaatgtgcctaaaattcttgcatgaacaagaataaagatcaagttagtcctttttttactgaggacacagttaaagtcctagcagtacagtagacttgttttctgcatgaacaaagctaaagatcaatttcgtcgcccacgataataactcgagtttccctcactgctgctttcacttgattcactctgaaatatagcagtaacaataatctgctaagcaatgtctgctgctcattatgatttgcatgaatcgagtataagaagaaaggttaatctaatcactacaaaaaaa

SEQ ID NO: 130371 - DNA, 648 bp, Zea Mays
gatcaacgaaaagttgattccataatcataggtcatgcatgcatcatgtttaaaccatgtaaaataaatcttcccccattatggaggtatcgcacgtaccaaaactacccagcaaaaggtgaccagacctcgaggtgtaccccgacactagttggctcctcgacatgaggggagcagtagcggaagtaatgatcccataggggatctagaggtcagagttgaaggaatcacgtcggaactgcgccatggaaacatggaatgtgcgcgagatagctgttgtattggtgagctatcggtggaggttaattgcttgcagcaggagatcgtggaacgagacaggctatagactgggccgtaaattcgcgctctatagcttgggattgcgaggcgactacccgagcccgggtagtggagctaagtgtagccctggagaatatgcaagcatactataacactttgcatgaggaagtgcacgtgctatacgaccagctgcacccgaacgtgccaccagaggttgcaggaatgggggctaggacatctagagcagctggcggagaaccttatggggagttggatctttttggagcccctccttccatgaacctcgcagatgatcgttctcccgaagctggcaatggagcgggagca

SEQ ID NO: 130372 - DNA, 527 bp, Zea Mays
ggactcctctattttggaccagactagaggaagacagtactttggacctgaacttattcaagaggcagaaggacaagtccgtataattcaggagaatttgagggtagctcagatcaggcaaaagagctacgcagataatagaagaagaccactggaatttgaggaaggtgatcatgtgtacctcaagatgtcaccacttcgtggaatgaggatattcaaagttaagggcaaattgtcccctcgctatattggaccaccctgagtttttaggcaagttggagagatggcctatcaactcgagctacctgataatctaactgatgtgcataatgtattccatgtgtctcaacttaagaagtgtctccgtgtccttgagaaacagttaccaatggaagagcttagtgttcagggtgatttgacttacacggagtatacgatcgagattcttgatactttgactagagttacaagaaataaggtgataaagatgtgcaaggtgcaatagagtcaccatggagaggatgaag

SEQ ID NO: 130373 - DNA, 950 bp, Zea Mays
actatcttctgatctgatctaatggaaactattgccaatattattgttcttgctgtgaaccaatagtattgttcttcccctaacttaattcgtgtgcctctaaaacagattggtatggcaagtggactggaaactctatgcggtcaagcctatggagcaaaacagtatgataaactggggatgcacacctacagagctatagtcacactcattgctgtgagcattccaatctcacttctgtggggcattcatagggcaaactcctgatcctcataggtcaggaccccttgatctcaagggaagctgggagatacatagtctggttgattccaggtctctatgcatatgccatcagccagcctctcacaaaatttctacagtctcagagcctgataattcctatgctttggtcctccattgcaactctgctcttgcacattcctctttgttggttactagtgttcaagaccagtatggggtacattggagcttctttggcaataagcttgtcgtattggttaaacgtgatgatgcttgccgcttacatcagatactcggattcttgtaaggagacccgctcacctccaaccgttgaggccttcaaaggagtcagtgtgtttctacgcctggctctgccgtctgcactgatgttgtggtaattatagtgatgttattaagcatatttctcttcttccgtgtaagattccatgttgggttaatgaattgttttctacaattttatagtttcgaatggtggtcttttgagatccttattcttgtctcaggaattttaccaaatccagagctgcaaacttcagttctttcaatctggtaaggtctttcacatctgcagtgacgtgcagttgttgtacattgcttttttatctaaaaacatttgtgttctcttcatcagtttgacgactatcacattaatgtatactataccttat

SEQ ID NO: 130374 - DNA, 347 bp, Zea Mays
gagatttatgaccatggactttatgtgcccatgagagagttcggattatttcggacacgatgattcatacaatcatcgtttgagctatatgtattttgtcattatttatcatgcatgactgacgtaagccagacgtattcatgatggatgcacatgtatttaggcttgaacgtgcaaagtcttttgcaggtcggacatgcaagtgctagctagattagacttgtgtgcaagacgctaacagactagcgacactcatggcggatactcatggactaaatatagaacatgcagatttctatttatacttaatagctaagcaaaatagcatttaacatggaacttgcttt

SEQ ID NO: 130375 - DNA, 346 bp, Zea Mays
tgacattacaggaaatgaagaaccaccttgtgaggccataaagaagtttgcaataggtgaagtgagacctcaagaaaaggatgatgaggaaggaaccttgtggatgaccaatgaggtttttgatgtgggcgtaaaggtggtgggtgataaatcctccacccaggcaaacccatcaacctcaagtcatccaaggcttgaagaaggtcatcaaccccaaaggatgccaaccgtggtagaagatgaacatgaaagtgttgatggtgaagtgcctcttgatcaagtggatgatgaggaggagcaaattcaaagacaaccatcagtgccttatcctcgagtccaccatacc

SEQ ID NO: 130376 - DNA, 631 bp, Zea Mays
aagtgcctttcggaccccctggcaagggaggtccagggctaccacgtctacttgcgctcccaggtactactccctacacgggcagagaaacggtgtcgctaggtggcctatggtgcatgacgaaagccggcatgtgtagcctgacttaagcttctagcatgggctccgctcgcattaaatgcaggtaggatgcacacttgtccacgcccgtgataggtggcttgcacccctcatttaatagaggcaatgtgcagttcgtaaggcatgggatgcaccagtaacccacgcgttaccgacgcaagaccattgactctcaacgccacgcatgggcagccctcatcatgactcctactccagtgataggtggatgtgacaagacaacactatttgtatgtcccctacgcatgtcggcgagctagtctacgccgcaacctacactagagcgttcgcctgcacgccgattagacatggcaaaggtgtgactggatgaagaatttgcactacgaccaagtgaagatatcttcacaccataggagaagaccttggttggtaggattaattactccacacattttttgctatactaattgggcccacctatcggggttcctcagtgcccatgtatgtgccc

SEQ ID NO: 130377 - DNA, 1225 bp, Zea Mays
tccatatgtggtagtcatgactcttcttccctaagactcgcatagtagataagttcacccccaactcaggttagccgcatacccatcagggaacattaatgtcttgatccatactagtacttccctcctttgtgccttgctcaggacgaaatcggccttagtccttctccatgtctttccactactatacggcttcatctcttagtttggtctatcacataacactgccagatccactcttgcctttacattatcctttgacttatcaggaatgtccatgattgttgcccaaagtgcctcggcgacattcttttcagtgtgcatcatgtcaatattgtgtggaaggagaaggtcatcataataggggagccgagtcaagcccgacttgtgggtccacatatgttgctcaccatatctcataaaaccaccttctggattgaccacgagaccatctatctgttgacgaacttcaacatcagtcatcattgtaggtgggtggtctgtcactatgacatctttcgtaaagttcttgatgtctagtctgaatgcatggttaagaggaaggaactgtcgatgtttgtcgaatgatgaatacttgccacccttctgtaaccaaaggaacctcaaaccttccttgcatattgggcatgggaacttcccatgaacacaccaggcagagaatagcccatacgctgggaagtcatgcatggagtactggtaccaaacatgcattttgaagtttttctttgtagctcgatcgtatgtccacaccccttcctcccaagcacgtaccaattcatcaatcacaggctccatatacacacccattttattccccgggtgtccaggaattatcaacgacaagaacatgttttgtcgttgaaagcatacgccggggggggggagattgagggggataacgaacacaggccaacatgtgtatgggacaaccattagtccataaggattgaacccatctgtggcaagcgcaacacgtacattacgagcctcttcggctttcacatggtgaacggaatcaaagtgggtccatgcttcaccatcggatgcatgtatcatcttgtcgggattgtatcgtttgccatttttgtgccatgtcatctgtttcgcggattcctcggtcatgtatagccgctggatcctaggtatgaacggaaggtgccgtaggattttcatggggatgtcaagctgcctcttctggccatca

SEQ ID NO: 130378 - DNA, 538 bp, Zea Mays
atctgtgaaagttgttagaaagtggagtcttcgctctttgattgagggcatgttcgggcttcgcccaacagtagcccccctccccgagggagtggttcatcctgatgggccattcccgaagtcttaagttagaggcggacgaacgttgccctcgaccatccggtgaaccgccttgagggcgttgcttgatgtgacagatggaaaaccgaggcagcactgtttgcttagcgcccctctagtctcagttatatagatatattgcagatagagtaataccccagtggtgaaggcggcagggtccctttcaccaggtcacgggttcaaaacctagtcttgcaaaataatccatcgttgttcctcattcactctcgggttacgactcggctgtgtgctaccctcagacctgggtgggcttttgcagagtgggcagcttgaatcggcacagggttcgggggtttctcggtcgggacgttaccgctgccttttattaatataataccacgagggtggtcttaccctctccgcctaagttatatag

SEQ ID NO: 130379 - DNA, 497 bp, Zea Mays
cgtcggagttcgaaacacatggccctgctacccctcgccgtgacttggccttacagcgccaccctctctagtaagaccccctccctctagttcgtcgtacctcgagtattcttctgcgtcattcagatttgaatttggaaccctagaacaccgtgtcatgcctctccggcgagggcgccgccgtgctctgcagtcgcagggtaggtgatttggtggcaatcgtcgatcgagcgatggatggttgagattagagcacttcataccggttcaaagattagaccggtgctgttagatcaggatcgggcagccccaggacgatctcggctattttaaatctataccgtatagattagatcggtcagcttcggtccatcccacctaattggctgggctgcttttctaaaagaatccctaaagttttgcataataaaccctccatccgatctagtagaaaggaaaataaatttaggacctgaattttatacagtagaccctgg

SEQ ID NO: 130380 - DNA, 907 bp, Zea Mays
ggtcaccaagaggatggggaggaaaggtggtggagccctgaatggcgatgcttgtggtggagacggtgggttagaaagaggatgaggaacaatgtataaagtttgaggaggcgatgatgggtgtacaataggaactacaatttgaggaggcggagacggttgggaatgcaacgacgacggcggtggtggatcaaccaattcgacatcccttcaaggccaaaggatgaaattcttgatggcttgtccaagtgtctcaataccttcggacctagggatgtctagcatgttgtctaaactcgctatttgtggagacagattatttcgcgttggtgcgacagagttcgcactcgccatttgctacatcaattttggaggaggattcaataacatttgagacattaggtctctaaactctttcttagcctcctccttaaaataatctgtcatctcctccttgtatcgatcacatttcttgtatagaccggtctgaatccttccttctatccttccttagacgagattcctcgtacaaaaccaggatgctcagggttgctgagaccagccattaagatgtctctctccctttgtggcttaaatgttccgcagctctacttagctgtcattgcatatatgtttattgccgcttcttcgacaattggatcatcaaaagatacaccagactcaatttcccttagttttctagcacgtatccaattagccgtcctttcaccaagttgctcggacagcgtcggcaaccccgcgaccttcttctcggcgtcttcttgtctccatttaggaatctaacgcttgtaaccacctatgcctaggtagtggtggtatttgttcttcttagatagttccgaatttgcctcacttagagatatgaaatctgggctgctcctctgct

SEQ ID NO: 130381 - DNA, 747 bp, Zea Mays
ggtgacgggaagagtggacccgtttccaacgacgatcgaggtagggtgtatggaaggaggtgggtgggagtgagatagcatggctggagtgggagtgggagtgctgttatccaactctatgtaagctagagatgttcatatatgataatatgaacaaaaaaaggaacaaagcagctgcagtccagcaaactccaaacaacttggcctcctgccctttctaactgttatgttcaatatgactgtagaatcttctgagcctatattccagtgtatactgtatagcattcctgatttctcaaaaacatgacttttaagtccttataatatagaagtgtccatgaagactcactacagtgaaggtcacagactaaatattttgcacagctgacactacaaagctaagttgtgtctgaagtataaaggacagacctaggaaggaataaccgaggcaagccttatccctacattttgcaaaggctgcgtcgaacccaggtccttccccgacattcatgcttattaatatgttttcatatgatttatgatcctgactgacattctaaaatcatatggtaccaaggtactaaaaattgcagacttaagtacagtatattcaggctgtgtagcatatgtatgttgatgtcaaggatatctaaattccattcagggtaaatattattttaaagattgacaacaaaattacaatcagtattatttgtttgtcacgtgatctccgtgtgtaagtattag

SEQ ID NO: 130382 - DNA, 802 bp, Zea Mays
ggtgatctctgtctcgggcggggctctgggtgtgcgagtgcaaacggctaaggcctttggaggcatttataggcgagggcgaggtgcagaagcgtggggcagggcgaccaagcgcggggcgcgcgctgccatggccagtccgcgctcggccggcctgacacggcgtcgagcacgtggctctttgcttctacccgagttcaaacgctcataggttggagatcttcgcgtatttgggcatgatcactgcacaagatttgctctcccgacaaagctttgtcttttatgtgtggaagtcgagtggtttggggctgtgtacagagagttgtcgcatcgctaaggtggcagtgtcacaaggtcgagtttcgaggtaaatccatgtcaagatcgtgtcaaacagtggagagaggtttccaaactttgtcatggtgtgttccaggaaatttggcaccactttgctatttggacttgtttgatttaagttttgaaaaatagagaacgcggttgatctttgaaaaggggctgaaattcagatttctgaatttctgaatttttcccaagtgcattagtttaggggctgatttagggattttgaaaaattcaaatggccaaactttcttactatattttgttggttatttagtgtactaaaatttgttatttggtttttaccaaaatttgtatttttctcccaagtcttttcccaaatgccctttatgtgcttaaatggtccacttaagactaattagggtttgacagttcttcttaccttgaggttcatgacatgattaaggagaatttctta

SEQ ID NO: 130383 - DNA, 335 bp, Zea Mays
ttgagctaaatggcccggggtccatgttccttacacccctgagcttcccgcgcgggggaaatgatctcccattatgttggctacgaggcactcttgggcagggttacagctcgcctcactaggtggggatgagagcacgtcctcagaatgtctaggaatgaatcccgaacagggtccaatacccctatgaccttggttcgagggggtcttgatgagccttacaacccccactcctcctaagggggaccgagctggatgtcactgagacctacgacaatgttggataggtcagtcattgaagggaccggagcttctagggcccttattatttccac

SEQ ID NO: 130384 - DNA, 613 bp, Zea Mays
ccctcgccgtggacgtcgcggcccttgattctcgcaacagccatccctctacgcctacaaaacctggcctttgtggtcgtgctcgcactcaccaaagccaccgcgccaagtgctcgtcatcaacgatactgcggcgagaaaaattgaagtcgccgctaggagaaaacttcgccgccgccacggattcgcgtcagtggcgagattcaagccccatcggggtagctggagcttggacgagtcttatagtcattgggagaaagcacaatcggtggggatccatctggggtcctacgaattgctcgttggagggattgcgccaccgcgggctgcactgctccgtggcggtgactcgtctcggcctcatctcaggtgagaagctcccccatcatcgctgtgtctttagcatcgtgtagaactagcgaactagcgatttcgtggctgagttgcgattttggccactggtcggcgaactcgccggtgagtttgggcgtcgtcgtcgctgcttaggattgggtggagaagacagtccgtgggccgtgcgatccctatcgggtggatgcgattggtgaggaagtgagaagaatcagaatcgtccacctgggcttgggtggct

SEQ ID NO: 130385 - DNA, 395 bp, Zea Mays
gagattttactttttctgccatgtcttgccctgcggccatgccggtacctgaagtttgttgatcaactttatcttcaggggcgacagccttcgtctcaatgggcgctgaaggcccagcttcggcttcggcttggactttggcagcttcagcagttttcttagtaggaccagggctcaaggcctttgtagtctccataacagtgtctagcacgctggccatcctcctcctcttgggagttgcggcaggagcttttttgcatcttcggcaaatttgcctctgccggtgggctcaggatttctggcatttttattatttttccacctgtggctcttcggccttatcatccttagcttcgactgggctaactataggcaccttcggcactacaatcggc

SEQ ID NO: 130386 - DNA, 360 bp, Zea Mays
aggtaaagctagctaatcaagagagcaccaacacctagtccccagatcttcacccccgaattcgacccaggaaaccccgcagaaaagccaaaagattccgaccacgggatgactcccgcgtcctattcctgtcctaccagcgagcttctacgaaaatttaaccagaaggcaggcaggcagtccccagcagcacaacccacttcaagaaccaacaagtcgcccacgcccacacagaaaaggcagagagaatgccataaagatccaacctttccgaggcggaacggcggcggcggcggcggcagcagcaggcgcggggactcacggagccggcgccaaacccgaggcaaatcgaggcgcgga

SEQ ID NO: 130387 - DNA, 303 bp, Zea Mays
accagttttgccacaaagttcttcttctttctatatctggcatgcatatggaatagtttggtgttagcatcaccctctctgagccagttgattcttgatctagtacgtgcaatggtgcgcttaaatgaggcaagggctaaggaatgctttttcagtccacatctcagccaatcctccaaaggagacaaaagcctgaaatcttgggctacttcaagcctgtgaagaatctcccttgctaaagctaactgtgaggtcacatgcccaatcttttgtccactccatttctgcaaggatctagcagtg

SEQ ID NO: 130388 - DNA, 488 bp, Zea Mays
acttctcccctcaccggcgatctcccctcaccggcggcgatcctccggcgacctcgcctgtgctcctctcctctcggtgagcagcctcctcccctcctctgccttctctctctctctgtgtttctctagacagtgccacccccttgtatatcaaatccaaatcttgtgaattcctgtgaaatccagtgcaaccaagttgtgaaatgtgttcccctgtattccttgagtactcctgcaggttctcagctcctaagggagggtttcacaacctaaatcgaatcaatctcccaaaacctaattcaccgcacgccaagtgttcggtgaaatgcccaaaccagccaaaaatgctccaattgaacccaaaattttcaggcaccttcacaacacttccagtaacatacttgccaaatttcacgccaatccgagattccaggcttaaatttcaccaaattccccgtttcgagcgatcgtttccgagccgagtgccc

SEQ ID NO: 130389 - DNA, 382 bp, Zea Mays
gttagataaaaggtattatctgaaatactgcaaggccagactatagagcagtaagatgggactatcataggggcacagctgagggggtagcttttctttacaacttatcatgcatgggtgcagaccaacaggccgagtttacgtggtcggaccccaccgggctggcgtacacgtatgcgttacctagttacaaaagggaaacaaattcgacccctcagacttgctctatggatagaacttacagagatgttctggcaccggggggaggcactccttcagtcgtagctagatggttgcccctgggtcggcgcattcctgttaccttgaagggcccttcccagctgggggagagttgcggagcccttcttggtttggtactcac

SEQ ID NO: 130390 - DNA, 479 bp, Zea Mays
catggatctcctgttcatctgaagagtcggattctaccactgatgggttccttcgtcgcaccattctaagaaataagagatagaacctatgatgagcaaggatcaaccacgtttgagaagaagcgcataagagattgaatcatgcacttcaaccgttcatatgagcggttcaactacaaggaacaatatcaaatcgctaatctcaaacagtgtttgtgtcaaaatgaagatagtctaagtgttgcaatcacttaaaccaaaatgtacccaacgaatgatacataagataatcaagaacgcgtaggatcgagcacacaaggaaataacatagaataatacctcgatccgaagatgggggacaagatctcccaacgagaaggaggaagatggtggaaacacgccgggaagaacggatctccaaccacacttccaaacgggtgagagctcgagagagtttggagaggagagaggaaaaacag

SEQ ID NO: 130391 - DNA, 358 bp, Zea Mays
ggttttgcggccgtggtctcttcggtggctgcagcagtttcttcagcggccatgtttagcagcattttatctatatcagcagctatgctctctaaattaatatcttcgtagttggcatctttggctctggcttcttctgcggcaacctccgaaggtacagcttcggtagctgttgttccttcaatcgtcagcaccatcggagttggagctcttggtggtgttgtttcaatcacttctgtcacggtaacaatcctttgcctttttggcctagatgcctttgtctttgtaggctcctttttcatatgaaaaagcttcgtcagatgaagccccaatggacttagtttgacaggcaaagttt

SEQ ID NO: 130392 - DNA, 419 bp, Zea Mays
agataatgactttagtcaaagaagggaggaggtccaaaggtatgtagaaactgctaggggcatcgggaaaagtttccacctgaggtatgttcgaagaattcacaatccagctcaatgtgttgagaaaatagcccagtcctaggggtagtcaagcgagcaaaaatagtcaagtactcaacaacaatcctcccatagaaccttccacccaccagctccgagaggggaagaggaggccaaagctttggcggcaggttcaacacacaaccaagaaagttatactgtgtgttttgttgtgaagataaaaggccacacaacaaggatctaccggataaccatcgagaagcaaaaagagcttgctgttgtggtttctcagccatgtcagccaaaggaggtgtttagtacatcttcgtactactcac

SEQ ID NO: 130393 - DNA, 922 bp, Zea Mays
ccacaaggggaagcgtgtaaagaaatgcatgcattgaagtgagactgggtgcatggatgggcagagtgtgttgtggcatgtttggaggaggcgctgacgtgataagagtgctaaggtgggaagaatggatggcaagaaaattatgctaggaggtgggcaggggatggaggggaggggatgttgcttttggtatgaatatttttgggctggaatgtgtatgacctgccttaaccataagctgcgacacacctgtgccaaggtcttcctctcttatgtgtaaggcctcatatggatcttaaggtgcaatccatgtatttcatgaatgaaatccccaatctcttctcctgccatcctcatccgcacatggtcaaccaaccgtgcaccagcggcagaccttcccaacagccactgctcgtagcctgcatgagagtgctgccaatgcgatatccaccagtctgaaacccgatgctgttggagcccttgtcccgagactccaggtgttagatcgcatgagaggcactgcacgccgctgctggcatgagtacctgccaccccagctatttgtcggcactcaagctcccttcggtgttagagccggcacaagtcaatgctttcacttccccacccggacccctgcccacaaaggagcagctggagttggtgaagatgggcactggccggtccttcatgcaacaacacgtttccagttggggaaatgaacgatgagctggacggctctcccgtgtatcgttggttgctcctgcatggccttttggccacaggttggagcaccaaaattacaagccattgggcggtgtctgcgttatgcgtgacatgggacagtaggaggtgcagggatcagagatggaggcaatgacagcaagctgatttttttattccttgaggcctggcctcaatcttg

SEQ ID NO: 130394 - DNA, 614 bp, Zea Mays
agtcaggcgtcctccgatagacaagtgcttccctttccaactgccaagtctcttctcaaagcgctcttcgactttagcccagtctctatttttcagctttcggaagtggattggaataccaaggtaattgatggggaggttacccggtttacatccaaagagttctgtataaagttctaaattctcctaggcagccccaaaacaaaacacttcactcttatggaagttgatctttaggcctgaagcttgttcaaatgcaaatagaagaagcttcatattgcacgctttgtccggatcatgatccataaagagtatagtatcatctgcgtactagagaattgagagcccgccatcaacaaggtgagggatcattcccacaacctgctcatccgttttggccctactaatgaacacttgtagcatgcctgccattatattgaacaagaggggagataaaggatccccttgccggagtcctttttttgtttgaaagaaatctccgatatcgtcattaacattcaccgctacacttcctcccgaaatgaaggtcttaatccaagatatccatttggacgagaaacccttcatcctgagagtttgatataaaaaaggcc

SEQ ID NO: 130395 - DNA, 633 bp, Zea Mays
tggctttagcgtggtgggacaccttcagtgaggccgtcagagatgctacctgggcagaattcgaaacagccttccgtgagcaccatgtaccccaggggatagttcaactcaaggaggatgagtttcaggagctaactcaaggtgggagaactgtcagtgagtatgtgcacaagttcacagagttggcccgttacgcgcctgacgatgtcagcaccgagtccaggaagatggcccgttttctgaaaggactaagacccgagcttaagaccatcctcgccagccaagacttcctcaacttttctcacctctccaacaaagccatccaagtggaaagggcaaaagaggaagaaaaagggcacctcaagaggaaattccaagttctccgagctcagcagcaagaacgtcaccagagagctcgaccctttgggctccaccccaggggaccaagcttcaataaaacatctggacccactccatcgcgctacagtcagcagagtcagagctcccttcaggcaccctccgttgcaagcaaccaaccgccagcaaatgcttgttggcactgcggagaccccagtcacttcaagaataactgccctcagttgaaagcacccggacctacctactccaactcgg

SEQ ID NO: 130396 - DNA, 475 bp, Zea Mays
cgcatattttgatgagatttaactatgttttagggggccttatcgatcctaggacaatctcttgatgctcctcctcgatgggtcttttagggaggagttcacaagtctataggtgaataataggaccaatgttggcttaactagtttctagatcggttttgttggtctgctacattctccatcgtgtgtaaaatcatgtgtcgctcgcaagagtgctagccattaatcgtgtttgatttgaatcttttccggtgtcaacatactttttggtgacttcgatagagaagaaaaaagactatcaagattgaatctactacaacatatcaagcaatcatagacctaaagatggagagaatcacaccgatcccttcaattttaagaacatcaaccacatgacatctcgcttgaagatctccccgatgaggttcatcagaagattcaaatcaagcttcacgctgatctgaatgttttattg

SEQ ID NO: 130397 - DNA, 577 bp, Zea Mays
cctagttcagttggtcgtgcttgtggggaccttgtgcatgcttagaattaagttgtacaaactttgctgtttctctggctcgtctataagagtagtagtaaacctccatgtttaggctagctgattgttttaccttggatacacgcaaccccacgtgaatttgggtgccttggtgtgcagttgaggcacaacctggctttaggtaggtcctcttggtgacaacgagaatgcacctgtgtattccacccccgttgttcgtgttgttgtgtagctgctatagttgattgcctataaagcttgtctttttggtctgggttaccagcactctgatgcccataagtggctcttatagtttagtggctgaagtaagcttaaaccattaaataaagatatacctctattagagcaactgaacaggaaatgtgctatatgtcatctctaacttggttttgataattaatgaccaacacaatcccgagtactaactagtttgctaaatgtgtacttgtaggtttgtcagtaccctgagaatgggtaccctctgctattgtgtcaaggcgggaacccatgtagttag

SEQ ID NO: 130398 - DNA, 599 bp, Zea Mays
agtagcaaatgcggcaattacctaggatctgttatgtcgacgtttccagcttgttcttcgtttgatatcacatcttgtggtactgattgactatcgtctccctgtctagtgtatccatggccatgcccggtcattggttggttgtgcacaggcgtggagaagccaagtccgtccaccaatggggtgtggctacgcccaggcaagacaaatgcagaggagacggtgtctggcagccctgcacaaaacaaacgtggaattacttgcaagcgccggtcagcaacagatgcaaaccaaatggagatcgcgtggaacggaagaatccaaacctgtcgcgccggtgggaaccacacaagccgaggccgcgatggtggggaatctggccacgcctgcgccgatgggaactgaagaccgcgccgtcgttggatgggagagacccaggccgccaagatggcccgccgccatgcgtgttgctgggaatccgcggccgcctccagcaatcccaggtcggatgcctccacggaccgcatcgtggccatcaccggctaatccgtggagttgcccggacgcgccgctacctcccccagccattccgattgcag

SEQ ID NO: 130399 - DNA, 611 bp, Zea Mays
tccccatccctctgggttcttcagataagaaaaactacagtaactccttgaactttctaatcttctctatcagtcataacctcatatccatcactatcctcaaggttatggccaactaaaggaactagtggtggagcttcctcatcctcctgatcttcatcgggatctccaccatcagctaaaaccacaccggcctccatctctacctgttgtaggggtgcagttgattctgcaactcatgaagctcctcatgtagcgcattgttatactgttgtagatctgttatatgaaagagtagctcatgagtgtgtgggctcttgccacctcctccctggaccaggattcactccttgacggtgccatccactgatccactccatgatgcgttcatattccactgttgcttcaaacgttccaactctgcctggagctcgccaatgcggatggtgtctcaagctctatctctagtagcctaggctaactcagctgatccacttcagcccgtgaaatactcctgctactgctagcaccttggtaccgtgcagccagttgatgcctgggaactccattaggcccaattgactttgcggggagtgatcttggtgcgtgcc

SEQ ID NO: 130400 - DNA, 473 bp, Zea Mays
ggccaatgtcgtgctaactactctgatgtaagtaagatccaggcaggtggccattttctgttggagccggtcgttgagtcccctcatgaagcaattctttttcttcaggtcagtgttcacttggtcaatagcatattgggataaatgattgaatttatcgagatactgcattacattatctcccccttgccttagtcgaatgaactcctcttgtttcatgtgaagcactccctctggaacatagtgttcacggaatgctatcttgaaatcttcccaagtgatctgatgtctagctggttcaactgctacaaaatttccccaccacgtactggcagggcctctcaattgttgggcaacaaataacagcttttgtgtttctgtgcaatggactaacccgaacttctgctccattacccttatccactcatcagcttcaagagggtcttctgctttaacaaagagtggaggacacg

SEQ ID NO: 130401 - DNA, 1923 bp, Zea Mays
atcttgccctgtcaagggcctgggcgtttagagcagggggccctcggctacgaaggtcgtagccgcggtttgtcgtcttctccggcgtggttatcccccacagccgtaggcttagatggtagagagagaggtggagaggagataacttgtttgctgccctttattcctgtctccctgtgccgcatatatagccatcggcctgctgtcctggagcctttattttaggaaagcctaaacatggtaacactaatcaatcagtaatcaatcaccaatcaatcactaatcaatcaccaatcaatcactaatcaatctctcctttccttccctcaactttccattcttctattttccttcctgaccactactttccataggttcctgctgatctcccagatctacgcgcccccccagatcgcgctcctggcgatctgcgcgctcctgtgcgcggcgcctgtcacgggcacgacgctgcctggcgtacgagcgcccgtacatgacatctctcccctcgtcgaagaccagctcgtccttgagctggaaggctgggaatcgggcgcggaagtcgtcgaactcctcccaggtggctgatgaagctggttcgccgctccagtgaacgaggacttgccgcacgccacgcgacaagcgagcccccgctattcttgcaggctcaggcactaccgcaccattgagcagaggcggtagaggcggcggtgtggtgggtggtgagcccacgtacttccggagcacgtcgacatgaaacacgtcgtgcaggcgcgcgccgggcggcaattctagccgaacagccacgtcattgatgagctcggtgacgcggtagggtcccacgtagcgaggcttgagcttcccggtgatggttcgtggtagggacgccgccacacgttggcgaaggcgaaggaatgcccagtccccaacctcatatgtgacctcccggtggtgcttatcgtactgcagcttttggaccgtctgagcctgctcgagacggaagcggacgtcagccagaaaagcttcccgtgcttccatttcttgtgccaccgtcgccacccttgtgtcgccgggcttgtaggagcggatggagggcggatcacggccgtagaccacccggaatggggtgtcgcgaagggatgactggtaggccgtgttgtagacgtactccgcctagggaagccagcgaagccactggcgaggacgatcccccgtgaggcagcgtaggtacatgacgatgacacggttggccgcctccgtctgggccattcgtctgcgggtggaacgccgatgacatgaggagcttggtgcccatgaggcgcatcagctcgctacagaatgacgaggtgaacagcggggccgcggtcggagacgatggactgcagaaacccgaggaggcggacgatgtcggtgaagaaagcatgtgccacagactccgccgtgtacgggtgcgctagggagatgaagtggcagtatttgctgaagcggtcgacgacggagaggatgaccgtttttccgtgcacccggggtagcgcttctacgaagtccatcgcaatgtccgcctagaccgccgagggcaccggtagcggctgcagcaagccagctggatgtagatgttccgacttgaaccgctggcacgtcgtacacgcccgtacgaagtcctgcaccaggcgtctcatgttggggaagtggaagtcccggcgcaggcggtgaagggtgcggtggacgccctcatgcccatcgtcatgcacggcggccacgatctcctgcagcaagggccacgccggtggaatgtacaggcgcccctcgtaggtgaccatgccgtcagccaccgcccacggtgcatcgcgggtgccgacgccgactccttcatggatggccgctagagccgggtccatggcctgggcctgacgaaggcgcgtg

SEQ ID NO: 130402 - DNA, 535 bp, Zea Mays
cactccagttttcttgcaagcttcaggattttgagctttgggaatcttccgatggtcaggattcgttcaactgccaagctaataacccccactttgtctgatgcactaggtatggaggaagatgcccccgacaccgtggttgtgggacctacaacatcaatttttgaggtgatgaagtcaacaaccaaaacaaggaaacatatggctggcgaggctactgaggaagaccgcccagaggagggtgcattggatgctgaggagaatgttgttgaggaagaagacaacgacctttggctaacaaaggccagctatatcaatatcgaccagtctataatcaagcccagtgacctggagctcttgaagaaacatgggcccatagaagatgataatattatttgttttgctggtgacgagaccactcctgagtcggaggatgagattgtagttttcaagagcttcttctgggctggacttcgtctacccatgttcaagatgattgtcgttgtactgaagaaatatgatattttcatgcacc

SEQ ID NO: 130403 - DNA, 357 bp, Zea Mays
cccgctcgtcgagagtttctcccactttcgagacttcatcccgagatacgggctgagctgggtctcgctccctagcctcgtgatgtcgctgaatattccggtgtctgttcctttgctgccgagcttctcgctggggaggttcttcctctggcatggttggctcatcatcggagatgggagacgactctaatctccccccaatgaagaggatgtcagggtagaaaggagttgtggtggcaagttccctttcgtccttctttgaaggcgaaggtgtcggaaagacagctcagggggcctccatcccttttccagcaacgcttgcttctttatttcttgtaatccgtgtccactcctttg

SEQ ID NO: 130404 - DNA, 465 bp, Zea Mays
gctaaccacaggtctgaaacttaatagcacgtagtatcttatacttttgagtgccaaatatatataattaatatacctgttcgcatgtttactggccataaaagtatacaatgactgaagcctaattaagaagcttggttcacaagatcattaattgaaagtgtttaatcgatctatgcaaattaattaaggtagaaacaacaatcagtaaaagacgctgtaagtagctagctagtgcgtagtgctactagttcattcaatccatgtgattactggttccacttttttttccctgcacaattagtagttttctgtgcaactggctaggtagattatagggaaagtgaaagaaaaaactcatgtcggttggttatccaagctagttctcagaggcttaattaaaatttttggttttctgtcaactacacgattatcacagtcggtgcaacttggcatggttctcca

SEQ ID NO: 130405 - DNA, 410 bp, Zea Mays
gctggggcaggcaggtactactctgtaggcaattaggcagcgacgctttgtcctaaggatgtttttagcgcttaaaagggcaagtgagaaatggcgctgctctgttcggcctcgtaccgccggcactgtgcgtgatgggatggtatatggggagggaggcgatgctttttgtcgcgctgggcgggggctccaaaggctgccggccgccattgacgctgaaaagggcttgcccggccgtgacaagcaaaatcatgcagtggtagctcgtgatggcaatagcggcctaggcatggcgctctgacagcgcaggcacaagcagggtgaaaaagatgtgtgtgttttaaaaaaatttcgagctgctttggtgatcttttctttcctgcccaattcccaaagaacgcaatcgatgg

SEQ ID NO: 130406 - DNA, 1069 bp, Zea Mays
cgacttcatgccgcagtacatccgcgggctgtacccgaacgtgctccctcgctagaacgagagaaagcacggccgccacgcgaatgccatcccattgcattgaactgcattatgtatagggtttttatttgtttactataggctttcaatgtttttcgaacaaaaaacctaggctcttcagtcagcgccctgtcccctgcgactaaagtggtgtgcctgaatatttttctcagaactgacaaacccgagaccatagtattatatcttacagataattacttgattttgtttcaaatattcgaaccaattttgtttagtagagagtttacagcttgacaaacagcaccaatattgaaagctcaaagctccactttgattttgtgtggatatattttctaaagtgcaaacctgaagttgaggccatttttctccagtttcggctgttgaaccagatgaagaacaacctcatgatgcacatgaagaggaggaagttgtagccaagccagcacccaatacgcaccagactattaaataacattgttaaggcaaagcagctcactgatggggaccattcattattctaattattctaagtagtgtggcttatattctgacagccctagcagccacttcaacaacaaaacctactggatttgaggaagatttagcacatccttgtttgaaacatgcaatggatgaagagtatattgccttgatgaagaacaacacttggattatagttccacaccagaaaggtatgaacattattgatgtttgatggatgttcaagttgaaaaggagacataatggttcagttgataggtataaagctcggttagttgcaaaagtctttaagcaacaactagtagaatgcccgtgcgttgcgacggcacataatcacatagacgacgtcttttaatgtaccttcttcgttttacatgtgcaatggtcattttcggatcacccagtctcgtcattttcctacacgagcaaagacccacgaatagggaggcaacgtttgtaacaccttcgctgccaggcgcgtgtccctacaaccaccgtcgcaggg

SEQ ID NO: 130407 - DNA, 458 bp, Zea Mays
tatacatcaagcgataacttgtgtgcaaatcctgacaatctaatcacacatcacaaacaccagtagcctcaagtcataatacacaaatatacatatacatacacacaaagataatgcgatattaagcatagttagacaaacataaacatacatgttgcgatggggaggtggcgacagagaggtgtggcggcggggagagtggacggtggtgcggggcacggggaacgagcgcagaggcggtggtggcgcaaataagggaggcgacgacgagtgaggcggaaataaggatgggcgagcagttagggttaagttcacattattttccgggtgcccatgatctggcattccgcaaagattgtttttgattttcaaaaaatactttactgagtgcccaagatctcgcactcggtacagatattttaaaaattttaaaaaacactttaatttgttgagtaccc

SEQ ID NO: 130408 - DNA, 565 bp, Zea Mays
cgcgtgtctggggaccaagcagctgctggcaccagcgagtctttccgttgcgataaacacagacgcaacaaaacgttctttctccctcctcctgttatcttgttccttctcccagtgaaaaatctttatgtcctcaagctcaagcataccgccaccaccagtctcagcccaacgctctacctcaacaactcacctcgttgtttacatttttgttctttggtcgtcgtccatagaaaagaatccccatcgtcaggtcgtttatctactccaagctggcgtctgtgatagggtgaggcagccaggcaggtatggtctttgggctcatgttgtgctgaatggggcagggtagttgtggggggggaagcgctcgtcttatgcttgttgagattcggctgggtgcaagcagccagggccttgcagccagaaattgttcgtcctgtatgtttgtgtggagaagaagtggtgtgagtagaaaaggaacagcgagggggttgatgctaatttgtgtagatgttcgttttctttttcagatttcttctaagacctgaaaagtgctaagatatga

SEQ ID NO: 130409 - DNA, 424 bp, Zea Mays
aaacagattatgtcaaggagaaggctttatcccaaaatgtttaagtcttgattcatctcgagatttgcttcgactgttatatccttccttgtggatgttgatcttttcttcttcggtcttggtctcattgattcgaggttaatgtatatcaatggagttagggaatatagatttggatgagatagactatatgatgtgggtcaaaagtttgtttgatgttagtggggataggcagattatgtaatccatcacgactctattggttggtttagatctcatgcacgtggctgagttggtttagggcactagtttagttttaagtgcatgaggggtatggccttattttttttgtaccagcattaagtaactcactttagattgggtcaaatctagaataaattgatatggttattttagactcgat

SEQ ID NO: 130410 - DNA, 714 bp, Zea Mays
ggcccgccacagtttcccccctcatccgatggccacctgcatcgctcgaacaacacaacacaacccacaaaaagccttgcacatcgcctcaagaacagaacagaacggcacggccgctttgcacgcagccgaagcatgagggccactggatctgccggatttcccgatcccttttctcttcccggaggcggggcatggaacagcatccaattatttgacatgatgcggcctcaagaacagcgacggatcccaaccgctaggcctctcgagacgaccggaacggatggagatggagacctctcctctccatggagatcgcagtctgtagcgttcggacgattgctggggcgaggcgatcggtggccgccagtaaatccaactttaataggtaactagctcaaaccttgtttagatatactagactagaaacaaacaaatagacacggtagaattaccgcctgatactgatatattatagaagtgaaaacttattacgttatgtatatgggcaccccttgcacatgtctattgctataattagcaataaatttgactgcggtcctgtccgggacagcgagatgaagtccctctcaccagcagcagatttcactgtccttctgaaatctctagcccctcatcctcacgctcgcttggcgtctactaccgcgtttcatcactcaccatcgccatcgaccggtcatcactccctcatca

SEQ ID NO: 130411 - DNA, 508 bp, Zea Mays
cctatttgaaccctatggagttaagtctaattttcagagaattggctcaactttagaagcttgtatcttccaagttatgaatattttgccctaggtcaacacatcaaaggtttagagctacaataagagtacaactttgcttaaggagttaagcattgttgttatgcaaagttgagagaaaactgggcccaaagttgggctgtcagtctctctacaacctgaattatggtatccagttgcatgggatgaactttgggtgccatttggaagatgatcccatggatgtttgagcatgattaccacagttggtttatagctggatcattagacaacaaatttgctactggccgatcaacaacttgccatgtaaatttaggagaaaatcaatgacaaacttggtctgtcaggctaactgaagaacaatctgatggtacagtgcactaaatatccctgggttcagtccccctcgccgccggtgagccgcgcgtctagatttgcgtcggtcgac

SEQ ID NO: 130412 - DNA, 484 bp, Zea Mays
attccttctccagctctgtctgctcttgttagccttcaggatttatctataacagattttgatcagacccttgaggatgttattcctgaagatatgctgttggaaccgactgttgatgatatgatgaatgtttgctctgacgctccaaacgtgggattagaggtatctcgggtggtatctcgtgcatcgtcgactttgtaaggtagtattcggtgtcaagaggttggtcaggattgcccgactcccatggaggtgactgaggatccttcagcctcagaggtgaccgttacagaaaacccagcccccaagggtgatgttggcgattacccagcccccgagggtgtcaccggtaatgacctggctctggtgggtagcgcaagctgcaacccagcccccgagggtgttgccggtagtggtccggctccgatgggtagcgcgagctgtaacccagccctcgagggtgtccgagcgagctctccttctc

SEQ ID NO: 130413 - DNA, 595 bp, Zea Mays
ttggaactgctgcaaaatcatgcgcataaaacaaaggaagaaagccttgcagtagttagaacttcgtaaccttgtgcttgtgcatcgtttgaacgaatctcgatcccctcgcaagttgctccaggctttgtacttttctgggggcgccgcgcaccgctggagcctgccgccgacgcgcgaccatacgcgctggcacatgagtatatatcccactgccgcaacgccaacgccgcccgtcgagcggcggagcggttatccaattgcaacatgtaattgtctttccaaatgtcttggctctccacgcaaaattttagtccctccacgtccccactcgtcgaaaccctagtttttagcaagttgctcgccaatctgcaagtttggtggcgggaacaagtggcagcaactaatcgaggtcgtctcatggcgataccacgcgaaaaaaagaagaagaggacatgggggaagaaaataggatttactgctaggagcgttagtgtggaactcacttacgcgcgcccagagatttccagaagcagtgggtggagtaccacgcgacggagggaacgccggcggcttggcgcgctctggttctccg

SEQ ID NO: 130414 - DNA, 861 bp, Zea Mays
cttcaaaacaaagataaagattcatggcagcttctttatctcatgttccctttgtaaccaatcaagtctcccttcagttgtccctaacaaactgaggaccttcctaagttcaggtttcataatgagcaatgttgatgaatgcataagggcagtttttttcttgcactccatgttctttcaccatcctcattgcctctgcaattgtaggaactgggttggtcataggaggagccgatgaagcttcaatacttgtggttatcttgtccactccttctatcttgctgcaagtttgcttgtacaagcgtaagaatggacttttctcttccttgtcttccatagcagttgaagagaccttacgcttcttgtgttttggtatatgcaaagtagacaatttgacattcatggggctttttctctaactcatgcacctcatcatcactgccatcatcagacaaatctccaggaatggaagcagaagccccagtaacatgtgcacttccaaacatgatgtgcaacgaatctaggttggttggtccacattttctgaactgtacatgcttgcatttcctactatttgctggatcatggcatctctggaaaaaatacacatgaagttagatactaacgacaaatcaccataaacaataaacaatcatgttttgtgacacttactgcaaggtgatccttccaccatgtatcatcacaatccacagtttgccttgcttcatcccatccaagtctagtggccatatttttcaaatccatgaaacaggaataacttcttttcaaactatcccatttattcttcaattgcaaatgttctagtttcttcacatatttttctgcaaacttatcttcgac

SEQ ID NO: 130415 - DNA, 386 bp, Zea Mays
gaaagggtcaacaaggtcctcgaggatttgttaagagcctgtgcgttgacatttgacagaaattgggagtccagtttgccatacacagagttctcatataacaacagctaccaggccagtatcaagatgtcactgttcgaagcattgtatggaccaaagtgccagacccctctaatgtggtccaacataggggaaaaggcactagaagggcctaccttcgttaaagaggcagaagagaaagttgccctgatccgcaaaagattacttgaagctcagagtcggcagaaaagttatgcagacaataggcggagagaactcaggttcgaggaaggagacttcgtttacctcaaggtctccccaatgcgcggagtcaaaaggtttcaagt

SEQ ID NO: 130416 - DNA, 422 bp, Zea Mays
atcttgaccgcggatgaggccgtgagctggccgtcatacccacttgccccgcggccggtcgagatgaccctcgccggagtttgccgcttgccgcctggacgccacatatttagaagtgttaccacgtcacagtagactgccgtaggtagcctgtccatcgcctgagacattgccccagtgaacgccacgtagttcgcgccagtgactcaccccactcttcggctgccagcctcccttttccaaattcggagccaccactcacggatactataaattgagtgcacagctagctccgttagtttgttatgaagccagagcaccaaccctcacccttgattagccaccatagctggaggatttcgttcttcccccaaatctattgtttgtgccactgtgagacgtcgtgccatggccagccatcg

SEQ ID NO: 130417 - DNA, 355 bp, Zea Mays
agacgaagcttttcttatttgaatgacatgatgttatgatgtctatgttggagcgaagcccgaattcgacctcgatcgggtcttttcccaaccacacttaaccatgtttggacgcagggcccgcaacacccgaagacatcgtctgaaatcaaagacaagactttgcctggaaccgacagcaaagcctccgacgatgacggcctgcataaagacgggggctcaatggccgctggggcgaagtcaactgcgatcgatgacttgacaccactacaccgtacggggacaaggcgctggtgaaggcacccttggcggacgatgaggagcgaagggtccggtgcacgaacgtaggcttcat

SEQ ID NO: 130418 - DNA, 316 bp, Zea Mays
gaggacatagaaccgctagtgagatcaaggtagcctttagacgaacaatatatagagacttgagatccttccttctcttggtcgtttctaacgcctaatactatcgatcaggtgtcggtagcgcaagcaatcgaagacaagaagtatggacattctacccaaaacagtataactctttcacccaccgagcacatcatctggatctaaaacgcgcacgcacaagtttactcgcgagtgttagttcgaaacaccataaaattttcaatgctcatgctaaattataaaatcgtaaatcgtacgtgtgttggggtagcac

SEQ ID NO: 130419 - DNA, 315 bp, Zea Mays
ggcggacggaggaaagctcgctggagctaaggaggggcgcctagctagtcgaggtgagcacggggtcaggtgaggcgtgcccgggggaggttttaaaggcgcgggcgagcatgtgtgaatcatctaggcccctttggtgatgttttggtaattaatgacaactgcttgtggactaacgattcttcgagaaatacgagtgcagggttggaccacatagaacaggaaatgttggagaatcataagcattggttgtggatcaaataaaggcaaaggtataatataggtttcgtttttgccggtcttgaggagtttaga

SEQ ID NO: 130420 - DNA, 500 bp, Zea Mays
aaatatataaatgtgaacgaaaccgtattttagtatgtgacagtgccagaaaagtgctgcatttcttaagccagagtggagagaatttgaaacacttaagcttaagtcagctaaggcttgcaagatacagatattgttattgtttcatcacataataggttactacatcatatctctttcttgtacaaaaaactgtctgtcgatgtcaagaaatctaacttcataatggaagaatactggcagagtaacatggctgtcaaccttaacacacttcaaattcacaacgaccataatggacaaaaaaataatatataagtcctcaatagcagtattgtccatttggttactaaatctagattaccgtaactacatcaccagtagcttcaagaattcgctggataaggggaacagcagctgggtcaccgcagacatgaagttcatctgaacaaagtcccagaagtgcacgtgtgaacgaataaccccttgatttacagccaacc

SEQ ID NO: 130421 - DNA, 457 bp, Zea Mays
aaaattgtttcaaagggaaaatgaagcgtacgacaagtttatgttctaagacgacaatcctcataacaatgaaacgacaagactcataaaacagactgaaacaaccatagtactaaacataagcctctgttgtcggacgaccagcatctaagtgcactttttaagatctatctcgtaagcattgcgaagccaagcgatccttccttcttttgtctgcagtgttgcaaaaacatctctatactttttctcaatcaatagatgagtggcaaacaaatgtagttggctgccttctggtgatccatcatcgataacttgttgcaactgcgcctttacctcaacgcgaactgggtcattgtcagcagaggtaatggacttgttagtggtcattgaacgcgactcaaaagcctccactagtcttttcatgtactcttccctcgaatcttttttcttctttggt

SEQ ID NO: 130422 - DNA, 715 bp, Zea Mays
cgagaccccgggtcacgcagcatggcggcaacgcggcggatccgttgtcccgatgagaaattccactgcttcgatcagtcgaccgcgcccgcgaatgccacaccaacatccacaagccctggcggtcccccctgggcctcgcccagaggtcttggcgacggcgaggcacgagttcggtcgcgggcggcttccttttcctccaccgtcgaacgcacacgagcttccttcatcacacaaacaggcaatggcgcccgcgattctttcctatctccctgctcaccctctctgtccttccgccgctcgagtgattactaacaaccacgactgaaacggatgggggctagagttcgctggtataggaaggggaagaggaggcctggaacaaaatacaaatagctccgagcaccaatctcggaggtcgtttcgccgcgcgtggaagacggcagacactgctctgcgtatggcggccgcaagatacggagacgctgtcaacgtgggtctcgagccccaggatccgcaatcatcgggggtaagggcctgcggcgacttgttcaccgacgcgagggaaacggagatgagtggggtcggagcatgcgcgcgcccccgccatgcattcggttgtggatcaccgagctgcgcggcacgttttggtgcggtggatctggccgacaggtacggcggcgttgagctggtaagcgcccagggagaagaaagc

SEQ ID NO: 130423 - DNA, 282 bp, Zea Mays
aaagtggatcaaagagctgccatatgtggtttggagcttgagaactcaacctagtcgagccctacatggaaataccccgttcttcatggtctatggttcggaggcagtgctacccgccgacctcaactttggggcaccgaggctggtcttcgaaagcatagatgaagcagaaactaccaggctagaggatattgatgtgctggaggaagagcgattgaacacagtaattcagtcagccagataccagcagaccttgaggcgctatcatgataaagccataca

SEQ ID NO: 130424 - DNA, 576 bp, Zea Mays
cggtgcattaccaaacacatctggtgctaccaagcaccatgttctttctttgtttcttcatgtgtcttcatctgggctccttccttcttatgtcttggacaaagcatgttcttgtatgtcttcaatatgtcttatagtgtcttgtttgaggtgttgattatctatatcatcatttttcctttagtctaggtttacttcttatccttcggaactatatctgtcatcacctagggatggccatacccccgactatcaccaagatgcgctcagggatcctgactcaagagactggctctgggcctacaatggagggaccactgctcctaggccccctgacttgaggacctcccctagccccgtccagggaggggcttggcaccacctcaaattacgttggggcatccttggaactaagtcttcgataccacacattatctaacacgcgattcttcaagaccacacattatctaacatcttcttcgagacctcaaattctactctactaaaaagactttgtgttggttggccacctccagcgtgaattagggagcatttgaggcttcgccaaaccacggg

SEQ ID NO: 130425 - DNA, 590 bp, Zea Mays
ggagcaccaaagaagagaggaggatggagatctggccagcagagatggtgacttgaccaaaacgagtaaacgacggaggattaagagaagccgagtgattagggattagggttagggttagctacttagctgcctggtgggaggagatccacaagaccacaaccgtgacaagacgcgccggttcctcaacagcgagcgcggcaccaacctaatcggtcgacggcctgagcacaaaacaagagaggaatcagaggattagcgacagattggtagattagagaggagaggaagatggagattacctgcgcagccggagcaccggagaagagagtagaggtagatccacaacggcacaaccacagtccacactccacagttcggcggttcctcaacggctcgctcaactcaaatggcgatgcgacgaccggacacaggagggagagaagacgggaagggaggaagccgaggaagaaagacctagtccataccgacgtggatgaccggaggggagggagagaagaggctccggttcggaccgttcggtggttcctcaacggcgaaaccggcgatgccgatgcgacgacgacgac

SEQ ID NO: 130426 - DNA, 999 bp, Zea Mays
cgagcaaaccttaggttgattatctaaaatatatgataagcgaaaataatttattattacacatagacgccacacgacacaagaaacaatactgcgccacgcgcacggcgagcgacaacgcgtgtgaatggcacgcgcgacatccgcaaaacaacgcgcacgcccgtgcgcgacacgcacgagtcaacgcgactatgcgcgcaaacagcacgatgacgcgcaaacgatgtcgtgcgccaacaacgaacagataaatagttagttaaaagcatttaagctggtgttaatcaagttaactaatatttatatttataaaagcaccatttaaaactatatactcgttctaaataaattgttattttattaaccctagaataaaccaataattaattatacaactaaaacatacgacccgacgacaacgagcgccacatgtgggaatagcgtgcgcgtcacgcaaacagcacgcgacccgcgaaaacggcgcgacgcacgaactactactaaactgtcgtatttattctacacataaattaaatgcaacacttaagttgacataaccacagttagaggtatttatcgcatgcacagatagaattaacacttagttctgattgatttactactcggttaatcatcgtttaattacgtagattaattaacgtgagcgattctagacgaattggtttattgccgcgcgacatggcacgcaacacactaaacaaggtgcgcggaatggcgtacgcgacagcgcgcgtcgacacgtgtgaacgacacgcacgatgcgtgcgaacggcacgcgctgacttaaacgtgccacgcgaacagcacggcgacgcgcacacgacacacgattgatacacgaaataatgtgcgcgacaacgcgcgatgctcgctaacagataacgtgattatactagacacaaattaaaggaaaaaacatttaagtttgtattaatcaagttaacttttatttataaaagagcgagttagaaacta

SEQ ID NO: 130427 - DNA, 691 bp, Zea Mays
cggaggaggtggagcagactgaactgggggaactgagacaccagaatgttgtagcataagagccatgaatgccctactctcagcccgatcctggagaagttgctgctgaagtgaatcctgtctgtcctgtatggtctaaaacatcgtgagcatcctctcagacaaccgggtctgctcggctgccaggtgagcctgctgctgagtgagagactggagaatcgaagcaatagcagggtcaatagccggaggggcagcaggggcagcactaaaactcccagcctcgtgatcatgtgagcgtggaggcataggaggtggaggaggaaccccaaaatcaacatcatcatcatcatcatcaactgctgtatcctgagtgtcgaactgatgaagagctgcatcctcggcctgagagtcaaaaacaggagcagaagctggcacaggagcctcaggcgcaggacggtaggatccaaacacaaggcgtgaggcctcaagcgtgccttgaaactgtggaggccgaatcagttgcgcaaagatgtggaacaagtagtgagcataaggcaactgtcgacgagcacgaatgtcatccaaaacggtgtcctcgatctcacaaataaggaaatccacgacgtcaaactcagagtgggagaccagggcaccaaggagccagagctgaatatgtgtggtagcctccctg

SEQ ID NO: 130428 - DNA, 373 bp, Zea Mays
ggctaaactcatatattggttcacttaagagcacgatccaatctacacccttgatcattgatcgggcggctctggttgacccatacaccttcgggctcgcataattataaaagaaaccctcgatttgttgcaaatgagcccgtcgtcccctagcggtgggaaaggtttacaccgaggtccctggaattcgtagtttagaccctagaattcatgaaattagtggcctcagcctagcctccttgtttaattataaatttaatccgaaaattgaatattaggtacaaaaataaacctaaacacttaagaaattcataactttcacattttaactccaaattgatctgtttcagttatgttagcttcatattaaaat

SEQ ID NO: 130429 - DNA, 769 bp, Zea Mays
ctcatttgcaatattttcattaaaagaagagaaatatggatatatagaacctgagagagacgaatcaacatcaatggtgtagctctcaaaagctttagtcaatgtgtgcatcatctccttcaattctagatgggagacacactcaccatcattaggcttaggacccttatccttgttcgtttgggtctttggtcttgtcattgttagtacaaaatagaaacaaaggaaacaaaaaaattataaaccctacaactactcttaggtgtggtggtggaacacgagtaatgaagcgtcttaccccgcacttacaaggttcttaccagcactttaggtggcaaatggtggccggtgtgacaaacttagagcatggatgtgattgcaaagaagtacatattctgctcaagagaaagatggagctttgggaaggctccataaatatatatctatggcacacaagtcagtaatatatagcaatactgaataagtgtccaaagtactcgtcctagctgctgtcctagagaatgtattagcatagttggaggaagacacaaaggaggtaaaaggatctaggtacaacaagggaacaagttggaaggaaaaacaatcacagaggtggacagatcaatggtgttcctgcttatgcgcactctttctctcttttttttcttttttctttgttttgtgcggggattttttgtcgcacttgcattttatattttctttttttcacaaaagtgtcacaaaaataagaccgtttgataaatttagt

SEQ ID NO: 130430 - DNA, 380 bp, Zea Mays
cagcagccacagccaggaacaggaaggtatacaacacaactacacattcttgaatcttgtaactgtagcttaatattaggtagtagtgtaactgtgtaagtatgtaactctagtatgagctgcggacctgggcagtgggcacattggcggctggcgcgttgctttgttgttggcttctgtggatcttcgttgacgactgaatgagctgcggacctgggcagtgggcacgttggcgactagcttccgtggatcttcgttgagctgttggcttttgctgcctgctgggctgctggccatatgaagttatgaactgttggtgttggctgtagcctgtaggagtaggactgggcgttagcagtttagcacaaagctgttggcga

SEQ ID NO: 130431 - DNA, 403 bp, Zea Mays
caacggcgaggtggtatgacgtgggtcgaagcatcgtggtctggggagacggcgttggtggagctcctgcatgccggtgaagctcgtggcaccgaagtagaggacgagatacctcacagaagattcgaaacgatagcgatggcactggtggcgaggagagggagttctagtgcctggaggctcgagttgtggtgagtagagatcgtggttgggtcctatttgtagccgggcgccattgattgggagggaagggtgagggcggtgtagctagggaggtgatgatgactgctgagacgttctccacgttgatgaacgccattacgaggggatcaagcaaggataaggtgcctaagatgtcgggtgaaacctctgttttcgggtgacgggtgcgaggaggctggcc

SEQ ID NO: 130432 - DNA, 474 bp, Zea Mays
gcttggtggagctggtggttaggaaagcatgggtgtatatatgtatgtccactttattatgtaggatagaagatgcctttaaagcatagataggtttgggcaagaaaggatagggtaggaaaatactccatccaagattgtggatcttgattcctttgaagatctggcttgaatcttaaccttccttgatttgatgaggtcgatcaccttcaatcttcgttctcgaagttgttatccaaatttggggcatgtagtgaaggcatattcttaggtaaacaaaataggttaataggtggttatgagttaaataagtttaagcaaagtctgtctcgttgtcttgcttttagattggttggataagttatgtaacctgttatatcggtcatgtttggtgttatcatcaaggataatgggtattggtgttaccgtacctagggacatagttgagataggtgtaggtacatggggtaggta

SEQ ID NO: 130433 - DNA, 339 bp, Zea Mays
cgaaagtttagtcagatgaaaagggggctacaataggatggaagagatgcttgatgatgtacgacacatgcttctacccgatgattatgagaatccacttcaacccgcagattctaaggtcctcctacgcctgaggttctaaagttcatcgagctcattaaggttttcgaagaaccgttgcatgagcatatggaagtctccatccttgttttcttgacttggcttatggctattaagtccaagtccacattctcaaacaactgctacaaggagcttgtgaacttgatcaatgatatacttccagagaatcacaagatgcccaaagacatgtatcggtcc

SEQ ID NO: 130434 - DNA, 856 bp, Zea Mays
ttcaggaacgacatcttcgagagcctaatcaaaatttgctatggataattcttgcagaccaacaagagcagacaaagctagagaaggaatatcgctactcccccactaactctgtaacgccgactgttctttcgaactaaggggacttcctcttcttcttcctcgtcctcgtcaacgatacagacaatacacgtcacaggatcacacccattgggatcagcatcagcagggccactcccactgggttcagtttcagcagggccacacccattggaatcagctccagtaaagagttctgccggtacttctttagcagcaggaacagaagggctggcatcacgatccaagcacgacactcgccgaagccgtctctttttctttttcttcccctcggcaggagcagctggatgactaacttggcgaagacgtttcgggcgagtaccttcaggccttcgagtacccgcggttttgttaggctctgggatagttgcaacagccattgttgcagtaggaattgagtcagaagaatccccagccaacatgtccagcatagcgcttatctctgcatcacccggactcataggcatctcaaagtaaacttgcctctcatcattgggaaaatctccaagtgaagcaaccagaacctcaacttcttcaagtgaacttgccctatccttcagtggctgattattcttaaaaacaaagtctgcaaccacagcttcagcggtcagacctctctccttcaacaagcaaatttcagcaagtataactttggcttctgctatctccaagtctgtgggaggctcaatccaacttagagcgcgaacatccgactgtctccctgaccgagggggag

SEQ ID NO: 130435 - DNA, 342 bp, Zea Mays
ggagagcgtaagaccttattgcagcagaaaaacactagcaccagttgttgttgatgcaaatagctatggcttgatgcagttaattgatcatattgctgcaaatttcatttgggggttcaaaacaatatatcacattgtatggttcaaatggagataggggtggtgcatgtgttctcataaacattgatgaacaactgcatggcctactttgagctcaacatagagaaaggcatgattgaaattgttgctcaaattaatgaatttgatggggcactgcaattttcacccaccaagcgtgcattgcatcctccagtcagatctagagtagtagagaaccaaaat

SEQ ID NO: 130436 - DNA, 921 bp, Zea Mays
gttcagtatgcagaccgcagtatatattagctttcgcatgtatagattgatcttttctatcgtgtgctggctggatgtgttgtgtttctttccagctggtagatccagcatggatgcctgaaataacatgcaatttacttctttaagaagttggtgccctgctgcattgttgccgtgtcgaattttctctgaaatgaagcttaaaaatcatttgccgccattgccctcgcatgctgcttgcactagacatgacgcaaagttaagtgttgctggccacttgggcggtgcaagtttgcagcttttctggaggctttttttttttgagcttaaaactttccggtgcggtgcaggttgctaaagtaagagacggcgtggaatgtcgatgcttcagtgagatattcatctgcttgtcttttggcgatagatctatattcgctttccattctttttgtaccagatggatctaagttggtttctccctccgtatttttttctctcgcatttgcagtgagatgaacagcgtcatctggtggttaaaattttcgtatgatttcaaaaggggggaaaaaaatctattttacctctcttaaaagttagtttttcgtcccttaactataaaatcgaacataactctttcctcgaacacatgacctctctgactgttttctcggtggttttcatttgtccggttttgtagttgagaaaagaaaacctaacagagacgacagtgcaaccatgtccgattttatagttgaggaaagaaaacctaacttttgtgacggttgatgaaagatgaaatggagtttttctcatttctaaatgttaaagcagtgtatttggggccatttggatcctctacccaacatttactaattgtacagtaattctggaggcaactgccatgttgcatgtgttaatttc

SEQ ID NO: 130437 - DNA, 599 bp, Zea Mays
ggcatgtagagactggaatatgatgtagatggcataagcttagtgcgtccaaataatgcaaggccaaagggaaggacgataaaaactagtgaacaaggagttctgaaaactaggtgcgaaaggagaaaagaagaagactcgaaagtgccaaaaatgtggcattgctgatcgacacaacagtcgaacctgcttgtctatagaggaaaatagggttaaattggctagccttgccgatagaaaaagagggcggccacctgggtctagaaacaaaaattcaacaatggccccacggtggaatgagacatccacatcaaaaaaaacataaacatactaattctgaagaacatggttcggatgacgataatttgacatgattgtaaaacatttatacataaataatggatgatattgaaatgttatgatcatgataatatttgatgaatatgaatatttacgttaaaagctcactgtatggattatatctattaatgcaacgtaattatttcttatgagctatgctactgttgggtttctttggctatataatcatatattcactgcatctcataaagaatttatgttgaaaaaatgaaaaagcc

SEQ ID NO: 130438 - DNA, 443 bp, Zea Mays
gtcttttccaaaagactctccgtgcaaaagtcgcctaagggtgcagccggactagcacaataagtgcgaaaaatcgaagtcttttccaaaagaccctccgcgcaaaagtcgcctacgggtgcagccggaatactagtacgaaaaaattgaattcttttctaaaaaactccgtacagaagcctacgggagcggcctgatcaacgaaagcgcgcagcttcatcacacaagagtatggttacatacatacaacaaggcatcacacattacattggctcaaccttcgggatgatacccatatccctatagttgaacaacactatcctcaattcctaacccgcaaacagacttcgcagctccccctcacccacactctccccagctggcgaggacaacaattcccgcttgccagtcccgtccacacgaaggcgaccaccttccacctc

SEQ ID NO: 130439 - DNA, 582 bp, Zea Mays
gcttgccttgcaagtcttactagggatctccccggtgtctattgttctgccccctgctccgtgcttcccctctaccaggctatcatcacgtgtggtccgcgacgggaggagtaaatccttctagtacgacatcaagtgcactgataatgatctcgcttccatgtttcccatgctctgatcccatgctaaagatctcgaccaaagtgttcaaggggtcctcacccatcccctgcctatttcctttgtcaatcgcctctccgatcaagctacactggagcttgaaactttgggaaactcactatagtcagtccgcctgacggatgcccccgacgtccatcgttgtgcaatttccaagtcagatggatccttgcactctaggctcctctacaagccactaaaaaactagaggtgcctagctcccagttgtcgacctttgtttggaagaacaacacccctagggttcttttttgcttgactggctataaaagacaaacttcagacccgagtgaacctgtgcaaaaaaatgtcctcgacgatgacaccttaaaagtgtgtacgacagctcctgaaacaacctcccac

SEQ ID NO: 130440 - DNA, 280 bp, Zea Mays
gggaggataagggacacacaacaaggacgtgccaagtcacgatccaaaagcaaaagaagatagctaaagctgaagcatgacagaatcagccaaagcaattcatgcatactgcctcatgctattcgccatatatccctaagtatgtgggcaaccagcaacccacgacatcagttgcttcgacaagtcattctcaagctgcatgggctcagttaccaccaccaccaccattggcacctaccttggatcataatcagtagccagaagggcatcgccaagcgca

SEQ ID NO: 130441 - DNA, 724 bp, Zea Mays
aacttaacaagggtgggaaccgccctctgatttgaccaagtaaatcttctaccattcaaaggaatctccttcagatccaaggagccaataagacctctgaaattgcccaataaagacctattaatgttagaattattcttgtcttctgacttgtacatttgattaaaatcaccagcaactatccacggacccacacatgtattcctgatatctcttaattcttgaaggcagatttcaaactgtcttgatgaggtccatacacccccgcgaaccaccaaagaggaccattttcactttgcaactgaaccgaaacagaattgtccttgattactgaggtagctgagacaaaggaaccatcacgccaagcgactaaaatacctcctctggacccatgggcaggactaaatacaaaattactgaacccggacccaagaatagaaagaatgttgaagtctgagatagagtccaatttggtttcctgaagacaaacaacagcaggtttgaggcttacaaccacagacttaatagagtctctcttagcacgactgttgaggcccctgacattccaaacccaaaaacaaccaggctccatggaaaaactaaaagcaagcaatcaacacggggtcagaacctgctcaggcctgcaccacatggggcacctcccagccaaacagagccgccagggcagcaatatgatcaccggacagggcagcatcaaacaaac

SEQ ID NO: 130442 - DNA, 340 bp, Zea Mays
gccgcgtcggccgtcccagacgtagacgagccaacttcgaaggatctcatcgacggagaccgcgtcttcgccctgcaggctctggacaaataccaagcccagacaaaagcatggcgcgaccaggcagtcatcccaagggaattcaacgaaggggacctcgtcctcatccggacagctcgaacggagtccagaggcaagctggaacccgcgtgggagggcccttacattgttaagtcgaaggcctcccccagcgcttacaggcttgcaacgccaaccggcgaagacttagagcattcctggaacattgataatctgcgcaaattttttgtttgactcatca

SEQ ID NO: 130443 - DNA, 718 bp, Zea Mays
caaaagaaaaagtaggatgcatgaaggaaatagaatcataaacgaaagtatatgacagaaaagaaagagacagaatagaaagagaaatattatgttgaacggctcagatttaccccaatatcaacacgacacatcctactctaaatgaacttttgagtaggattgttcatttggaaataaactggttgcttgtatatggtacaccaccgccacggcaatgagacaatcagttgcaaactggttgcttgtatatggtacaagccatccaagtttaacattgtattgagcacaataccaaaccctaaatcctaaaccctaaacaattcaagtggatggggcatttgacatcacagccgccgaagagtagttccaaacaagaaaggaagatcaacagataagcgacaaataaatatctagaaaataaaggaatgcatagggtgtttggtcatcagtcatcacagccagagaagaagagttccaaacaagaaagcaagatcaacagacaagtaacaaaaaacatcagaaaaacaaagatcatttggatgtgacaaccagcacagttacacttagagcatccaatcccaggtctttaggtcagggtagttcctggttcctaccatgggtgtctttttgtttctttgtttttggccaccgtaatggggtcttttgtctccctgtattgattatttatggatcttttttctgctcttcttaatga

SEQ ID NO: 130444 - DNA, 1025 bp, Zea Mays
gtcggccaataaggttgattttggcctcccatgacttataaacgatattttcgttgtcgaacaacgattccatgtatcccgtccgcgaacaatgttttggttcctgacaccggtaaggctatttttttgcgttctagtgagctatagcacacatttttatggccgaacaaccatttttatgtctccagtccacctccgacgttttagtcccttaggccagtaagaccatttttggcccccgtgagctatagtgcacgttttcatggccgaacaaccatttttatgtctcagttccgctaccgacattttggtccctaagcatagtaaaacagtttttggtctcccatgagctataacacacgtttctatggccaaacaattaatttcatgtctccggtccaccaccaacattttagtacccgaaggtcggtaagacatttttcgccatgcgtaagttatagcacatgtttttatgatcaatagtcattatatggcttcgttctgccacccacattttggtccctagagcacggtaagagcagttttagtctcccgtgagttataatacacatttctatggctaaacaaccaatttcatgtctcctatccgccacccatgttttggtccccaagaccggtaaggctatttttggcctctagtgagctataacacacattttcatggcaaaacaaccattttttatgtctatgttccgccacccatattttggtcttcgtagcacgatacatacagtttttggcctcccgtgggctatagcaaacattcccatggccaaacaatgaatttctgccacccatattttggtcttcgtagcacgatacatacagtttttggcctcccgtgggctatagcaaacatttccatggccaaataatgaatttcatgtctccagtctaccacctatgttttagtctgcggagatcggcaaggcatttttggctaccacatgtttttatgacagaatagtcattttcatgtctacggttcacctcccatgttttca

SEQ ID NO: 130445 - DNA, 687 bp, Zea Mays
gcaagatatggattttcctaggttttgtccatttttgtattaattttgtgaataaaaataaactaatacacaaagtcttcatttatttttattttctttacactgaaaaatggacggcgggttagtttgtgaaaagcatggggtcctttttgaatttttcgcacgccgaaggggtataggttcatgtgagccattggatcaggattggatgcgtgagattaaatcaaatcctttctgaaccggtacgcacatgttgtcgtccgatcacgatccgaaggttcagattttaaattgatgtgatctaatcttacccgcctgatcagagttggatgactacgacttgatccactctattctaatcccaaccttccaaacccggatccacgaccaccgcactcttagccaaaccagtatgttacttctaatcgtggccatccgtgaccagatcagcggccatgcgattgtctctcccccacgcccgatctcgacggcgacgttgccccgtcgaacacccgcccaaggttctagggcataatccgaattctaccaggaggaaaagagggcgaacgctttcgtgaacatgacggggtggcatacaagtgcacagcacggccggagcctcattcgcggagtagcgcggttcctcgacgcggcttcatcaccggcaagaaatcgcccacgctcagc

SEQ ID NO: 130446 - DNA, 282 bp, Zea Mays
catcatcaaggtcacacccattgggtgcagcatcagtcgggtcacacccattgggatcagcttcagcaaaaatcggcactggcacttcctcagcagcaggagcagaagggccggcatcctgattcaagcatgacactcgccgaagacgtctctttttctttttcttcccctcagcaggagaagttggatgattggtccggcgaggacgctttaggaaaatactatcagacctctgagtgtccaaagctttgccagactctgggatgggtgctacagccagcg

SEQ ID NO: 130447 - DNA, 325 bp, Zea Mays
gttcatccatagagcttggtgggcaatctgctgacgagttatttacaaacttagcactctgaatgttgcactttttacttatagaccactgtgcgcgcttctttcacttatagaaccgagaaaggctatctaaaatcaaaacatatggttgtcagctaacaagccaaacatgagtaaccactaagtccttttgaccttaccgcacctcctccatttcctcagtttggcagtactcccgagtgttctagacttggtctgctcaatgttgagtgctgctgagcgctacccacttccgagctctcctccctgtagtgctcccctccct

SEQ ID NO: 130448 - DNA, 570 bp, Zea Mays
gtcactttcaccggataccgcttcccagatacttgccaaaatgttgcccggaaagccctccgacaactatgccagagctacaacagagtgatctttgaaaccccccttcgctagttcccacccagcaacaaaaatacacccgtctggaggaaaagacttcaggccctgtcaggaggagaccctatcgaggatgaccccaccattgtctacatggctggatacctccacaccctcaataaccaatatgatgaccttgcctcccactgcactcacctaaactcccgggtggaaagcctggagcaaaaagtcatagaacttacaagggaaaaggcgccccttcaagagagcctcgagatagcagaaggcgaggaaaccaacacccatgaggcctaccgcacactgaagatggattacaacaagaagctgaagaagctcgcccacgcatgaaaaatccgcaagaagaccaaaagtcaaggatgtcagactgagtagaaggaagaagcccctccagccctacctcctaccaggataagaaactcgtccgacaccgaggaaatgtccctagccagc

SEQ ID NO: 130449 - DNA, 783 bp, Zea Mays
cggggattcaatcgagcatcagagaggtttcataccgtgcttcgaagggtgatagaaccagtcacaacgacgcacagcaccttggtcaccaagtgcggcagagcccaacgctcggcgagaaattcgaccagcgcccccaaaatttcccctatggcgctagagctgtagtgaggccggacgacgggctccgcgtaacagccatagcacgagctcccccaagttcttcgcgtggcgcccctctaatttctctctctccctcactcggatctctagcaacacccaggctatagtccgacatggaggtcgaccgcaccacaacaacacagcgacgggattccagatttatagtccgggcgcaaggtcaacgaatacccgacgaaatcgcagcaaaccaggaggtagcgctagcggtccggtttgttcgggcttcagttaggtgaagaaggaaagtgatgacatgcgggtcccacatgtcagtgtgacgccaagagaggaggagctgggctgctagaggaacaaatgggaaattgggccggcgtgagagcaagggagatgggccgcatgcggcaatttcggcccaggtgaggtctttctgtttcttttttttagttcatttctccatttcaagcttcaaattcaatttaaatctaactttaaaattcaaactcttattcaaaagcaccaacaaaattccagtatgcaaacgcaaaaatatatatttgcttattattactcttcattaagtagatgttccaaatcatataaatttacttattgtttgtt

SEQ ID NO: 130450 - DNA, 345 bp, Zea Mays
aaattgtatgagatctaattcataattttgttcttcaaagtccctctaaatcttcaaaatatgcatgagtttgaattatcgattcctactccatggccaaactcatgcaaatacaaatagatgtttaggtaattcccttattggacctaagatgcactcaaacttaaaaataaggatctcgggtctgtgatcttgacaattcacttgtagctctcttatggtcatattttcatcctaaactatacccttgtttggttggtgcaagctgatgtttctattctgctttgcctctccatgagaatcacattgttgctttctcaatctaacctaggaaaggaatgccca

SEQ ID NO: 130451 - DNA, 539 bp, Zea Mays
agataatctttttcccgaagcgtgtcgtacaatataatcaagtacttcagaagatgcttcgggagtaggagtgacagtttttcaggcagaatttgttctatagcttctttttccgtttccttttcttcggtttccaaggatttctccttggcgggctataaaggcccagtttcggtctcgacctggctctttgcagcttcggctttggttagttttgtctcagtctgcgcttttgaagcttcggcagttttccctggagaggagcttgaagtctttatcgtctccagcacatctagtacgttgaccatcctttccctcttgggggtcactgtaaggcctttttgtgccttcggcactttcacttctgccgaagggcttgtaacttctaatatctttgttccttcgacccctatctcttcaatattatcggccttcggctcagctaatttggctgaggatgtcttcggcattgcagccggctcttcaatcttctgcgtaagcgcaggttctttggcttcagtagccgaagaggtctcacc

SEQ ID NO: 130452 - DNA, 556 bp, Zea Mays
gcatcctcaggcactgactctgcggtgacgtgattgacccttcctctgctctggttctgcggtgtcttgttctgagaagatccacgagcgggggtgttctggtcattcctctgattattgcctttctggggtgtctgctggttgcgccttgggcagttgttggcatagtggcctagctcactgcacttgaaacatccattgtgttggacaggtgcgttgtttctggcctgcgtgttactggcgccaccttgacggttctgagaactcccaccagacctctggttggtctgagagttactcctttgttggttctgattttgattatttctctggctttgctgtccagagtgttgcacttgataattgtttccgccttgatttccagagcggaactgcgaaccttgagcgttgttcgggcgggtgttcctgcttgactgaccttgaaatttccttttgtggtcagatagctcctttcttttactttcaaggccaattgtcttgttcagcagtgtctggaaattgggaaatgtatggctctgaagttgataattcagag

SEQ ID NO: 130453 - DNA, 383 bp, Zea Mays
cctcaatcaaccccttcttcttcacctccatggctcctcggatggggtcatcaacctccacgcctccccgtgcttctcaggtgtgttccacacttcccattctagacttctcatgcaatctgcatgaaatcaaatgtttgtgtgctcccttgtatgcttttcattgcgcagaaaataattttactctgccagccacagcctgccttatgctcctgattggcacttcctcatcttgctcccagcagaaagatgaataaaaaataaaatagcagccgctaactcatgtgtttaatctaagtttaatcttcctaggtgctaggcagtggtatagggcctacctagcgcgtacacagtgcaagataacaaggttggagcatcagaga

SEQ ID NO: 130454 - DNA, 704 bp, Zea Mays
cgcgttggggtgccgggaagggctcagggaggttcaggggagtgtggcgaacatgaccatgggcacaacatcggcacaagggcattagagggcgcggaccgtggtagagtggcccaatggtggcgcggacttgctccggcgagcaatcgtgcgaaggatagggaaacaaacggggaaataagggcatggggaggttgctcacctcgagaggaaagtctagagtgcttgagcaacgacgggacacagggagacctcaggtcgatgacagtggggcttcggctgcaaggggagaacatcgatgagcacggaccgggcgaaaccgaggtgctgggggcaaaccagagggtgtcccgcgttgctggagaatatgcggagctcaccgaggcaacagacgcaacagatgctcgacgacagccacggaacggaggcggatcacgtcggagctccacgggcgcgtgtgcagagcgagagagagagcgagggagtttggctgggggcgtaactgggcgaggggagtgagtgagtgggtgcggactctagaaaagggctcgggcacaggggacgtggctgggaaacgcgcggtcatgggcgcgtccacgacggagagcgcgagcggggcgttagggaagggagcagtggctgacaggcggggtccacagaccagcgaggatgagcgggcgaacgggcggtcagcgctgacaggg

SEQ ID NO: 130455 - DNA, 342 bp, Zea Mays
taccgagttagcagctgctgcaattcctctggtaactgatggacaatggcttgatccttgtcagtgagaatatctaaggaagagacctccatagcagtacactgcaggtcattgacccccataccacacagcttgattgaagaaccgtggtagggtataatcagccacttatcatcccagtggacccacatagggctgtaggaactcaaccagtccatgcctaagaccaggtcataatgagtgagatggaggatctttagggttgatgaaaaaacatactcattaagataccatgtgacattggccagttcatgttcacaggacaacctagagccattggcc

SEQ ID NO: 130456 - DNA, 544 bp, Zea Mays
ggagtgtccaaattagaggttgtcgcatgggccgacgtgcgcagtgtgtagaatgggcgataggaatggaagatgggaattgaaatggcgtgcggactatggagtttgcacattgggaatgggcgatgggactggaggtgaagtttgcacgatgggaatgggcatcgggaatggaggccgagatgttgggcctgaacagctgaagaagggcgtgcatcagggaatggtttccacgatgttgaaacagtgttcactctccactattatgttgaattgttaaatgtatttacatgtcgttggagtgtcataatgttcggttgtactacatatttgggtgtggctaactttcactactgttatgtacataatattgtgtggttgaacttttaaattaccactaggtatgtgcccgtgcgttgcaacggtgaacaaactactttctacaaaatattagtgcacaaagattaaaaacgaaagcacatatattatcaacctcaacatctcactgaaaaatattcaaatttaaaattccttgcaatttcga

SEQ ID NO: 130457 - DNA, 391 bp, Zea Mays
aattttgtgaagcggtgatgctgaagtttgggtcggaggagtattcacaggctatgcagtccttgttggaaattaggcagaccggatcggtggagtacaaaaaggtgtttgatgaggcgcggtatgcaacttctgtccataatcatgatttagatgagactttgtatgtggcccatttcattaaggggttgaagcaagagctgcaaggaccagttaagtctcatttgccagcttcggtggaacgagcagcgttgttagccaggatccaacaaggtattttcgacaaacaacgacagaaatcattcaagatggtcaatccgggtcgactggggagtgctgtgtccaggtttgacactagtgggtctacttccttacctgagttgtctaaaga

SEQ ID NO: 130458 - DNA, 852 bp, Zea Mays
cgggccagtaccaatgtgaaggttataggacagtgtgctcttggcatatcgggggatatgcttgatcaacatgagatggggctcacggggatcatacataaagagacgtacttgctatacaacatatgccaagtcgggatgagtgagcataagatactgtaaagcgccgacgaggctccggtatgtgatcggatcagcagcaggcgtgtcgtcagtggaagagagatcgataggagtgtcaacaagagttgatgtagtgtgacactcggccatacctacccgctgtaggaggtcaatggcatactaccgctaggaaaggaagatgtcgttagtggagcgtgtgacgaagatgccaaggaagtgatgagagcacctaggtccgtcatgtctaactcgatgtggagatgcatggtgaagtgctacaacagccgtgtcgagtatgcgatcaggacgatgtcatcaacatagagaagcatgtaggcaacattgtctccatctttgtaaacaaagagggacgtgtcggaggctgaagcgatgaactcgaagcggtgtatgtatgtgtcaaagcactggaaccattcccaagagcctgcttcggttcatagagggaattctgcaactgacaaacatgattaggaccaaaggagtcaataaagccagacagctgctgacaatagaccatctcctcgaggtggccatgaaggaacacattcttgacgttcaactgttagatgggccaggcacgagaggtcgcagtgctgaggatgacatgatcacatgaatggtggcaggttcgaccaccaggctgaaggtctcattatagtcgacgttgtgctgctgtgagaagcccca

SEQ ID NO: 130459 - DNA, 278 bp, Zea Mays
attcaagcaaggtcaccagcaccagtatcagtgtcagcaccagcaccagtaccagtggcagtttcctcagcagtagcagcaacagtactgtcagaacacctagcctagaggaaattagttccaacgtcagaacaaccaggcagctcgtcttcctaccccagaaaccaaccagaatagccaagcagccctagcgcaagtaggaggtcgtgcatgcttctactgtggagaacaaaatcactgggcgaagaactgtccaaagaaagcagtctagctaccgc

SEQ ID NO: 130460 - DNA, 588 bp, Zea Mays
aactttcttcgatttaaagcaaggaaaagaagtattacctccgaagctgagagggtatcttcggcagattcaacagccactatttttgaaaccactgcagcaggtagtatagtagccctttctaaaaaatacgacttcggccggtgagttacaacttttgttcgctttggcttcggcgcggcagaagaagtggttgatgcagttttccttttcgtcccttgtttctaagccaaaatgtagtagtcaggatagacaaaacaaataacatcaaatactctattcagccttttctttcagcgggcaccaaatgcaatattcatggcttctcatcaacgtttgggtctagcccttggctcctcatcgcccaaataaaaaccccgattctaattagagcttcgggagtaagctgatgaaggtatatctcgaatctttttagcacttcgaccagcatcttatgcaaaggaaaccgaagaccagccttcataaaacccttgaataccaccacttcgtcggctttaggaagatgaatagtgtcctctcctcctaccttcactatggatatatcacgaaaatatttgctcttcatcg

SEQ ID NO: 130461 - DNA, 410 bp, Zea Mays
ctagatcccatctaatctaatatgatctaatctaatgtgagttatttaatggattggttaatacaggtgaaatacactagaccctacccctatgaacatgatttaatccaaaattggtgtcctaggtcgacttggccatacacaactacctaacctacctgttggggtttctagttcacctaccccaaaactaaaaacaatgtaaaccttgtttgacctacctaccccatgtactcacaattgttatcccaactctgatagcagtatctaacaccaagaccgatggtccgtaaatcagactcagggagaaggagatcaacctcgacatggaagaatacgagtcaaattagatctcgagatgattcaagattcaccacccaagatagagtccttccttaccctactatgcc

SEQ ID NO: 130462 - DNA, 369 bp, Zea Mays
aatgaacctgcctctcgtcgtcaggaatttcttcaagtgaggcaaccaaagcactaacttctttgggagagggtcgcactctaaagcccaaaccgctatcaccagcaggaggatttgacacaaaactggtaaaggccttggaaggaggcagattctaggccgagtatgcaacaggagcgtcgatgttcgacaccttgcctctgagtatcatctcgagccggctcaccaagtccacagtaggaattcttctgttggttacccgggttgcatcagctaggcctcgatacagatatgcggggtatgctctgtctttcagtggctgaatgttcttgaaaatgaagtcggcaaccacagcctctgcagtcaaac

SEQ ID NO: 130463 - DNA, 497 bp, Zea Mays
cgtgaagagctgcttgagtatgcccaaagtatcatttcaggattgaagagaaatgatgaaattgtgaggtgatataatagaatcagctaattacctgtgaatatattataacgatataatagaattttgaggtaatactacttttgttacatctagtgcttcctgttttggacatacatgtggtcaggctttctaattttttgctaccaatatagttctggaaattagttggaaaatatgataattgcatgtagatttgtaatttgaagtactattatacaatttcaagttattaaatttaaaccttcctttgtaatagtgcatacatatgctacacccacctccgccagcatttagcatcattgtattatcataaaaccataatttctaggtagtatttagttgtgctagtctattaggtgaatgcttttaatcattataccattttctgttgagctttactaaggaaagtagtgactcgactcgtgaatagctga

SEQ ID NO: 130464 - DNA, 298 bp, Zea Mays
tgacgtgactgctacgtagtcatgccatcacttcaccccacaatcccaagtaacaaaataactctaaccgaacttggcatttagccgatcgattcctaacccatttttcataccaccactacacgacatgcctaatacgttaaataactcattcacaattcacctacatctttaccaaaacattcccccatcgcttgaaactcaacctaagcttcactacacaattttaggacatctgcttaattcatgaatatcatcgtcacacacactgactcgatttgaattaaccacacatgtc

SEQ ID NO: 130465 - DNA, 849 bp, Zea Mays
ccatattgtgtttaactgttgcaaatgctaatccgcaagagttgcaatttgttattcatttatcattttatcattgttttttacttttagctaagaagtatcgctgacacgtgctacgacgtccccatcggtgctctagcaatattacatgctccagtaccagcacctgccccagtagcagaccctaacccaacagcagcacctaacccaggagcagcagcatctgccccagtagcagcagcacccactgctactggcacatctgctgatgtgcttggcacatcccatgatcctggcggtcatgcttccttcaatatccaacccccagtcttttaccagtaccctagcttcagatcttcttttggtcagagcattatcgatttagttggaaggagtaggaagtcagatgcgctgaacatcttgaaggcttttgatgacagcactagtgaaacccagtcgtacgcacagaaggctgccaagtattcaacaatatcccgtgaccttatggcaaaagctcaccacgagtgctacattggcattcagaagcttatcgctgacgctatcgctgagaagtgagctgccaaagagcgtaggaggaaggtgaacaatgacactagagcaggagcaggtattttttgttgcatatagcataatattattgttgcaagcacccaccatacaagttgcaatttgaccacacacatcaatctgtgttttcaatcatttttaaatttgtatgcaggatcaggaactacttcaattgcaccggaggaccaatctggaggaggtgatagtgaagaaattatacggagtcccgttgcaattgacactagagcaggagcaggtatt

SEQ ID NO: 130466 - DNA, 470 bp, Zea Mays
aatggtaatagcttaaaattcacaacatagatatcagtcatggctagccaatactattatttgtagtttgtgctaaccttaatgatcatgcatgaatgatcagacaccctgcaacgatttaaatatgaccaagcatctcaagagtacagttttttactacctcctctttcttcacaatgatccaggcagctaggcaagaaacagacttcactcgccacttcaccaattatcctctggactaaaagctaagagccactattgttcaacatcacaattttactcaataccatcatgggtgaagcatataacaccactaacaagggcatcaagatgtgaagcaatcagcgttctagatcatgtataaaccatgatccatttgtcatttgttgtcaaaagttgatactgaaagggccttttcccacaatgggagacaccatcagtactactcatagcgttaagtttaaatccac

SEQ ID NO: 130467 - DNA, 563 bp, Zea Mays
tgaatgttcttgaagacaaagtcaataaccacagcttcagtagtcaagtctctggctttcaaaccagcaattttagttaacaagatccttgctttggcaacttcagagtcggttagggcctctatccaactcggcacacgaacatttggctaccttctagagcgtgcaggcaaggacttattataattctccatggtaagtcactcaaagcgccatcccttgatgctacccttcagagggatatcaaggtactcagcctttctaccgcgatggagttcaaggttggctccaccaaccactccatgttcccccattcctggtttgcaatggtacaagtacttccacaatccaaaatgcgggctaatctcgaggtaggcctcacagagatgaacaaagatagcaatttgaagaatagagttgggattcagattagtcaaattgagagagtaaaaattaaaaaggtcgcggaaaaatggagaaacaagtaaacctaggccccgaatcaagaaaggaacaaagactacagattcatgagtatcctccataagtacggtgatcccttg

SEQ ID NO: 130468 - DNA, 570 bp, Zea Mays
gcacaaccccagaggatggcgtgttgaatcgctaaaaggtgaggggttcttttacaatttcggctaggcgaaagggtacggtgcgatctgaaccgttggatcgcaagccgagcgcccagattagattgacaagtcaatgaaccggtataatccgccatacgttggattgaagatctacggtcagtattacccggacgcgcgctctaatccaagccgctagatctcgatcaaacgctcctctgctcttccacccaatcggtatgctatgctctaatctgtaccgtcgtccacggatccgacggtcacggacccatcgtcctccttcatgcccaggtagcggcggcgcactcgcgccccgcggcggagcatggccgaagacacccggcccgattatcctgtacctcgcgcgcctaacccagcgatcctacgcaatgccggggccgaagcaaaccaacggagggaagactcaccgagaattgtgaagctgaatcttgtgaccgcagtgcacgacggaagtcatccccggcgagcaattgaccgacaccatggttctccaccgagcccaaatac

SEQ ID NO: 130469 - DNA, 297 bp, Zea Mays
gttaggagagactaatgggccagatcaaggttgaaggcccaactcgcccatgtgacagctcccaacctcgtcgcaaacaactaaccaaagaaattctactgtcttacaggtgaatattttccacaaattccaaattcccaaagcgcatcacccgaatgaggaaaaagaacaaaaagaataacctccacttctctttacaaaccgggtatgacactctacctcccttaaaaagaattcgacctcgaattctgacgcttctatcggaacgacaaaagggaaaaaattaatgaatcaaca

SEQ ID NO: 130470 - DNA, 664 bp, Zea Mays
tcggcacgagggatttgattcaagagcatattgcttacagagtatgtccccttgcaagtggatgggaaatgtcgaaggaggctgccgctggctccagccaaagtggcctgatttatctgaagtacacattttggttcagggatcagtttgacgagccaaatgatgattggttggatgctatagaggcaacaagtgatgagctgcttggagcctactcgtgggctgaagacaaagctatgacagtcgccttcgacgctcgagggaaaaagagactgaatatggttttcgatgttatcaggtttatctaccttgactattgttttcatgttcggaaacaaaaggggaaaaggaaaattgctacttgagcatcttctagtgcgccaaaggcgatgaaagtgaaggtcttgacacgtagaccacgacgcattgagatggtcgatgtaccggagcttattgaacgtgcaagagttgccccttctgccacagaaccaggtcatgctgtgccagtcgaggctagtacaaacccggccaaagagctgaaattagagaagacaacagatcagttgaaggtgttgagcccaccaggtacaataggattaccaaagccatcaagcgttcccgcagtgactccaaggaaaagtagaatggctagcgtgctagaaac

SEQ ID NO: 130471 - DNA, 563 bp, Zea Mays
tgacttttcagtcctttgtctcttactcctccttaactccaaatatggagtctggtcatggacactcgagggcagagaatatgcctgagatggaccatctggagctactacttccttatcccgcataggtaagatgctctcaaagaatgtcacatcacgagattccattatgacatttacagcgacttcgctcgtctcggaatggaccactagaaatctataagctgcattgttatgtgcataacccaggaagacacagtctacggtcttagggcctagctttctcttcttcggcaacgggacattcacctttgcaaggcagccccaagtccgaagatgcgaaagatctagcttccttcttttaaatccttcatagggtgtggcctcacggttgcgaggcggtaccctgttcaggacatagcataccgtgagtactgcctcgccccaccagatgtcaggcatccccgaactttgcaacaaagcattagctaagtcacacatcgttcggttctccctttcagctaccccatttgactgaggtgaatatggagcggtggtttcat

SEQ ID NO: 130472 - DNA, 697 bp, Zea Mays
cttacccggcttatctgtacagaggcctagctgactcgactcgggttaccaacagaaggattccctctgtagacttggtgaaccgacttgagatgattcttaaaggcaaggtatcaaatgttggtgccccagtggcatactaagcctggaacctacctcctcccaaggccttcactctttttgtgtcgaatccacctgtcgctgatggcagtttgggccttagagtgcgaccctctgctgaagaagttagcgccttagttgcctcgctcggggaaattccttatgatgaacggcaggtccactttgaggtgcctttggatcccagtgatgcagagataagtgatatgctcgatatgctggctgaggactcttctgatgctgctcctactgggacattggtggtggcgcctctcccagaagctggtataaactcggatattcagaagcctgtcagtgttcgcccaagacgcccttcccgagctaatcaacttgatcctcctgctgatgagcagaaaaagaaaaagagacgtctccggcgagtatctagcttggatcaggatgttggtcctttggttcctgctgctgaagaagtgcatgttcctgaatttactgacgctgaccccaatgggggtgctccacctgctgctgaccccaatggatgtgctccacctgctgctgaccccaatgggtgtgctcc

SEQ ID NO: 130473 - DNA, 439 bp, Zea Mays
cagaaatagaagtaaaatagcctagaagttgggctgtaagtcggggttggactgaagattagactgacactggcgttaggttgatttgagagctaaattgtgcttgatcaagtggaggtatgaacaagaactctataacaaaattaaagttggtatgatgggcaacaatcttgctatgatcagtttgatcggttgttgaacgaaaaccgacgagaaatgatccccaaatcgctctgtcacgcgcgcgaaatagacattcccatggtacagtacactgaagaagatcaagtgtcgtgtgctcgccgccgatgttccgccgccgtgattcgagctcacgccacgattagtgccgccgagatgtggatcaatacgtggtaaaaagatctccggctcggattcgatgctcggattaccattctagacacaggcaccagtgtcc

SEQ ID NO: 130474 - DNA, 409 bp, Zea Mays
cccggcccgaagcatcaacgggccgtgcctggcccggccctattcgtaccgggccgaaacgggttcgggccgggtccgtgccgggtggcccgtttggacatctatacttccgccacggcaaccattcggactcagactttgcaacaattcggatatctgccacgactcggactccgattgcccggggctcgattcgtggttacggtggactcgggataacaaaagaaccttccacacgaggaggacggcgacgatggcgacagaagatggagggctcaggaggaaatgcatcggagtggctaatatgtccacgatcaaattcatatggacgagttttagggtcaatcagtctacaccaccctaacgacaaacattatgacagccaacctcccgctagacaggattactc

SEQ ID NO: 130475 - DNA, 487 bp, Zea Mays
cgctcttctctataactcctaaaaagaaacaaacatcaccaagacatcgcaatcactcaacaattcaaggcaaggaccagaagcccttaccttggtaaccacgaccatattctaggtgagggcgtgagtcgccgcccagagagatttatctgccacctagtcgatgtcttggaagtcctgccacagctgcatctcctcctggtcgtcaagggtggacacgagctcgtccctataggcgacacgatcccgccacgagagccacgggcctccccacatgttaggattgcccccaatggaaataattgcctcgcccgagctcagcgtcggccaactgccccagtagacacgcattaaatgccacctactctcccgtgaatctcgcagaagaccatgccaagcactatttcaactactccaactcgacacttttgtgcccatgtacacgctagggatcaagcacatgcccatgcttccgagcctagcgtcg

SEQ ID NO: 130476 - DNA, 682 bp, Zea Mays
atgacgcatcaaagcccataggttatcagattttttggatcatacgaaggcataggttcagcaggcacacatgtaatcaagagcagcatgacaagaagcgaaggacacgatgaatctcaccaacagctagaatgtcaaaacagcctcgcagacgcaggtaccgcgacagagggatcaaatctaccccaggtactagggaatgacgacctaccgtcctccccaatagggacggacccagcaagaatatggatttacagtttacacatgtttacccaataacttttttgcaaaaaaataataataatcgaagttagaatgcataatacacgtataaacttctaattcgatcagatcggaatacaaatagacaaatagctcatgttggggttcgggtgttcggtttcgcacagcaggaagggaaaagagagggtgggcatgcctggtgcgtggtcgtcgtcggcaaagctcaatgaaagcctggtcaccggacgtagggcggcggctgcggcggtagcccacgcccggatgaagcgaacgcggggtgaacgggacacggcaggtttatcgaatgcggattcggtgacttccttgggaaagtgagtttctccctgctagacttgatcatggaccgttcgattcgaccgatataacctgtgcaaaaacaatccaacccgacctaatt

SEQ ID NO: 130477 - DNA, 465 bp, Zea Mays
gttcaaaataagtaccaaggtaaagatatagatattttacaagggttaaaggcgataacaggcaagggtgtaagagataagaggtgaaggtgcacaagaaacaagggtatgagtacaataaagaatagagctaaggtaagactggcacgtgacaaagatgagattacgaccaagggtgggataagtagaacaccactctcgaattgagaggggagaagggaggttttaagtggcagacatatgacaagcatcaaggtaggatcacaagggtaaaggcgatagcaaacaaaacacattaaacaatgaagttgaaagtttgcaagcagcaaagaataggatacatcaagaaaaatgggtaagatacaactttcaaattgagacagacgagagaagattttatagagggaaggtataagcaacagggtgagatgtagaggtgacaaaggtgaagatgatatcaatgaa

SEQ ID NO: 130478 - DNA, 703 bp, Zea Mays
aattcgagctcactggtggatgattgctaacgattagcgggggctggctagctgatgactttgcggaactggtgggggctcaatttatagaacccagaggcggcggccgtgaattttgagcaagacgcgcagcggtcggaggtggagaagaacactggcgcacgcgaattagtgtcctacgccgtggcaacctcaccggcgttgatttgacagcagtagcgagttacggcgacgcggtggaagggttgagccacgcggcgcatggccgggaggcggcggtcgtcggtgagcttatcggctggagccgcaaaagcagaagggcggcccacggtgagtcaccggagttatcccagggggtgccttttacctggcgaccatatcgggttatcggcgacacgaatcctactgcggtggcgtgaatcacggcgagggtcgccggcggtgaagatttctttgctgcggccgatcctatccgatcagttactgtaccatggcgacaactcatttagacagcctgtcagccaaacttggagcatcattttctcttaatttctaacgacaacactagtcaagctctacagcaaaagtgtagagcaatactccatctacaactttgtaacatgatgatgccacaaaaacccattggatcatgcttgaatttaagcttgaagttgatggcatcaatctgttagtctgattttca

SEQ ID NO: 130479 - DNA, 424 bp, Zea Mays
gagaactgcgctaatgatgtagctaaacttctatctttctttatggcatgcaagaaacagaatccacaattcttttgtgattttcagctaggcaaggatggaaaaatagtgagtatttttttggtcacacacaagtatgcagggggaatatgtacattatggtgatgctgtgacctttgatacaacacacaagaccaatctatatgataagccactgggcatgtttattggagctaacagccatctgcaatgtactgtgtttagttttgtgttgttgggagatgagactgttgaaacatttgaatgggctttcaatgcattcaaaacatgtatgggatgcgagggaccgagagttatgctgacaggtatgtggtatgtgaatttgttatgctaattcgtcatgaaattaaaattaaatgaatgt

SEQ ID NO: 130480 - DNA, 691 bp, Zea Mays
atctctctagctagctttacgcgccctgggtacagttcttgtagcagctgtcgacgcagctcatcatgcagtaccccatatacctgtcgttgtagctcaggcatcgctggtactcgccacccacacccatggctgcgttaacagcggtacggcaagactgacagcagctgcttgcgtgggggttgtcgcaggaacagctgctgtcgcacacactgtgcacacaggacttgccagggcagctgttgttggtgcagctgccatagcacccttggaaggcgccgtcgcccaacgccgtgcagttcctggcggtggcgttgtagctggcttggcaggacgtagtgcactgcgcgccgcagtcgctgtagctgcagttgatggtgggtgatggcgccggcgccggggtcggggtcggggtcggcgtgggcgccggcggcaccaccactggcggtggagtgggctgctgcccagtgtaagggcagtcgaccggtgatgcgggcggcggcggtggctgctggcccgtgtagtagtaaggggaagcggacgacgattcaggcgccaacggctgctgtcccatcgaggacgaggagtggagcagcacgacgcacacggcggcgagcaggcaggcctccttcacagcagcaacagctgaagccatgtcggtcttgcttggatgatgggaccagcagcaaga

SEQ ID NO: 130481 - DNA, 450 bp, Zea Mays
ctcattcagcgaggagaacgcagagcgctcacctgtcatgtgatttgtggctcccatatctaggatccaccgcgcctcttccttcactttgtcaccaagctgaatgtacagcttgtcctccctgagatgaacgacttggtgcggccccagcgaagccgaggcgtcgtcgaggttctcttgtatgtcgatgacgctggttctcgccagtaacaaagcttcgtccacctcttcagtatgcacggcgtgggattgctcatcgcgcttcttcttcctgcagtctcgcgcccagtgtctagtatttttgcaataacgacattcgtcgttcgcgaccatctttcctccacgaccgctgttgcggccactatgtctcacaccgtttcttccgtgcccgcgtcctcggtcacggaaatttccagacaccgacgagctcccaccaaaacctgatggttt

SEQ ID NO: 130482 - DNA, 560 bp, Zea Mays
ggtactcggcgctggagtttttgtaagcagctcttgggggcggcacgcgagcgctcataggaagttccggtgtgcagcgaacctgcggtatggcctctccctaatctaccgtttctcatttcgacgtccatccatgcgaagctggggaagagtctatggtcgctcggtttatggcgatgtcgatgtgtagggcctggactgtgtaggccggtagctgggattggcctggtgttgcgcatcgcggccgactgggtgttcgggttgggcaaatggtgcctggtgtgcgcgtagcattggagaagatgatgggttggccgttggattggcaacggagggctgtaatcaggcgtgcgcatcgtgtgagcgttggcgtcgcgtgggccgttgatcgttcgatgtgtggttgagatcaaaccgcgcgcctgttctcatcgcaacgccctcacgtgtaatcttagccctccatccgtgatcgcacggccagtacttcacgataccccttcggcctggcataatctctaaagagtccttgtccttttaacaaaataacccgccgtcca

SEQ ID NO: 130483 - DNA, 768 bp, Zea Mays
ggaagaagaaaaaactgccggctgctgctgcgcggtccacgtacgcggcatgcagtggcgcaccatgtgcccgtgtcacacacacgttatgggtttgtctgttgcggcaaattaccgtgcaggacgggacgggagccatccgaatcgcatcggcatcgcactcgcacgggtgctctccttaccgaaaagacccgttgtccggcggcctgtgtagtgtgcgtccaaagatagtgtagtaggatacgtatgtactagtattgttgtttgcatgtacttgtcgctaataatctggggttttgggaatttacacaagcgttactgtttaggaggagtaccctcgcctcggtgaccgcaagtcgccggcggacaagcgattctgacaccgcgcggacggcgagaaggacagaggtgactggacgaccgacccccctggccccaccacgtcgacccaaataaaaaacgccacctgcacgcggctccacctaccactcgattcaccacaccagtcgtccttccttctcattccccaagccaaacccccgggctccatcgaaccaaacctatttgaatcgccaaagccggtggcggtgggtctcactctcacagccctccgctcctcgtcctcacccctgcttcgcttgcctagccttccgtcgtcccctgctgtcagtccccgaagacggcggcgccgccggccatggaggaccccctcgccacggcgccgccaccgcgccggccccaccgggagcggcggcaccggcggaaggc

SEQ ID NO: 130484 - DNA, 828 bp, Zea Mays
cgcaagaagaaacgcatttatctatctataaatcaagctatagccctactgtagagaacgatgcacatcagtgttgcagttgcagacatctcaagctacatgtatcaaaatatgcatgcggcatagcatggagctacatacatatgggctgagtttgtactctggaaagaaattacatatatacatgcatgctgaacacaagttaagaagggatgaatgctaataagaagagtgagcaggatctctccatctcctttgtggaagaccatgatgcatatatatcagcatgatggcgttccccttttcaccttcccaatcccataaaatccgttttgccccctctttcccatctttcagtaagaccaaagtcacttttcttgcaagaggttcagcgccccatccctggcctcctaagtttccgacccatcccatcgcagaaagaattgcacgctctacacagattactgggaagaagttagggaaatctagccaaagccggctgatgagctgacgagagaggccggtacgtacgcgtggcctcttttatgtcctcccaggctcccacaccacaccacgccccggccagcatagtactcgcatcgcaggctggcaatagcatcgatcgaagcaacgcgctgcacatcgcacaaggaggccgggaggcaagagctggcaactgcgcagaggcagccatcaggtttgtacacccctacgcattgttcctactcctacagcaacagtgcatagcttggttcgtacgccgatagtcctcctcccctcaccttcatgaattcctggcaatgtacactggcgccgttgttggcaatg

SEQ ID NO: 130485 - DNA, 291 bp, Zea Mays
ttaggagttttgtttcaatagaactacttgttttgtggtgctgtgaggtgaggtgtttgatcttcttatacgttcatctggtgtggatgttttaccattgaattaaaatgaattgttgaagttggtaagggtgtgcttagtgcatattaccccttcataaaagattgtcgttttaagacattgatgctgatgtatggctgcatccaaattcgatgttgtgaaatcgtagtgttgatcgcatttatgacttgctttgagcttcattgcaggttgtttcatgcttgttgtcag

SEQ ID NO: 130486 - DNA, 500 bp, Zea Mays
aacctttcgggaagaaaggaaccaacttcttagaagattggaagaaagaatcagctcagctgaatgcatgtctgggagacaatggcagcctagaagtaaagccaatgctagaagacctcatatgcaaggctcaacgcctggacactgagacagcaggtcttatggaaaaagctcgcaaggaaccactttcggacttcaggacagatgaggaaggagtcctttggttcaagaaccgtctgtgtgtaccaaaaggagaggcacgagaagttctgcttgacgaagctcacaactcagcctactctatacacccagggaccaccaagatgtacctagacctcaaaactagatactggtggagaggaatgaagaaggagatagcacagtatgtggcccggtgcgacacttgccaacgaactaaggccgagcatcagaagcctgcaggcctattgcaaccccttctagtgcccgaatggaagtgggaggaaataggcatggatttt

SEQ ID NO: 130487 - DNA, 640 bp, Zea Mays
taaaaaccgaacgaagtataatttagacagattataatcctaaacaaacaacttcatagtctccatatgacctgccacttccgaggatatcgataaactgatgcttatatatgtccaaatccatgtcattgttatctgttttgtcatccttattaatcttatccacacaaattaaataataatcgatcttattagtactcattactttgagtttaactactactagcttccattgttctatattactccatagactggaacaaaaacctcgcgtttacacgtatagttttaatgaaattgaatgaaacctgctaaaataattcatcacaatagattttaacctgtagggattaataagactagacctatatataggacatttattaaaagcgaaaccctaaaactaaaactttacattaacacttaaaaatttgtgcaacattgattgaaacttttagcagcaggttacttcatgcatcctagacattggtgcgtctagatttaaatatggaccctatgttgaaaagtagacccataaaataaaaaaaagccttctttacatcttgaagttttcatggaattaactgaaattagttggaaatgactcgttataaccgaggtctacttcatgtagatgagc

SEQ ID NO: 130488 - DNA, 431 bp, Zea Mays
cacaggcagcacacccattgggatcagcaacagatggagcacccacattgggatcagcaacagaaggggcacacccattgggatcagcagcagattgggtacacccattggggtcagtgtcaataaattcagttacaggcatttcttcagcagtaggaactgaagtaccagcgtcccgatccaaactggacactcgccggaggcgtctccttttctttttctgctcatcagcagaaggatcaggctgattggcctggcaagagcgcctcgggcgagtactggcaggcttctaagtatctaaggtcgtaccagcctctgggaggggcgccaccaccgatgtcccagcaggagcagcatcagaagaatcctcagccagcaaatcaagcatagcacttatctctgcatcgctgggattcaggggcacctcaaaa

SEQ ID NO: 130489 - DNA, 371 bp, Zea Mays
ggactgtcctcgtcatcagataattgaagggattgccaaacttcctcaacgagatgaagttggactgaatcagcacatcggtggccacaggaatattgcaacccacacttgtaacagagcccttttgccttgcggtaagcatacaatgcagtcaatttatcttcaaccgtggagggtttagatgtcgatgtgtccagcttggctgaggatggatttttgatgtccaaggtggcgaccgaagaagcatatggcctcggtacacctctggcatacgtcttggtctcgtgaggcttgtgcgcgtcgtgcacctcctcctgcaactgagcaagaacatagacagtatcgagatcgcgagggcgttgcactaaaac

SEQ ID NO: 130490 - DNA, 447 bp, Zea Mays
agcacataatgataagaaaagctacaaaaataatctgttttgcaacaagttaaaatattctcaccttcagactgttataggcaaggctatctgcgagttggtccttcgtcattacagataagccgagttcaagtttcgggtatcctacattgtctgccatctcccagcagacatgaatctccttattgtctggcagacaataaaggaagtcatctttgtcatcgccactatacacccaaggaccctcgagggtactttagatccctggcataatgttgcgcttcggcaatttgctccttcgataattttttccctgaagcatgtcgcactatgaattccaattcctcggtaggtgctctgggggaaggagattcagattcttcagcagcaccttctttttccaacattaatggtgcttcggcagcctccgaaggtcttgttttggac

SEQ ID NO: 130491 - DNA, 273 bp, Zea Mays
gcggaagcttatctggcaaatcttacctgttgatgaatgagagcttacatggcagatttcacgcgacgatgagctgagccttatctggcatatcgtagatcctacctgacacacaaagagacacacagagagagggtagatgttgagcgacatcacatgacatgacatgctatgaaagtgtatttagtagaccccacacatcgatgagctataacaaacctggcagatcccacatgttaatatgctatagatgctcatctagaacatccagtc

SEQ ID NO: 130492 - DNA, 1246 bp, Zea Mays
tgtgcatctatagtgttttcatgcgcactcatgttcctcacacattgtctttgttgatttcacagccttttgaagcaatggctcgccaagttcgtaaggttttggaggcttataccctgaaccaaattgtgttgtgacctcaattgcagggtataacacaattgaaccgcaagtgaggccgcaacacaattttattcagggtataagcctccaacaccttaccaacttggtgagttattgcatcaagaggttgtgaaatcaataaaataatgagggggggacataaacatgcataaaaacactatgtctgcacattcatgtccgatagatagtctgataggagatgacgtcatttgattaactttttagtgaacaacctagagggcacttactttatagagtccattagtgtatcaagtgaagtacatgatgcaaatatacttgctgattttttgctagaaaaactaatggcagtgggagagacaaggtggttcaagttgttacggataatggtgtcaattacaaggcatgaggcaagcttctaatggatatgattcctacattatttttgagttcatgtgttgcacgttgcttggatcttatgttagaggacatagaatacttgaagaaactcaagaaaccaattgcgtgtgcaaggcatgtgacaactttcatatgcagacatgagagaatccttgttgccatggagaaaactggtgggactgatcttgtaaggctcaatgccactcgttttgctattttctttctcaggttgaagagcttgtacataagaatgctttgaagtctttatttacaagtgttgtttggaccgaaaaccgattgacaaatactagagctagagtgcatgtatataacattgtcttcacacaattttgaaattcagtagaagattgccttaaagcttcaaggtcactgccttttgtacttagggtggtcgatagagatgaaagaccagttatgtcggaggtccaagcattaatgaaacatacaaaggaaaaaatcagtcaaagatttgatgtccagagcaagaagagtttactcaagaacatcataattgtcgatacactgtaactgggtaccctctcctactgtgtcaagtcagatactcgtgtggttacctataaccgcatactaagaaacttagcagccgagcccatggatccaaacccgtctgactagaccattggcatcgagacccgctcctcgctcgggggcaggtccggtg

SEQ ID NO: 130493 - DNA, 316 bp, Zea Mays
gccggactagcacaacaagcgcgcaaaatcgaagtctctctcaaaagactacccgtgcaacgaccgactacaggtgccgccggaccgacataataaacgcgctagacctagtgcacaagtcccctacggggcacgaccggatcagcaaaggcacacaacctcttcatacaaattatagttacatacgtacagcgagggcatcacaccttacaatggttcaaccttcgggataatacccatctccctatagttaaacaacattatcctcagctcctcaccctcaaaaagacttcgcaattccccctcacctacactc

SEQ ID NO: 130494 - DNA, 604 bp, Zea Mays
gtggcgcgcctcccgacgtgcttaggagtgagagaaagcagagactttttaatagtttaccctacccttccctctatctctatctctctctaggcctctagggccgtctgttgctacagcctacaggagtaggcgtccagcttgggaaagaaccgttggtacacttctggccacaaaggtgacgaatttattagatttgatttaaactccaaacaaacgaagcatcgctgaagctgcattcctcgtgggatagaggcaagtagcccgtacgttagaaaaaccccaattttggtttattatttgtttttttttctcgtgttgacgttggggtggcgatcagatctgaggtacagccgtacaggctgtctggctttcaatgggggatggatgggtgtgggtgcacacaccctcattcattgctctcattcaatcgggatccaaaatggagcgcacctcgctgacccgtagaccgtaccgcaagcaccacgctgcctgcacacttcaaccatcaacgtcccggccgctgcaatggatggaacagttagttccctttggctctgactttagcttcgtgtgtccctgttactgttagccttgccggcgg

SEQ ID NO: 130495 - DNA, 590 bp, Zea Mays
gttccaccccaagctgccggcggccagtcactactgcaagtccttgtcgtcgctcatccgggagacctacgcgcactgccatgtcccctgcgtcaggacccccgccggcgccgggtggagctccggcgaggacagcgacgacgacaacgtcctcgacgaagcgcaagacaccaaacaggtaataagattggtatatatacgttgcgcgtagcccccggtcccagttctcggtccgttcacgcggttcgctaaaagcgctgcacccgtcacgttcttgcgcaggtgatcctccacgagatgaggagccggcagatgaagaggcggtccaggtgcggcgtggacgtggactcgccgacgctgcctctgtcgtcgagctctgctttcgcctggtcgtacaccccgctcgatccaagaaccgtcctcgacacggtgtcaagtcccaagacgtgcacgtgcgtcgtggtggagggaacggccgcggaggaggagcaggaggaggaggcagccgacgggggggactgcgacgcggacgacgagagcgaggcgttcttctccgtgaagagcttcttcacgcgcagcacgagccgggc

SEQ ID NO: 130496 - DNA, 460 bp, Zea Mays
tgaagaaatgcgcggacgacaccgaagccacgccgccgcgctcatgcacccgcacgaccgacgatggccggtgaggcgccgccgtcatccttaccatctcgcctgcgcatccgctcttcttcatctcatccgacctccactcttcttcacaaatatgcatggcggtcttcgcagaccgtccacgacgcctctgtgctcattcctctctttcgattcttcgatgcccagtttacttgcaaatgcagctgctgacaaacactctccctaagttactctgtagaggataacaaaaggatgctctcctcctggttccagtagcagcaatgcaatagaagattcagtttctactttgctttgttgatcctctccaaaagcccaaccaaacttaatttgtctacacacacgtcgttacttttctattttcccatcaaacaataccatacagaataaaacttgattt

SEQ ID NO: 130497 - DNA, 436 bp, Zea Mays
attaaagcataattaaattgtcattatatggatacctccgcggaagcgcactcccacgagtcgatggcggtgcgcccccaatctctgcacggcgcgccatcgactcccacgagtcctatgtcaagttgtccgtctggtctccttgtcgggacagccaatcctcatcgtcacgccgattcactgaggtatgaatacctttctacctgtgtgcctcgtcgttacgatttcgtctagcctcttgcttcccccaccacaatcccactcctgttcatagacgtgcagatgcgtgattcttcgaaatgtatgtcctccgtactagggtagcaatatatgtagttacctgaatatttgtttcaatgccaaccattgtgaaacagactcctccatctagagcactacatgtttttccttcatacccatttatgcatatagatac

SEQ ID NO: 130498 - DNA, 954 bp, Zea Mays
gttgcggaaaatgattcggatgattctgtgtctatgttttttagtctgatggttctgggagttcggtggtgtggacggaggagtcttcggatgaggatttggattattttgcggcattggatgtggctgaggcggaggcttctccgcgtgtgatggatactgaagttcttcccggtccgagtgctgggcgtaggcagcgaagggcggtggcgaagcgtagagtgagtgaggtggagggtggtcgtcttcgtgtggacagggctggcaagcgggaattgttgtcatcgccagttggtgcgagtgtaggtgagggggagttgcgaagtctttttgagggtgaggagctgaggataatgttgtttaactatagggagatgggtatcatcccgaaggttgaaccaatgtgaggtgtgatgccctcactgtacgtatgtaactataatttgtatgatgaggctgtgtgccttcgctgatccggtcgtgcccgtaggggacttgtgcactaggtcaagcacgttttttatgtccgtccggctgcacctgtagtcggtctttgcacggatagtcttttgagagagacttcgattttgcgcgcttattgtgctagtccggctgcacccttaggcgacttttgcacgaatagtcttctgaagaagacctcgattttgcgcacttgttgtgctagtctggctgcacccttaggcgacttttgcatggatagtctattgaggaagacttcggttttgcgcacttgttgtgctagtccggctacacccttaggcaacttttgcacggatagtctattgaggaagacttcggttttgcgcacttgttgtgctagtccggctgcactcttaggcgacttttgcgcggagtgtcgcacgcgagggtagccagcgctgcccctcgcggtgacttcgtggttgtcgaatgccgaagaccgtcgatgcggtc

SEQ ID NO: 130499 - DNA, 358 bp, Zea Mays
tcaaacgacgtgaaaacggcgtttgaacgagaaatagtgccataggaggtttggaattcgaattgaggcatgaaatgacgtggaattgagccgatacttcacgaataggtttatatgggtaaatatgagtgaagtgagtgcttggtttgaatttaggcgaagaaaacggaatttgggcactcggctcggaaacgatcgctcgaaacggggaatttggtgaaattaaagcctggtatatcggattggcgtgaaatttggcaaatatgttactggaggtgttgtgaaggtgcctgaaaaatttgggttcaatcagagcatttttggctggtttggacatttcaccgaacacttggcatgc

SEQ ID NO: 130500 - DNA, 490 bp, Zea Mays
tgtgtagtagcttcagcgactttgttgccaattgaagaatattgctgcaaaatggtggagcagttttaacaggagaattgagtcaacatatacttcaacatgtcagatgttgctgcaaggaaatttcgaaccagtccctatttggcacaacttcaccaagctgtcatgagcttctttttttgcaaatactctttttacaaacaactccatggatgaagctccttaattcatgctctcgagatggtaggatagattctatcatgtttgtttgccaaatggggggcagagttatatcaggttctgataaaaggggaaaagaaagagtttaaaacttttgtacatgcaaccggacattttgtttgttgttgttgttgctgctttccaagttataagttttgatttttctaggtacgccttttaacatcaagttgctctaactctaaatcaaacaaagcaacaatagcaagccataactcgaataaaagtgtga

SEQ ID NO: 130501 - DNA, 440 bp, Zea Mays
gtatacgacggggcgacgacaacgaaattggacaagggctaactaccggctataaggcgatgaagttgtctgtccatggattggggaagaaacagcggcgctcccccaccgtcagcaagaaatcctgagcaccggtggccaattcccgcctgaaccgactgcgaccacggacgaggagcaccgaaaaggttatgcgaccaccctccgaggacgcggtgtggttgagaaccacggtcgataacggtggccatgttttcccccttttacccagtcctcacacgacggcacaccgagggcgagtatggccgggacgcgcaagggcagaggcgggcgcgacttcgatttccatttgtagccaggtgggcgcgagccagggggttgctgctacacgcagagagtgaggtccctggccatggcgttggggaggtgagcggcgcgag

SEQ ID NO: 130502 - DNA, 301 bp, Zea Mays
cgaacacctgtgcaactccatatggtcgccaggaaaatcgagccctgacgcccgcacgatcttgttgctagagaaaccccatgagctactgcacgtcgtgatcgaatctgctcgccaagagaacctatcacacaatctgatcaccctcttatcgaatcccctcaccctgatcggagtcatgaaaggcggatgcgagtacgcgacgagccctaccagatgatagcaatgaaattgtgcatcgtttgaccatctcagaacaatcagtacatgtcgctgaagtcacagaccaccctggagtcac

SEQ ID NO: 130503 - DNA, 629 bp, Zea Mays
ccagagttcaaattcttaatatatgaacttgacatataatagtgcctctagcagtgtcgccatagtttaaaagcagtaatatggcatagagaggagaggagagaagagaagagaggaaataaacaatatctattgctttccatataaactcacaaatttatatatatttcaatcccatggacagatgaggggaggagagctacaaaaactaatcctgttctgtttctcctttcaggcctaaccctatgcagcagcatattcatccaagaaaccaacaacctataacatatcccttattatcctacccattacaaacttgtcattaaaattaaattcagtactgactaatattatctcgatcaatcttcaaggacatcgagcttgattttgctatgccccagagaatggtgcatgtggacccttcttccttatatgcatcaggtggtctaaagttggctttaacctttagcccaccttacattagagatttggacatcaaaagaaagctaaaacattgtaaagcttttagatatttaagtttagaagagggaggcaaacatgccctagaatattggagatcgcagctactgctatcaccaagtaacacactaagatatcgaagaccgcaa

SEQ ID NO: 130504 - DNA, 511 bp, Zea Mays
ggcactccaggctgtttttcaccatttaaatcaattgcatagtatggatcatcttctgcatacctctcaaacaccttctcatatgctactgctaccttgagcatattatatgttgagttccagcgtgtgacaacatcaagtgacaagaaagccttggtgttgaccttctctagctccgcacacttcttaaatttggcaatcctagaaggggagctcttaacgaatttaacagcagcacaaacacgcttgatagatatgtcaagctctttcaacccctcttggactatcaagtacacaatatgggttgcacacctcatgtgaagtaacttggattccaagatgctagtctttgatttgttagtgacctttgccatgtaggaaacagcaccattattagctgaagcattgtcaacggtgatggtaatcaccttatctaatccccactcagccagacacttctccatgtcttttcctatgtcatctactctgtgacctttcaccataaaaaacc

SEQ ID NO: 130505 - DNA, 632 bp, Zea Mays
caggtttctaatatgcaccgttgatatgccgatctatggtacctactcgcccctctcgcccgcggtcgcccaagcggcagagcacacgactgcgcggcgaacattcgctggagtgtggccatccgatgagctagggcaccgagctcacatctaatcggtcctacatggagtataagcgagagtggactatatgaatagcttattacctgcaatcctgatgccgaaagccgcgaccacgcaccacggaggaagagaggcaccggtggtcaattacttgcgcccagatggttctccgagcccaatcgactctgcaccaacactccataaggcgaggtgaggcgcgggaccctaactctgaggacgctgcgtcaatgggacaaggatcaccggtggtggcacggacgggttcaatcttggctacagcggtggctctcgggttatgggacaagcacgacaaagcaataagatagggccgcaacggaagctttatgcgcgaggggagaacgggggcagtctcaacgactcggcgattcaggtgctcaccgttgaatctctgcaccgcacggtaacgtctgactgaaccccgggtccacctgtaagtgggtgagcggtaaggggcggcagtcgctgac

SEQ ID NO: 130506 - DNA, 349 bp, Zea Mays
gtagaagctgggaagggaggcagcgactgctcactgtcactgactgctgtgttgccgatggcgatgggggcgtggggtgcaaagcattgaatggcttttattctcgtggagcagagcagggagagggatggatgggggaagagaagaccccgtgctgtgcctgctgcccggcacatgacatgctttgtgcgacgtagtacgggggcatagtacttgcttgctcttgggagcttcaattctgtgctggcggagtggatgggactggctgggattgggaggaggtgccagccaccacgtactcctacgtgtctatagcatgtgaggaccacgccacggccgtcggaatcga

SEQ ID NO: 130507 - DNA, 524 bp, Zea Mays
cagagatctggggccgagatccaatcacgctcgcctacccgctgaaccatccgatataatctaacggctctcatttaatgtaccgaagcggtacgcttgccctaatcgtggccgtcaccgaacagatcgacggcaaccgtttcaccgcgcggcatccaatccaggccctacactcccgatcggacgacgcgcaatccagcttcaaccctgaggccgggtgacggcggcgccattgatgcagaccgcaattctcccagcccgcacgccaagacctgacccaaactgagctacgcagagagaggatggaaccgaactcgcagaggggcactcaccgacgaatggccactcggagattcccgaccacgacgaggcggaggcggtacccgacggcgagcaattccggggtccccgttcactaatccagcgcgccgaggccaccagcacccttcctgcgcccccggtgaaaccactagccacggcgcagaggaagcggcggcgatgagcgcccggttccactactccga

SEQ ID NO: 130508 - DNA, 460 bp, Zea Mays
cggcgactccgggagcgaatcgggctccacggctgcggcaacggagggccagcctctccctctcctcctcggtccgtgcccggccgccgtcactgctgaccgaaccgtggtcggcctgggcgttgtcggattaaaggggaggtaggagaagcgctccgtgcatcttggatcaagggccaggaatgaatgtaggcatcccagggatcgtattaaatcaggaccgcgaattcgaagatccggcgtctgtcgtcaggtaccagctcataaaatcctaagtctaatctggtccattgatggaagattcaacggttgtgatatgactataccccttcgcgaccgatcaattgcataagagcccctgactttcttaaaaatcaacccgccgtccatgggcgttgatcactgagtctagggtgtatttgtagatcagtccctaggtttttcagaatttagcgcccaa

SEQ ID NO: 130509 - DNA, 581 bp, Zea Mays
aaaggggatgataaagggcaacaaggtgctgatcttactcgagaaagacaacttagggacttcaggcgtctcaatggtttatgttatgcttgtggagaacagtttgagctcgggcatattgctaaatgtgcaaagaggggttcagctcagttgaattgagtagtggatgaggaggtgtctgaaattttgaccgatgagattctacatcagctagaaaaggaggatcaaagtgggaattatgttgtcatctttcttttcaggcagtttctggtactaacaatgactataacatgagagtgcgatctattatgggtaaacatactatgttgatgttggtggattctgtgagttccatcaattttattagtcaacatatggtgcaaaagttggggttagctgtgacatcttgtccatctgtttcagttaaggtggcacaatggggagtccatgatcagccaggctatggcgaagaatttggaatggtgggcacatgggcatttttatcacactgacatgagaattctacctttgggggcttttgatgctattttgggttatcagtggttaaggcaacacagtcc

SEQ ID NO: 130510 - DNA, 491 bp, Zea Mays
cttgaactttattataatcacttgtatccttgaactttattataatcacttgtatccctaaggtacatgacgcaaaactaataaaacaacatagacccatttgtctcttgaatgttagttacaagatcttcaccaaagtagctactaacatgttgaatctagtagctaacaaaatagtaaagcctacccaaaccactttcatgcaagaacaaaatatcctaggagaagtaatcctacaagaaacaatccatgagttacacagacaaaaagatagatggggtaattttcaagataggttttgataagacatacgataaagttaagtggctttcatgtatcaaactatacatatgaaggatttctctccaagatggatatcttagacaaagaagttcatctcagaaggcagtgtgggtgtaaatgttaatgacaagataggtcactattttcaaacaaagaaatgctttaggcagagatcacttccatccctt

SEQ ID NO: 130511 - DNA, 806 bp, Zea Mays
gaccggccaaacggggcaaggataggtgctactgagcggtctacaccaaattcacggcctatcaatggtttccccccaatcaatttcatatttggtgatctatttcgctctgcccacgaggacagcgaaagctatagacattagttcgtgttcccagtgattggtgggcttctagtttaattggacagtttggagagcatcaccagcatacagggacatgagaacaacacgcgaattggatggtgccttaccagaacggactggccacggtggagtggtgctttacggtggcggagaccaatttgggggaaaaggggaattctccggctatggtgggcaatcgaggggaagaacgggtgtgtgggcttcgtgatgacctaacacagctgcccgggggctcaatttataggcagcttcgtcggtggcgcttaatttggccgagccgtgtgggtggccggagataaggaagagcactgtcgtcgcgacttcgtgtcccccgccgtggcaacctcaccggcgttgatgagacagcagtaaggagtcacgatgatacgacggggtgcacggatacgtggcataaggccgtgcgacgacggtttaccggcgagcccatcgaaccttccaccgcggcatgcacggtacggtggtcggacttgtttatggccggagttatccacggcgaggatatttatgtgacccaaagtgctatccaacttagccaagcccaaatcgcggcaacagcagcacgaatcgcggcagcaggtcaccggcggtgaggaccgttgcgctggcgatctgatcctccc

SEQ ID NO: 130512 - DNA, 337 bp, Zea Mays
tgcatgtataattaattggctcgaaaatcaatcaaagcaatgacttggatgaaacataaagagtgaggatcgatgacttagctgattattggagaggtcgttgtatttgagcctattgtcgcccatttcgaaaagcgaggcagaggcaggctcccgaatttaggacttggccacttattgtttatgactcgacctttggtggcatcggcctggttccagaaaatacctcaccgcttcaactttcgcatgcaactataaccatcggtgggttataaatatttgatttgttaactccttatggttacatgatcccgcgcatccttgctttcacttgcac

SEQ ID NO: 130513 - DNA, 299 bp, Zea Mays
tgcggagctgggatatgtgaaacacattgtggatgtcagacatggattccggtaattctagacggtatgctgcgggtcctaccctgccaatgatgggatagggacctatgaatcgcggggctagctttccttttacttggaacctcttgacaccacgcattggagaaaccttgaggtagacgaagtatccttcctcaaatctgagttcccttcgcctgttgtctgcataactcttctgccgactctgagcttcaagtaaccttctgcggatcagtgcaactttctcttccgcctctttg

SEQ ID NO: 130514 - DNA, 416 bp, Zea Mays
ctatgaaagagtgggatgctccagaatcgaaaagtacggtagcgggagtaaattcaacaaggaactcaccgagcactactccccggagcttgctgagcctcctgggcatcgacgtgattcactcgtgtccttccttggtacagggtcttgttctgctggctgacggaggagggcgccttgggggcggatgccgaggtattcttggggccattcactgagttggagtaggcgggtcctggtggcttcagctgcggacagttgttcttgaagtgactgggatcaccgcagtgccaacatgcattcgccgggggttggttgcttgccattaagggggtatggaaagagctctgactctactggctgaaccgcgacggggtgggtccagctagtctactgaagtttggccccttgggtgg

SEQ ID NO: 130515 - DNA, 311 bp, Zea Mays
ctctgttttctcaaagttgattttcagcccagagcatctctcgaaaatttctagaatcttttttagaacttgcaaatcatgcttatcaggtctaatgaacaccccagcgtcatcagcatataacgaacatcgtaactttgctccttttggtagcactcgttttaggatgcctttgtcggatgccatctcaatcatcttttgaagtggatcaattgctaggatgaagagaaaaggtgagagagggtctcctcgccgaacaccgtgtaaatgctgaattgtctctgtcgactgcccattgatcatgatcttag

SEQ ID NO: 130516 - DNA, 339 bp, Zea Mays
ctaggccttatatactcgaccgtggagtgctacatgtggatatgataacaacgtgtgcctaagtaatagtgaaccaactgagcctatcttcctataattccgccgacttatcttcatccagttccgacgcctgaggatactgcgcgggaaagtcgggtcactgctgtggacgttgctcaaattcattgggccgtccggactcgagttgatccaatctcgcatcaatccacttcatcagacgtccctccccaggcccacgaagggatggccttgcgaaatattgggcccaaagcctttcacgaggtcctctagcctttccgtggacctaggggatatctg

SEQ ID NO: 130517 - DNA, 468 bp, Zea Mays
acttagcatctggcttctttggaatgagcacgatattcgcagagttcaggaacttgaattcagctccattcatggcatgtagttggtgaaaggcctccaacacatccactttgataatgtcccagtactccttgaagaaaattcatgtaaaaccgtctagcactggggccttatcgcttggcatagagaagatggtttccttcacctcatccagggagaacgacgcttccaaggccgagagatcgtgtcgcggtaaggccagcgccaaccagttgagggtgagctctctgggtggggttgtccccatatgtgacttgaaatggtcataaataatttcttctttgtcattatgggccactgtcagattcccaatggtgggctgcaggtattggatatagttcttcctcgctctggagctggcagtgagattaaagaagttagtgtatgcatgcctaatcgaatgcgggt

SEQ ID NO: 130518 - DNA, 315 bp, Zea Mays
ggactagctagtcttttcctcctcggttttatctaagccgaagctagtgacagcttcgatactcgccatcgttgcttccaaataagatcttcgtctcgaggaccttcgacagagagagttctcaaaatcactttgccgaagatgtctttgtcttgaggacctttggtggagaagaacccccaacacatagcctaccttgttaaccatgcataattcctcccatttgctgagcccccaccgtaagtgagctcactccttgctaaattttgatccgaagctgatgaggaagactttgacgaagatgttgatgagttc

SEQ ID NO: 130519 - DNA, 569 bp, Zea Mays
aggcggagtgcccgagaattggcaataactgctggattgctgctggaggcgctcagttccgcgttcggttgcccgatttcgtgccgattcggagctctcattgggcgctcgagcgtgcgtttatatatagcgcattggtggtggcctctcgccgtccgtggcccgtgggccgtgggtgtgggtggagaacttgtcgccgtgctgatgatgcattgagtggcggcgaggcgataccccctccctgatgttccaggtggttgttttgcgtgcgttggtgaagatgcctcgcgggcaggctctttgatcgcgcggggcctcgctcgttggtgtgtaaggcggcaatggggatcaaggcggtggagaagctcaggtgcccctcgtcggtggccgccgcggcgcggtcaggcttgaagctgtggatgctgcgggccgtgacgacggtgttgctctggaccagcgtcgtgcagttcacggcggtagggaacacctggacctgggggcctcgcgtgctaaagggatggccgtcgtgccggacggcgcgggaggcggccgcggtcaccaccacgcgg

SEQ ID NO: 130520 - DNA, 550 bp, Zea Mays
aacatcaatgtcaccttccctcggacacttcaagccttgtgagttttgatcgccaacttaacccagttgaacaccctttcttcggtatcatgctgactgagggagagtacccgctataacacctctacatgtgtgtcacctccggcaccccggacaactatcgaaccgagttcctaagctttgaggtagctcgtttcgattgctgatacaacaccatcatcgggagaccagaactggcaaaattcatggttatcccgcactactcgtacatgatcctcaagatgtcatgtccccaaggcgtcatcactattcgcactgactaccagggagccacatattgcttctggggggccatccaaacagccctcacggtcagaccctcagtggcactcccaacatggagcaacgacaagcaagcaaaggatgacctcactattcccttgaatgaagcatcagtcgtgacctctatgcgcccgactgaagaaacaaagaggatcaacatcaggttctctgacgagcgcaagactacggtcatcagctccagccttac

SEQ ID NO: 130521 - DNA, 494 bp, Zea Mays
ggctcattttataccggtgaggactaattacacgggagccaagctagcaaaattgtacatgactcggatagtttgtctacatggagtgcctaagaagatcgtgtctgatcgaggatcatagtttacttcttggttttggaaggagttgcatgagagcttggatacaaagttgaattttagttcagcctaccatcctcaaactgatggcagacagagaggactaatcaagtgctggaggatatgttaagagcttgtgctcttaaacatggtggaagttgggataagagcttgccatatgcggagttctcttataataatagctaccatgccagtttgaagatgtcattgtttgaggctctatatggcagaaaatgcaggactccactgtattgggatcagactggagaaagataattctttgggcctaaacttatacaagaggcagaggaacaagtgcgaatgataagagagaatttgagaattgcataatcaag

SEQ ID NO: 130522 - DNA, 554 bp, Zea Mays
cgaatttattgaacgtttctagagataaagaagatatagaggaatgcatattttagagtatgttatatagaatataaagtatttgtttagagggtgaaatttagaggaaggcgaggttaccaccgccaagaagagagatctatcggtgtcagattatttttgcaagatcaagaatcttgctactgagatggcggcggctgacgacgctgccctccatagtgatgaagtactggcacacctccttgtcgagctgccctcccaatatgaccccttcatcacatcgatgacgactccatcacgctcgacgacatctacactcacctcgatcatcgccttcgaagcgcgccagatacgacaccaggcagaactcgaacctcacgttggtgcattggatcgctatgttggacgtggtggacagcacaggggtcgcgaccacagtgatcggggcgtggtggtcgctctcacgtcggtgcacaatcccggtctgccgatcgtcgcaactcctcatgccctgcccgtgaaatttgtggcaagctgggtcatacagcgatccg

SEQ ID NO: 130523 - DNA, 426 bp, Zea Mays
ggcggagcagggcgggcgaggtacggtagcagcggccatggtggctcacatggcaggcgaggcacgcgggacacgaagcaagtgacgtgtgcaggggaaaacggctccctggccacgtccgccatgggctgcgcgaggaaaaaggtcgccgaagggaggggagggaggaagcgacggggaggatgctcaccttggcggacgagtggtgatggcgcggatccgacgaacgatgacgcaacaggtagctctagagaggggaggatgagccggttgtgcagggagagagtcggggcaggcagtttcgagtttatggggtctaggacgtgcgtcgtggaagaagattagagaagcaagcaagcatccggttggggcactacgcctacgggcccactagccagggggtggcgtggagacgaggcacctgca

SEQ ID NO: 130524 - DNA, 593 bp, Zea Mays
cctccgtccagccttaaggattagtatatatatatatatatatatatattgacacttcatgagatgaatacaactgtcaattcctttctactctcggtgtctcgtttacacttattctaacacgttatcagtattttgcctaccgccgaagtctaatcggccattgcgttgaagaagggcgagcgcccacttactgcagatgtcccccgatgaagaatcaatacaagatgatccattggatagggtaacaatattctgattctaccttccatggatcttgattcattttgcatacttcctggacttctccatgcaaccgctgcatgaccgccgtggtgattgccgcatgatgtgacatgctctcacgttggacatgcataccacgagtggatctttgggtgattggcgacatcgcagggagcatcatagcgactaaccgcaccaagatctggatcccacgccgaggccgcctgccgtcgagccaaggctgcggtcgcgcccgcgctcgcgcgtaccatggccgggcggccgcgcccgcgctgcgccgtgcgcaggggccggaccgccacacccgctctcgcaccggggtcggg

SEQ ID NO: 130525 - DNA, 281 bp, Zea Mays
aaaattttgggggaacccgaacgcccagtcctagatgtgacaacacaggcgactttgtacgctcctacgcacatcggcgtaccagtctatgctgcaacccttaccaaagccttcgcccatacattgacaagatagggagaaggggaggctggtcaaggaatccgcacgatgaccaagagaagatctttgtccgctgacaacaccgcacaacgaccaagagaagatctctattcgccgacgacatcagttgttccatgcagtatgtttttattactatattc

SEQ ID NO: 130526 - DNA, 617 bp, Zea Mays
gaagccgcgaaggacccaacaagctttgtagcgatcaagagtaccatcagaatgtagcttgtggcggaaaatccacttcccagtgacgacgttggtattcggagggcgcgggatgagtgaccaggtatgattgtcgatgagggcctggtactcgtcctccatcgcgtgcctccaatgtggatcatcaagggcacgtcgataagaggtgggtatgggggagacaacaaccgcttgaaggtttaggcgaggttgccgaaacccactcttagcccgagtgcgcatgccatgaaggttgttgactggcgcagcaggtagagcgccaacagggagacgagtatcgacgtcgagtgcccgaggcacacgggcagagcgctggccagccccggcctagcgccaggcatccacaatgcgtggagcggcaccaggcgcagtaggcggtgaagatggttggagcggtgacccagccggaagcccagaaggtgtggtagcctcagatgatctagcgccagatccaggggaggtcgtagacggcccaaccgttgaagccgtggatgggggagcctgagcaccaggcggcccagcactgcctaccgacggccgagccaatgaggccaggg

SEQ ID NO: 130527 - DNA, 401 bp, Zea Mays
gttaggacgagtgacaggggaagtgttggtaaagggaaaggaggactcatcaaagaccacatgacgagagatgatgacacaatttgtggagaggtctagacatcgatagcctttgtgatgtgaggagtagccgagaaaaacacaaagaacttaccgaggagtgattttatgtgcggcggtggcagacatgttgggatagcacttgcaaccaaacacacggagatgggaataggatggtggcgtcatagagggcctggcggggagttgaaaaatggagagttcttgtgggatagcgattgaacagatgaatggcagtgtgaagggcttccacccaataaggaggggggagatgtgattgaaaaagaagggagcgtatgatgttgatggtgcgcaatacacgc

SEQ ID NO: 130528 - DNA, 571 bp, Zea Mays
cacgacaggagtagaaactgctgaaactggttgcactggcggctgagtacttatagctccgacgacctgagtcgagaagtccatggtaaccgaccaggatggagagaaaatcgtaccaaaggagtgtagcttgggtctggactggatcgctggcaccatggaagtatgtagagctagtgatggagcggattgtactggaggcattggaacactggtgtgctgaaggatacgagtcatgaaagcccggtgctccgccctatctaccagaagttgttgaagtgtgtactgattgatgtggcttaggaacgagatcgacaagcaggtagtttatataaagcactcaatttctacaacattttttgcttcatgaccacatttactaatttctgcaacattttcagatgtgatgtccttgactaaggtgttagatgcagcagccttcactttgaacaagaggttagtaagttttggattatgccttcagttttggaccatgtcctgctatactgttatatactgctaggagcatatcactagtagtaagttttggattatgcagcagccttcagtt

SEQ ID NO: 130529 - DNA, 332 bp, Zea Mays
gcaaggcgttttgccattgtcttacagtaaagactccggacaccacattatgtcaagaaatggagaaattcaacctgggaatgatacaacatggaatcttgaaccaattgaggcttgagccaattcttctgcaaagaattattgatgccaaaggaatgataagggtatgaaacatattcatgagaaaatagaagccagtaaagctaattgcttcagaaaggatgatcaagacatagtatggtttaatgatcgcatagttgtgcctaaggatgccgacgtccgccagcaaattttggatgaagctcatcttagtcgatatttcattcatcccg

SEQ ID NO: 130530 - DNA, 389 bp, Zea Mays
atccttccccccaaatgctggaggaagaagcgagaaggagcgtcgcctccacggacatcctgtggaggtaggcgacgatggccgcctgaaggaagaagcaggacaccacgggtagaggctggaggccaagcccctccagcagctgcacgaagaaagatgggatcggcagggccaacccgctggagagtttggaaacaaagaacacaaactcttcggtggaaaggtcgccgagaggagagacaccagcataagtcctcccggcaaataccggcgcattccatccaagcaagtggtataccatttcgagcactcactcagtttgggtgtgctcgggatgaagtcacaaggccatggcaaactacggcaacgcaaagcagaaaccttgaagg

SEQ ID NO: 130531 - DNA, 493 bp, Zea Mays
aattctctgtcaattttcatattcaagagaaaaagctactgctggacttcctgtccacatagctcatggatcaaccactggaccttctagaactattttttctaaatatttttgaaaacaaaacactagttattagaaccaaggaataactcatccatactagtggatatacactataagaatagatttttaactctacacagaggtgtgcattttactcacatgtctggtttccggagccatcaccatcgaggccctattaatattcccaaaacctaattatccccgacatggcatcaacttggcgattacaccaagagaaataaggccacctcttcgtccaaaatctaggatgcaacattttcctcccggtgctctcaagccttctaaaacccttaggctagcttatacaggtttaaattaagtgactgcacatacagtctcgagtggttgcacttatggagttaatcaagctggaaaaaaacaagtcaat

SEQ ID NO: 130532 - DNA, 548 bp, Zea Mays
cgcgttcattctacccgagttctggcacgtgtggtcattcatccgagcctgctcttgccttggtcagtgcacaaaacatcttctcctccctataagctaccgatcttgtgtgggggtcataggatttggcctactggtttcaaagatttggagctctgaagtctggtctgtctcccagcccgtgcccgaggcaaatcttcggttttgtcatgtctagggctcgcgtcccgatgccatcttcagatatgtgatagaggggttagttagacacgtttttgttaatgggagctttaggattagagctaaggatcaaggtgaacacgctcgattttggttcaagggctgaaaatttagaaatctgaatttcagatttccccattaaacctccacttgaatggcttgtttggaatttttaacaaactattttggccaaacttttataatctttattgtagcttatttagtttatttcaatttttataattggcctaagccatgatttcatgtttttcatggtctttcatcccttttcttcatttctacttaaa

SEQ ID NO: 130533 - DNA, 398 bp, Zea Mays
gaagaatttttgaagggtggtatttaaacatgaatataccgactgattggatggttgtgtgcgcgtagctaggctcatgcgagtttgtgccgtcaggtacgatcatttaccgtgtatttgtgggtgtaggtaaataagtctatgatgtatcagtgcgtgcgagctcagctttctagatacagtgaaccaaacacacgttggaccatagtccatgcatcgaagcctagctctcctgatacgagcaaccaaacacacaaacaaagtgtggatagaggatttggaagggaatatttatattccacccctctgttgttctgatagagtggcgatctatcttggatgccttgattagattgtctgcaatggttcttcctaaatttgtcctcccctatatccca

SEQ ID NO: 130534 - DNA, 554 bp, Zea Mays
gaaccagtccttgcctccaatcgttcaccatagcctctcaatttctcttttccctcaaatctgttttccgcgctgccgagattctctcactatggccagccctcctcaggttggttcatgcctctctgttggatgttctagcatctcttaggtctcctgtgcttgtagggtcgattgattgaactagaccgcgcttggttgccctgaacactgtagtttcttctcggtttttgccgtcgtcgtgagcaggcatgctctggtccggattagtattagttggggaattagtgtcgccgagggtggcattaagtgtctgtcaagctagagccctggtcgttgagtgtcttggccggtacaggttcgctggaaggcgtgctcaccggcgatcaccatcgaggactggagtttgcgaagataagaaagaggaagtgtctaagtgcaaacgtcagtgagacaaggaaatagtgcccagggttctttactgtttgttcaaaaagctgaggtcttctgtgtaaagccgccaacacgggcgcgcgcgggcgcgtttcgcctgg

SEQ ID NO: 130535 - DNA, 377 bp, Zea Mays
tggacgtatgaccaagctacagagacaaacttcaaaatgcatgtttggtaccagtactccatgcatgacttactggtgtatgggctattctgcgcctggtgtgttcacggtaagttcccatgcctagtttgcaaggaagctcttaggttcatttggttgaaaaagggtgacaaatattcatcattcgataaacatcgataatatctccctcctgaccatctattccgcctagacatcaagaacattacgaaaggtgtcgtagtgacagactgcccacctgcaatgatgactggttccgaaatttgtcaatagatagatgggctcgtggccaatccagatggtggttttgtgggatatgttgagcaacatatgtggac

SEQ ID NO: 130536 - DNA, 430 bp, Zea Mays
ccccgctaacctagtagtaatgggtactcaagggttagatgtcatcctagggatgaattggctgcacagaaaccaagccactgtcagttgtgacaagaggacagtaaagttagtgtccccatccagaaggaaaatagtaattgaactattcgtgcctgaattagaaggagcttatcaccatttgtctgtagacgacaaggaggccaacatgattgatgatattagaattgtgtcgtaattccctgatgtattccctgaggagtaaccaggcatgccacccgagcgtaaagttgagtttgtcatagagcttatacctggcaccacccctatttccaagagagcctatcgagtgtccggaccagaattggtggaactcaagaagcagattaatgagttgttagagaaaggctatatcagaccaagtacctcg

SEQ ID NO: 130537 - DNA, 531 bp, Zea Mays
tagtgtccttatcaggagaggaagtgttagtggagtttgtcttgtctggaccaaggaaaggaagctatcaccaagtcaccgcccatattgaggaaattgagccatcagaagctgtcaaggtagtatcagaattccagatgcgtttcccaaggatttagtaggcatgccacccaaaagaaaagttgaatttgccattgagcctatacctggcaccgatattattttcaagagagcctatcgagtgtccggaccaaaattggtggaattcaagaagcagattgatgagttgttagagaaaggctaaatcagaccaagtacctcgccttgggcagcccctattttatttgtggagaagaaagacgggacaaagagaatgtgcatcgattgtagatctttgaatgaagtcactatcaagaaaacaagtaccccctgcctaggattgaagatttgttcgaccagttgagaggagctagtgtgttctcgaagatagatctgagatcaggttaccatcagttcaggattcggccttcg

SEQ ID NO: 130538 - DNA, 445 bp, Zea Mays
ctggcctggtggctggctgctgtccgtctgtccctctgctgcaagcctgcagtgctgctgtccgcctaccctctgctgcaagcctgcagtgctgttgtctgcctatccctctgctgcaagcatgcaatgctgctcagttgttgtcggctcgatcggttcccctacctggcagctatggactcgaggcccggttcgcaatcttactcttatccgctgggcgcagccgttggtagcatcgtacaatctacaattttcagttcgagaataaaatcagctagacaaaaaccacaaatccaacaaaatctaatatgtactcgcacaaaaacaattagccatatatactttttaatttaggtcatcaaccactatgcactaaggaacattatgcaagcactgacggggctggacgggaggaacctagcgaggcgccacccatcgtgtttcc

SEQ ID NO: 130539 - DNA, 363 bp, Zea Mays
accgtatagagcaccaaacatcgcattgaatacgacactcagagatgtctatagcatggttgggaagatccataaggcaccagacatattaggagacgcacctgatgctccaccgaatagggtactcagagaggttgcaaagcaactcaaatgggtaacaacagcaccaacgactatgatgccacaccagacatcacatcggataccctgagctcaacaaatagtaatatctagttacggtggctagctaacgtggacaatcacatgactgtccgatgggtgcatcggagtgtctaatgagcatgcaaaatttctgctttgctttcctatggctagcttggacataggggctctaaatacaac

SEQ ID NO: 130540 - DNA, 751 bp, Zea Mays
gcagtttggtcacacccattgggatcggcagcagtttggtcacacccattgaggtcagcgtcggtaaggccggtcgcaggcacttcttcagcagcaggagctaaggtactggcgtcctcatcaaaactggatactcgccggaggcgtcttctcttcttcttttgctcgtcagcagaaggctcaggctgactggtccggctggggcgcctcgggcgagtactgacaggtttcaggacatccaaagttgtatcaacctctggaaagggcaccactgctaaggtaccatcaggagcagcatcggacgaatcctcggctaatagatcaagcatgtcatttatgtcagcatcactggggttcagaggcacttcgaaataaacctgccgttcatcatcaggaattgccccaagcgaagcaaccaaagtactgacttcctcagcagagggtcgcactctaaggcccaaattgctgtcagtcacgggtggattggacacaaaaagggtgaaatctttgggaggaggaaggttccaagccgagtatgcaacgggagcaccaacatttgaaactttacccctgaggatcatctcaagtcggcttaccaagtcaacagaaggaattctcctatcggtaacccgggttgagtcggctagcccttgatacagatatgccggataggccctgtcttttagcggctgaatgttcttgaaaacaaaatctgttaccacagcttcagcagtcagacctctctctttca

SEQ ID NO: 130541 - DNA, 651 bp, Zea Mays
gcgaaggagacatcgtcctcatcaggaccagaagaacgaaatccaaaggcaaacttgagcaaaaataggaaggacccttcctcgccaaaaagaaaacgtccccgaattcatacaagcttgcaagccaaacaggcgccgacctcgaacattcttggaacatagacaatttgaggaaattctacctgtaggatggcacacaaccagagccttcacgcccttgtaataatttttgatacattgctctattttggcccacaatcttttccttgcaaggggcaaggtttttaatgaggtggcaccatgtaattaaataaaacaggaaaccccccacaaaaaagaagtgtggcccgaatacgtcgaaaaagaccacaaagtcggccttcgccattcgacggcaggacagtcaccaggacgacaagtcttaagttagccttcgtgtgcgacaactaaatccgagcaaaattcgcctcagggtgtagccgagttagcacaaaaaatgcgcaaagacacctaagggtgtgaagtcgtccaatagatgcaacatctacccgaacaaaaagtcacctcagggtgcaaccggattagcacaagaagtgctgtgaactcacctaagggtgcaaagtcgtctattagacacaacatctattcgag

SEQ ID NO: 130542 - DNA, 911 bp, Zea Mays
aactcatataatcacaaatcgattgccaatttacccgatgataatttaattgctagtttacattatgctgacatttttgtcaataaaagaaaagatgcatagaaaaaacaaagagcaatcttcttttcggcggttggcattagttttccatgacttccccattgctgctgcgttggaagaatagacaaatacctcatcccacccacgaagggaacatgtcaatatcttaatcttgtggcactgtggggtttaagtggcacagtgctctgtaactcgcggttcaaagtgagttaaggctaaacatcgtatttttttacaaaattacactgggtgaacgtacacatgtaaactctaactatgagcattttcgaaaactgggtcatcgacgaagtggttaatattagaatattagctctcacggagagtcgaacctatacatacaattctacaaatatcatattctaaccacagatgaaaagatcctgcgcattaatgttgcagcggcgagtcaaacgcctaatcttctcacacgcacgagtgcgtccaactaacaatgcattaaagcatccaaagcatccttcaaaaactaaaagaagcgttaagcttaaggacttgtttaacctattagtttgaagatagtggactcagagtgcaggcatcacattaatcttccttttaatgctagtacgaacccaggagtagactactgcaagaaactgacacgttgttagagggaacaaagcattaacccagttgcttgaagatactgccattgaacatcatagcccaacttgaataaacaacacagagtttggagcctccataataccaccacaagtgtcattagttcaagctacagttctaatgtcaacccataggaccactctcgattttattcaattttttttctg

SEQ ID NO: 130543 - DNA, 302 bp, Zea Mays
cttcggaacaccatgcagactaagaatacgagcaatgtacaattgggcatagacagtaaccgggtaattcgtcttgaccggtaaaaagtgagcaatctttgtaagccgatcaatgataacccagatagaatcatacccttttgcagtcctgggcaatcccacgataaagtccatacttatatcttcccatttccatggtgggatcaacaaagattgtaatggaccagcagttttcatgtgtatggctttgacacgtctgcaaatgtcacacttagccacatagcgtgcaatttcaattttca

SEQ ID NO: 130544 - DNA, 415 bp, Zea Mays
tgaagatcggccatggcgccgccgctcagcttgggggcgtcagccaatggttagagtgggagatgagggattacgcgtcagccactcattcctggatgggcggtcgtgattagaacatgtggtaccggttcggccaatggttccaagccattgatgttcagatcagtgggtatgattagatctccgcgtaacgcttcgtgcattaaatcttgaccgtagatctcgttaggaacgactgcgattatatggaagataacctttcgcgatattgaatcaggaccgtacatccatgatcgaatggcctagagcttaagtgtgttgccggccgcaacgctttttcgaaagtgaccctgatggaaccgaaaaataacctgccgttcatcttgggttagtcttagtctggtaaaatgttaca

SEQ ID NO: 130545 - DNA, 620 bp, Zea Mays
tgaaaacgctgcaagggcagctgacttccagaggttgtgaccaagagttttccacctcttccatgaacccttccaatctgatccagaaactttcaaaatgaaatcttctttttccttggacaagatcatgcagccccaacagtaatggacaatgatcagaaatctgggatgcagagctctgcaagagacaattcggaaacatgtcctcccaatctgctatacagaaaatccgatctcgacgaaccaaagtaggtgatgcccgttcgtttggccaggtgaacttcctacctgaaaggggcagctcattaagaagcaagtcattaagcatccgcctaaacctccccatcatagctctatcaagattatcattgctcttgtccagttgtccttagctctatatataaggttgaaatccccaccaatcatccacggaccaaggcactgtgatcatatcaagtgcagctcattaagaaattgaattttatgctcatcgagttgggaccgtaaacacccgtaaaccactaggccacgccatcctgctgctgaaattgagcagagactggaaaattgtttattctagtttggagcatcttgcagaccgaaatcctccaagccaaaag

SEQ ID NO: 130546 - DNA, 473 bp, Zea Mays
ctcgtcgcggtgattcatgctcggtgcagttggataacgcagagggagtaagaaatatcacccagtggatgaattccgtccattgttcactccggtctccatgtccgcttagccccggccgcttcagatctaccctcgccgaagttagacacctcgcatccttgcgccacgtgcctcgacactttaaccacgccgccgtgactcatgttagcccatccggtgatcgctggtgagcttgccacagtaattgccaccaatcgcgtgcgccagtgcccctcctcctcttcggccgccgcacgtctccttcaaattcactggccaccactctggggacctataaattgagcacgccatgagctccgtagggtaattacccaaccaaagcaccagcacttgcctccaattgttcaccagagaccacaaattgctcatttcccccaaatcgggtttccgccactgtgaaaaggtcttcg

SEQ ID NO: 130547 - DNA, 675 bp, Zea Mays
gataggtgttgttccaaagtggcacaatagattacaatgtcatctaggaagactaggacaaactttctgagaaaaggggcaaggatgtcattcataaggcattgagaagtagctggcgcattggtcaagccaaaaggcatgaccctgaactgaaaatgcccatggtgtgttttaaaagcagttttgaattcatctccgggatatatggacttacaaagtacttgagagagatggtggaaggaagagcacacgtgtatgtcaacttgtggaggaagttgctctccgtggtagtgttctaattctgtttttcttgcattttccgttttggttcacagactcccctttaacaatagcatgtaaatctcacttacaaactgggcccacatgatatccacaccacttagtactatattgtagagatgctaaggtaaactatgtatcttccccattgtgccatcactgttgctgatgtggcatgcctttccccgcactagacaaaactgtagtgttctgattctgtttttcttgcatgttccgttttggttcacaggatccctttttacaatagcgtgcaaatctcacatacaaactgggcccacatagtacccataccacttagtactatactatagagatattaaggtaaattatgtatcttccccattgtgccatcac

SEQ ID NO: 130548 - DNA, 570 bp, Zea Mays
atttacatgcagcataaatatatattttcattttagacaaataaacaatattattttaatatgtacctggttaccagttgttattattgttaacgcatgttcacatccagtcctggtgttatgtgaatcctacaaaatattatttgcttattacattgattttatatattcattatgtacaatacttcatgcaagcttatatatatatatcttttacataccttattatgacatgtaattgtattgtcatcttccatcccatcgccagcattatttttatttaactcttcttcctggtacaaaatatcatgttactatgcataatttatgttacaaatagtataacactaaaacatctgcaatattattaccttgtcttcctcattatcactaacatctgttgactcattacatccaatatctggctccaatcggcttagaacgacatcgagctcatccaacacatccatcgccttatcgtaccctgcttttgacatgcacgcctggcgaactactttcattgttttcattaacaacattttctgtctgtataatttagtaactccatcc

SEQ ID NO: 130549 - DNA, 485 bp, Zea Mays
ccgacagatggccccccgaagtcagccactcccacactcgttcctttcacaaagttcgtgccggcagcctcctcgctgtcctgtgggcccgaaccgtcagccgctatgtgaaccaccccgccgcaaatggtggaatcacgccggttactgaggagtctgttgccccaccttcgactgtgccatctctataaggtgtaatggggtcccgggtcgccttcccatccacctctgcaatcctcgccgtggaatcgcggttgagtagggagcaatccgggggtgtgcgggtctgtagatagggaggcggtgggcgccagcttcggtcgtgcctgcgttgtccgtgttggttgtggagcgtcaccgtcgatcggagaagacgcgagcaccatcgtcaagcacgttctgaccgattactcggatgaattcctcgtcgacgtccgagcttcgccgtgggggcgaactgcatcgtagtcgacatactctttgtg

SEQ ID NO: 130550 - DNA, 638 bp, Zea Mays
ccggtgtgcaccggacagccactgtagactgtccggtgtgcccatctcgcgttttaaaaaacagcctccagcccgagccaggccagaggcccctttccttctcccagcacccgcgctctctgtccaggggcgatttcccccccgccggtgagcttcaccggcggcgaccgtccctgctggactccggcgacctcgaccgcactcttcccctccgtgagcagctctccccttccccctttctcactgctctctgttttcaaagcctctgtgccaccaaattcaccaccttcctgtgcaaattcaaatctgtgaaatcccatacttccaactggtgaaatgtgtttcttggtctctattacatatccctgcaggtccttggctccttcgggagggcattcccacctcaaatagccatttccctaaaaccctagatccccgcacaccacgtgttcggtgaaatgcccaaaccagccaaacttgctccaattgaacccaaatttttcaggcaccttcaccacacttccagtaacctacttgccaaatttcacgccaatccgagatcccaggcttaaatttcaccaaaattcccgttttgcgcgatcgtttccgagccgagtgccccaaaccctatttcttcg

SEQ ID NO: 130551 - DNA, 577 bp, Zea Mays
ctatagtcgaaatgtagctggtttgtaactctacaactttgctgcagagatttgggtgagttgccatgaaaactttagagaaaatccaccctaaactttggctgtcaagagcactgaagaacattgccatggtacagtgcccggaaggataagcttcagaccctcaccgccgacgaccaatccgcgccgtgatttgcgccagggtcgggatgggcgcgcgacgtgcatctcctcgcaaagatctttttgatccgggtaagatcgccgcggtggagcgtgatgattccggccgccacgcggccactaatcactccggccatatcaggtcatcggcgccgctcctcttcgttcatccacgccctcattgatttgaccgcgttactgtcgcggcggaacgtggcaagctcgtaggaaaggatagcgctcgacgccgccgttgatcgccagctaaggccggcgatggttatcaccatggccatggccgtggctcactacacctataaattcaccgcatcctcaccccctccgttcaaatcaaccgagcacaactcttcgtctctaaattgcgaagccaaag

SEQ ID NO: 130552 - DNA, 690 bp, Zea Mays
taggcacgggtggcttctgatgcaagaagctttagcgacaagctaacacaaagcttgtgttggaagctaccgtttatgacaacaaaaaagtattccatggaccgcttggtgcaaaaacatactacgcgcactcgcaactatgaaaatttctcttgtgtagaatatggtcattgtacatggaataactagatacatagtatgtgcattgtataatgcgatgacaaaaaatcattacattttgtagtacaatcatgtcgatttggtgcaatacggtgttccatacaaatacaagaagtatacaagtattaagtttatttattttaaatagagttagtatagggtgtagtgtgagggggattggttggagatgagaggaaatagggtgaaaatgaaatagggagagatatttaaaaatgctggaatagtgggagatgagagagggaatgttgtagataatcttgtttgcccatgttgcttgtcaaacggacatgtctgactcttgatgaaatgtcccaggcttccattgccccaactatagatggtcaagtgggtcatgttaagcacgacacgtgcacgattcatatagtaccagtgacggcacgacacgggtctagtgtcgtgtttgggccgccatcctggcacgatggattggcacgagcacgacataattaagtcgtcggcacgattatg

SEQ ID NO: 130553 - DNA, 598 bp, Zea Mays
gcgtattctcgtgcgtgagagtggagcgattccattctagattttgagaacggagtgaaaccattatattttctgtttggatccacatttttttggagtgagctcatcccaggtctagttgaaatattctcaattttgaaccactctgctctgatcgctctccaactgaatgcacaatgaagcggctccatcccaccttgctacccaaccaaacggacacaaatactttgtcttgaccgagaattgtctctccccatatttcataaaattaactatatttctctgacaccattcatacatgcagaaacttgctcaaagagttgttaagatgtcaaatggatataccggatttaaaatatgcacttgatcaccgtattcctttgagcacaccagatatgtatccctgccgcagagaccaagcacaaccacacaggaccataatcaaatactaatggcagttgacctaatagaagaatccagttgcattagaatggcaccacatatgcacgaaaaaacatgttcctcataaagcaataggcagcgtagaaccatagaactatagaagaatctgattctaattccaataagggcagaccag

SEQ ID NO: 130554 - DNA, 479 bp, Zea Mays
gtgcgagacgtggcttgatctagcgcgaggattagcggatgaggagaggtagcccgcaggccgtccgagttttatccccagctttcgggcgctcggacccggtcttctcgcgcggaggttgaacagagcacccgcgagaagagggagactatcctgaccggtggggacaacatgacagaagagagaaaatgccccgcccaacgccccagtggctgactgatgggcccccggttgacagtcagtcccacaggtcggcgctagcccacgctgcacggtgcgcgcagagaggatttgggccgcgcaagtgaagagctttaatgggccgcgccagggagtttgggcccgagtgacgctttccattttcttttcctttttctaatttcttttctcctctctttttattcttttgaaactcaaatctgaaatcaaattcttgtagtgaattttgtactcagttaaatggagattttgaaatcacc

SEQ ID NO: 130555 - DNA, 704 bp, Zea Mays
tacaataatgtccttgcaaaactatcagcacgattcttagtgaagtactctgtgagtgttgtcatagaagaagttggctcattgacaatgtcttgtagtttagttgtctcgtcaataataacagactgcatacctggtaaatggcattggagttgcaaaacagatggattgacaccaaacaatggaaaaccaagaatcctatgtacaacttcaggtggggatatgtatctggcatccctgtactgccgaatctcattgattactccatcttccttatgagcagggtcaactgagaatgatgcacgatcgtggcctttgtaaacatatttgcacatgtacttaatggctttgatgcttgagcaagcttcaacatttatgtggcagttattacctcataagcaatccaggattgtatggaaccacccacctgttatctaacacacatcctcttacctttacacgacgcccatcatctctcctcctatacaaagggtatgaatcctttccttgttgagttgcagcacagaattgtcgaggatagcgaaaacgacactcttcattgaccatacaaggacactttttatttaaaactccacaaggtccatgtagcatatgcttgatgaccagattatgcaaaacatggtatttatccttctctggtatctctgcacaaatcactttgtcatatgcatctgggcttgtca

SEQ ID NO: 130556 - DNA, 475 bp, Zea Mays
aaatagagtaggaggtaaagtggcgtaccacgcgaacacggttcctgttaaagacaatgaaaataaacgcacgcgaaatgcttctgtgtcggccaattctcctaattgtgctaagaactagcctatgtgttcgcgcgtgttttttccttggtcacccaaaaattttgcgaatttgggtatcctggttcccctgggggtatgggtggtgatcaaatcagttgtcataaggtttacgatatgattggcccccaggcaccatgcttactccgagcttatctcagaacaccccggctatttcctccctcactatatcgatggcagccgatgcgagaccaccggctctctggtcaaacataggtgaggttggctggatattagcatgttgtcttccccccattggtttgagctatgtggtgcattgccatttgccctatatggctcataggattgatcgttcctttccggccttctaggc

SEQ ID NO: 130557 - DNA, 588 bp, Zea Mays
cctcgaatcctgaggaatttaagtttccaaactaatcttgattgtatgttctgtacaggattttgtattaataagcacctctttaatttaataagttttcaaactaatcttgattgtatgttctgtactggatttcgtattaataagcacctctttgtacgtactctgatgtacttgagctgtggtctccctgtttcacttataggacatgctgtgttccctgtttcacttataggacaggttgtgttagtcggttaggtctttcaccactacaaacgtgtactgcaatcaataatacgacaccgctacagatgtgtttgatgagtacttaagacagggaagtgtaccattgagtgtctagacacgtttgcatgaggggtgattgaggtgtttgatgggtgtacttgtgatgccccacacgtgaggatgttgaagatttactttaggtcaatgaggctcgtggtttctttggaatgctatggagtttttttccgataatggaagcttatattaaaataccaagtcattacatcaaaagaatacaaagccttggtacaaacctccggcctctacctaatgcacatagtc

SEQ ID NO: 130558 - DNA, 431 bp, Zea Mays
gaatgtatttgctgaaaactcatgcttaattcccatgccatcacatagctcatccattcttgtgtttctaaactcacttccattatcactcctcaatttcttgattttaaattcaaattcattctcatttctcttgacaaatgttttgaggatgatgaagacttcatgtcattgagatagaaaactcatgtggacattgagaagtaatccatatttgttgctactaatgcttgtgtatgtggttggtccaataaagacatattcaataattccaatggcctactattgctcattatactcttgtttgaatgagtatttctagcttgacaagagatacaaaatctatccttctaaaaatatgacatcttttaatcccttgactagatcatgcttgataagcttatataattgattcatgccaacatgtgcca

SEQ ID NO: 130559 - DNA, 703 bp, Zea Mays
aaatttttccttgcaaatcatggaaagagcctgtacgatcatcagcttcaaactcccaatgctccagattcctggtattcgactcaggaagcggagccacagtgagtgaagcatgaattgacaaatgacggaaatcgcttctcatccccaatgctgaggaatggataaacacagaggagaaggaaggacaggggaaacgaccgacacgttcgtctgagttgtagaagaccgaatgatttctcgcaactcagaaccaccactaccaaatcacacccacccgaccaaacgaaatgaaatacaatcgacgaactcgaggaaaaaaatgtagaagcaaaacagagagcaatccactaagaacgagaagcggaaaaggcctcaaacctgccgacgggtactcagacccacctgaggagcgacccaagtctccgatagattcagcagcccgagattgcacaccaccagacgacgggggacgcgatgaagcagcgacgaggagggtggtgcgacgggtgaccgggatggagagccggagaggaaacgccctttccctcctgctgggtgctcggagtcggcgagtcgccctttccctccgcgaggcggagacggaggaattctcttgcgaattgtcagatgcgtacaagattttcgcgatgcgatggaatagaacaaacaatattatcacaaaagccaaaagcgcaaagac

SEQ ID NO: 130560 - DNA, 513 bp, Zea Mays
atgatgctattcggtatcccgaacctgaatattatatcttgtatgaattccactgccttagctgaagttaaagaagcaatgggcttgaactctatccatttagtgaatttgtcgatagccaccagtacatgagtgtatcctccttgggctttcttgaaaggtccaatcatatccaatccccagcacacgaatgaccaagttatgggtatagtctacagctgctgttttaataagtactggcaggcttcgcacctctgtactaactcggctgcgtcactcttcgctgttggccaatagaaacctgacctgaaaaccttcccaactagggttctggatgctgcgtgtactccacattacccagcatggacctcatccaaaagttgctttctagtggctgagagaatgcatttcatgaggactcctgatgcaccccttctgtatagtgtttccccaatgagtgtatagtgagctgattgtcttgcgatgcgctcggttgtattcttgtcatctggc

SEQ ID NO: 130561 - DNA, 435 bp, Zea Mays
gtgccttgggtaatttggctcctttttgtcaattggaccttatggatttggcaccagtaactaagtgaacatctctgatctttagaagagggctgattttcaacttagagaaaatttggttgctcttgagtgctcttcacttgggggctgaatttgggggttttgtgggacctttttggaataacttccttactctttcttgtagatatataaatgtacttcaactttggtataaggtttaagtcatgaaatggtcatttgcttatccttcccattaatccagtgcttgggggtctaatggctcaagaggggggggtgctagggtttgagcatctttttccaaggtgaagatacatgaaaagctagggtatcccttctatcatgattattacttaattaagccatggtttctaatgttttagtgccccttctccc

SEQ ID NO: 130562 - DNA, 337 bp, Zea Mays
aataagttcaatcatttgtcctagtatgccatcaaccaagtgaatactgatctgaagaaaaagaattgtttcatgaggggacttaataacaggcttcaacggaaaatggcaacatgtctggatcttacctacagtagggctatcagtacaacactagcagtggaagccaaaaatgtcggccatggaaaatcaaagggatttggggtgaaaggtccaaccaaggacatgagaagagaaccaggttggtgatccaaccttttaaataagaatcgttcttcgcctcgcccaccttcctatcccttcaagtagcctgttttcattcgtcccaatactgccc

SEQ ID NO: 130563 - DNA, 960 bp, Zea Mays
gggggaggccaaacccgcgctcataaaaggacgcgagcacaaccacctcgtcatccctaggatggaccacttccccctcgcactccaatcttcacactaaaacatccttcgggggaataaaccttttttctctaggccacagaggcaactctcttagatcgggcttactgagaatgacgccataggcgcaaggagaaatctgaaagagcgcaaggagaaagaacaacaggggagattccgagaggtagaacacaaggatatggtaagcgaaatctaaccctgggcgcactctccctttgtttacgcgagtgggtagggggtagccacgaacgaacgatgaaggaactgccccttcgaccaagggacacctcggatatcgagcaaagaggccatttgttttgcaggaccttgtcgcttggggcagagcaccaggaacatacgccacgagaagtatggtagtaataggcggggaaattagccggaccaccatggaacccaagcacgacgtagtagacaagccgtttcatgtcccatcagaccgcccatgccaagcaacatcatgatgacaccccattactatcgcgtcacagcagtaactgccccgaaccagctaggtgagaaaccagaatgctttcagaaatccccatgcagagtgaggggtggatcgagcaagctcccagcgagccacgggctatgtgactggttcataggtcatttgctcgaatccacgttcaaggttgtacctcgcattctcccatggaaacccagccgaaggggtggccatggagccccctttggccgggaagaccaaccaaagtgtcgacatgggatcgaataaggaaggacctaatgagatgcccccaacaggccgagctccctagtgggaccactcgttgtacatacgccaagccgaagggtggtcagatctcacttggataacctattcacagctcgacggcc

SEQ ID NO: 130564 - DNA, 808 bp, Zea Mays
gtgactcgccgcactgttgctacgtaatcgcatgcgttgacgcgtggtggcatgccgcatgcgtctcgtttccgtgcatctccgggggggggggggggggggggggggggggtgcgttgcgcgtgttttccctgtggttttgcggtgtgagaggaatgcggcgagctggacaaggaggatccagagcgcgagatcggaatcggatcggggttagcggctgtagatagcattcgtcaggtttgtgtttgtgataatgagctcgccgtggttctgtggtgtggttatgtatgcatgcatgcatgcatgccgaattgtcaactgatctgaatcctaacactaaataatgcacgtcccggtgtgtgcaattccgcatgacgttgccttgactgctgttttgaatagaagaaacctacctttgccgtttgagaattcggaatccagcgtcgaaatttgatgctgagaccgagcggtcatgcatggctggctcgtgagatttttgactgaattctcctgcaactgcaaccgtgaaagtgaaacaatgacgaagcactcccacattattcacccgtctcatgttgtactactgatgagccgctcgtgacagcttgctgcaactctcggtccctgcaaaacccaggccacatgctgttcagtcgttggacccaggaacaggatagataggccgtgctggaattgctttgcctcctcctcagtctctgcactgcactgtggcaaaagcctgcgtctgcgtctgcgtctgcgtctgcactttgcctctgtgaaaggttcaggctgcttcggggacaca

SEQ ID NO: 130565 - DNA, 377 bp, Zea Mays
cagaaatgcagagttggacataggaagctcaaaagcactgctcacattgaatattgggcaacgggatgtgcaaagggtatataaattttaggattgagcattctaaccaacaaatcagctgcctatcggtgctccaccaggttgtgttaaatgtgttcgtggtaaagatggaatttgatgttgcataattacttatgagtctttatatacatactatggttacacaatatatctgttcaatatgaccttgtgtggaaactaaagaacataatctgttgggagcttatattatttggtgggagccacatgtgcactcgcctatagggtgttctgaactatcagtttgtggttgtggttgggatttagccatttaggtg

SEQ ID NO: 130566 - DNA, 365 bp, Zea Mays
gcctggagtggatatgagatggcggcgtccgggagctcacgggcgaggaggccggtgatggcaagggagctggcatggtggccctaggtagggaagggaaagatcatgacgtacgtgtttggttctcgtggtcgccatgaacatgaatgagatgaggtgaggccaccgatcaaactaaggtagctattattccaggccagcgaggaagtttctcaccaatttatccatggcgagggacgtagataatggtgtgccatgctgcaaaagcaaaaacacggatagattacaaacgaagcagcctcaactcttccgtcttcctgcattcacgattgatcaattatatctcgcccactatttagcctgac

SEQ ID NO: 130567 - DNA, 280 bp, Zea Mays
ctctctctcttcaagcccaaatcacattttgtgctttaaacatctagtcgattcactctttggagtttggactttaccgccccctctcctttccgtgaactcaatcactctcttctctatcccaggaacgctccccactctcctgtccatcggcagtgaaccatgccactccgccactaagcgctcctctcttgctctcaagctcgccgttgttcgtcgctcaccgaagctcattatccctgctatctcttagagctactccctgcccctaactctcatg

SEQ ID NO: 130568 - DNA, 473 bp, Zea Mays
tagcgacttcgtaataacctcgactacgtgttagtaatattatttggttatgttttcgttaattatgtagttaatcgtttattcgaggtttatttgaatgacattctaagtaaaattaaggtatagtttttaaatggtgattttatagatgcaaattaatgtggttagtgccaactaagatgttttcaactaatatttgtttaatgttaatgtgacgtctgtttagcttttctcgaatatcgcgttgtttcgcacgtggtcacatgctgattcgcgcactatttcgcgcgcgtcgtcacgcgggccgtttgtgcgtcatcgtgctgttcacgcgcatagtcgcgttgactcatgcgtgacgagcactgtcgtgcgcgttgtttcgcgtgtgtcgcgcgtgccattcgcacacgttgtcacatgtcgtgtgcgtgcgtcgcgtgtgtcatttgcacgtgtcgtttgcctcaccg

SEQ ID NO: 130569 - DNA, 1314 bp, Zea Mays
ggacaatcaacatgaggcatcatctcagaagacaacttataataagcatggaaaaggcatggattcttgtgttgaaggtattgctagaagtatatcctactgcaaaatagttcaagtaggcatgctagaagtatatcctacttcaaaattttggtttatgtcgtagagctgactcaacctcgactactataaatagggaacatgaccagagcaagtcaagtcccatgtttcaaacaaaataacactatagaaatattacagaaaaatcagataaaaattatatgtggtatgagattaattataaatcaattccctgcagataggcatgcttgttacatacttgtggttttgcatctggtacctgtcgtggatagtatagtatattaaaaacatggaacaactaatcatatattcatattcggaatcacctttttagaatgtcttggtcagcatagaatctactataacttttagaatcaatacaggaagtgcaaggagaatctactatgtttagtggttgataaccaacatattaacagccttgaacaaaattgcatttggtcaaggaattaacgccacttttgtctttggaattaacagccttttctcactgccttgtactgcatatcttccggttcttagtagctttcttgcaactctggacaaatatattactgaccattatcctcttgattctacttaggtggcacaaaaaccttctgtgtaaaaccttaatagttttatactttttatggaaagctttgacaattgtaaatgccagccatctatacactcaaactcaaataatcaagcatgcctatgtgcagggtgtcatggagactaatattttttaatgacacgagcttagttgtttcgaggctgtatatataaccaccatgttctttacacgcacatctaggctgttcccagccgagattagctaaagggatcagcactaagcttggggcttgggcacagttgtcgtcatgatttttctgccacatataagtatgtaacaagcatgcctatctgcagggaattgatttataattaatctcataccacatataatttttatctgatttttctgtaatatttctatagtgttatcttatttgaaacatgggacttgacttgctctggtcatgttccctatttatagtagtcgaggttgagtcagctctacgacataaagcaaaattggaaaggcaccaacgcatagctgagcgagcggtatactccaatgctattgctatgttgccttctacttgtttgtttacctagcctgtggcagtcctcatcattaccaatttt

SEQ ID NO: 130570 - DNA, 657 bp, Zea Mays
caggaaatcaaacatggatcctcacggacaagcgcttcagcagtacccgacgtcgacgagccaacttccaaagacctcattaacggagaccgtgtcttcgccctgtaggccctcaccaaatatcaagcccaaacgaaggcctggcgcgaccacgcagtcgtcccaagagaattcaacgaaggggacctcgtacttgtccgcacaacccggacagagtcacggggtaagctagaaccaaagtgggaaggatcatttatcgtcaagacaaagtcatctcccagcgtgtacagattaacaacacaatctggcgaagacctggaacactcctggaatatagataatcttcgcaaattttttgtttgaatcctcagggccatcacgcccttgtaattcaccaaacattattattccggcccgcactcttttcctcccaggggggtgaggtttttaatgaggcggagccatgtaaatatacaagcaaaaatcccccaaaaaactaagcaaatgtcgaaaaagaccgcatcgacggtcttcggcattcgaccacaccgaagtcaccgcgaggggcagcgctgactaccctcgcgtgcgacactccgcgcaaaagtcgcctaagggtgcagccggattctccgtgcaaaagtcacctatgggtgc

SEQ ID NO: 130571 - DNA, 404 bp, Zea Mays
caggtccattcttgccatttgcgttcttgtttcggcattcttacttgctctggatgatcgccgaactgtccaattaggctagaacttcgttagtcaccgggaacgcgtgcagttgtcttcatcatccgcggcctacgtggtcagagcttgatagtttaccaattatagaattaagttgggggaatcatttggggaaggtccaatttggtgttcgccgctcgggggcgccagtacttgccccaattggccggcctacgagctcaccggagctcggccgcgttcgccgtcgtcggggaccccatcctgcgaagaaatagaagttcgggggcgtttctgtaaactgtgagtgactctccgaaatagtgtgcggatttcttctgtgattattcaaggcgccagggtct

SEQ ID NO: 130572 - DNA, 392 bp, Zea Mays
attggatagaccgagggcattactatcatttccctcataatcttgctaaacaagtcttaaggacctcttatttctctagctagatcttcttccacgcatatacgtcatcagtccgaagctccgtagcttcgtctttgtaaccataacaacaacatgttatctccaatcgaaggtatcctttggcatatattctgttacacttgaaacaaaattggcaatggttaatgaattaatgttttgaggaccatcgtctaatgaggaccccaacaaaaacatccaaagaaaaataagccatcacaagagagagcatgaacatactaggatggcaagcctctactgaggccataattgataaaatacttaccatcacaaacacatatttcatgactatt

SEQ ID NO: 130573 - DNA, 737 bp, Zea Mays
cagccgcgcgctaaaattcctttctcctgtgcgctgtccggtggttcaccggacagctactgtgcgctgtccggtgtgcaccggacaggcactgtagactgtccggtacgcccatatccggtttttaaaaaatctttcccctctcgcgcccgaggcctggcattcctcttctctgttctgcctctcctctctgtctctggcgatctccccccctcaccggcgaccacccctcaccggcgtccactgttctccggcgacctcgacccagtgctcctctcctgccctcgctcggtgagcagctcctttctccctctgtcttctctctctctctctgtttctctaggctgtgcatccccctatttccaccctttgtgcccaattcaaaatcctgggaatcccaatgaatccatgtggtgcaatgtgttcctatgtggccattgagtatccttgcaggttcctagctccttcgggagggttttcccaccccaaatagtcttttcaccgaaaccctagaactccgcacgtcacgtgctcggtgaaattcccaaactagccaaaaatgctccaattgaacccaaatttttcaggcaccttcacaacatctccagtaacatattcgcaaaatttcatgcccatctgatattccaggctttaatttcaccaaattccccgtttcgagcgatcgtttccgagccgagtgcccaaatctcattttcttcgcctaaattcaaaccaaa

SEQ ID NO: 130574 - DNA, 386 bp, Zea Mays
ggccgtggtgccgcaccatcgcgcgggtggagccgtcgccgcatcataccaaggtaataagcccaccaacggattcgccttgacctcctctacacgtagcgctagggaatcgagaatttaacgtctgggcgtgtagttggggagctccggtcatggcgctccaccgcggtgagcgcgccgtcgggatttgggggtgctcgaggaaggaggcacttgtgccgttggatcggtttccagcggatgagtttagatcgtgaccgattcgttctgagccgtcgatctccgatgtgagggcttggattaaatctggtttgtgctggccttcaaccgttgatcatacgatgattggcccagatcaaatcctggcgcatcccttcaatcattaa

SEQ ID NO: 130575 - DNA, 574 bp, Zea Mays
tcactcgtcagcctagtcgtagacctaattctagccatttgagttctcaagatgaagctagctaacagttttcaacacttatgtcgaagtacaattaacaaacaaagagaacacaaacacctttggctgcactaaaaattttcagcagcacaacgatgcaagtgcaatgaatgctgtaataacttggcaccaaccaatctgtttatatagtcctgcaggtgaagaaggcaaaccgccgcaccaattcactggctgatcagtggaccgatggaggtcgtaaatattttattcattttttaataacaacatcagagaaggtgtttttagacattcaacattcagaagccttcatatgtttcgcggattgagctcgttatgaaaaaacgatctaacaccgtgaaggggctaatgttggaggtcttcttctctactgaaggtcctcagaatgaacaaaaccgtttttgattcatcttaacagatacatcgaaggatcaaatgtcaaagctagagcagcgaagcaaggaacgcaaggaatacaactgagcttagtcaagaatcagagctttgggttaag

SEQ ID NO: 130576 - DNA, 283 bp, Zea Mays
gtttgcatggtttacgctatcatgtatcacaacgttatgcagtcgtaaacgtctagcacatgcaaatattcgtgcgcgcgattcctggcatgcaaagattccatttatgcatgagttatgcacatttgtacacatatttatggttgcgtaattgcatgtcgcgtgtaagacgggatacgtggttatcctttgcataaatggtgcaggctggcgtccagtaggccgaacgcgacccgatcggtctccctgcctggggcttcgcccactaacggaagcccaggac

SEQ ID NO: 130577 - DNA, 570 bp, Zea Mays
gcactaccgcaggcggtggcgtgctcctcacgcggcggttcgccttctccgcacacggaggccaacgcccaaagagtatgactcgtgggcctgggcccccatgccagaggctggtctgctgcttaagacgccgcccggggggtcgtacaagatgtcgtacgccgtggagatggcggtcgcgcgctcccagcgcgaccctaccgatgtcgagtaggtcatacctgtagacataaggctagggtcccgcttgaaggcggatgtaataactttgtttttgtaaggtaatttttgagtactatttatcgagtagtattagcacttatctacatactatttgtccctgttgtgtgtggcgctgtcgactcctccccggtacctggccccctgggatgtaggctcaacgtgttgaggatggataccagcatacctaaaagagttggcaacgacccctaggaggcagactcgactgggacctggacctgaacatagcttcggctagggagcgttagtagcacacccataggacccatcgtctgacattagccatcctttgatatatgcacgggacct

SEQ ID NO: 130578 - DNA, 683 bp, Zea Mays
ctggaaactacctcaccacgattatggcggaaaccgagcttacgaacacatgttcccaccaaatcatggttgaactaggtaaatgagtgccacagtgagcttcacaaacatgaggagacatgaaaacaacgcttgatttggacggtgccttaccagaacggattggcaacggtggaactgttcttcgcggtggcggagacaaatttgggggaaatttgaaattcaagagctcgggtggatgattaagggtgggagcgggtgctatggcttcacaaagaactctagttctactacgcacacttaatttgagagaaggggacagaggtggcgcgaattcggctccaatgcaactcacggtgtgggatgatctcacctcgccatggaccaccgtgctatttatagccacggcgacccgacagatggtctccggccacggatagcatcacaagcacatgcataccatgtcggtaggaggcacagtgaggcagatcgcggcatgagcggcaccacggcaaaagttaccaagccacggtggccgccggtgaagttccccgctaggcttgggagatggcgccacgtgcaggttattccttcccagcgttatccacaccataccgcgcgcgaatcagaaaggcgacgacacaaatctacgggcagaaaggtcgtcgacggtgaggttgtcg

SEQ ID NO: 130579 - DNA, 524 bp, Zea Mays
ccaaagagcatggatctgggctggtagccgcaagatatggcaaactccttcaattctgatatatcctcttcggaaagttgttggccacccaggtgccgaaggtcgaaattcttatcttccgaagaggtttcttcaattctttttcccttatcaggagccgcttcggctatgtatttctcagaaaccacatctgatataagtctatcaatttccgatagtatggtagcaagattatcggcttcggctcagcggtatcttcagcatcagcagccataatagttttttccgccaaagctacaggcggggtctgttcaattgcttgcatcgcgttcatcatccgttgtttcttctgccccctggttttccccttggcagctgaagcggtctcctttgactgcaataggctagtcaaatctgatcttagaggacttagtagcgcaaacgggatgagttcagtcattacattcagaatttccgaaacatcagcagaagaaggcgaatcagcgcctatagctttatctggc

SEQ ID NO: 130580 - DNA, 278 bp, Zea Mays
tgacctacatcatgtagtctatctcatccaaatctatcttaaccatattccctaactccgatgatatgcactaacctcaagtcaatgtgaccaagaccggagaagaagatatcaacatcaacaaggaaggacataacagtcaaagcgaatctcgagataaatcaagacttaaacatttcgaacgaagtactttccttgccatgatcctccttacctcaacgtgtccagcttatattccacataaatagtaactgtatacctatgctctcccaaacacc

SEQ ID NO: 130581 - DNA, 372 bp, Zea Mays
ggattgtgttttggtctgatggacctctgtttgataatgtgcatatcggaagatccagtatgacatacaatagtttaggtttgtaaactgtgtattatgacctcaaatgatatacaatatagtagccgagtcattgtggggaacaaagctcacacctgaaggttcttgtcaatttctagaggcgcctttatcccagatgactggttaagtatgcaccaagccaaatgtatgttcgtgtcaaaccctataagaatgcgacctgcaaagctgtgcctgtttcatatttctccatttgtcttattgtgcaaaatcaggtgagtagttgagttttgttggtgcgggaacttgctgtttttaattcttacttccctg

SEQ ID NO: 130582 - DNA, 333 bp, Zea Mays
gttcttgaaaatgaaatcggcgaccacagcttctgcagtcagacccctctctttcaacaatccaacctcagcaagcagagcccctgcctcagccacctccaggtctgtgggggattcggtccagctcggagtgcgaacatctggccgtctccttgaccgtgggggagggaattcccgtgattctccacgataaaccattccaggcgccatcctttgatgttgtccttgagtgggatgtcgaggtagttggtcttcctcccacggcgcatctccaaactcgtgccccccacaagctggtgctgccctccggccatcccaggccgacagtggtac

SEQ ID NO: 130583 - DNA, 629 bp, Zea Mays
cactatttcactttaagagctcaaaagatttagaacatctttacgattaaaaaatatggtttcaaaacatgaattgctaaatgtgtgtcctacgtgatcgtgtttccgcgtggttcggaacctacgacgatggccattattactaggactataaaacatgatactctttggtataattagtaattgtaccatgtcaaggtaataaccccggggcccaaagcccatgggtcgagtaaaggaaaaggtgtgcccgaaccagcccagacaaaaaccgacctgctttggcatgcataggcaagccatgggtgctcgtcccccacttcggcataaagcatggatacctgggggcggtctaaccacaatggtatgagacacacctgaggccaatccctccgatcaaacaaaaacatccggctcgcaaggtaggtcggaccgcacccgtgttaagatggattgtcctacggatgaggctaatcctctgcatcgccttaaaagccctccaaactacacgacgccatccatcgatgagtcttgggggtgagtttaaccaaccccaagaagtggtcaccgtattgtatagccctacaacgcgtactccggtttaggcctccaattggggtttagggaac

SEQ ID NO: 130584 - DNA, 629 bp, Zea Mays
gcttggtgcttgactaccgtacggacccgtcggtgtgcttaatttatagtgtgcttgagcggtggtgcttcatttggatgaattgcgctggcggccgagaggggaatgagtcacggcggcgatctaccgtggcaatcgcagagcgactaaactacgacggccattggatggtcactacggctcatatcgacgcaataaacttcctaaggcgtggcatcctcacggtgaacggcgaacacgtcggtgattgccgctcggccacgttgccggtgtgtactgatgaaccatcaagcacacagtactttccagcccatccgcggcaagatctttcaccccgtgatcattatccgcgtttaattcagcgtgaatcatggtgatagcacaaatccgcgcacgtggtcgccgtcggtgaggtctctgagtgggcgatcaattcggttactgtaccatcgtgaaccttcatcagctggcctgacagagcatgattgggatcgattttgctctatattttatgtgatgactcaaccaatactctgcatcaaagtcgaagcctgataaaccagctctaactttgttgcattgtgcacccacaaaaagccacaaaatcttacttaaaattgagccctaag

SEQ ID NO: 130585 - DNA, 424 bp, Zea Mays
caaacaccccctaaaacagatcgttcccgtacacgctccacatatgaaaaactgcgggcagatatgttgtacccattggctttatttagctaattgtgcgcttcacttttccgagcaagacgcatctagaagaagctgctgggccacaccctgtactactactgctatcgctggtgtgcattacaatattggcatagagggccgcatcaaagcgagcacattctccccccatccccttctaatcgccaatcagccagaaagacctcaattttctttgccctgctccacatggttaaacaagtccactcgttgtccctgtcactagatacctttaatttgctgcacttccgttgttgcctaaagaagcacatcctagattgacaatctgggtacaaatacggcatgtgaaaaagttttaactctc

SEQ ID NO: 130586 - DNA, 899 bp, Zea Mays
agcccctcaatccactccattacccttgctcccaaacaagccctaaatgtgaacttataaataccccaaagtaccaagtctagatagataaatgttgtacagttggtatccagcaccgacaacacattttacattttagggtttgtccatgtaaaaacctcagtccatgtattcatctcaatacatatatgatgataaatgttgtacagttggtatccagcaacgacaacacattttacattttagggtttgtccatgtaaacacctcaatccatgtattcatctcaatccatatatgatgggatggattgatatagaattatgatgtggaattgagttaaaatccacacgaatccacccaaacacacatggattgacgattgagttagataccaaagccttagaaaacatcaacggcatagtgctgtcactgaaacaacgtgtatattatttttcgcattaaaattgcatcaagggacccctatttcctttaattaacacaaatgcagatgagcagatttaccagcataaaagcttggtatggttcaatatagtagaaattgattctggagttttaaaactcggcctaggaggtaagatagtcccgaacattgaattaagaaatataggtcgagaaaaccctcgaactgccccactcatacacatcagccctgtagctcatgtgaccatacacaacggcaccataggccatatgagaaccttgaacccgaccaaaaccaaggttgaccttagacatgtgctttgtcgtaggagagacgagaggatttgttcaaaattgaacagaaatgaattttagccccccctcaatccccatctcgcaaacaagtcctaacggtgttaattcagtccacaaaaagacgtttgtacccttgcaacat

SEQ ID NO: 130587 - DNA, 602 bp, Zea Mays
atttttcaaattttgagaatggatctcccacatatgtgcctcacctataagttcttcaattgtttcttcagcaacgccaaggagatctttagatgaaccagatgcgcctaatgacaaatgagcaaaaccacttaaggatgactcatcgatactctcatgtagcatgttttgacattgagtttgaaagctgaaagatgaatcattagatccataaatcagatcactacgacccacactgatattgtgaataaaataactagcattatcttacctctctatgtacaatcctccatcagaatcattccttgaagatggtgagaagcttgaatcatgaaatacatttcacaatctatatttgtgcataataatctaaatattccctctagttcaaaatactagttttagcctcttttacattcttcaaaatatttgttctacaccttctaggtaacttcaacatatttttttccagccataagctcataacctttcttaattgtaccattacctaacttatttcttcatgtatgcacactttaggcaagactaatcgagggtagtattttcattttatctaccttgttagttattgtctcgatctc

SEQ ID NO: 130588 - DNA, 305 bp, Zea Mays
ggttaatgttgccagatcagatagatattgcttcaaagactcgaaggttgtggcttgttctgggccctaggtgaagtcctttgcaccacgtaatgttttgaggaaaggaagactcgaaggttgtggcttgttctgggccctaggtgaagtccttcagccgatcgcgagatgaatctgttcagtgcagccaatctacctgtcagtcgttgtatatcttttgttgattgtggtggtgccatgtccatgatagcctgaattttgctgcggctggcttcgaatcctctgtgcgatacgaaatagccaag

SEQ ID NO: 130589 - DNA, 709 bp, Zea Mays
gggcgtactactatctatctatctccgtgcattttttttaatttttggtcggttggttgaatctcgaaccggtctagatttggcgctgctacttccgacttccaacgtcccgagctgtgtttgttcgatcttggactggtctaaatttgacactactgctccagactttttcgacgtctaagaaacaagtcctagacaatgacgctttgtgctttaatgcgcgttgtggaacttaaattagatgattaggacgctctagtctagaccaccacctcgcgttgggactcctaggcgtcgggtttccaatcttgctacccagcgtgccatgctgtttccatcttgcaacctgcggtgggagggtggtctcttcatgctcttccgtgaccagtcattgttccgtataacccatatttgtgggttctgatggcacagcagtttgttgcttatgtaccttagtgctagcaaatgaacccaaaatctaacgccaaatctacaactgtactactgcattcacgggctaccaattggtggtgtttgttgcgtggtgcgatcaacagtgctagagatgttgaatcgtctttctccaggaatagctatctcgcaacatattatacccgctgttttgtgtctgttacccttatttgggcatgggcatgctttcagtttgcactgctgattgtgacatttagttggaccgttttacatgttt

SEQ ID NO: 130590 - DNA, 455 bp, Zea Mays
gaccctcaaaatgtcccctactacatgaaggatctagactactggtaatcttggtcatgacgtcgggtccaggatggccgagacgacgatgccatgtggtggaggaggtggtggagactaggacaggaggtggagacacgccggcggtggagggctggagcgtgtagagcggccccgagctgtcacatcgagcgagaagggtcctggtggccagatccttcatagaaaaactagaggggtcaaacttaatggaacaggagttgtcagtggtgaatcgacgaacagagagaagattgtgagtgatgtggggagctacgagaacatcgttgaggtaaaacggcccagggagaaccgaggcacctactgaggtgactagcagagtggaaccgtttccaacgacgatcgaggatgggtgagaggggaggggggatgagagcgagagagcgtgcctgtcg

SEQ ID NO: 130591 - DNA, 589 bp, Zea Mays
cctgcagcttcagcgagccatcgaaatacatccgccatacttctgcagtctccgggttatctggtacttgttgctcggtccactctgatacgaagtcaactagtgcttgagtctttattgtagtacgaggccgaaactcaatgtcgtgagctctcagctcacaggcccacttggctattcttctaatggcttctttgttgtggagaatgtcccctattggaaaaccggtgactactatgactttgtggtcgtcgaagcagtgatagagcttgcgtgcagttagatgtactgcgtacaatagtttttgaacttgaggacacttcttcttagatggccccagaacttcgctgatgaagtagacgggatgctgtactggatatgcatgttcttcctgtgctcgctcgactaccaacgaggtgttcaccacgtgactcgtgcaagagacgtacaacaacagatcttctgccggctggtttggtgtggctccgcgtggcggctttagcactggcggtgtggtcaggaacttcttcagtgcatcaagagcttcatgagcttcagaggtccactagaatttgtccacctttttgag

SEQ ID NO: 130592 - DNA, 600 bp, Zea Mays
aagaaaataaaacctggcagctgtctacactacctgctggccatcgagccattggcctgaaatgggtattcaaagtgaaaaaagatccagagggcaatgtggttaagcacaaagctcggttggtagcgaagggatatgctcagcgtgagggggtggattttgatgaggtttttgcaccggttgcaagaattgagacagtgagattgttgattgctctggctgctcagaagggttggcaagtgcaccacatggatgtcaagtcagctttcttgaatggtgagttgagggaggaggtgtatgttcaacaacctccaggatttgttgtcaaatgtggaggtgacaaagtgctcaaactgaaaaaggccctttatggtttgcgtcaggctcctagggcatggaatgcaaaacttgacagtgaactgatgaagcttggttttgtgagaaatccactagagcatgctgtttacaggaggtcagatagagatggttttctgctagtaggtgtttatgttgatgaccttataattacaggctcaaacaaagcaagcatagaattgttcaagcaggagatgaaagggaagttcagtatgagtgacttgg

SEQ ID NO: 130593 - DNA, 516 bp, Zea Mays
gcttgctgaggttggattgttgaaagagaggggtctaactgcagaagctgtggttgccgatttcattttcaagaacattcaaccactaaaagacagagcatacccggcttatctgtatcaaggcctcgctgattcaacccgggttaccaacagaaggattcctgctgtggatttggtgagccggctcgagatgatactcagaggcaaggtgtcgaacatcggcgctcctgttgcatactcagcctggaatctgcctccttccaaggcctttaccagttttgtgtcaaatcctcctgctggtaatagcggtttgggacttagagtgcgaccctctcccgaagaggttagtgctttggttgcctcacttggcgaaatccctgacgatgagaggcaggttcatttcgaggtacctttgaatcccagcgatgcagagataagtgccatgctagatatgttggctgaagattcctctgatgcagctcctgctgaaacactggctgtagcacccatcccaga

SEQ ID NO: 130594 - DNA, 628 bp, Zea Mays
ccaacattaaaatcttgcagcaaatgcggtggattgggttacttaaacaagatgggagggaggtaagcaaatgaaacaaattcatgacattttgtcacatcctcacccttggccaatgtcaagaaccctaatcggccttaggcgctagaggtgaggccacaggtgaagacacggtgtaacccaagcctttcagaacttgtttttcctctctttggccctcattcgttcgctatctggaacattgcgacgtgggctactcatccccaaattcttccaaggcaggcatcattgcggcattgtagaggtgaggggatggggattcctagcgaagggacactagaggggtgggtatgacgcgggcgtaccttcctgcagggcgataggcgatgcaagaaagtctagaggtggacgcagccggtgcagagctagagcgcctcctcctccggcatcagttgcgtcacgacgacgtccacggccatgggatcctcagcaccggtactggcccgtgcatccaccatgtcgcgcgagggggagggggtagtattcctgatggcgcggcgacagggggcgctgcacacagctccctcgatgtcctcctcctgaagtcgcaggtttggatttcgaggag

SEQ ID NO: 130595 - DNA, 439 bp, Zea Mays
ggaatattctcaaggtcacctgaaatgccaaaatcaaaattttactcaacgatcgaggtcagcctattggtaaaagtgctagacaactttcaagtgctattgggtgtcaagttagaaagaaattgtctattgctaccacggactggaggcttgttgatataaacaagaagtatgagttgtgggaggatataaagacatattatgatgtagatgctgctgccttaaactgggtgatgcgcacagctggaaagaagtgaaagcaatttaaagcatccataaagcaatgatacttcaatcctgaattgtctataaaagaaattccagaatgtcttgataagagggttaatgatgatgattggcactctatgtacaactattggatgtcttctgaatttcaggtaagctctacactttagttctaataaagcaaccatacttc

SEQ ID NO: 130596 - DNA, 458 bp, Zea Mays
gatcaaatcccggccgaaccggtgcgcgcccagagccgcccgttctaaatccgatggcaaagatttaatgaatctaggatttactattcaccactggatcacgcatctacggctgcaatccgtttggtcgaaacattatctgacgtctaatccccacagtcggtaatcggatcaacgggcacggctcctcctatccaccgatggtcacactacggcggcgcatcccaagccacggcggcgctgtcaccggcacatagctaattccaatgccggtcacgcatacccgacaacactaggtgcaaaacaacgtctaggcgatgcggaattggaacggatggtgctcacccccgattgcagtgaaggtgcgccagccctcgtcgtgaagcagccccgcggcgttgagagactccggcgaggaattcaccgtgcaccaaatatgcccgagccagcatgaggtc

SEQ ID NO: 130597 - DNA, 457 bp, Zea Mays
tccgtatgagctgggatactggtggaccggattagtggattagtaaataatgctaggtgtttctttctagatttcttggtggatttgaccagcgtcctatgaagctggtgtgttgagttcttttgacctattggatatttggtatgatgttctgatcctgctgtcagacttgaaccctgatgcttggttgataatatattttgtcttatgacgtttgcggcgcaccaaatgttttaccacacaaagaatagtaccatccgtgttctcatataataggagcacaagatttcaatgtagcattgttttggtaatgggacttcggtcctttctcgtagcattggccttatgtcacattgcctcgaacagaaggaagctgatgatttccgtatgtgctctgtggtgttgacttcacgcttacactctcttcgcttcgtatcctgcaaacccttctctgtgt

SEQ ID NO: 130598 - DNA, 639 bp, Zea Mays
gcaagtggagcttgagcagccaaggcgtgaccgatgtcccagcccgcgtaggccagggccacatgcctttggcgtgccatccacaaggcacagttccctatgaaggtgagggcactagcaaatatatccaagtatgatggatccttgaatccagacgtatggttggaagactatcgcctcacatgccgcatgcacgaggatcaaggatgaccacctcatcatctagttcctccccatccaccttgtggaaggagcgagggcctagctcgaaaatctaccagtcaacaccatccacgattgggtcgacctccgaaaggccttcgtcgggaactttcaagtctcctacaagcgccatgggagctcctgggacctcaagaggtgcacccagcgaagtgggaaaagcctccgagattacatccaaaggttttgccagaaaatgaacaaacttcctaatgccaccgacaccgacgtggtgagtgccttcccctacgttacaaccaatgaggcactcgtccatgaacttgggcgggggagaccaagaacgattaccaacctcctcgacatagtgaccaatttgccaacagggaggacgcagtaggtgcaattttttgcaatgccagcgaaccaagcggctagaag

SEQ ID NO: 130599 - DNA, 595 bp, Zea Mays
ttcatctctgattcttgcgcagagaagacaacgagcaagaagggttcgacgacgatgggtgcagacttgggctgcggcgagatgttgaggacgcagatcgaggccgagttgcttgtcaccgcagtggagctccggcgtcgatggcacgaacagaaatggagaagcagcagcaggcacgcagtgggatggtgagtgcgggcactggatcggctgtatgcagagcacgagagcaagcaacgggatgaaggaaggggctctaaggcagcttttataggccgagtgagggagagaaattagtgccagattgtttgtgatttaaatgccgttgaagcgtcttgatttcgtgggagaacggtagctttcattgccattcacggtggctgtggaaacgacgactcagtaggcgcgattgtggctaacgcggcggaggctgggcatgggcaggtgcaggcacgaactggccaagcggtaacgcgcgtacgagcgatttagtttccactggtaacggcaagcatcaattccattaatggcagtccgaccacgactgtagtgaagacacgccgcgcggcgtggagcgcgagatggcagccggggc

SEQ ID NO: 130600 - DNA, 365 bp, Zea Mays
actccattcaaaatttactcctttcttcaacaattctgtcattggcttcgcaatcctcgagaaatccagaataaatcgccgataatatcctgccaagcctagaaaactccgaatctgtcgcacggtggtaggaggcttccaatccatcacctcttgcactttctcaggatcaactgatatcccatcctgagaaatggtgtgacccaagaatttaatctcccttagccataaatcatatttggacaatttagcatataagtgatgatcccgcagtcgctgaagtacgatgtgcaaatgctcagtatgctcgtcttcattctttgaatagaccaagatatcatcaatgaagaccaccacaaacttgt

SEQ ID NO: 130601 - DNA, 324 bp, Zea Mays
gcggcaatatcgatggaagcttaatcctgaaaagtgtgtctttggagtaccagcaggaaaattgctcgggtttattgtcagccaccggggaattgaggctaatccagaaaagatcaggctatcatgagaatggaggcaccgcgatcacagaagaaagtacaaagacttactggatgcatggcagccctaagcaggttcatatcaaggttgggagaaaaaggcctaccattctacaagttgctcaagaaggtagacaagttccagtggactttagaggctcaggaagctctagatgccctgaagaaattcctgacaacaccacca

SEQ ID NO: 130602 - DNA, 671 bp, Zea Mays
ggtggctaggcttagtcacctgttctgcgcattgtggacggtccggttggacatcgtggatggtccgaatctccatcgaacggcccgagcaacttgagcggacggtccaacagcatccagggacaatagcgactacgcaccttcaagccacgatgacccaaaataggtatgtgtaagcaaaatttagcaaaagcacctagtcagctgattaatgttggcccaacttttgttcaatcgttgtccaaatatgtcaacaaaagggccgggcctcgtgactggccagcaaaacgacctcgctcgcccacccaaaaaaagacaggcaaaagcaattgggtcatctcaaaaaaataaggctaaataaatcagcccgaaatattgtccaattaacaccaaacacactagcatgggcacctccacctcaatatgcacctatggcatacccacctcaatatccatatccttacgcatacacctccaccatatgtgactacccaaatgtggggatgcccatgatccacccacaatatccttatggtatgacaccacacccagcttggggggcacactagatatcgttgtttgataggctaacaccaccggtgcaagtccgattgggtgttcctcaatctagtcagcaggttcaatcacaacaagaatgtcggacacctcag

SEQ ID NO: 130603 - DNA, 716 bp, Zea Mays
ctttcttatctgtgagatcgaggacacaatgttggatggtctccgtgctcgccgtcagctgccatatgctcactacctttgtcatatctttgcgtagctgatcaggcctcctcagttccaggccaccctcgaggcctctcgccttcagtttggcttctatcgcctaacaccttaggacctagttccagtgccagatccagtcgcagatatcacggctgaggatgaggctatcagatagttcgagactcagggtgccattgcagattcttcttctaatgatgatgaggacctagggatcccgccaccacctcctatgccacctcgctcacatgatcatgaggctggtagttccagtgatgctcctactgcccctccaactattgaccctgctctggccgctattctttagtcagtcactcagcagcaggctcatctggcagcagagcagtcccggcaggcagccattcagcagtagatgtccgagcggatgctatccatgtttcagactgttcaggaccgccaggacaccctacagtagcagctcttagcatgcagggcaaaacatcgggcattcatgacgcatattcttcagcacacatgtattcagcttcctctagtgcagtttgctcctccccagctcttcaggctgctgttgttccagcacttcagtcatgacccccactccactcgtttggtccttctatctctcctctcag

SEQ ID NO: 130604 - DNA, 488 bp, Zea Mays
tttggacaaagcgaagaacttaacggcaaaattcaagttcaccagaaagatccttaaagagtggcagcgatcactgccaaaaattgacaaaactgtgagacaaattaagttgattattgaattcattgatattattgaagagcaccgtgacctttcgattgaagaatggaatttccgtgagttgttgcaatccaagactgctgagttgcttcagtttcaaaaaatttattggaagcaacgggcttccatcaaatgggtcactgatggagatatctgctccagattttttcatgctcatgcaacggtaaagcatggccgcaatacaattgcgttgctctcggatgacagtggctcaatcttttcagagcatgatcttaaagctaacctgctttggaatgttttcaaatgtcgtttgggatcctcagattttttggaaaatgtctttgatctccctagcttgctgttcttccacagtgacttgcattggt

SEQ ID NO: 130605 - DNA, 638 bp, Zea Mays
tcgggccgcatcttccctacccttccctcactctctccattcatcctggaatccgttagtgatgcattcgggttcagagctgctgcggtcgcagagattatatggtgctaggatacactgattacgctgtagggtttgtttcgtgagtagctctgatctcacggaatggtttgaccggaaatgaatgcagcgaaatcagttgctaggcctcgtagggtatctgaaatctgaacatgatggttttagatgtcaggctttcatatacacttatatgaacacttacatgacgagttctatttagaattggtgatgtagatgaattgtcccgcaaccttgttgaatcttctaaagcatctactatgtatttttctatacagacacgtttgaagtgttgttgatgagacagaatgcatattctagatgcagtttgttttttatagttggcgtttttagatgaaatgttaatttactttacatacttgaaataggtctttttactgtattaacaagcaagaaccagattaggtgcagggggctgcatttccctctggccattccctaaaaaggaacaagcgaggttgttccttgttcgcaatccagacatctggatttcagatggggcaactgatgtatagcag

SEQ ID NO: 130606 - DNA, 510 bp, Zea Mays
atataacaagaaaactaattgaaatcaggttcagtgtccaccatggctgagtacatacagccacaatgaccttccctccaaagtagtagggtgggtggttgatttgggcaagagcctgtttcctcatggagatgcaccagagtgaaagaatgcaaactactccctccgtcccgtgaagcatgtcgtcctagcccttggcatttgtcccgtgaagcaagtcgttcctgtttgtgggccctcaaaatatctcccccgtgaccgtgagaaaggagaaagggaaccagaagcttccagcaacccccgtgagtttctttccagccatcgttccatctccactcatcgatttccactcctagattttgattcctctggtcgattctctcactccatgctcagatctagcagtgcccccctcctccaactctgattgaagccaaatttggagctggcgctcgtcctcgccatggacagcaatcgtcgccatccagatctcgtcgccagggatgacaa

SEQ ID NO: 130607 - DNA, 279 bp, Zea Mays
gcagtgttccatatccaagttgccaaccgatgaatatccagttatggccaatatcaaccatagagacctcattctcaggttacaaaatagacaaatcatcaggggctacaaggttgctctttcggaataaggccagcctcccgatagttgtacaacatcagcacaagctcctcgccctcaaaaagtgctctaagctctgactccctagtacaacaaggatcaaggagccccctcgatgctcttgttagcaaaaccctacaatctacatctgacttcgcc

SEQ ID NO: 130608 - DNA, 504 bp, Zea Mays
cgcccctgaagatgctctatcagaacgactgaagaagatcctgatggtacagtagtgaaaagatcttcaggttcagtgcatctcgccgccggtgaaccaacgccgcgatccacgccagcgttgcgattcgtgcccagtggcacgcggatatctatgtgaggtgaaaaatctcaatgcgggaagagttggagccttatcactggactgttcaccgcaccacttaccgcgcgaccggccaaagtgttctcgccggagttcgccctttgtagccgtgccatgtgcttacgcttgttatcgtgtcgtaagacatcgcagtggatagcccgtttaccgccaggatctttacctcgtgagcgccacgatagttatgctccgatgactcacctccgctccgaccgcaagtcatcccatctcaaattcgcgaaaccctcgagtggtctctataaattgagtgttcagtgtgctctgttagcttgttacgaactcagagcaccgctcctcgcc

SEQ ID NO: 130609 - DNA, 283 bp, Zea Mays
cgaatgagtagggtaggggttccgagcaaacggacaaaaagagcgaaccgtttgatacgatacccggagttgtcaagatcgtgcgctagctttaggccgccacgcttaccctttcgtgagcagcaccagcacaggagatggatgcggtctgctttcccatgcaaagcaaagggaagcgaagccccatccgtttactacctaccaggaaccattgacctgaggtacgtcttgtcacgcgtgccgagaggactaggagatctatggaatttgaccgtgtttacac

SEQ ID NO: 130610 - DNA, 448 bp, Zea Mays
gatgttcgtgcagtttagagacaaacgcttcccacgatggtcatcacgcgctgagcgtgagtccatggatactggctctcttttagagactgaattcctgggtgctcgaaagcgcatctgctagatgtagccccccgagtaatccatgtggatggcttggggtttattcggtatttgtgcaattcagggatggacccttcccgtgatggtcgtcttgtgctgagtgtgagtccatgcagtgcgagaaatgggtgtggtcttggaggatgatccactgagttgttcgtcttctgggtgcttgatccttgacgtgcacgcatccccctcgaaaggctttttgtggtcctttcgagggcagggccaccctccaccgacatagttggcacggagaaggtggtcgttgagctatgaatgggttatctaagtgagatccgaccaccctccggta

SEQ ID NO: 130611 - DNA, 669 bp, Zea Mays
gtgggagtggatgtcctcaacacgcctttcgatgttgtcacaacgtccggcgaacttctcggagagccgtgcttccatcaggcgcatttcctcgagcacctggcggttactggcgtcggtgtactccatcgctgcggctgtggcccgagtacgccgtggaccgttgccgctcggatccagaatgcctaaatctgataccagattgttagcacgtgtggaggagaggagtagcagaggcagggattggaggtagaagaagggtattggggagacggcggcggccaagacagccaacccccaggtactcgtattatctttctgttgtttgatgccctctctgtctcagcgttcccaggtttatacgccttattacaactcagcccaacaggcctacacaacccactccggcccaaatactttcacgctacgacgctttactcgttgtggacgcgcagcggcttcctcctcggactcgccctccacgtatttgtctgcacgaccgacgtcctggctgttggagctgacaccgcgccactcggtgaactaactcgccggtgggcactgccgccctgggggtcgcaccatcgcggtcatgaccaaaggaggaagaaactcggccagccgttcgatttagtagggacgcatgggattagatcctagacatcggcc

SEQ ID NO: 130612 - DNA, 410 bp, Zea Mays
gttcggtgtctccggaaagcttagcccgagatatattggaccgttcactatcttggcccgagtgggcaacttggcttatcgcttgcaattgccggattccatggcaggggtacacccagtttttcatgtctctatgctgaggaagttcttgcgggatccggaccatcagattgagatggaatcaattgcggtgcagcaggacctgatcttggagtgtcgtccggtgcatatcttggaatcctcggagcgtgttttgaggaagagatcaattaagtatgtcaaggtcttatggactaaccagtctgagcgcgaggctacgtgggaacttgaggagctgatgcagcagaaatatccggaactttttgttgtgggaaagtgttgttgattcattatttttttcattttgtcgt

SEQ ID NO: 130613 - DNA, 1259 bp, Zea Mays
ggcctccgcgtcagtcttcgtcgctagcgagacacgtacctcggtaccataggccctgccgtcgagtcattttacctcggtgcctgggcctattacgtcgagcaaagggtataaaaatagaattaagtcatccaccagaagtataaacctgattttttcggaaaaaggatcgaaataaaaaaaattcgggtcaacggttcacacggtcataattggaagagttcgagttgcttgattgcttctgcggatgcgcttcccccatcctcacccaaaacctaccggcaaaacctacagcccttcgtctcccacacgcactctgccactcatctctaggttgtgtacgatcatcagcgagaggagctccctcgcttatttgtctctgaaacagacatcattgcttcaggtattctccaggttgttgctgatgcagaatctatattttttggtgcttgaatttttatctctttttactaaattgacatttcatctggattgctcttacccaattgctgctttacaaacgactgaggaacaatctgtttattgaaaatacggaggagattcgatacctttgtattatgtaggcttagcatatttatgtgcttcccaagtccaaacaatcacgatcatctgtaattttccccacaaattcttaaattttatgaaccctaaaattcgtggatttgacttgtttataatattatattttgtgcacccccacattaattattgtctcatataaaggtgattttgtatagttagggaatgaagggagattccagcagacaaaatagcttagaggacaactcacaaatactaagtgcatttccaagggaaccaaagctagaattcctaaaaaacatcacgaaagacttctcaagtgaacgagtgattggacatggtgtctttggagtggtttataaggtatgatttctatctcatgttttaatatcttttgaagttaactataactgataaaagagctgaaatcacatactaacaaggaaccaaagcagggcatacttcagaatggacaactggttgctgtgaagaagcttgtgcaaacatccggagttcatgatagacggtttcagaatgaggcaggcaatctccagtttctggagcacagaaatatagtcaagttacttggttcttgttaccaagtagaaaagaaattggtggagagaaacaacaaacattttctatcagatgttccagaaaagtttctatgctatgaatatctgtctaatggaagcctt

SEQ ID NO: 130614 - DNA, 340 bp, Zea Mays
tctcgtaatatgctacactctccttgcaccaagggcatcatacaacactttgtaaggctggtgaagacgcacacggaaggtcttgataatgacttgcaggtgacgaatgaaaagatggggcaattggaggccacacagttcaacacaaacaccaaacttgcaaatgtggaaatgacagttgctcatattgacaagagccttgtcgcactcttgaggcgatttgatgagatgcatgctaataccaatggtgggcgtgatgagggcaccaaaggtaacagggatgactatgttgctgatactgaacaagatgaccaagaagcacctaatcgccggcgactac

SEQ ID NO: 130615 - DNA, 702 bp, Zea Mays
gcttaattccccttaggggatcttattttttccctatattgcgcctacgtgtgaagaatctgtgcgacattttttggcctctttggaagacagcagcatagggatttcggcccaaccctgagccaagcttccatggggatctcgtcccagcctccgaacgccaggcaactatcccgagcagcacgccgcctcttttcgcacaggaattttggcttaatgaacgttcgatccgctgcgccgccagcatccactgcgtcgatggggggcgattgcgatggggagatgaccgcgacggatcgattgcgatgcctccatccgctgcaccgacgttcgattcaccgtcgtccatagtgccgccatccccagccatcacgagcatgacatccttggccgtcgtgcccagcgtgtcatccccgtccctagtttgaggtattcgacgatgatctccctcttatcgttccttatgttcttaggtagggtttcaaaaaatttcccattctgatgttagctcttcttcgattcttgatcttaaagatccagtggttgatcaactccgtgtgtgctcttcttcgttccttacacagccgtctctcctccaagatccaaaccccagcgctagtgaggtatgcctccaagtataacgtcttgtgtgctgatttgtgcttgtctgttcaaaagtagcgacttcaattcccatcagat

SEQ ID NO: 130616 - DNA, 433 bp, Zea Mays
cgggttaaatagggaaatttaggacatccttgcttataaagattatgctaatgtaacccgattgtttcatcttgcttgcaaagctgaaagggaagtgcagggacgacgtgctagtgcaaggtctaatgtttctgcaggaaaatctacaccatggcagcagcgcacgactacgtccatgaccggccgtacaccagcaccaactccctcgctgagtcgaccagcaccactgcctttctccggcgacaaaccacgtgcatcttccacaaatttagcaaccaaatctgcccaaaaaccaccaggtggtgcctcttcagtagcctccacgggtagaacaagagatgttctgtgttatcgattcaagggctatggacatgtgcagcgtgattgtcctaatcagcgtgttttggtggtaaaatatgatggtgggtattcc

SEQ ID NO: 130617 - DNA, 299 bp, Zea Mays
cgcggtcaacttcctcccgctcagccgcccgggcaagtgccttggcggactcgttgagggctgactcaaactctgcaaacagccaaaaagaattcttcaaacacgagttgaagaatgaagatcgaagtcacaaagcggccaaaacataccttctgcccggacacgctgctccgaggctgcggcttgggcggactgagcagacctgatggccgcggccaggtcctccgccagggctccggcccgagcggacacctcggctagctggcccccaagggccttagcccggctttcagcctcgg

SEQ ID NO: 130618 - DNA, 334 bp, Zea Mays
gaccagagtagagagcatggggcaagtgaggctgggctgcacgtgatcatgccctggcggacgacgaggacagcgcatggtgcatgcaatggcaacatgggagtagggatggataagggtggacgactttcaagagagcacaacgactaacatttgggccacaacaacccgttagaacataatagatacatgaatagagattgaaccttaagaggcatactttaaaagtttatggactgggatgacacatccaaacaagtttaaggaccggaagtgcactttactcaagtttatgatccattgtgttgcactctacctatagaggctcactcgc

SEQ ID NO: 130619 - DNA, 804 bp, Zea Mays
catcttaggatttagggcgggtgcactccgccacccggccggagatttcctctccgacacttaccaatgtgtcaacaactacgactcaggtagcgtctccataggataggctccagtacgcgtttgagccccataccttggtctcgactctctgcacggtcaaagatgcaaatacaggaatcgaacatcctcctctcatctcaagtcaacagcaagtacaaaggccataccgatgaccataccgtctataggagcccagtgcttcgttcaaagaggagaagacttcacggtttttcacctccatgactgatattggcacttgcctcaatcaccaccagtgacttgggaacttttgcatgtcctgaccggtttgtatcccctactacaagcacttaggtacaagtaatataagtctcacctcctctgctggaagaagggccttctcttgcctgaacctggatataggcttgtgtctcctttcatcaccatctgagtctaggcatgcaacactagttcactagttggtaggatcctccggtcaagacaccaacagtacggttggccctaacaactaacaagtaccaaaaaatgtgatctatctgttttttaatactttggaaaggtgaaataactaggtgatgtgatgggaatagttggtcgaccctagaagatgatggattggcaggggcggatctctgaccgaggctgcctgggctgcggccccgctcgtggcccagtaaagcgaagaggcccatcactgtcagcctgccgtgtccatgctaccctccagccgctgagccgccg

SEQ ID NO: 130620 - DNA, 504 bp, Zea Mays
acgtcgcccagtgcccaaccatgcgccaggggccacacatcgcaggcaataaactcttcgtctaaatcacatccactactcaagcggactgcatatcgaagggcccctcatcttgatcttcttctgccacctcaaaatgtggaaatgtcacatagcaatgcgagcacaggatggcagggggcaaactcggcaacccttcgacatttctgggagccacataaaaccaaaattcccaccaattgccccacttatttctggcacatgggacaatctcgataactttagccgaggtcttcccagtcctcgttgtgaaagtgcatgatccaaactgagcaatcttataacctattttccttttttgccagcgcagacagtaattcttcgcgaagaccactacagatggatgcccctcgtatgaggagacagcccaggcatacttcgcgagcgccactatggaatttggtgtcaactggtgaagttgtactttgaatctctgaagaacct

SEQ ID NO: 130621 - DNA, 293 bp, Zea Mays
cccttactcaaatccctggggtctcattatcaaatttgtgctaaactaatccctctaccacatatctgaagatggcattgggattcggaccctagacacgacaaaaccgaagatttgcctcgggctcgggctgtgagacagaccctacttgagagctccatatctttgaaaccagtaggccaaatcctttgacccccacacataatcggtagcttataggaaagggaagaggttttgtgcactgaccaagccaagagcaggcttggaagagtgactactagcaccaaaacccg

SEQ ID NO: 130622 - DNA, 923 bp, Zea Mays
gaaacccagggtcaatcgcgcaaaaagttctaagactcagaattatagccgcatggacggcgggttaattccgtaaaactgcaggggttttttttaaaagactaccagagcgaaggggtatcggtagttctgagccgttggattaaaatcaagggctaggattagatctcctggtgtaaatcccgctttcactcctgaccgctcgatcactgacctacggccctgatttaagaaacgataaaggataacctgagatctaatcgtggccgctcagacctagatcgacggccaacctttcttcttcccctcgacaccaaccgagcggcggcgccggtcaccgtatggcggcgagttcaccagagatcgcgattccggccctcccgtcctccatttcctaattcattcgctcctcgcccaattgatgacattatgaacctgtttcccccaccaatttgtgtcgtcaacgagcgcagagtttggtccacggcgctgcacgagtcctacggcggaaaccatggctgccgactacgttcttccaccaccccgctccaaactccgattcgaggtgtgcagtacgtagaaaagacataggggaacccgattagggacttcataccggcagtcgaactacgcagcgccccagcgacggacgatggcggcacggcggcaaaatccgacgtcgatgggtaattccgttggcgtaggcagcgattctctgcacgcccaagtcgccccgcaccccgcgaatcccaatgaatcgctcgaaggagtcttcgatggtgaggtcgcgacggactccagtatccgaccccgatggcgccgttctcccccccttctcgtttgtggtgggattaagctcccaagggcataggttggggcactcgagagcccagggacgcaatttatgcgatacgggtgtggcc

SEQ ID NO: 130623 - DNA, 604 bp, Zea Mays
ccctggtattgtttgtaattgatctgtatttggtgaaagttcatactcttgtgagaatgtgatcttgaatccaagaattcaacaatgtgagtgtatagtgggcatataattctgtccaaatattgttctgaacttctgactcattttttctatgcctggtttggtcaaggctgtgacaggccaaattattggcagtctagcattcgctgattacataggatagatatgcccaactgttattcagtttaaatttgtttttaaattaactaatgcccatcgcataaaccttttacgtgatccaccaatgattattcttttttttcttggatgacacaggaaagctatgtgtcattaagatagggcattaacacttaatctcatgtcataagagaatttgctttccctatgctggtgtggcaaacttatttttttccatccaattagaaatctcccaagcacacattttgcagaaataattggatgtactggttgcataatgccatgttagtacatctttattgattttttgaagttaccaacccatatcgaggaagaaaacatactatgagtacatgctcctatttaattcgtgctgttttttttc

SEQ ID NO: 130624 - DNA, 609 bp, Zea Mays
ggcgtgtgttaatttgagcctgacagtggtggtatttatacaacgcgcgcttggaggtacgtgattcagatcgattgatttaaattaaggccagatcaaggtcgaaaactacacgttttatttccacctaattaaattgaccatgcacgtgatgttatggtgtcgttattaattgagcaaatgtttggctacattaatttccaagtagtgttggtttatttcgttgtctccatttgatgagtatattcatgcatcttggttttcatcgctacagcgaaaaaagctgtttgaaatctggaaatatcaggtttgtagatgttgtaaatgaatatggtgaaaaaggtaacgatagaaatcgtgcataagcaactttgttattacctacctcttacgtatatcttaggtgaaacgtttgtttatcgtaatgaaaaaaataactagctaggcacgcataaagacgatgcacttgagaacaacaaagtgatggtgcacccattttattttatgctgaatagccaaaagaagctcgatggctaaggtcatatattcttgggtgacaagtatcgaagacttgaagatttgaacacctcaccagtcgtaagaagcaat

SEQ ID NO: 130625 - DNA, 650 bp, Zea Mays
agttcaaagggggtggcactggcaccaaaacccaaaacaactttaactcttgacttatcctcgaatgtgatgtattccttaccaatcatagggttgaggctggagaactatctgaagctttcgatcatgtgttgcgaacaatcgaaattcatgggccacgtattctctaggcctccgtcctgcatcaaaagaaagacatggggtgagcaaatgacacaacactgggcttaggatactaataaggaaattagtgttgagacattagtccctgataagtgttagggaaacaccaaacgtttttggtcccaatggaggggtagctatcaccacaagaatgaaacagtggtccgctagagaagtgggtactaaaaccactggcacgagtctttggtcatatggcacatgaccaccatatggactcactttgtgaggcctagcagcatcaggcaaagcacctctcggcctagtaggacatctttgagcaggaatatcatgaacaccatgagaagagcagttcatgttccctctgatcaactcaaaacccactgctcatctctcttccttgtaaagcaaaaggtagccaaatactcatacctctcacaatactcacaatagaaccttagctctctcttgggcgaaatatgtttgtg

SEQ ID NO: 130626 - DNA, 440 bp, Zea Mays
agaaatacttggccccttgaagctggtcgaagaggtcatcaatccgaggtagtgggtacttgttttttattgtaacttcatttagggatcgatagtcaatgcacatcctcatacttccatccttcttggtgatgaacaggactggtgctcccaaaggagacgagctgggacgaatgtaccctttctgttgaagttctgcgatctggagttttagttctaccaattcggtgggagccatgcggtactgtctttttgcgattggtgcggtgtcgggaattagatcaatgtagaactccacttctgtttctagcggcattcctggcaattcttctgggaatacatacatgaattcttctactacagatatgctttctgctgctagattaaacaccattggatctttggtgggtggctgagcctgacatgaaactgactttcct

SEQ ID NO: 130627 - DNA, 1120 bp, Zea Mays
atctagcaagattttgcccatgggtgctgtaacaaagacgaagatggtataatggacaacaactttgctgcagagcttggtatgggttatcatcaaaaatcaagagaaattgtgacctgaacttgctctgtcagtcaagttctttttgaattcagagcactgtttgccatcatctgaaaatatcgcgcgaggataaggtcttggacctcgccggcgataaggacgccacggcggtcgggatgggctggcggccgcggtaaatacccctggcaacgtggcagcgaatcaccgaggtgtcatgctccagtaaaacggcgaccaccgcgctgtcaccggaatccgccgcacggcatgctcgccagcgcaaccgggaaatccacgatcctcatccatcgccggtcagccgtctataaatagagcgcgggcacggcttcgtcaccacattccgcacgccagcagctaagcacttgactcgagctcaccaaaaatacccgcgcagccccaattccctctcttcttcgttcttgctccgccgtgaagagcttcttcgtagccagcgctcctctggtcagtaatgatcaaattgctctttgttttagttagtatgtgatctattgctgcccctggatgcaacaatttggagtttgaccgaagccccttaccggaacgcacctaggtgccgtcaaacaccgccgtgacccccccactgtcgacccgttcttcgggccttgttctacccaaatcaaagaatgtccgtagacccaagtgcacccataaacctttccccagcctcaattcggtcatcctcgccgtcgtttgctcggaatgcgttcatcctcttacccatccgctcggtcaccgtggaccgattgattcgtagtcccagccataaaattgatttgggggaaatgatccgtaggggttcaattgtgttcctgtcgcttgggaacttcagccgtcgcgtcatccggccggtctagctcgtcggagcatggctcccgcgcggttcgccgtcggggacttggtgtggtaaatgaatagaacgcgaagggtttttctgtaaacggtcagcgactcataaaaacagtaaacaaatctgatttgagttagccaaaaccgt

SEQ ID NO: 130628 - DNA, 348 bp, Zea Mays
cctaggtgtgttgaagtactacgtttgttgaagcatatatactttagagtgcagagttagtcacatagaaactgatttttcagacttgtgtaagagacattgatgaagatttaacttatagtccctctccttgcttagataagttgataggaatttcacacgctatctcagagtcaaagtatgatctatcaagagcaacccatgtacattgtggcagcaccattgttactccaccaccaaattcataaccacaacgccaccatctgaaacatgagcatcccattcataaatgctgaggaaaaaagttccatcattgcataccttgtctactgtgttttcttccttgca

SEQ ID NO: 130629 - DNA, 528 bp, Zea Mays
cacgtatcagcgtgctccggtgacactccttggccaccaaccaagggaggcatgacaatgtgggcgaaggccgacggtggcgccctctagcagtgcccgctgctggactggcgacacatctttgccacccagaggatcccatgcacccggaaacaccttcgccactctccacacactgcggcgaacacccacctgcccaggccaaggcttgaactacagctaggcgcaaagtcaacggcgtcgacggtcccccgcactctctctggtcgctccatggtgactggcgccgacgagatgaatgggggtgtaagaagatgattgaaagggggtaccaggttatatagccacgaggggcgaggccaatgcattggaaacgaccgccaacctcatccagttatcacacgaagctcgtgggtccctcaacacattggtgaacgcgggtggaagaggactcttgactagttaggtccattcgtcagcgatggtaaccgggtgtgtggggtaaagttgaccgagcgacgtcatttg

SEQ ID NO: 130630 - DNA, 411 bp, Zea Mays
ctcttttctccctctccacacaaatccttttctgattttatcaattttgttaatcacccacttagggacattcatagcaaggaagagataaactgggatggctgaaagtacaaagcgcacaacggttgtccttccagcaaggttgaggagcctagctttccaatttggtagcctatcttcaatcttgtcaacccaattcatcaaaatattcctgctaagcttcttatctgagataggcagccccaagtaagtgcaagggaaggaagaaggggtgcattgcagaatgttacacccttcatgcaacaattcctcttcacatcttattgggatggcacaactcttgtgtaagttagttactaggccagaagcttctccaaaacagtcaagaatgagtttgacatagtttagctc

SEQ ID NO: 130631 - DNA, 388 bp, Zea Mays
agtagtaaagttctgtctggcacggattggttatcccgtgattgtttagtgctcatgtgattgttctgcagtggtctgacggagcctgcatgggtccatgagtccatcccgtcctcacgtgtaaatgtctcagagctccccggcctcaaccctgagtctgagtgcatcgatcatattggctgcacctgtacctgcagacgcagcattctgaacgatggtaacaggcatgtgccattagctggaggggaacagtgcaaccaacgatagtgtgatgtggcgccgagtcgctgtaaattggtagtgtccgtcctgttgatgttcacaagcacacagaagttatagctggcagaaggcggttggcatgtcaggatccgtagctgatcaggat

SEQ ID NO: 130632 - DNA, 1140 bp, Zea Mays
gggttattgagcagatagattagcctccggtcgccatgtcctcctaacaacctccattggagtcgtaatttgtgtattgtagtgcaaactagcctattgagcagatagattacaggggttatgcattgaaccatgtagtaagttctcaattatgcatgatgcagataatttctttctaaattctagcgtggatcaagggatcctaccccacaggaatctgatatccttcttagaaagggtgcaggaaatggtttgcccgattttatttcttggtttaaacagaaggtaccgtccaatctagttattgatttcatttctgaaatgtgcgaataatataacgatctattttgcttgagctcacagggccaaagagatgtgtctatgagtcccgagttgagacaggttgccgatggttttgcctatagggttaggccattttctggttatgacataaatggatatcgtttccgcacaacaagctacgagcagagtcgacctaatagaaaaactacaagttctggagtttttacgcctggccttgatggggtcgagtattatggaataattgaagaaatatacgaactcaagttttatggttccaaatctcttaatcctgtcatattcaaatgccattggtttgatcctgaagtaacgagacggacatattctaatctgggtctagtcgaaattcgacaggattctgtattaccaggagacgatgtctatattgtggcccaacaggcaacacaaatttattatctctcatatgcatgccaaaccaaagagcatcttaaggattggtatgttgtgcacaaggtattgccgcacggtaaactacctgtcccaaatgatgaagattataacttagacccaaacacatatgacggagagttctttcaagaagaggggctagaagggaggtttgagatagacttaactggagagatcgaaattgaagtagacattgaaatggctgtggatgaggagggagatgaggtgcaaaatgtgaaggacttacaaattcttgagcaattacatttagacaatgacaatgacaacattgattcttcagatagtgttgattatgacatggttgatagtgatgatgatacttatgatccaactaatcctgatcatgaa

SEQ ID NO: 130633 - DNA, 539 bp, Zea Mays
ccaccatcatccgacagatgccatgcttccggaagaattccatgtcaacctccatagtggtgccaagcgtagacccaactccccaaatatgtggataagtgcacagtgccgacggtagaccatcaaactgtatccaaacgtcagtaagagtggccttcactcgacccccggatgaactagccttgaactcaagaattgccttctgagacttagcctggaccggaccccattcgatcatcctttgcaattccgctgctgcaggaaaggaagtccgaaacacctttggggtgatttgatccacgttccatggaccaagtccgggtagcagcctttccaactctcgaatcacattgtccaggctaatactcccctccaccacttgtattattgccaacctgttctcattgctacccttagtgagcttcttgttggaggggatgtgaaagaaaccgccatttttatggcaaaaccagctgggatagcatgcaccttaggagcgttaaacaccggacatttcagcttgatatggtgtcagtacc

SEQ ID NO: 130634 - DNA, 487 bp, Zea Mays
ctcatgatagcaggtgcggcaagaacatctgcaacaatatcttcaggcatcacaacaccaggcctcctcattaggatccgcccggcgtgaatgaccttgtccatggctttgtcgtacatcgccttcataacagcacggtcatcctctaaggccctgatgctgagatgggcggcctccagctcttacgtgacaagcctctttgaaacacgcagctccttgatgacagaatctttggaggacagcataccctactaacggagcaattggcttaagccggaaacgccttaagtcgatgcgacatgctcacgcttacacgactcagggtgatcactataccctactaacggagcaatcgacttaagtcagaaacgccttaagtcggtgcgacatgctcacgcttacacgactcagggtgatcactataccctactaatggagcaatcggcttaagtcggaaacgccttaagtcggtgcgacatgctcacgc

SEQ ID NO: 130635 - DNA, 460 bp, Zea Mays
cttcatctggcccacttcccacctcaccacgcacagcccaactccgtggtgggcgcgctgctcctcgcctgtgccactgaccggcctgccccactccccagtcacacgtccccgcgcacttgccttctgccctgcacacatgccgccccactggtgggtgggtcccactggtcaatcaccccagccgatgtccatgtgcctacagacgctgagtcgatggccccacacgtcataaccatgaggctgagtcgtcgtcgtcttctccccgttgctgcgcgcggactccgtggggcaggttgttacaactacttgccgcaatcctcgtcctcaccgatgagctcccagactgcttcagctgcccgtgaatccgccgccaatataggcttggccgtcggtataagtaccctattcgtggtcccgagctcaccaatcgtcgccatgctcgggcttggatagcggc

SEQ ID NO: 130636 - DNA, 958 bp, Zea Mays
gcacaacaagtgcgttaatcgaagtcttttatttaaaagacactccgcgcaaaagtcgcctaagggtgcagctggaataacacaacaagtgcgttaatcgaagtcttttatttaaaagacactccacgcaaaagtcgtttaagggtgcagccagaatagcacatcaagtgcgttaatcgaagtcttttatttaaaagacactccgcgcaaaagtcacctaagggtgcagccggaatagcacaacaagtgcgttaatcgaagtcttttatttaaaagacactctgcgtaaaagtcgcctaagggtgcagccggaatagcacatcaagtgcgttaatcgaagtcttttatttaaaagacactcagtgcaaaagtcgcctaagggtgcagccggaatagcacaccaagcgcgttaatcgaagtctctcatcaaaaagacactccacgcaaattcgcccatgggcgcagccggaccaacacaggtgtacgaatacggcaaacagaccacattaccatacaaattacaattacatacacacggcgagggcatcacatattacatcggctcaacctttgggaagatacccatctccctgtaattaaacaacattatcctcaattcctcaccctcaaaaagcttccgaagatcccctcgcctatgctcgccccaatcggtgaggacaacaattctcgtttaccaacccggtctacttggagacggcaacgctccatccccatatgacgacgcctgccacttcgcgaaaattcacccacactatgttttcccatcacctttcgccgcctacacccagtactcgcactagggagatcctcgacaccctccacacgcggcgaagtctccgccgcagccacatccaacgcaacaaaataatccaagccttcatccgaggactcctctgtccaaggaaacgaactcccagattcaccatcagactcaaaa

SEQ ID NO: 130637 - DNA, 398 bp, Zea Mays
cagataattgccatacaaaaaaaatatcccgctgtcctagaacccttgtttagccttgcaatttcgtttcagattgctttgttgagtttgtgtccgtatcgagtcttgttgctggtttaggtcgtgtcgtcatcgtagttcaaccgctccatcgctgttatttgtttccaccgctatcccatccaccttacccagattacaagtcgagacaccacattactctatttgcctcgctagccgccttgtgtgaattctcaccacgctagccctagattaggttgcaagccgcattgcattgcaaccctccttgtttcatcatctggcgcttacctatttcttataccagggaggtttgtgcccctgtgttctatagccgccgctacagttcctaccaattt

SEQ ID NO: 130638 - DNA, 3011 bp, Zea Mays
gtttcgactgtagggggtgttagagtatatttggtagtctagatattgtgttttatagactgctatatgtatccgtgagttgccttatctcctacgtcatgtactctatataaaccgtctaagagctcaatgcaagacatcatcttttgttacagcatatacctttgtctaacagtgtaaatagcagaaagggaaacttattttagcatatactgaagatattcaaattatttacagcagtaccttgaacaagtcgcatgcgtgctataaacgaattagcacggctttgaaacacttctctttcttgctgccaccatctctccttttcaacatcagtcccataagactcggctgatttccccatcaaaaggttccaaaccctcgtcgtctcaaaatccaagtcaaccttagcacgaggccgctgctttttgactaactgcaagggcctctcattgggaaccatcaccacaccaccatatgggacaagagcatttgaaggaccacttgttccctcaaaagaaataacagctggtgtggtcagagataaatgcatctcagttctctgcacctgttcagtattcaaatcaagatgcttcaactttgatgcaactccttgaacgtaatccatatagggtcctgttgatgtgttggttgatctcccttctgctacttcacaatgagtatcaacgttgattcttttattgtccagggtctgagatgaaaagtttggagaactctcttctgatattttgcatccattagttgcgccataaaaagtgcttccagctgaaagcctgtccttcagctcatcatttggttgaattacactggaacagtgcggtcttgccttttctgaacgttttttggtcaaaaacttaatgcaagaacttctatgcagcgcatccatgcatggctgtggcagtcttgttgatgcttgtagagtattattcttaagatccatagtataaaagggggaatttctgcggagtcgggcagatcgcttcttttttattgcacccgcttggaaaaatgcgaacatctcagctgcagccctcaagacaacagagtcccgtgtgccaggtagcgaaccattgctatggtgtgtggggttttccacttccgacaccttacccatctgacttcttgtgggatccatttgaggtaaagacctagctgaggaaacaagaccatcagcatcagaatagtttaattccaagtcctttttgttcccttctattgtggggtttaccaccctttcatcagcaaacaaactgcacttacttttgccatcaggtttgcaagttcttcccacattatcttcttcccttgccagttccgtactaaatgatgcagaagttgcagccgaaacttcttgtgtaggttttagcatatctggcaaatgtatgtactcatctaaaaatttgttcagtctgcgactcatgtcgaaagctaattctcctggtgaattctccataccttcttgcatcacacgcccagtctgcacttctgactctgagtagaaagaactttgagcatggccaggtttctcatagttgtgatggtgtatgttggccattgacgaatggccgccctgcaatccttgttctttggattcaaattgcagacttcgtcgaactgatgatgttctgcttctagctgcaactcctgttgctccagagattgattgatcgctaacaggaccagagcaattctccagagagctgaggtttcttttcttccggacataacttctcttgaccttttggttcggagattttccatctggtgttgaatcaggtttctgcactttggctggcttattctctctgattacctttggtctgtgttttttcttccgagccttcattttcagcgctggggtttcctcattcctgaacatttcggttttctcggcacttgctagctgcgtctcaatttgagtcagtgttttctccttgggtacagttggtgctgacaatggtgtgtgttcactcttgttgatttgtgtcttgagccttttttgcatagattggtacatatgaatgttgtcatcagtggtactttctgcaagacaggtggttgattcttgagaatgttgcactcgtgtttcccaggtagctgcaggaaccactgattccaaatcattgtagctgtcacggaaaattgctgttgctaattgtggaagttgggtacttccttttccattttcagtcttggatgcttcatcatgtaaacaattcatccgatgctctgaattgtatttatctgcagtggctagctgtgaagaattcgttgtcatatcacctgcaacgatgctaggtgttcttccatgtgacaagaaattactcccagcaagccgaatggaagctccttcggaatacatagagcaacagaaaacaaagagcgttcagtgcattcataatgtatgataatatggccacacaaaacagaaccagcatgacacctagaaagaacaacaagatgagaggacatgcttaccctctgaaacatcaggtaaggcagtggccgacggcgacaactgcggcctcgaaccccttctagtgagttccctatggaacactatgatattaataggcacctgcgtgcaacccccaggcatattccaggatggctggatgcagggcacatcaccttgttcagttgcacggtttatcggactcaacagagcagattgtggagcaggaacctcctgaatagtattcaggacagacgtggagcatggggagaataagacttgcgaggcgatcgagccgctgttgcctgctgcagctggagctgcaacattgtgacagcctaagttgggcaccccagcactcaggaacagaggcctgttggcaggggtgtttggatcgcctctccccgcagacatggcttcaccgggtcttcgggagttgcgttcagtttcgagcttgagggtgaatccttgcttcttccagggcctgcaggaagaacatcatcagaatacggataaataaccacaacatttcgaa

SEQ ID NO: 130639 - DNA, 318 bp, Zea Mays
aggagaaggcgtccctccaagagtgtctcgatatagcagaaggcgaagaggccaacactcatgaagcctaccgaaccctgaagatggattacgataagaagctaaagaagctcgcccccacgaagaaaatccaaaagaagaccaagagccaaggatgccagactgagcggaagaagaaagcccctccagcaccacctctctccaggatagagaatttgtccgacgtcgaggatatgtccctagctagccttgatgaccttctcaaggaatttggggacactttagaaatggagttcggaagtacctccgaaagcgctc

SEQ ID NO: 130640 - DNA, 583 bp, Zea Mays
tagtcatcaccggcctgcaccatcgcccgagcgctgcaaggaacttggttgcgcaggaactcgcgttgtggtcttgctacaccagagaggcaccctgatggccggaaaatcattcacggcaaggagtgcatagtcggattgttgtgccgtggccgagttcctctacgtattggcgccggtaaattttctatccatagattcgtcgttcctatttcctgtatactccctagacatgccagtaggaaccaccaggatgatagatcacctaccacggcaatagcgcaaccatcatggttttcccctcgcaaccactggtatggcgccatgccctaatttgttattccctcggcaatacgattctagtagtggcggtacaattcgagcgctgggttggggagtcatgttctcaccggtgtttgtgggtctgctgggtgtgtctatggcaccggcggctggaggaggtagacggtacctggtgccgttgaactgcggggtgacggctacagaggcgtggccgcgagatccgaaatgatcggctcctcatcagatccttgggtttaccagttcgtgggtttaatctgag

SEQ ID NO: 130641 - DNA, 302 bp, Zea Mays
ggggattgccagcaatggcactgctgctgatcggtagctactgtcgtggccagttggtcaggaggaagaagagccatgggtgccctttgatcgtgaaatggatgctcccaattagataagagaatacctcttcgtttcgttaaaagggaatcgtttgatcgtgatcctacggttcaaaataaatcacgccttcattagatctaggccgtagatccatggatcaagggttgcagttacttaccccttcgttgttatatcccatccatcggatcttgatcggacgactgacaacagaagatacc

SEQ ID NO: 130642 - DNA, 311 bp, Zea Mays
cggcggcacggcagctgcgggcgcgccagcttggctctcgccgccgcgctcgcgtgcggggtgctggctctgcttctgcgctccgcagcagcttgaatggctggtcattagtcgcgcggtgtcgtttgattaattctacgtaaatcaagtacatgtgtggcaagctaagtaagcattcagttcgtagccatgttttgccgctgttggagcgtggcaaaagcgtccgtgtcatgtacggtgtacccggtgtgcggcccaagtttggtgttgctggggttacatgttgttcagtcttttatttaaaaattgcg

SEQ ID NO: 130643 - DNA, 357 bp, Zea Mays
ctttcctcttcttcccttgcctccgcagcggatagcggtagtcggggtagatggagccaatagcgtcaaaaattctgttcaatctcttctttcctcgacttccaaaggctgtggataatgcattgtcttccgccttggaatatgatccaagcagttcatcacttgtaacttcgatgcatttcagccagtcatcgtttggttcatcgaatttatcaccatatttgaatgtgtacttcagccagactagttcaccttcactagattcggtgatggtctccttcagcatttcctagctctctacaagcggccatactctgaatgctatgtgctcttgaattaaatctctcctaccaataa

SEQ ID NO: 130644 - DNA, 1064 bp, Zea Mays
cgttactaaaggaagtgatcgagcgaagatatattttgaggtgacggcaaagacagccaacgcatcacctgaacctcaggtagctcctcgtaatgaaattcaagagtatatcgatgcaagatacctatccatatgtgaggccatctagcgtattttggagttcgacattcattttagaatacctgcggttgaacgtcttgttgtccatttgcccaacaataactatgttggtatgaactaggtgctaccctaacgtctctcctaaagtcccccgcagcaaaaagttccatgctaactgagtggtttaacaccaatgcaagaaatcctggataccgacacctaacatactgtgatttccctactgagtggtcccggtactcttcggatcgactgtggcgaaaaagaaccccttgtcacaaaattggacggatgtactacgttcatccaacggccggtgaactgtactacttgcgcatgctattgatgatagttaaaggtgcaacgagttatgttgatctaaggacatttagtggcacaatatatgctacctttcgcgaggcatgtgaggcgaggggccttcttgagagcgataacgaatggagccttctctttgatgaggccatcgtctctgcctcattgcaccagctacgccaactctttgtaacagttgccctccattgctcggttggcaatgttcgtgctttatttgataagtactggctctatttcacggatgacattcaccgctcactcacccacgcaatggccaatccacgctacgttgtgccaccggaacaacttatgccgctgctgataaagaagctgacacaactattttctaatagcggagggaatattgaagacttcaacttgcccaaattgtctgcacgaaatgatcccatgtacgaaaataggctgcttaacgatgaacttgatgttgaaccgttggtgttgtccatgcaaggccaatctcttctgtcccaactaaataccgatcagagacatgtctatgataccattatcggtagagttctatcttccttacccggatttttctttgtctc

SEQ ID NO: 130645 - DNA, 832 bp, Zea Mays
ttattaaagatcgaaatatactcgaaggagtgatcattcttcatgaaacaattcacgaattacatcgaacaaaacatagcggagtaatcctaaaactagattttgagaaagcatacgacaaagtacgatggtcgttccttttacaaacactccggatgaaaggcttctcgtccaaatggatttcttggattgagactttcatttcgggcgacagtgtagctgtaaatgttaatgatgatgtcggacactactttcaaacaaaaaagggactccgtcaaggggatcctttgtctcccctcctatttaatattatggtggacatgctgaaagttttcattagtcgggcaaaattggacgggcaggttgtgggaatcatccctcatctagttgatggtgggctttcgatcctccagtacgcagatgacactatactcttcatggatcatgatctggacaaagctcgtaatttgaagcttcttctatttgcttttgaactagcttcgggtcttaagattaatttccacaagagtgagttgttctgttttggggatgcccatgagcaggtagaggtgtacacggaactcttcgggtgcaaagctggcaactttccaatcaattaccttggcatcccaattcacttcaaaaaattaagaaatcgggattgggctagagttggagagcgctttgagaagagactcagtagctggaaagggaaacatctctccatcggaggccgtctgactttgattaattcagttcttagtagccttccgatgtatatgatgtctttcttctccatccccaaaggagttatcaagacattggattattt

SEQ ID NO: 130646 - DNA, 361 bp, Zea Mays
gttggatattacttgggagactgtctccagtgttaagcaacaagggcgtatggtcagaaatatccctagagtgtgctaccaccgacgccttagggaagtgtagctcccattcagtagacactaggattcgatctagcttttcgtaagttgggttgaccctagaattggcccacgtaaattgtctattcgataactctagttcactgaggttcaatccgtctatgactacgttaaacaagaatgaccacctcgggttaaagttgtcgttgtttttctcagatgacttcctgagaatattaaagtcaccaccaatcaaaactggcaccgttacccgacctaccatgttaaccatttctgccaa

SEQ ID NO: 130647 - DNA, 461 bp, Zea Mays
atggcttcgcgagctcaccaaaagttggctttcaaattctttggtcctttccgtgtggttcaacgcattggttcagtggcgtataagttgttgtgccagaaacatccaagattcatcctgtttttcatgtttcccaactaaaaagggcattgggtgcaggtttggtggcttccccaactctaccaacaaccaactattccttcagtgtgccagaagcaatattgcagcgccgcactgtgatgcatggtgtcaatccttgtgctcaaatcttggtcaagtggactcacatgccaaaggagctcgccacttgggaggatgttgaggatcttcgtcagcagtttcctcgtgcagctgtttggggacaaccagcatttttaggagggaggaatgttagccacatcagtgaatcaggtgaaaatggtgaacctggaaaagtgtcaggtgggctgcgccaagacagc

SEQ ID NO: 130648 - DNA, 625 bp, Zea Mays
attataatactccaggcgtcgagtggtccaccgttcagcgagtgcagacgatctggcggtttaccttcccacttgcagcactatataaacagacgggttggtgaagagttaccacagcattcattgcctttgcactgttgtgatgttagccgaagctttctgtactgcgctttcaagcgaacacttcatcatttaaggttaactttgtcaaacgggttagcttcgtcaaactataaaaagtccaccaaaatggccagagtgcgatcaactgcaagggtgtctcgtgagggagaagaaactgaggtcactgagacagcgccaatttcagaagtcatggaacgatcaggtctagttgtgacggagggagctattgacgaaggtgctcctgatgccgaagctgaacagactgttgttgaagaagaaaatgttgatgaaggtgaagaagattacagtattttgatcccaacaaagccagtcattcagattttgagaaatctattgtgtccgaagacgacatgcccatgatgatgaaactaggctattttggagaagctgaaagcaaacttgttcgatttgccggagcagaaattaccctagagccgaagaaggacggagttgtggttct

SEQ ID NO: 130649 - DNA, 418 bp, Zea Mays
cgggacatgtgagctaaaataggaaacctatgtgcatttaccttccaccaaaaaattatgtcaatctttgtctcagtgtcttcagtctcttcagttagatacttttcaagttctgacttcattgtgctactagaatagttggtcatcttcatcctcttggcaattacttctctaagtttgcctcctctaccaccctttgcttcactaggatcagttacttcagttgttacttcagttggagcataaatatttttgtattcttcaaacagctcacggacacaagagttaatagctgcccaaactaactagcacctgttcttctagatggtgcttggaaacgtgggcaagctttagacatgaatttcttgaagccaggcttttcaccaaaagcaaaaggcagctcatcttcaataatcat

SEQ ID NO: 130650 - DNA, 575 bp, Zea Mays
atcagattatctgaatccgtaagcgctgctagcccatgaatctaagatctacggcctggattttattgaagcgcgccctgattccagccaccagatcccgatcggagggttctgatcgcacgcgagggactctacatctaggatctaatccgcccgcccattgtccgatcaatggctggacacaacgtccccaggccaatgcccacgccaaacccgacgctaccctattcccagaagaaacaaaacgaagcacggagggccttacccaagggtgacggcgcagatagcggttgcggcggcccggtggagttccacggccatcccccggccagttcgctcgactcccccacgaggacgcccagtgaacgcccgcaatcaccaatggccaagcggcgaggtccgcgcgagttgaccacggcggccacatcgttttcttctctctctctctttcggccctgtggcccttcaccgcgtcggtcgtgctctctgtcgatgcgtaaggctcggcgattctggctaacaggcaccatgggaatacatataaataccccgggcatcgaactccgatggaagcc

SEQ ID NO: 130651 - DNA, 833 bp, Zea Mays
aatgccgaactcaaaagcaggcaatgaagatctttgagttgattagtactcaaatcaattcaaagctcgggggctacacccaacagatacaacagtgaagcaaagagaacctcgaaaagcttagaaggagcaaaggacatcgttctcttttagagtctcgagccaactaccctcaaaagttggcttgagcctcgggggcttgtgggggatagatatcccccgggtcctcatgagcactaaaacacgtcatgggccgcctgatgggtttcctactaggtcaccctacgtgatggactagtaggatagagctaaatcaggtaagctcgacccaagctgatggcgaccgacgttcgagttaagcgtcatcaaagcccggatgtgtcggacgatgtaatttcttacacccaaagggcttggcattcggcgataactcgggtgattaggcaatgaaagctccggatatgcagggacatgatctgcggtaaggaaggagataagaggtagatagtaatcatgacttgtaatgggataactctctctagacgtgtatataaggctgatggagacccctaccatttcatctctcatcacccacaacttcagctcaccctcatccacaatcctcagcttgtaatcctcatactccagaaatcaataccaaacccccaataggaagtagggtattacgcaattctaagcggcctaaacttgtagaagtctacgagtaatccccgcgtgcttctacacaaaccatcgagtcacgatcaacgacgtcgtcctacccaaaagcatcacgtgggtaaccccgtggtgagcgaccgggtcacaaacac

SEQ ID NO: 130652 - DNA, 477 bp, Zea Mays
ttcgcttgctacttccctctgctcctctgctactactacttcagttctcgccttctctttctgccctcacctgactcctcccttcctgccatttctctctcgatagtcgataccaccacacctccgctcccctccaagcctctccttttcctaagccccgacgtcttccgacttccaggtcggtgccgggcaacaataacttcttggtcaccgagccaaaagggggtcttttcggttcttgcgatcgattgatgagcggcgggtggcggcgatgagagcggatctcagcaccatccagcagacgctcacgccggaggcggcggcggcgctggcgcgtgccatcgacgaggctgcgcggaggaggcatggccagaccacgccgctccacgtcgccgccgcgctgctcgccgcgccggccggtctgctgcgccaggcgtgcgctcgcgcggccgccgccggtgccgggcctggcgccgc

SEQ ID NO: 130653 - DNA, 591 bp, Zea Mays
tcagcagtaaatgaagtgtttccaaatgctgaaaaaagagaatgcttccgccacctcatgcaaaactacattaagcacttcacaggttcagagcacatgtatcccgcagctagagcatataggaacaccattttcgagcaccacttcagtaatgctagggatataccaggtgtgaagcaatggatagatgagtggcaccctcttttatggtacagatgtggtttcaacacggctataaagtgtgactacataaccaacaacattgctgaggtatttaacaactggattaaagactacaaagacctaccagtttgtgaactagcggacaaaatcagatgtttggttatggatctcttttttagaaggaaaaggatcggggacaaattgggtggtaaaattcttccaatagtcatcaatctgttgaaggctagaacgaggggtttgggccatttatctatacaaaaaggtgactactatcatgctgagatccgtgataacaataacattcaatgcagacatgttgtgaaggcagaacagagatattgttcttgtctcgaatggcaacacacagggaaaccctgccagcacggc

SEQ ID NO: 130654 - DNA, 620 bp, Zea Mays
cacaaatttgcagagttggctcgttatgcacctgacgatgtcagcaccgaaaccaggaagatggcacgttttctaaaagggctaagaccagaactcaagaccatcctcgccagccaagatttcctcaacttctcgcacctctccaacaaagccatccgagtggaaagagcaaaagaggaagaaaaagggcacctcaagaggaaattccaggttctccgagctcagcagcaagaccgtcaccagagagctcgatccttcggtcttccacccaagggaccaagcttcaatagaccaggtagacccactccgtcacgttacagtcagcagagtcagagctccttttaggccccctcggttgcaagcaaccaaccgccagcaaatgcctgttggcactgcggagaccccagtcacttcaagaataactgcccccaattgaaggcacccaaacctacctactccaactcggtgaatggccccaagattacctcggcacctgcctccaaggcaccccctccaacagtcagcagagcaggacccagtaccagggcagagcacgagttaatcacgtcgacgctcaagaggcccagcaagctccgggagtagtgctcggtgagttcctt

SEQ ID NO: 130655 - DNA, 379 bp, Zea Mays
ggcgggttgatttattaataccccgagggctcatttgcaaaaatgagatcagcgaaggggtatcgttggatatgggccgatagattggttctgggtggcccagattaaatcgattcacacactgaacgagtacacaccaggaacccatagattaattaccaacggcttagattttaagcacctgagattcattccgatccgatcgatcaaatcaaacggtcaggattaccatgccaaaagggtatgctagggatttaatctcatccactggctcgccgatcaatggtcaagtacccatcttcttcatccaagaaaaacacagtggtgcgagcaacccccacgacggaagccaccacgccggcgtttaggtgatccggca

SEQ ID NO: 130656 - DNA, 371 bp, Zea Mays
ccgcgctacattgaaccggccacagtgcccgaatttggcggtgagtcctcttcggctactgaagccaaagaacctgcgtttacgcagaagattgaagagccgactgcaatgccgaaggcatcctcagccaaattagctgagccgaaggccgataatattgaagagataggggtcgaaggaacaaagatattagaagttataagcccttcggcagaagtgacagtgccaaaggcacaaaaaggtcttacaacgacccccaagaggaaaaggatggtcaatgtactagatgcgttggagacgataaagacttcaagctctactccaaggaaaactgccgaagcttcaaaagcgcagactgggacaaaactaac

SEQ ID NO: 130657 - DNA, 862 bp, Zea Mays
cgaggatatggcacagtgtcaaaaaattcaggatagggcttcctatatgacctagtatgccctttgggctcaaaaccaaattccttgagagtccttgccacttgttctataacaccctcagatctctcaccctcagctgctgtatgtgtgactctcgatgctgataacagcgctctctgctccccaatcctgtaatcatttggaacaaatccttgtgggatcttgttccctataggtggaatagatggcccgtatgccatactctgataatatggctgctgtaggttaaagttcattactgaatccccactcctctcattaacagtttggtttacatcattatgcgcagctgctccgttataactaggcgcatatgaaagattttctacatgcttaccctgcaatactccttgaacctgttgaactatagatcggatttgtctaggcatattattattcatatcttgcttaaactcggatctaaatgtgtcaaaagaattgcgcactccctcagaaatcatgtgtgttatttctgtgacatcagtcccatatttgctagctacagcggtatcaatcatgtgagctagttcttcacaagtgacagatgaacttaccttcttgttggacgtgcttgccccaccaatctgtttgatcacaccattcttggtttttcgaaagcaagacaatctctcgttccgtttctcctccatctctcgtgcgatttcttcttcaatctccttctggtccgcctctgtaaggtcctccatcgtgaccttgatcacgttcaagggatgaactttagatttgtccggcgccgccttcttcgctgtcttttcctccatagccctgactatgattggcg

SEQ ID NO: 130658 - DNA, 348 bp, Zea Mays
ggatctccaaaccaaaacggtcctccttcggtgcaatagcaacggggatctctacaccattccacatcgtctgccgcctcgctgccatgttggtgtcgttgctccagagttgtggcatgctcgcctcggtcatccagcaccagccgccgttcaaaccctaaataagctttcagctatacagtgtaataaagcagctcgccgcatttgccatgcctgccaactaggaaaacatgctaggctaccttttactagttctgtttgtaatacatctacaccttttgaactcgttcattgtgatatctgaacctctccagtttttactatttcgggctataaatattaccttgt

SEQ ID NO: 130659 - DNA, 341 bp, Zea Mays
gtcagtttgttccagctgcccgtcaacttcgctgtctcgagcagaggaacgcgccgactgctgtgtagcacctgctccgaagttctctcctactcttacaggaaccctgccaggaagaagatgcagctgcagtcaccatttgggggcgacgcgtacaacaccgatgagttcgagcaggcggatccggagtcctattccgaggagtacgagctctcattcggcatcagccactcgatcagcaccgaggacggaattcttactaccatatcaatctcgacatccacaatcctccacacatcactggtacatacacttccaggtgcttcagttccaagccttgc

SEQ ID NO: 130660 - DNA, 431 bp, Zea Mays
tcttggcctcactgaaatagcccagcttcaccattttagggagatcagcttcagagatggtggactttccaaaatccagatgactaggtttacttggcaccccacagctgtactcatcctcggaaccaacttcttcaacattagcttgtgttgcttcggcagcagctgtgtcccctgatgaaaccagcccagaacgcctcatcgcttcggaaatcggaacagtttcggtggcttcggtctcatctccatcacgcttgaccctagcagtggagtgtactctggccatttgattacaaatttcttggaagttttttggaaattaataaccttttttccgaagctcttcttgtgacgaagcagaatccaaggtggtgcttcgttcgaatgcaaaagtcaagcttcgactatggttaaatttttggcagcaaaac

SEQ ID NO: 130661 - DNA, 406 bp, Zea Mays
gttgaaattttttacctaacaatgccttccaatcactcgcacacacatgctttgtctaagtcttatgtcaccctgcaaactttaataatttaattaaaatttgatctaacacaaatttgatctaactcttatgatgtcagtagaacaaaatgatcatctgcaattaggggacgtatgcacagggggacaaagtagaccataccaccatcgattttttaaaacctcttattcctaatgttcatttactcttaaatataggggaataaataaagttttaaagttttgggtcgaccaaaccaacctcgtcctaggcccgcctcattcttctcgaagtcatcggagccagttcgccctaatgctcttttcctagcgctgctccctgctacccctctccgacacgcgacgc

SEQ ID NO: 130662 - DNA, 718 bp, Zea Mays
gtggggccgctgtcgggtagctcggcggacaggcgcatccgctatccccatctacggctgcgtggcggtgtcgccatccttctgcaccggtggcgaatgtggcggcggttgctgctcggcctcggtcgggagaagaagaacatgtgggagtcctcggatccgaaatggagggctggtaccatgcgggtgtgggcggagatgcaggcgaagagcaggccttccgtcgcccagcttggactcaggtaggagaaagaaagctagccattggatcttcaattggacgctctagataacgtttcacccggatccgtccctggccgtctgatctggatcgtgcgcttgacaattgatctgagtgttttaaatctcgggtcgttggatttgcaagcgacgatcaagattagaagagtaaataacccttcggcactttgaatccgggccgttgatcgtcgatccggtggtctgggatgatctcttttgtttgcacgtgtgtgtggtggtggggatcctgtgcggatcggatcccgtgcacctcaccatgtgcaccagggtgtggcacgatctcagccagtcgcaggatgccacgtgtccttatgtaggaatccgagatcggttttgcacaagagcccctgcacttgtgttaaaacaacccgcagtccatacaagtccagaaatcccttcagctcagtcctggaatttacagaacgcaccccgtgct

SEQ ID NO: 130663 - DNA, 1112 bp, Zea Mays
gcccgaccccactcccttcctggtgccccgtcttccttgccgtcgccgtgatgccggctcgccttccaagcccgatctcactcccgacggattatgccgcccgaccccactcccttcatggtgcccgcgtcctccttgtcgtcgccgtgatgccggctcgccttccaagcccgatctcactcccgacggatgatgccgcccgaccccactcccttcctggtgccccgtcttccttgtcgtcgccgtgatgctagctcgccttgcaagcccgatctcactcccgacggatgatgccgcccgaccccactcccttcctggtgccctgtcttccttgtcgttgctgtgatgccggctcgccttgcaagcccgatctcactcccgacggatgatgttgcccgaccccactcccttcatggtgccccgtcctccttgtcatcgccgtgatgccggcttgccttgcaagcccgatctcactcccaacggatgatgctgcccgaccccactcccttcatggtgccccatcctccttgtcatcgccgtgatgccggctcgccttgcaagcccgatcttactcccgacggatgatgctgcccgaccccactcccttcatggtgccccgtcctccttgtcatcgccgtgatgctggctcgccttgcaagcccgatctcactcccgacggatgatgctgtccgaccccactcccttcctggtgccccgtcttccttgtcgtcgtcgtgatgccggctcgccttgcaagaccgatctcactcccgacggatgatgctgcccaaccccactcccttcctggtgcccccgtcctcattgtcgtcgccgtgatgccggctcgccttgcaagcccgatctcactaccgacggatgatgccgcccgaccccactcccttcatgatgccccgtcctccttgtcgtcgccgtgatgccggctcgccttgcaagcccgatctcactcttcgtgacaatgcgactcatccctgacgattggtgagcttgacgaaccagtgagccttagctcttagccggagttaccgcctaacccctcccctttcctggcgcatctgcccaaaatcgacattctataaggtatactcacattt

SEQ ID NO: 130664 - DNA, 550 bp, Zea Mays
agaatctatagctgttgcagtcctcaatgtcttgtcttttcattgtggaagtcagaagtcctctgacttattctgctattttccaatttcaaggtccgatcaagcgcaagggcatgctacaggatgttctcaaggatttggcctgaccgttcgcatcagctgtactcatcttttgaaccacccagacagaaagtatttccttaaacttatcttgcgtcggcgaaatttatcagacatattaattatctaatcatgtaactgcatttttttatgtagatgataaatgatgaagatactgagacacctcaagcgcatcttcctccagttaaaataagtcatcttcaacctagttctttcgttccagctgtaatagataaagttgttaaggtcgattctgggatatcattttcttccggagaccttcaaacatcagacatactatacctccagtgtgatgatataatcgcaaaaggcctagatgcgggcaataacgatgacacactgactattggaagttcttttgaggataagatcacactaagagaactag

SEQ ID NO: 130665 - DNA, 506 bp, Zea Mays
ttcgcgtggcagcaggcagccggttcgtcgtccacgaagacgaatgggtcggctccggtgcgcagcgcggcgagtgcggccgcgacgggggtggagggtggcagcgtgagcaccctcggcctgccgatgcagaggtcggagacgacgtgggacaggagggttgccgccatgcacgcgcaggtcgctcggggacggattgggatagggaacgaagtttgctgcacgcggagaagagaaggtgtgtgcgcaatcgtgtgggggtgttggagagcgcatatgcaagtgcaggctatttatagtaactggcagtggtagagaaggcgaacgtgccggcgtggtgtcgagtgggcagtgagttgtaattttggaatgacgctaatgtttggcctgtagtaggtatagcccatatgctataacttttttataatgtttttgggtttaggaagacttcaaattatgccttcttgcatgaggcggagaaatatacatcgttacagtaacctaga

SEQ ID NO: 130666 - DNA, 853 bp, Zea Mays
tatgagtacaacaaaaaatggagttacgtcaaggcttgcacgcagtaaagaagaggatattgccaagggtgagataagtaaagtatcgctctcaaattgggatagaagattggagattttagataatagaaataatgtcatcactaaggtaaggtcgagagatgggaaaggtcaaggcaacgctaaacagaggcacaacaaaggatggagttgaagactcacaagcgacaaggaagaggatacgaccaaggggaaaataggtaaagtacaatgctcggattgaggtggaagaggggagatttatatgggcaggtatgagacaaatatcaatgtaggatatagaggtgtcaagggtaaacaagaaaataatgaaaagcataacaaaggatagagttaagacaagactcgcaaactgatgaagtggagaaaacactcaagggtaagataggtaaggttccaacagaagggttggagtaaaaattcattaccgaaggaagttacaaggaattaacgagatcaccaaggatgtgcgaaataaaatgaacgctcatggatcatcgagaaacaagggtggtcaagggcatgttaactgaaatgtcttgaaaagtcattggggtatgaaggtaagcatacatgataatatgagagtatgcaagactccaaggatacgagcatacgaataccaagagaatagagattgccaaaagataatgacttaacaacagaatgggaaaggatttcacaagacaggaaggtcatggtcatataaaccgaattgtttaaataaacaacagaggtacaagggtaagtactttgaattaagggataaggatactaaaaatgccaggatacg

SEQ ID NO: 130667 - DNA, 305 bp, Zea Mays
ggtcgattcgccgaaaatcatcggccctttattgtctccctgtatgacaacatctgcagtgcctattttgatgatgtccttttttgttgttctttgagtagctacaggcatatgcccccctgccggattggtcggctgtgaatcatctaggcccctttggtgatgttttggtaattaatgacaactgcttgtggactaacgattcttcgagaaataagaatgcagggttggaccacataaaacaggaaatgttggagaatcataaacattggttgtggatcagataaaggcaaaggtataatata

SEQ ID NO: 130668 - DNA, 499 bp, Zea Mays
ttcgggagtaattttatgaagaaagatctggaatatcttcaacacttcaaccacaaatttgcttaatgggaaccgaaggcctgccttcataaagcttcggtaaacaacaacttcattttattcaggagcaggggcggtgctgtctcctccaaccctcacaatagacatatcacgaaagtaccttcccctcatggcgtcaacctgactttgtttaatggtcgactttccaaagatagtatggcttggccgccagggtcgatcttcggaatcttcatctccactttccacatcaaaatcatcactatcatcagaatcttcagataaatccgccattatctccttggtaatcttctctgtatttgtttttgccatagattcataaaacccatcaataaaagggtccacaaccttcttctccttggccaccttcgtcacctcagacaccttcttctcctcagacatttcttcaaaactccagtatatcacaaagattgaaaat

SEQ ID NO: 130669 - DNA, 402 bp, Zea Mays
agccgttcgtgggcacaatcggtcggtggtgaccggagaccgtgtgaatccctcgccggagttggcaatccgccgtgcatcgcgggcgacatcattgggctcccctcttcggtgagtaagctctacaccgtgttcgcccattccgtgagattgtgtagcacccaacatcatagagttttgggcgctaaatcaccgtgcccgtgcgtccagccatggcgccaccgcttggctttgaggcaccgccgccctgtgtccggtgggggaaagagatgagagggggagatgaagaattacgcgtcgtccgttcgtttcgtgatggatggataggattaactcctcgttttattaaaccagtgccgtagatcgcgttatcaatggccaggatttgaagattggggtacc

SEQ ID NO: 130670 - DNA, 523 bp, Zea Mays
cggccttcatgtcataccaatgcttgacatagttgtgcagggtctcatcctccttcttcataacttgattgtggtcatgttgggtcttcccctattcatagtcatgctaaagttgtaagtaaactggctattggtcaccagtcaagactcctacaaggatccataatagggaaacacaattaatttgacaatactgtatccccttgctcactaatgaagagatgaattaaacatggggagaaggttaagtagatgtgaaagccatgtaaagcaagatgcataagtaaagaggtcgtgaactatattcaccattttattatagtttccatgattataagcttgtcacaatgtattaccttcgggatatacacaacgcgactgaaggtgagattgcccaggtaacttcagagataaagatgttgattacgatgagagcatgtgaacagtgaaaaagagagagtgagggccccattgcatgggccctgtacccctatttatagggacatggcgacgaacaacttca

SEQ ID NO: 130671 - DNA, 587 bp, Zea Mays
ctggcgcatttggcaacgatggagaagatgtccacgacaccatggatgacgcgggtgactagcttctccaacatttttttgtcgtacaccccctgtttaatggtgatgatgataaaatctggcttaaccgttggattgaagtgtgcagtgatttgccaggctatgtaggacaacatggagatcgacgttgacattgagttaacgacaagatccatcgagattagcaataaattattgacaaagctcctcccatgaactgatggagttaggggaaagattcatgagccaggacgaaatagacctagttagagctacataaaagtaattggccatgacatccttgcttcctcccatatgttcgtcaagagaagcctctacgctggtagccactttcagttcagtaatcaaatttttggtgacaggtgcgccgagaggactttcggtaatcttcagcgttgcgggcgaagccatctttgtaggcctcaaaatagccttcagcacattagccattcttttaccctttcgaggggtccctgttgcaatagtttctagcttcggttggtcttgcgcgctgctcaacatcttcg

SEQ ID NO: 130672 - DNA, 674 bp, Zea Mays
agcgaggtcactgaaatgacagaagaggtgagcacatattagtcacatagtcataagtatatgaaatgtgaacaaatacatacacagagaattatggcacagaaaacgagagatatggcgatcgagaggtcaaacgacgcgaaaacgacgtttgaacgagaaatagtgccataggaggtttgaaattcgaattgaggtatgaaatgacatggaattgagccaatacttcactaataggtttatatgggtaaatatgagtgaagtgtgcgcttggtttgatttgaggcgaagaaaatggaatttgggcacttggctcggaattgatcgctcgaaatggggaattgagtgaaattgaagactggtatatcggattggcgtgaaatttggcgaatatgttactggaggtattgtgaaggtgcctgaaaaaattgggttcaattggagcatctttggctggtttgggcatttcaccgaacacgtggcgtgcggtgaattaggtttttggagatatggccatttgaggattgaaaccctcccaaagggagctagaaacctgcaaggatattcaagggacacataggaacacctccaaccacatggattcacagaaaatggaaggaatttgaaattgagcaatcaaggggtgggcagctgcattgatctgagaaacagag

SEQ ID NO: 130673 - DNA, 408 bp, Zea Mays
gctgatcaaggactatgacctggaggtacattatcacccagggaaggccaatgtggtggcagatgccttgagtcggaaattgcaatgcaactgtgttatgatggattctcgcatcaacaccctatgtgatgagttgaacaaaatgaagattgaagtgattccttctcgtgctttgtctcacattttcgttgagccaactttgcaagaccagatcattatggcccaactcagtgacaagggagtacaaatcattaaggagaacctccatcagaagacagaaaagtataaatgtttccgccaagatggaaagggtatattttggttcaaaggcagattggtagttcctaaaaataaagatctcaagaagagaatcttggatgaggcccatctctccaagttctccatgca

SEQ ID NO: 130674 - DNA, 447 bp, Zea Mays
gcgatgcttactgacccgtccaattgggctatgggtctactgaccgtcgggaacgcatgggtcttgagttcatccgcgcgctctccgtggccagaccaaattagttcaccattcgtgcaattgggttggggaaaatactcgaggtagatccaatttggtgtctgatgctcggagaatccagccgtggccccagtcggccggttcaggtgctcgccggagtgctccccgcgctgccgtcgtcgtggacttgggcgtgcaaagaattagaaatctggggggctcggtgtaaagcgtcagagacccgttggaatagtggttgaacccgttcacagttagataaaaacgcgaggaccccggtgcaattctgccatcgcgcgcgggcgcgggcgcgcgtttcctgtgttgttgggccgtctggaccagatttggcccagcactgttacatct

SEQ ID NO: 130675 - DNA, 414 bp, Zea Mays
gcgaattctttcaattcagaaatatcttcatcggacagttcttggccacccaggtgttgtaggtccaactctttgtcctccggagccttatctatggatactttggctatgtctttctcgagagccacatcagatataagtctgtcaatctctgacaatgtggtctcaaggttctcacctttaggtgtggcttcattagcttcagcttcgacagtatcttcggtattggcaggcacaacaattttttccgccgaagctgagggcagggtcttttggatagcttgcattacgtccatcattcgtcgtttcttctgacccctggcatttcccatggtagccgaagcagtctcctttcctcccgagctttgttcaaatcccttttcctttgactacaataggctagtcagatctaac

SEQ ID NO: 130676 - DNA, 1185 bp, Zea Mays
tgagaagctacattgtagctcgacgaaggaagatcaaccgaaacaatttgaagagcatcgtcgggggttgactcagccccactatcagatatcagaattcttgcatctggctctccgacctccaaggcgacttgcttgctcgaagtcaaagaagtatgcatcgccatcaccccatcagatcgtggtggagacaacccgacatggacatccatggaggtgtgggaaggagagctcacttggacaccctcgggggctgggttgtagctcacgccacccaccagagtcggatcattaccggcaacaccctcgggggctgggttgcagctcgtgctacccaccagagccggatcactatcggcgacactctcgggggctgggtaaccgccagcaccaccctcgggggctgggttttttgcaacaaccacctctaaggctgaaggatccacagtcacctccatgggagtcgggcaatcctgaccaacttcttgacactgaagactgccttccaaagtcgacgatgcgcgagatactgctcgggatacctctaatcccatgtctggaagttcagagcaaacatccatcatgtcgccagcagtcggctccgacagcatatcttcaggaacgacatcctcaagggcctgatcaaaatccgttatggacaattcttgaaggctgacaagagtagacagagctggaaaaggaatatcactatcacccctactacctctgtaacaccggctatttttacaaactagcggaacttcttcttcctcttcttcgtcctcatcaaaaatacggaaaatagccggtgcacggtcacacccattgagatcagcttctgcacggtcacacccattgagatcagcttctgcactattacacccattgggatcagcttctgcatggttacacccattggggtcagctttaacaaggtcacacccattggagtcagctggtgcacgatcacacccattgaggtcagcttcaacagatacaccaccattgggatcagcctcggtaaggacctccgctggtagttcttcacacacaggagcagaagggccagcatcctggtccaagcttgacagtcgccgaagctgcctctttttcttcttcttctcctcaacaggcgcagttgggcggctaacatggtgaggacgctttaggcgaataccctcaggc

SEQ ID NO: 130677 - DNA, 760 bp, Zea Mays
caggggctaaactataagatttctaagacttagtaaacatcctccctggacggcgggtttatttctgtgaaagtagggggctcatttgcataatcgcacggccaaaagggtatcaatgaatcctagccgtccgatctggttttagcgtgcaggattagatctagcctgttatgaaacgatacgcgacgatcaccgcacgatctcatctctacgctccagatttaataacccctgaaccactctcgcccgtccgacccgaaacgggcggccctcgttacaccaacccaaccggtatgcttcttctaatttgggccgtagatcgtgcaatcgacggacccagcgtaacccggcctcctccgaccggcactggcggcgccgcccaccaaattgcggcgggcatcgctggagcagggccgactaccatcctggtgcgctaaacccaaagggaataggtgctatacgaaggtggggcaatgcgaacaatcatgagggagatttcatcttcaatcccggtgcagaaatcctaggcgacgacggggcgcggcttcacgacggagggaatacgccggtgcgcaattcgcgccatgatgtgggacttctcttccatttgccgacgtggacgacctccccaggtttaggtgaacctcctcggtcacaccccgtggacggaatccacctccaccgcgagttaccagtggcaatctaggtttctccctcacgggcggcgacgacgagtgtgtggctggcgacgcgaaaagag

SEQ ID NO: 130678 - DNA, 390 bp, Zea Mays
caggatcttcatcttcttgctcttcggcacagcagtaatggccgaagcgatagtttttcttttcttcccttgcctttgcaacgggtagtgataatcagggtatacgaagccaatggcatcaaatactctgtttaatcttatcttccctcggcccccgaaggctgcgtacaaggcatcatcttcagccctgctatatgctccaagtagttcgtcgctgatagcctcaatactttttagccaaccatcatttggctcatcaaaccggtccctgaacctgaaggtgtatttcaatcgaaccaaccgaccttaagttgactcggcggtagtatccttcggcatatcccagtattctacaagtggccatattttgtacgttatgtgctcttgaac

SEQ ID NO: 130679 - DNA, 1002 bp, Zea Mays
gcgctttggagttcgctagcgaaattctcgctggtgttgttcaaggcaatcctgcaggcgtttttggcaccaccagggaagatttcttcccggatgggtccgctatgcagtgtaaaatatcttcctggtccacaatgtaggagatggatccaaagtagaagatctctccagcattgaaggtgatcatggtgttgaagatgattgccatggagtcgtcgtgtttcaatgtcgcaccccctactagcatgccagctgtcggtgtttatgacctgactgtgcaccacggggatacccacgtgatgtttttttgggtaggacggcgtcgttgattgtgactcgatggtacgtgcagaggcacgtcagtattgctcgtaaagttacataggttcaggacgctttgaattgcgtaataccctactttctgttgtggctaagtattgattgctggagtacgagactggggttaggtgagcctgatccaagacgacaaagaccgacatccgagttaggcgctactgaagcattgatatcccgggtgatgcagttgcaagcacccaaggagctatgcattcagtgataactcgggcgacaaggcgatcaaggctctggatatataggactgcaatctgcgacaaagaaggggataaccgaagtagatagtgatcacaacttgtaaagatataactctttggtcgtgtatataaggccaagggggaacccctacaaaatcatctcatcacacaccatttcaccccatcctcatcaacagcagctgagccatcacagagctcatttgtatgccaacccatcccatagaacgactcagtaggaggctcgttaggcgacatgtgatacgtttttagtgttcatgaggacggagggatatctatcccccacaatcttagcacactaattagtacatagtagctttattttgaatcttatctaataaatttcaatcaatttcaatgaaattttaaggtcagagcatgaacatttatt

SEQ ID NO: 130680 - DNA, 566 bp, Zea Mays
ctggtaggcgtggtagcaatctaggttaagtgcactttgccgtgaataagaatgccaccgctgccatgttcactgctcggactcgcgtgcctgggtaaaaatcttccaagacgtggcgcatgtaaccatgaggtgtcgtcgttcgaccaaagcatttcgcctaggcgctcgttgcggccatacctgctcacaagctcgccagcgcagtgtggaaacctgaagatcttttgaaattccgtctgattccggcaacctccctataagttgagcccaagcgctacttccttgcccccttgcgcacctgagtgctagcgtgacccgaccaattctgtggagaaaccctagagaacctattatcttcctctcgtcgtcctcggctctgccatgggagacctctccgttgacaggtcagatagagcaagtattgttttaattctgcctcgctcgaactccctcgggtgctatggatgctcctcgacgcatttgattcatcgctataaccgttacctcattagaacaaccctccgacatcggaaaactccaccgtccggcatctcaacgtggac

SEQ ID NO: 130681 - DNA, 488 bp, Zea Mays
cccgaacgcaaaaagggaatgattctatctgggtaataatcgatcgtctcaccaaggtggcccacttcattccagtaaaaaccacttttggaggagccacccttgcccggatatatcttaaggagatagttaggctccatggtattccgcgaaagatagtgtcagatagagggacacaattcacctcaaaattttggaaaggccttcagcaagcgatgggcaccaagttagatttcagcaccgcttatcacccccagtcagatggtcaaacggaaagagtcaacaagatcctcgaagatttactaagagcctgtgtgttaacattcgagagggattgggagtccagtttgtcgtacgctgaattctcatacaacaacagccatcaggccagtatcaaaatgtcaccgttcgaagcattgtatggaagaaagtgccagacccccctaatgtggtccaatgtaggggaaaggacactagaaggacccgac

SEQ ID NO: 130682 - DNA, 589 bp, Zea Mays
cgagaaactacagttcccctagtttgtttcgttgtgcatctgagctttcacttgttccctgagtgtttgggttcacctgtcagctcagccgcgtgacagtgcccaacatttggcgcccaccgtttgcgcgacgaagacaacacccacgatgtctcccaaaaagatcacccgtgctagcccaccaccaaacgacgatgatgccaagaccgcccttgccaccaagaaaggcaaggtagccctcgccactgatcattcaccaccaccaaccagaaagccaccaccgacccacagtgcaaggacctcctcgcaaaacaaaaacagatagcagtctccaccgaataagcaggcaaggtccacaccaccagctcagaagactcaggagatcccccacccaacccaaaaagctagccttaccaagacaaggtttggcaagacatgacaaggaacctgcctcccgccccaccgggcttcgcccccacggtcggtcctcaccacccattcgggatgccctcgaaaaacgacggtgaagacatataggccagcctggacctcggcatcaacactaaggattagctgctgatcaaaagcc

SEQ ID NO: 130683 - DNA, 727 bp, Zea Mays
atcgagacattgattaatgcgctttgtttgcccgtctgtttgaggatggtaagcgctagtcatgtggagactgaccccagttagcttgaagagttccttccaaaaatactcgtgaaaatcttatcacgctcagacacaatagcaactaaaagcccatgcaacttgtaaacgtgctgaaagaaggactgagcaatggtaacaattgaaaaaggatgggacaatggaataaagtgagcatacttagtaaatacgtctaccaccactaatatgcagtcaaaactttaagaccgtggtagcccttcaataaagttcattgagattgtatgccaagcagcttggggaaccaacaaacgttggagcaagccacggaacgagtgcacccagtctaggccggtcgccctgctattgggctcagtttcctctttgctcttggttcatgtagcgcaccctccgctcctgggatgccttttgaagcaggttccattgtcgtcttcatccttggtgtactaacatacacccaacaattcggacggtagttgtgcagtgttggtcacgtcccgtgcaggtgggggaggtccgaagcgaagcagggatggaggacagcggaggtaggatgatgagtggcagcagcgtggtgtgggtgcgggagggcataggggcgagagagagagctagagtggggtcgacaacaagctcaattgaattagacgctcgggtccgagatgcg

SEQ ID NO: 130684 - DNA, 609 bp, Zea Mays
tggaaggcttccaagccggtcaccgcgatcggggacctccgcaagtcgcgctccgacgccgccgccgccgtgacgacggccaccaccaccgccactgcggtggttgctaggcgggccgtggcgcgggtatccatgcccgagaagaaggtggcgccggcgccagcggccgccgccggcgaggtcaaggaggtggtggtcgtggaagtgcacaaggctgcggcggcagacgcgaagaacgtggcgcgaggaccagatgaggagttggacgacgacgacgacgaccacgacgacggcgcggagggtgaattgttggacgaggagcaggagacagacgaggaggaagaaaaagagatgctggatctgcaggatcacatggccattgacgacgacgagcaaactgctccgcaccaaggcaaggatccgtagtccccagtccccaccaccactgtcgtagtagcgtcttcgcaagattcacttgtcggttgaactaataatgacactgtgctcttcaattgctgccgtattgcagtggacgacgacgacgagcaagatcttgagccaccgacaaaaggtgcacgaacacctctgccaatttcgtccctattttcc

SEQ ID NO: 130685 - DNA, 628 bp, Zea Mays
cacacacactgacaaacgacccccctcggtattctccaatccccaaaccctcgtcgacgccgtcgtcttcactgttcagtcccccccacagccccactcccttcactctcctcccctccaccgtcgccgtcattccattcgtggggggcgcattacttctgcggttctgcgccccgtcccgaatccctgtagcgtccaccttctccctcccaccgcccggattccgcaagactgagagcagcgctcgctcgcctcctcccaatctccgcatcgtttctgtccaggtcggcggcccgatttgttgccgggcgtcgtcctcgcccccgccctgcctgccactcctcgtaggactcggtcctgtccggactcccgctccacctgtcccctcctcgcttccatcgccattgccgccctcattttgcccccctcccgctcgaagccgcctgctgctttggaccgtgccgagcggggcggcgtaaatgcccgcccgtgcagaggatcccagacagccttctccgcccccaaaccccgtccttgtttcccaccaattaggagcaggggaaggttctcgcacgcgtgcccatcctaccaacggccaattccagatgcggagggcgtcctgactcca

SEQ ID NO: 130686 - DNA, 552 bp, Zea Mays
cggaggcggtaggcgtggttttatccgaagccatctgccagggggagagagtcactattatgcacatgccaattgttttcaaccaagttattttattcattacaccaatacattacaagcatacagctactacaagtcgtgctacacgtgagcgttccctaaggtacttccgaattctttttctaaagtgtccccaaattccttgagaaggtcatcaaggctagctagggacatatcctcgacgtcgaacaaattctctatcctggcgggagttggtgctggaggggccttcttcctccgctcagcttggcctccttggttcttggtcttcttttggattttcttcgtgggggcgagcttcttcagcttcttatcataatccatctttagggttcggtaggcttcacgagtgttcgcctcctcgccttctgctatatcaagacactcttagagggatgccttctccttcttaagttccttgacctgctgctctaagctttccacccgggattttaggtgggtgcagtgggagaaaaggtcatcatagtggtt

SEQ ID NO: 130687 - DNA, 301 bp, Zea Mays
aaggggaaagaaaagcaagtctgccttgataaagactatagctccttatcctatattatactctgtgttatgtcaccttaacaaattgaaattattgccaaaacaagaattttgtaactgaaaagtgccgaatttagagtttatgtcagcttgccaaacagaaaactgaactagtcacagtacacaagaaacaaccagctgacatgactccttcctaattctacttcagacagatccgtgtattgctagtaccgtacgtgatttccttccaatactgaacatgtatagatctgaatctttc

SEQ ID NO: 130688 - DNA, 438 bp, Zea Mays
catcaacacacggccaagaccaattcgagaagcatccgtataaactgtgaaacgcttaccactctcaggcaaagctaggataggggcgttcaccaacttgttcttcaatgtctgataactaacctcgcaatcgctgaaccagacgaaaagaacacccttctccaagagtctagtcaaaggcttagcaatgctggaaaaatatggtacgaagcgtcgataatatccggcaagccccaagaaacttcggatttcagagacactagaaggtctcttccactccaccacagccgcgacattcttgggatcaaccacaatgccctgctgattaatcacatgacccaggaaagccacttcgtacagccaaaaggcacacttcttcaatttgccataaaactgattcttcctaagagcacccagaacaagatggagatgccgctc

SEQ ID NO: 130689 - DNA, 478 bp, Zea Mays
gtcctagcacaagtgcgcaaaatcgaagtgctcctcaaaaaactccatgcaaaagtcacctaagggtgaagccgaaccctccgcgcaaaaaccgactacgggtgcaactggaccaacacaataaacgcgctagatcaagtgcacaagtcccctacgggcacagccggatcagtgaaggcacacaacctcatcacacaaattatagttacatacatgcagcgagggcatcacgccttacattggttcagcctttgggatgatacccatctccctgtagttaaacaacattatcctcaactcctcaccctcaaagagattccgcagctccccctctcctacactcgccccagccggcgaggacaacaattcccgtttaccagctccgtccacatgaagacgaccaccctccacctcaccacaatgacgcccctcacttcgcgacatctcactaactctccgcttcgccaccgcccttcac

SEQ ID NO: 130690 - DNA, 947 bp, Zea Mays
ggcggcccccgcctatcagcctatcccacacacgccctctctccctctctctctctttcgctgctctatggggccagcctggcggcgccgatcccctcgcgcacgtgctcatcctctctctctctgcctcgcggaccccacccatcacgcctctcgtccctaacctcccgcccgtgcaatcccgccgtggacgcgcgcacgttcgtacatttcctggccacctccgcacgccccgacccctttaaagcccccaccccgctcgctcacttccccctgctcatttgcaccctcagccgagcaccctcgccctctctctcgcccaacacgcgcatccaggtagctccggtgctgctcaccgtagtccgctgtccgttctacggccctcgtcgctcccgttgcctcagtgagttccgcctcgccgtcagcaactcgagacacctctcggttcgccctcagtccctctggtttgctcggtccacactcaccggagtcttccccatgcagctggagtccgccatcgtcgacccgaggcttcaccgtgtccccgctgttgctctagcgctcctgagtttgcactcaaggtgagcaacctttctatgcccttatttcaccagttactgccctagtgtcagcgtaattcctcgccagagttgatccgcgccgccgttaggccgcctcgccatgttctgcgccctctagtgccctcgcgccggtattgcgcccacgattgagtccaccagatcgccctaagcgcgcccgatcctttctccaaatccctagagccctaccgtggccgtccccctcgtctccggcgaaacctcgccacgaagtcgagcgacgccaccgcacccatgaccggttgccggcctttggatctcggacgtccatctgagatctagcggtcttggtttaattagaaccaatctaatcgcaactgtctgattcgc

SEQ ID NO: 130691 - DNA, 300 bp, Zea Mays
tgacaccggtaaattcaagtcatccaaagaaggagttacagtactcaccatggccacttcaaccattgaccctggcaacaaggctgctgacaagccttggagaagcactggcaatttgtgataagtgataaccatccacttatgcaaccaatgcaccttcatggggctatgaagtgccaaccaatccataccaacaatcaaatcgtacgaagataaccccaagacatgaaaatctgtgataaaggagcactgttggacagaccaagaagccccccagcaactgttgtgagcagcgcagac

SEQ ID NO: 130692 - DNA, 729 bp, Zea Mays
atacagatgatgaaagtgaacatgattctgaatatgaaaatgagtactctgaaaatgagtactctgaagatgaaaacatagtgaataacatgacaacaggggagaagaacttatattttcaaaaaaaagattcctgaataaggagagacatccaaagaagtcaaaatgtgaggactaacttagtacatgaccaataaattgatatctcattttttctaagtcattgacaattgttccacatgccctgcagccatgaaccaggatgctccaacaagcaaaagggattattttgaagataggagggactgtgccagagcatctaatgctgaagacttaatgaatgctacaaaaaatggtgtgcttaattcacacaccagaagggatgattatgaagaagggagggacagtgccagggcacccaattctgaaaactatgaggaggggagggactgtaccagggcatccaatgccaaaaacattgtgaatgctacaaaaaaggtatgattaatttacacagttttcatttttctcttttaggtataggaacacaactaatagttgaagtataaatgtttcagctgatagaactaaagagaagaggggtcgtggcaaaaacaaatgtaaaaaacttgctaaactaaagcctagagaaaaaaattaaagtaacgttctacaacaaccgtgctctttgtacaacatttgcacgacacataggtagaatcgttcgtg

SEQ ID NO: 130693 - DNA, 1537 bp, Zea Mays
ggcgcaccaatacagagaaggtcgaggtttattctacaaaatctaccagacacaggcttcccacgcactggacgacgggttatttataataaagggtagggtttcttttgcaaagttgaatggccaaaggggtatgatgacatgtggaccgttggatcagcggtcaagggcccggattagatcggcggaatactgaaccggaagggtacggtgatcgtaggatcctgattctacggttcagatttaaaataccccgcgatcgcctcggacccgcacgatcgcgatccaacgcctagaatcgcccaggccgaatcgttccgtggatccaatctcgaccgtatactctaggatctaaggctaatacgctaacacccacgtgttctcatcacatccgaccaatgatgatccaatggttagaacaccgcctccctcctcacgatggacgctgggcaacggagcgcctagcgcagcggtgtcctcgccggagtaccgcgcgccggcaaccccagtgcccaaaactgacgccgccaagtgaacaaaaagggcaggaaagatggcgatcctgatggagtcacacataccgtgattcgcgcaatgtgggccccagcagcagcgctgggcggaaatcagattacggcgggcaatcgccggtcctaggtgccaccttcttcaatctgttcgctgcgcgctggcttcgatggatgcctacgaatgcccctgacgccaaaatcgagcaccccacaccggcgagattgcaggtcgacggcggcaattgccttgacccacacggtggaggggatttctccgatgaagtgctcagccacccgattaatcatgcgagatcggatcccttgtgttgctgatcgggggagaggaaaagaagtttggttttatagctgtagtccggatggaggagcaatcttttcccaccggaaagctcggccgccgcccgcctggtttgttgcggtccgatggggaagggtctgacgggttggccccatgcgtcataggaggctgtcggctgaggttaaatggatgagggggcatgaggtctagtctttatatcctgcgcaaagcccgactctggtgcacagcccaacccatgaacgcgctaatggcggttatggcttcctaacaaactttgacttggctgcgatcatcgtggtttcgccgagaggacgaggcgtttgtggcacaggggccgatgcatgcgggttcagcaacatgcacgggtggttgcatgtgtgcaacactgaaatctgtttgatgcatgcggccaggtgaataaacaaatggaaaacacgcgtatggataatggatcggccaggagaaattggccaaaaggctattatgttccttttttctttccttttcctttctattttcgatttcattttcaatttaagtctaggtttgaaatgcaacttcccatttagatgcaacaatcaaaatagtcccaacatgatgcaataatattttattattttcaataatactaatgcttacttcatgaaagagaaaaagaaaataattcatg

SEQ ID NO: 130694 - DNA, 298 bp, Zea Mays
agaaatacatggactctatcttgaagataccaggccctcagggcatgatcacggtgtatggagatcagcaagcaacacgaaatatagaaagagactttgtcctaggacaacacaacattcactgtctaacagtagagcgtgaagacaacaacagtcctcgccaaactaaaaacaaaaagttcaacgcccaattatagagcaatgagggaaccaagacggtcccccttgaccccgcaaccccaagtaaactgtcttgatcaacaaagacctttcaccaaacgaagaagcaagacttctc

SEQ ID NO: 130695 - DNA, 377 bp, Zea Mays
gaagattttgccttaagtcattacaacaaaatggtagagctatgttagtagttcaaagttgattaagtgactaagccttgatgttgtatggaaattgggataaaataccctagaagtcgggctgtcagacaacttcaatcctgaaaactaaagttcagtgacatttggttaacttcggagacagtttgttgttaattcgatgaagttaaggccagggtcactgtggtaaagttgaagccctaacattggtgaacaaatttgttgtattaagcttggcctggtgctatacaatttttggagtaaatcgctcccaaacttcggtcgtcaggcactcgggagggtgttcagtgatgaacagtaacctgatgaagatcgcc

SEQ ID NO: 130696 - DNA, 749 bp, Zea Mays
ttcgaattgaggcacgaaatgacatggaattgagccgatacttcacgaataggtttatatgggtgaatatgagtgaagtgtgtgcttggtttgaatttaggcgaagaaaatgagatttgggcactcggctcagaaacgatcgctcgaaacggggaatttggtgaaattaaagcctggaatatcggattggcgtgaaatttggcaaatatgttactggaggtgttgtgaaggtgcctgaaaaatttgggttcaatcggggcatttttggctggtttgggcatttcaccgaacacgtgacgtgcggtgaattaggttttcggggaaatggccatttgaggtgtgaaaaccctcccgaaggagctaggaacctgcaaggatgttcaaggcatacagaggaacacatttcaccacatgatttcactggaattcacagggatttgaaatttgtgcaaaaggtggaaaaggggacttcacaggtggcatgagctcagagagaaggggggggggggaaagagagacgaggatacacaccagggaagcacgagcacagggatcgccggaggatcgccggagcacggccggagaacagatcgccggagaggaggggaggtcgccggcgaggggtggagatcgccagagaccaagagagagaggcagagaacaaagagaagtggcggccaggcctcgggcgcgagagggaaaagttttttaaaaaccggatatgggcgcaccggacagtctacagtgcc

SEQ ID NO: 130697 - DNA, 353 bp, Zea Mays
ctcctgaggaaggaaaacaagatgtcacaaagaatgccctggtcacgcaaggtgtacgtctaaatccttacctggaaaaccctgggaacgtccctagaaagggtttccatggtcgaccgaagcgacctcatcgccgcctcgttatactcacggaaactatcccaagccttctcctccaactcatcatggaggaagaggaggggctccaaggtgccgcggccccagaaccggagtggctgcccacaccactcattgggattgagctgcgcaggggtaaggccgctgctccccaggacaggccacggttctgcatgcccgtccaccgaggcgtcgggtccccctgcagccgacgc

SEQ ID NO: 130698 - DNA, 363 bp, Zea Mays
cagggaaagaaaagaaaggttgctgcttcggccatctctaccacgccgaaggtgaaaaaggttaaagttttgacacaacggcctagacacattgaaacggccataatgccgaagctttctgaagggtcctcttctgcttctgggtcagactgccctgctcttgctgaagccaagggagagtcggccaaagtgtcgaaaccgaaggtaacaacgaagcagcagaaaattgagacggccgaggtgccgaagcgtcctgccgaagctagggaaaacggccgaagaaccaaaattagggaaatcggcagagcgaccaaaaactctaagctcgccgcaagagttggagctgccaaaggtgtcaaaaat

SEQ ID NO: 130699 - DNA, 375 bp, Zea Mays
gacaaatggcaagctctcaatagcaatcttcgcaaagcacattccgaccacctgctctgagagcaagcggatgacaaagctctagtggcagatttggtgcgcctccaaggaagccattctatttgtgttgtggtgtggacaaaggccacactataaggacatgccatcacaccattaacaagtagaaagagcttgcttcatcaggtactcaaccttcacacataaaagaggtgtttagtacatcttcatattgttcaccctacatcccataatacatccaaactcagttacaggagccaaggccaagtctggcttcagcctcaaatgcctcaagcaacccagtgatgagtacatggtcaccagctgcatccgttg

SEQ ID NO: 130700 - DNA, 282 bp, Zea Mays
ggaggatatgttaagagcgtgtgctcttaagcatggtggaagttgggataagagcatgccatatgcggagttctcttataataatcgctaccaggccagtttgaagatgtcatcgttcgagactctgtatggcaggaaatgcaagactcctctatattgggatcagactggagaaagacagttctttggacctgaacttatacaagaggcagaagaacaagtgcgaatcataagagagaatttgagaattgcgcaatcaaggcagaagagctatgctgatac

SEQ ID NO: 130701 - DNA, 530 bp, Zea Mays
gccgtgagcaggccggagcacacgccgctgacgagcccgaccgcctgcgcacgcggtcagacctattccggccatcgccgtcgatgacccgcacctcgacatgactgccaggacctcctgaatctcacccagcccttcaccggacctccctcgccgtcggtaagccgcgccaccctttttcctctccgcggttactaatacaagggggaaggatcccgggtaaaaagaaggaaaagcgagggggatttttgccaagtcagtgactcagaggaatagttccgcaggggtacggtttaaaggattagttaagggaaaccccagggacctcggcgcaaactgattttccttaaacccttttaaacattattcttttaaatgcgtgcagagcttgcaaaattcataactccaattttatccagccaaattgagtcaaattaattttgctaggttctaaataatatgaactacttaggaaaaataacaaacacactaagtactgcaagactttttagagtttccatttaaataag

SEQ ID NO: 130702 - DNA, 507 bp, Zea Mays
agtgtgttcctgagatggttaggttttggaagccacacttgtttctgaggaggagctctcacaggttcatcaatcacaccatctctcacaggggtgataggcttagcagggctggttttgataagcttgggagtgggtgaaggtttctctaaaggtgtcaaaccactgcactcaccaaccttcccaaagcgagcgacacttccatccttagcagcaaagcctaaacccggtctaccagttcccctcttgaactgactgaccatcatgcccaactggggctcactgcacgacacccaactcaagatagatcgaaggtctatgttttcttcctcgattcttgtcttgtcgtgtctgcaggactcaatggcagactgcaaaccctcacaaagtgcacactgcgcaggtgcagggacactcactgagctatccttctcaagcaaagctatcctaacgtctctctctgctagcttagactgtaagctaggacaaacagtacacgcacccaac

SEQ ID NO: 130703 - DNA, 584 bp, Zea Mays
agcggagcggtctgaacaatcgtcggtcatgtccctacggctatgctagtgccggggttactctcttcctttaccgagtgatccaagtccatgcctgagtgggtgacgtggacaaaggggtgttccgcgatagaggtgcagcctcagtcgaccgagccacatgtgccacaatggtcctgagcgcaacggacgcaggcgcaaatctgcgtagggcagaagtctgtcgggatcctcgcgccttagagttcgtcgtcgctgttcttgctagagttgggtgagacaagcctactcccgcattttggcgccatcgaagaagatctctttctaaatggatccgcaatgcggtgcaggatgccttttcctgatctgcaatgcaggagagggatctaaagcagaagatctctacaacattgaaggtgactgggaagttgaaaacgatagccatgaagtcatcgtagatcaatgtcgcaacccctgcctagcgcgccagctgtcgatgtttgtgatccgatcgcacaccacagggttacccacatgatgcttttgggtaggacattggcattgattgcgacttgatggtacat

SEQ ID NO: 130704 - DNA, 499 bp, Zea Mays
gggtttgaatcggtctagcatttgtttggtagctggcttggtgaaaatgtctgcaatccgatctcctgacgcaatgggtctaacctcaagtgcgcgtaaagccaccttctctcgatcaaagtggaaatcaacctcgatgtgcttagtgcgtgcatggaacacaggatttgagctcaaatatgttgcaccgaggttgtcacaccataggactggaggccggttctgaataatatttagttctttcagtaatgactgaatccacactccttccccagttccattagctatggccttgtattcagctttagttgatgatcgagacacagttggttgtttgcgtgcactccatgatataaggtttggtccaaagtagacagcgaatccaccagtcgatcttcgatcatcaacacaccccacctaatcatttgcttagaaaagtagctgctcaaacctcgccgtctgaagcgttttcccacctcgtcttcctgtagctgctcaa

SEQ ID NO: 130705 - DNA, 313 bp, Zea Mays
aataagtaaaggtttcgttagttgcatacaatggttggtcatgtaatgaaagacaaatacaaatgaaagggtcactgagtccaattcgtagacacacgaactaagtccaattgaaagtactcgatatggaaggaacaaggtgttctgtttgggtctttcaacggtaacgctacagagttcttcgaataccaacattaacatgcaattctgtcccaccaacattcagcaaacaacatacaatccacagctatcttaatggaattgaaaatgcacaaatgggtgggtacacaatcttaagtaaaccaggacgacg

SEQ ID NO: 130706 - DNA, 679 bp, Zea Mays
cacataaaaaataaccgaacctccagccatcaaaataaaccatttcgggcagcaaagagtcattgactccaacatagttaattgtatcaaacaggaaagagacctcgattccatcagagtacatttcagcaaaagcaaaaagcgccacatgcgcgccagctccaaccgttaaccaacaaaatagttgccaaccagtgaatagaaaataccaaacgacccaaaagggggaggccaaagccttacaaccccgccgaggtattgtcttcatcataattgtcatcattgaagtgagggtcccccacctgttcatcagagaagtcggattcctcatccttgctgtcggtggaagcagccggcctctgaatggcagtaccagtggccttggatctgttcaagtcgtccggatttagcttggaaggggtcattttatagaactcagcacccaatttcttgatgacgtcaagatgcatagagggaggggcattttgagtgcagcatgagcaatttttcttgccaatcccagtgcaatttttgaagcccttggcctttgccctaagcctggcactccttctgactgtcgtgtcgactgagataggctgcctttttctgggagtgtggagttgtggactaccggtcactttatatttaaaaccgattgatgagtaccacaaatttcttc

SEQ ID NO: 130707 - DNA, 441 bp, Zea Mays
ccttgttgggtcaagggccaacccatcttgctcacagacggtatcgtagcagatattatgataatgatgatcgtaccgtagccccaccctcacctcacccaccaatcaaaaaaccactcgccacccaaaacatacgctgtcatctcatctgtccaatcgtcttaggcaatgtgcgagccaacaatggtttatatgcagcccgcgttccaatttttttggttgcccgtgcacgtcgtggcaagcaaaatcttgtttgctgtccgtgtccaacgtacaggccaagtcaaggcatacccgcacgccaaaccaaacagatcgtcaaatcatcacatcaaacccaaacttcaatccgaaaaaatccagccgattttacgactccaagtccaatcccaacaattttcccttataaagctagctcgtcgtcatcaaccaccttcaaga

SEQ ID NO: 130708 - DNA, 546 bp, Zea Mays
cggttaggctaaccctaattcgccaccagcaaaagagcagccgctcgcctctcgccctcgcgaagctgccgtcgcgaacctagcagtttggtacgcggcgcttcctcccggtacgtgtggatacctcgaaggtgctgcatcttgagcactaggacgaaccacgctaggacgccggcgactgcacggcaccgctcgatgtgttcgtctacatcgagacgtcttccgctgccctacgcgtctaatggtaattccatgacctataactgcagtagttcttggttttatgggattgaaaattttgtttatcgctagcgtagcctcccaataatcctacatttccttcatcaattcttgaccttcggctctggacaaacacttgagtaatgcaaagcagactccgtgtttgtataactccccttctatgattacatatggtcttgttcttgcttccattcttttattgtacacttcgtcatccgaaagacaattgccttggaggaaagatataatctcagtgctccaatctcactatgtactagtgaaatt

SEQ ID NO: 130709 - DNA, 369 bp, Zea Mays
ctttttctttttcttcccctcagcaggagaagttggttgattggctcggcgaggacgcttcgggtgaacactatcagacctctgaatatccaaagttttgccagcctctgggatgggcgctgcatccagtgtttcagcaggggctgcgtcagagaaatcttcagccaacatatccaacatgtcacttatctcaacatcacttggattcaaaggtacctcgaaatgaacctgcctctcgtcatcagggatttcaccaagtgaggcaaccaaagcactaacctcttcgggagagggtcgcactctaaggcccaaaccgctatcaccagctggaggattcgacacaaaattggtaaaaaccttagaaggagg

SEQ ID NO: 130710 - DNA, 498 bp, Zea Mays
gcttcgtggattgacctatactccggtaagcattccccctcacgtgatcgccgtagttgtccctttgtgtagcgtgggttaattgagggtcaagtgcactagcgctcccggtcttgcgccttcggcgagtgcgccaccgtgtgggggtccgctccgccgcggctgtgcagcgagagaggaagagatggcgtgggccgtcaatcacgtgatctgcggcccggattagatggagactttcgtttcggtctggtgtagtgtgagtcgttcgattcagatcgatcaggcgagagttggttttagagtatttaaattgggagagtcaaaataggttcaaacagctcggattgcatatcggttcgccgtggctgaattttaatctgagaccttgggttcagatcggatggctctgggtgaccgatactatttcgtcatggttaatttacaaaagagtccttgataaatgatgaaacaaacccacagtctatagtaatattagaa

SEQ ID NO: 130711 - DNA, 321 bp, Zea Mays
tttctccactttgtcgtttcgcgagccttgccttcactctatcctttgtcatgccttttgttattatcaccttcaccttagacacctctatatcttacttgatgtttgtctcatacctgccctttaaaatcacctctcttccgtctcattctgagagctatactttacttgtctttaccttggtcgtatcctcttctttggctcgcgagtttgtaacctcatcctttgttatgcttttgtttcttattgcctttacccttctcatctctcaatcttaccttggcgatcacgctatgttcgttgtctaaaacctccaatctc

SEQ ID NO: 130712 - DNA, 671 bp, Zea Mays
gcagagggtccatatgaccatgcaaaacactattttgcactataaattgtatagtctggactgtttataaggtagagtttgaaacagaaagtgagataggaagactgctgaagctagactaacataattgatgtttgtttccgaatttcatctcgtgttaggagaacctctcagtgttctctcctccccaaaacatacatatatatagaatgcactcaaaatgaaaagggccgtatatgtgtaccggtgtatctctacagtacacccatcatctaataataagagcaaagttacactggtagcctattggtaagcatgtgggacaccgatgcagagcaggccagcagggcatgttccattccttaacgattggaccaatcgaagctaactgtggtcagcatgtaccagttccgttcctttttccgttcacctttcctctttacaagcatcctcacttcatcagcgttcctaaaagggttttcttttagcatctttctcgcaggattgctgtcagtacacccaacttttgactcaagattcctccgcccgggttaacaaacccaaatcacagctaaacctgtccatgtcctacattcagagcttcagttgctagctaagcgaccgggagtcaacgaaaaggtgaaccacgagggtgcaaccgggcagccaca

SEQ ID NO: 130713 - DNA, 292 bp, Zea Mays
cagcagctagctcgtgcacaacttcgtcagaaaacacaagctgacaaacatcgtactgaaagaacctttcagataggggactgggtctatttaaaactacaaccgtatgtgcaggcatccttggttcacagagcatatcacaaactggcgttcaagttctatggtccttaccaattcattgcaaagatcggctctgttgcctacaagttaaatcttccagactcttgtcacattcacccggttttccatgtatcactgctcaagaaagctgtgggaccccatgatcaggcta

SEQ ID NO: 130714 - DNA, 542 bp, Zea Mays
gtggatggtatgaagtgctcatgtgcaaagttgtgccggacagcttgaataactcttgccataaggtgctggtgaagatacggtcacgatccgagacgatggtttcaggtaggccatgaagacgatacaccgaatcaataaacacttgagctactttcagagctgtgaatggatgggaaagggcaatgaagtgactgaactttgagaatgtgtccactaccaccaaaatgcagtctgacttgccagacttgggtaagccttcaataaaatccatggagataacttgccaagcgtgtgatggaaccttgagtggctgtaataaaccagggtaccgagaccgatctggtttggcgcgggagcagatttcacatgaacggacaaaatcccgaacaacagacttcatggatggccaggcaaacaactgtttaacgcgtcgataagtaactgggaagccggaatggccaccaacagcactgtcgtggagcgaagatattaccttctgttggagagccaagttattgcccaaccatagtctgcctttg

SEQ ID NO: 130715 - DNA, 540 bp, Zea Mays
ggctcgggttttatgcccagtgtgaattggtggagaatgtattcatattggttgcatttaatgcacacgtcacgtggttcatgagaacctgggccgaggccaggctcaaggctggcctccatccgagatgccctcgtgcgtggtagatttttgcttcccgtaaaagtgtgctcctcggatgagtcgagggtccatgtgggcgcagccttcgcccgaggatggggccgggcgtggttttaggcagtcatcaagtggggtttcgggcgaacgtgattcgacccagcgtgacctcggggagcgtgttttgtgccttatggttccctagcactcgagtgttaggtatgcctaggggcataatccgggtacctctaattatgatacccgacagctacctttcgcttccgtggcatctccctcaacccatagaagatggtgtgtggtagaaccccaataagagtttggtgcctcgattgaatctggtcgcttcccacttaagatgacatcggtataaaatatatgtatatccgtggacaataggct

SEQ ID NO: 130716 - DNA, 703 bp, Zea Mays
ttgtctattcattatcacccggggaaggcaaatgtggtggttgatgcccttagcaggtccggggttccaaaagtggccttgcagttgattgctgatctggaccgtttggggatcaccttgtgctatgtcggcaccgctagtgaggagactcatatgcttattcaatcttccctcatggagagagtgcgtgcggctcagcagcaggatcgtttattgcaagaagttcgaaagagggttggcgatggtaaaccctgggagttctccatcgatgagaatgatttggttcgtttcaggggtcgcctttgtgtgcctcaaaaatcagaggtgaacatggatatattgagagaagctcataaaacgccttacaccgttcaccctggagaaaccaagatgtaccaagatctgaagcaaaacttcaggtggaagcggatgaaggttgatgtttctaagtatgtggccgccagtgaagtatgtcagcgcgtgaaggccgagcataagcggcctgcaggtttactgaagccattggaaattccggagtggaaatgggagcatatcaccatggattttgtggtgggtttacctcgttctcctcggggtagaaatgctatatgggtggtagtggatcgcttgactaagtctgcgcattttattcccatgaagaccacaaattcagcttcagatttggtccccttgtatatgaagg

SEQ ID NO: 130717 - DNA, 317 bp, Zea Mays
gcagcctcgggcggcacgccgaccagacctccaaggtcctcgacgtcctcggcacgctccatccgcagcaacaacacattcactcagcaaaaactatacatacccacacgcaaccaaccacacaaaaataataaccttcacctgctctctcgcccggtcggatcgctccctgacagcctcccgaccatgcgccccccacatcctatcaaaaagtgcccccactgactgcttcacaacagggtcttcagccttgaagatcttgcgttcaaagctctcgtctgattggtcgaagacctcgtagtgtctacagccctcgc

SEQ ID NO: 130718 - DNA, 613 bp, Zea Mays
ctcaaccgtagtgcctgccgatgatggtttgtttggttttgtgtctgagtgtttggagtctgatggtgaatctgggagctcgtttccttggacggaggagtccttggatgaaggcttggattactttgttgcgttggatgtggctggggtggagacttcgctgcatgtggagggtgttggggatctccctagtgcgagtacttggtgtaggcggcgaagggtagtgggaaaacagtgtgtgggtgaattttcacgaagtggcaggtgccatcgtatggggatggagcgtggtcgtctccgagtggaccgggttggtaaacgagaattgttgtcctcgccgattggggcgagcataggtgagggggatcttcggaagctttttgagggtgaggaattgaggataatgttgtttaactacagggagatgggtattatctcgaaggttgagccgatgtaatacgtgatgccctcgccgtgtgtatgtaattgtaatttttatggtgatgtggcctgttggccgtagtcgtacgcctgtgttggtctgactgtgcccgtgggcgactctatgcggagtgcctttgtaatgagagacttcgattaatgctattccagc

SEQ ID NO: 130719 - DNA, 573 bp, Zea Mays
accagtgagagaagggaggggcgaaagctgccgcatggattcggccggtttgcgccgttgactcgctgcagtggagttctccggtgcaagctgctcgtgggagtaaccttccgcgccggatcgagagcggaccggctcggaattgctccccggtgtggcgtctccgcctcagacccgcccttcgtcgtggccggagcgcagctcggcacagaacttggtaataacaccctcatgcagttcgcatagttatgtactacgagtaggtgtcgtcaattttgcgaagaatacgcgccagtgtgttcgccggtgggtctccgccgtgtttccctgggcggcgccgccgtgagcgggtgaatgttggggaattgtctctgggccgttggatggacagcgggcgactgagattggagtgggatatatcccttcgcgctattagataggagccgtagatcgaccatccgacgaccgagatcgggctctggcgtggtcagatctcggacattgatcttgaatccaacggtagtgagtgaaagcggggtgtgtaaatagggtcgatctaatccggaccattcg

SEQ ID NO: 130720 - DNA, 492 bp, Zea Mays
ctataacaaagatgaagatgatctataggtctacaactttggtgcagaaggatgatgatgttgccatggaaaatttggagaaaacctgtcctaaacctcggctgtcaggctaactgaaaaagcttccaatggtacagtaccaaaatatcaacagaagcaggtcccccctcgccgccggcgacctcgcgcgtagattcgcgccgatgaggtgatgtgtgcccacttaagcccggataacgccgcgaggtaaaaagatcgtcaccactgttgggctatgggtactaatccggctagtcgtcgtgctcctttctgctttgcggtcggtccggataattcaccagagttggctgcccatcgaccgaacgccacgtgcctcaacaattaccatgtcgcaatcaccagtgttatgcacgtccaatgatcgtcggggaggccgccacggtgaaggccacgaatcaccatgcccgtgactcatttcttctctgaccacca

SEQ ID NO: 130721 - DNA, 501 bp, Zea Mays
gaagccgccaggcgaggttctagggccagcttcctttgcccgtgtatataggtggacaccagtacccctccccatccatcctgtccatcccctccttccaccttgacccatatcgtgcctcggcaccaagtgcggtgagatgcagtgttgacgatgccgccatgggcgtgtcatgcctacgcactccgccattgggcttcgggtgggcgaaggcactcgcgcccatagaactcttaccctgtgtcatcatcttggttccccgagtaggatcccctccagtcgtgtagtggattgaccgttgaagcaaggaactcgcccccaaccgtcctcaccatgggccgagctcttccactcaccgaccgccgaattggtaggccaagagtatcgtttaagcccctgctatgttttacgtgggttgttgatgagtttggttatcggaaagtagcatgactgtgggattctgggcacagtgccgccattgggccgctgatcgcgtgggca

SEQ ID NO: 130722 - DNA, 390 bp, Zea Mays
gtagtcactggttttccgataggggatattcttcacaacaaagaagccattggcagaatagccaagtgggcctgcgagctgggatctcatgacattgaatttcgacctcgcactgccatcaaaactcaaacactggttgatttcgtatcagagcagaccgaacaacaagtaccagataacccagaaactgcagaagtatggcgaatgtattttgatggctcgttgaagctacagggagcaggtgcagggattctctttatcgcacctggaggtgaacaactcaagtatgctcttcaactgttatttctggcatctaacaacgcggccgaatatgaagctctgattcatggactgaacattgctatatcactgggcatcaagagactgatg

SEQ ID NO: 130723 - DNA, 748 bp, Zea Mays
cttggagtggtttattgttgagaatcacagaaattctctccccccacgatcagggagacagccgaacgttcgcactccgagctggactgagtcccccacagaccaggatgtggctgaggcaggagttctgctagctgaagttggattgttgaaggagaggggtctgactgcagaagatgtggttgctgactttgtcttcaagaacattcagccattgaaggacagggcatacccagcctacctgtaccgaggtctagctgactccactcgggtcaccaatagaagaattcctgctgtggacttggtgagccgacttgaaatgatacttaggggcaaggtgtcaaatgttggtgcccctgttgcctactcggcttggaacttgcctccttccaaggcctttacccatttcgtgtcgagtcctcctgctggcgatggcagtttgggccttagagtgcgaccctctgccgaagaagttagtgcgttggttgcttcgcttgaagaaattcctgatgatgaacggcaggttcattttgaggtgcctttggatcccagtgatgcagagataagtgccatgcttgatatgttagccgaggattcttctgatgccgctcctgctgggacatcggtggtggcgcctctcccggaagctggtaaaaccttggatattcagaggcctgtcagtgttcgcccgaagcgcccttgccgagccaatcaacttgattctcctgctgatgagcagaaaaagaaa

SEQ ID NO: 130724 - DNA, 514 bp, Zea Mays
gccttagcaaggcccccaagccattaatataatgaaatttagtaagcaaacattgatcaccacctggatcccaccataaacgttgcccaactgaacgagagccataagatggccagggtattggcctgagttgagcacccacaatatgcataacccactgtgtaggtggaggccatggtggtctttgcttcagagcttcctgaccgtaacagaatgacagatcaaaactgaaatatggtgtcatggtgtcactgagccatgtgtacttgttctcaagagggggtggccaaggtcctatgtccacctcagtagcagagaataggcgtggtattactaaacactgagtagtcatttccaccagcaccttaggagcctcatgaccttcaatggcatagcgtgatagaacaacaccactcgaggccaatgaatcgatggggatgtaccttgtgaacgagttgtcagcaaccttgactattgcccttggtgtagcaggcacgagcgtggacgttggcgc

SEQ ID NO: 130725 - DNA, 728 bp, Zea Mays
tggtgggcagaataccttgcgctgcagccagaaggacgttaagttctcgggttgagttcggtgaggtatttcgagaacgtcatgttccagaagcccctatgtaaataaagttcaaagcgtttttggatctaaagcaaggtgaagaagcgagtgtaatggactattttagaggtttactcgcctatcccagtatgttttggagtatgtggatgccagtgaaaaaaaagaaaaagaaaaaaagagtaatacatcctgcgtgatcttaatgtgaaactttagctcctgatggaattagtttggttgaaggatataaggaaatggtcagtcaggctattctaggaaataataagattcgtctacatcaggagtttaagtgaaagaagtaaaggatatacctgatgtgagggagttctcggatgtgttcctcgaagatttgactagttgcctcagaaagggatgtggaattgcgattgggttgcagtccgggactccattcaccctaaaggtagcaataggtaccaaggtttgaaacagagattttggtggacctatagcttataaggtacagttgccaaaaggaccttcaacagtgcacgacgtgttccacgtgtccaaatggaagaaatgtcttcgagtccccaaatatgttattgagattttatatgttaaccataaaccaggtttaacctcctcggaatatcccataaatgtgttagatcaaaaggatc

SEQ ID NO: 130726 - DNA, 431 bp, Zea Mays
tctattttccaattagatttcctgcttctaagttcatttgtgtgttgatctttcagatttaccagcaatgtctttttgatgcagctgagcagctggaattacaaatacagtgtctgtgctgcgctccgggatcaaaacaatgagcaagagctatagcttctgcactaatcatcgaaatatgtcgtctaagtctttgttccaagctctcacaaatttgtattttgtaagctgtgcaactttagatgtctaagatctgttgtctggagctcaactttgtaagcccagctggaaacctaatgaatgcatgaagtgagaatgctcaggaatttaagtattaccatcgtgttacactaacctgactcaacaagccacatgctatcaagacaattgcaccacaaatcaccaataatcattgcatgagcaaatgccac

SEQ ID NO: 130727 - DNA, 391 bp, Zea Mays
ggctcgtcaacttaactagggcaaaatggaccaactgctagaatatgcatctgacggccatgcgctccacacgaaggtacttcacctcgacgcaccattcacgatgacgccatgtgccgcctcctaatcctgctagaaccgcacccctgagttttgaggccaaaacccagtgaatctaaccctccatagcttgctggttttgaggcccaatcagtgaaactgtcatgtgtagtgtactgcatacgcgtcccccacatcctagacacgtgtcccgccggtccccgaccgcgccggtgacacaatccgctctgccacgtctttgcgctggtgcatgtcccaagtgtcagtcactgtggctggtcacctagcttctctaatccctcgatcaagg

SEQ ID NO: 130728 - DNA, 920 bp, Zea Mays
ggggagtgtgttctcggcgattggtgagcccgcagtccaaattggtggctcagcaaacatcacagagctatgagagtgctcaaacgaggaagcaggggacagggactgaccggaaaggggctggccgcggtgaagctgttcttcgcggtggcggcgacaaatttgggggaagtttgaaattccagagctcgggtgaacgattacgggtgggagtgggtgctaaggcttcacgatgacatagcgcagctgccccggccatcaatttatagagggcttcgacggtggcgctcaatttggccgggcagagctggcggccggagacagagaagaatcatggcgcagtgggttcgtgtcctcagtcgtggcgagctcaccggcgacgattggacagccgtagcgagtcacggcgtcgcggtggaaaggcaaagccacgcggcacaaggccgagaggcggcggttcaccggtgaagctatccgcgccagccgcaaagcaggaggggatacgacggtgagtcaccggagtgacctccagctcaccggcggcgaggatccttaaccccgcgacgttatccatccaccccgagtgtgaatcctggcgccggtgacacgaatcacggcgagatttcatcggcggtgagatcttttggtctgatccagccaggtattgtaccatggcgatcgccattcagtcgactgacagaacatcttggagcatgatttactctcaatttccaatgacaactcatcccaagctttgcagcaaaattgtagagctataaaccatcaataattcgactatagggattgaactcatttgagcactagatcaaggttgaattcacattcaaagctggctctgttacactgaatatctgaatttcagaatggaaccagcctgacagccaagctttaggcttaat

SEQ ID NO: 130729 - DNA, 617 bp, Zea Mays
gccttctgtaggacagcgagaggagatgaggaacaggatcgcgccggtctcccacagtgaaggacgtgatccccacgacttcattaaggcctactccccaccacaagcgctcaggcaaggtatccctctcattccccaccttggagatattggtgtgctgtgtagatatcattctgtgctgaaactgactactcatttactcaatggagttaccaatgtctcaaagatagctatctatgaattttggatcaatgtattgtagttacgtttggagaaataaacatatgtagatgaatggttgtattttgttccagtgtcagaatggatattggcctggtcaagcgtcttctgcgttactctaaaggttctgatccatatctagttggtgtagagaaattccttgaatttgcatttaaagataaacctgaaggtatcaagatttattgtccatgtcagacatgtgtgcacactactgttcaaacaagggatgacatgtatgggcatttggtgtgtaatgggatacttgagaattatgatgaatggaattttcaaggtaatgtttcagtgcaacacacaagtagtccagaaccaaattcgaatattgacgaaaggtatgt

SEQ ID NO: 130730 - DNA, 331 bp, Zea Mays
ggggcagcgatggtgctaaaatccttcacgaaacgacgataaaatcctgcaagtccaagaaaactccgcacttgtgtcagtgtcaatggcgttggccaactctgaatagcctgcaccttggcctcatcaacctcaataccctgtggagtgacaacatagccaagaaacgatactcgttcggtgcaaaaggtgcatttctcaaggttagcaaataagcgcgcggcgcgcagagcatcaaaaacagcatgtagatggtcaagatgttcagataaacaagtgctgtagatcaagatatcatcaaaataaaccaccacaaattttccaataaatg

SEQ ID NO: 130731 - DNA, 608 bp, Zea Mays
cgtgctcgcgggttggggtcgtggccctgcagggggaagtggaggctcggtgggagggtaattgctcgccgacgctcaagtgccgccatggagtccctgcagaccgtgcacagaagccacgacgacgcgattcacggtaagaataattccattaacttcgccgcagccctagctttgtatagctctattggatcgaaatatagactgggtgttagccggatggctcatcgctggccatgggcgccaccgcggggaatctgttcaccgccgttgggcgccgtcagtttgctgggaggttggggatgcttcctggccgttggatccatgggcatcggtcctaatctgatctgtgcatacctttttctgagatcggatcatggccactgatcatagatcgtgcgaccaggatagataggcgttacccccttcgcacgtgctgatctgggccgtggatctgtgatccaatggctaacgcggttaaagctggcgagggtgccgtctggccgtagatttgtgatcgtatggtggccacagcgtaccggttcgatgtggcccggatataatctgagccctcaaatgttgatccaacggctgagattgaagcgtaa

SEQ ID NO: 130732 - DNA, 486 bp, Zea Mays
ccggacttactgaggtgtggcgtctttctttgccacgtggcgccctttggcctgcccatctggtggggtcaggcgcggtcctccgcgtgcctaggagacgtcgcacgggtgcagtgtcttcatgctgtaggagagggtactcctgatttagggcggtcctcgtatgagatgggctcgggcgagacggatatggtggttccagggtgaggtgtcctcaggcgatgcggagacttgctcgaggcggaggttttggagggccctcggagagggggctcagttaggatggcgctcttatgggaagacccgtgaggcgggcctcgggtgaggaggtgacctggtctcttgccttcgggggtcacacttgggcaaataacctttcctgagcgcattttaaggttataatctgggtacccctaattatcacacccgacaactctccctctgcagctcggtgctaggcacagttaatgcggcacaatgggtcag

SEQ ID NO: 130733 - DNA, 299 bp, Zea Mays
gtgatcacgtgtatctgaaggtgtcaccgatccggggtatgaggagatttaaagttaaagggaagttgtcccctcgctttattgggcccttcttgatcctgaagcgagtggggaaagttgtctatcaactagaactacccgaccatcttgcggatgtacataatgtcttccatgtgtcccaactaaagaagtgcctcagaatacccaaagagcagctacctatggaggatcttagtgttcaagatgacctgacttatactgagtatcctatcaagatcattgatactttgactcgtgtc

SEQ ID NO: 130734 - DNA, 452 bp, Zea Mays
cgccctattgacgtacccccttgcgtcgtgatgtggccgcgcggctatcgtggtgatgatcgccgttaacccaagcacatcacgctactgaccttgttactacgctgtagtaggtcacggtagatagcccctctgtcgccggggacttaactcagtgaatgccacattgagcagtctacggtgactcctcccctttcttaccgctagctcttctccgcccaaattcgtcgtactcgcgaccgctctctataaattgatgccccagtgagcttcgctaggttattacgcgcccagtgcaccagttgtcgcctcttatcatccaccgtagcgtcccaatttcgcttttcccccaattccgttttccgcgccgccgtgagcttctcaccgtggccagatgcctataggttagttcaagcttctctgcttgatgttctagcatccattaagcctcc

SEQ ID NO: 130735 - DNA, 331 bp, Zea Mays
tgactaaggagctctggccacggtggccgtgagcagcgcggcagaaccgacgcgttcccggcgaccagaggctactccgtgcaaattaagggtttggcaggcatcacaacgatgtgagagtgcacaaacaagaaagcaggggacggggactgaccgggaaagggctggcgacggtgagctcggtttcacggtggcggaaatcggatttgggggaattccaaattcaagctctctggtgggaggtttgggatgcaagcgggtgcaatagctagtagagtacatggcgaagctgagggggggctcaatttatagactccgagagcggtggctc

SEQ ID NO: 130736 - DNA, 707 bp, Zea Mays
gtccaaataaattaaccagtcgatgtagtagttgtcgtgcgtgatttattgttagtgagtagtttgaattacgaactatatgaggattatgttagaaactagtgtgtggcctgtgactgtgctcgggtggtaaacaataggtcagtaggtattgtcggtgtcattggcaaatggggatgattcttgttttgcgataaaatttgaaaggcaaagaacatgggtaatgtgtcgatcaagttaatcgataggtttcgtaaacatgcttgtgatgcttttatgtgcatgataaaatcgatgcattgtcgtcgtagtcttaggaaattttctgaaatgcgctagtgctctactgatgggttgaatgtacttgagatgtattacaatagctgggtgtcgcgcaggttatccaaagatggcgaaaggtggcgtatgttggtaattgggaaatagtcacgtcattagccaactcgtgttaaacaggagtcgattgcgttaagcgattgctatatacatattgtgtctcggagtgctatgataatgagttagcagacttgttagatggttttgggttaagttcgtggtcacgatgaattgctagttgtagtctaaatgtgtgtggttatggtcgcgggtaaaaattagtagtgctcatgtggtgtctaagttaaaatgcgaactagtgggtgaaaagcgcttcgatatacatatat

SEQ ID NO: 130737 - DNA, 555 bp, Zea Mays
ggaaaattctgcagaagctagaaagcacaaccggagcaaattgtgcctctcataaccaatttttctgttgatattttgcatgcaaattctgcagtagctcgtcggctgggtggcaactacagcctacatgttcttttagaatagtgtggacaagagcagatacctttcgatactcatttggggcacatcgacacactttgaatcttttcttgacaataacggtaagtatgtattctccaaatcgtgcaggaaccagcttcttttgttttgactgtccccatcttgccagaaatcattgttgtaaagggctattgaggtcaaccgagagagaattatttctttgtcgaaaattggaggaataatcgagagaagtggccatagttggaaagatacttttatctacttattatagattattaggcaactggtgtttctatgtcagttactttaaggcccaatggtttcgttgtctcaggtatatatttatctctctttctcttgtcttttattagctactaactgggcagctgcaagaaaggtgcaaggaaggtgctg

SEQ ID NO: 130738 - DNA, 622 bp, Zea Mays
ccaagaggtgccacgcccaagcatttcctcagatcaagcagaagagtgcaacgttttgagctagccagagtcagactctaatgactggagggagcccatcatcagatatataaagaatgaagaggaatcggatgacaaaactgcagcagaacgcattgcaaggcagtcaacccactacaccctcattggggatgcactgtacagaaggggcgcaacaggagtcctcatgaagtgcattctttcggctactgggaagcaactgttagatgagatccacgctggacagtgcgggatacacgcagcatccaggactctggttgggaaggtcttgaggtctggtttctactggccgacagcaaagagtgatgcagccgagttagtccagaggtgtgaagcttgccaattcttatcaaagcagcagcatttaccagcacagcaactgtagaccatacccgtaacatggccatttgcatgctggggactagacataatgggacccttcaagaaagctcagggaggatacactcacgtgctggtcgccattgacaaattcaccaaatggatagaatacaaactcattgcttctctaacctcagccaaggcagtggaattcatacaagat

SEQ ID NO: 130739 - DNA, 498 bp, Zea Mays
agccattaggttcacggcgaggtgctcgctgttcttcaagtaagctcgagtacaaccaggaattcacactgccctctccaccttctctcaaatcgattgcgcacagtgaaagcacagcctctcacgatcctatagcctcaatccccacccccaatttcatccagagtcgttgaattgccattttcccccaaatcagtccgccgcgccacccaaaacagcccgcccgtggcagcttactctggtaagttaatgtccaatccttgtgttgttctagtgcccttgcatacttgcgaagctcacggtggcgtccgtttgctgtgatcgaccatggtttggcgggaacatgtactcccgtgctcggtttccgccgtgcacgtggaccggccgttctcggggtgttcggatcaaattggtgtgtgttccgaggtcgtcttaggtcggtaaagcctccccgatagtcggcttgagcaatcatcgccggccatggccggtatgaac

SEQ ID NO: 130740 - DNA, 592 bp, Zea Mays
cgggcgccgaagaaagcacaaatatctccgcgatcattcaaaattttctcaaaagcttcggcttccccgcttatccactcaatgacgccttcggggtcgcctcaaatgaagttctcctcagaggagtaggcaccaacttttgcaaaactgtttttcaaaattttcacgcagtctaaggatttttcgaagcatctttccttggattcgtgaagctcctcaatatttttctccagcctggtcttccaccattcacttatttcttggctggccttcgcgacttcacaattttctttggcttcggcagttgtttccgaaggtcttcaacctcggctttttgggcttcggcctgagcattgtacttagcttcctcttctttcattttattcaccaatgaaattaaaattttgtctttctctagaccttcgtttctcagctcaattacctctgagcgaaggttactgagagctattgtacaactttcgtcttcggcgctcttttgtgccctcaaggcattgctaagaatcaagccctgcaaagaaaaagaaagaattaagcatgacaatgaaatacttcatttccaactttaaagtta

SEQ ID NO: 130741 - DNA, 498 bp, Zea Mays
gcgccaacaggagaagaacaaggcgagccagcaggaggtagctattaccgtagttgttggggagaatcgccaattgccgatggagcgtatgccgcggcagaggaacgcgtcgacgaacaatcccagtcgacgccggtcgagcccctgcctgacgatgcccacaaaagcgcccacgcgtattaacggagttgccacgatgcttttcccggcttggacggtggtgcagagggagaatccccgcggcggcgaggagaggcggcgcgcgaggtgcgacgggatggctgttagcgaaaagggcagagatatacatggggtttcgtggactcgcttcttatagaatgcaggcacgaacttccgtgagaccagggtgttggctaagctcgccgggattcacggagggcaccgcgcgcgttctgttgcgcccgcgagcgagtatggggagaagaagacctgtgggtcccgcctggaggtgactggcgcgagggaacacccggctga

SEQ ID NO: 130742 - DNA, 422 bp, Zea Mays
cccgcgtgcctgccgcccctgacaagcgaaccccgcttgtcggtgccagtttcccttcgcccgcgtgctctctttctctctgtgtctcatggacccagatcgccagtcgtcgagccgttgccccgagcgtccctcttttctctctctgcgccgtgggccagccctgtcagcttcgccctctctgcgtgtcgccgtggaccggtgcatgcgcactcgcgcacgtcgccgggtttctcaaccacgacacctgcccacgcgcccagctccctctataaagccccactagtgccccgcgcacacccctcacctcattttgcacagcttcaccctctctcgtgctctgccctcgccgccagccgccgctagagacccgcgcccgtgtttccagccatccagctcactggagaccgctccaagcctcc

SEQ ID NO: 130743 - DNA, 608 bp, Zea Mays
atggaattgagccgatacttcatgaataggtttatataggtgaaaatgagtgaagtgtgtgcttggtttgaatttaggcgaagaaaaagagatttgggcactcggctcggaaacgatcgctcgaaacggggaatttggtgaaatttaagcctgaaatctcggattggcgtgaagtttggcgaatatgttactggaggtggtgtgaaggtgcctgaaaaatttgggttcaattggagcatttttggctggtttgggcatttcaccgaacacgtgacatgcagggttctagggtttgggagaaatggctatttgagatgtgaaaaccctcccgaaggagctaagaacctgcaggaatgctcaaggaacataaagggactcaatcatgcacttggattcataggatttgatagaaattgtaattgggcacaaaagggtggagaggggagcctctgcacaacagaacagagagggaggaagaccgagggagaaaggggctgctcaccgagaggggtgaagagcagacacaaacacgggagatcgccggagcacggtggtcgccggtgaggggaggtcgccggcgagggagtgggaatcgccagagagacaga

SEQ ID NO: 130744 - DNA, 644 bp, Zea Mays
aaatttttcaggcaccttcacaacacctccagtaacatattcgccaaatttcacgccaatccaatataccaggcttcaatttcactcaaatccccgtttcgagcgatcaattccgagccaagtgcccaaattccattttcttcgcctcaaatcaaaccaagcgcacacttcactcatatttacccatataaacctatttgtgaagtattggctcaattccatgtcatttcatacctcaattcgaatttcaaacctcctatgacactatttctcgttcaaacgtcgtttgcgtgtcgtttgacctctcgatcgccatatctctcgttttctgtgcaataatcctctgtgtatgtatttattcacatttcatatacttatgactatgtgactaatacgtgctcacctcttctgtcatttcagtgaccttgcctgcccgtgagccgtctcctgtcctgcatggattttcatctctcgtgtgagctttccaggtagacatccactcttttgacattctatcggctgttatcgacttgtgcttagcttcgctctctcacttgcagtcgtcaggtcaggatgccgcgcacgaagaatgtgtcggcgcaagggggaggagatgacgaggatcctcctcgccccttcaggca

SEQ ID NO: 130745 - DNA, 421 bp, Zea Mays
gcgagagaggcggtgcaggcatggctcgactgtggactgagggcgacgatggagtgtggcggcgttcaggatcggtgcaagaaaacacgataaaagtgatggacgacgattgtaggaggaagaaagttgagccacctctaaaaacacttaattttcgacgggctctggttgccatcgaaaataaactcataatttttagcagtttataatcagtcgtaaaaaatagcaacattattttcgacagataagtgacaacattaccagaatccggctctttatcgagtgctcggttctttgtcgagtacattttgtcttgcattcggcacagtcggctctgccgagtgccgcactcggcaaaatagtactctcggcaaagacaacgtttatcgagcgtgcgacactcggcaaagactaacactcg

SEQ ID NO: 130746 - DNA, 621 bp, Zea Mays
caaaaccatgtgagaacatattttgaagtgtattccagttaaaaagtgcgagtccttgaaaaaaaggttaaatagacttgactcattttacttttagacgaaggacgaggcaagcatgtcagatgcatgaaaagcgtagaactcacttgatactttacctcgataaacgcgaactgcatcagatgcttcggtagcaaggcaagggaagaacatatcctggacgtacagcaagaaacgactgacctacattgctacagctacccaacattagtatccaaatgtttttgtttttggtttggataatatatatatgtatgcagtagtgcacgacatgctctagcctctagctccaagtttaatgtaaattcacacgtgtggccactggccaagacaaaatttcaacaagtaatctgacctttaaccgttcaccgaggaagccaacaatgaaaaattcatgcacagcactgggatcgctggcagcactggttcgatctgtctttgtttcagcttttgtgaggagaatctaagtattgtgaggactacatgcggagaaagatgaagaaatctataagatttacgatctaaaaggtgacggatttctcatatcgcgaagattcgatc

SEQ ID NO: 130747 - DNA, 355 bp, Zea Mays
cacgacttggtaagctactgtcttcgaaggattctgttttcaaggagttgcgcgcctcgaagaaacttgtcacacaagagttggaggtcactcgtcacaacattaaggccttagaggatgatcgtgttgttatgaaagcaatgtgtgacaaagcgatggacaaggttgttcgcgtcgggtgaatcgtgatgagaagacctagtgttgtggtgcctgaggacatcgttgctgacgtttgcgctgcatctgttggtgtgaacaaaccttcttcctctggtaatcctgctggcgaggttccctgcaaaaatgctccttcacagtgatttgttcggatgagaaaatacttttcattgag

SEQ ID NO: 130748 - DNA, 566 bp, Zea Mays
ttacagctggcccatgtgggcctcgagggcttccggaagacattgcatcggctgcgcgcgaacttctacatcaccgacaaccatgcggtgctccgggactacgtccggacatgcacaacctgccaacgcaacaagacagaagcactctagccggcaggactcctacaacccctagaggtgacttcgcaaatttgggccgacatcgccatggacttcattgagggattgcctcgcttccatggcaagtccgtcatcttaacggtcgtggaccgtttctccaagtacgcccacttcattgccctaggacacccctacaccaccacctccatcgcacgcaccttctttgtcgatatcgtctgcctccatggattcccaattccatcgtgaacgaccaggacccggtcttcaccagcgccgtatggcgcgacctcttcaaaatggcaggcgtcaagctgtgtatgagcaccgctttccaccctcagacggacgaccaatctgaggtcgtcaacaagtgcatcgccatgtacctacactgcttcaacggtgaccgcccgcgctcctaggtg

SEQ ID NO: 130749 - DNA, 551 bp, Zea Mays
gtttcagtgtaaatcacagtcaaggatgagatgcggccttgcggcaggatcgaagatgagagattagtggttcggctgtgcttccgaggataacggtgagcgtgcagagcctcgctcagcttcacccataccagagagaggtacaagagaagataatccggaaaatcaagcaaaatgatgtttctgccaaagcctgtaataccttcgaatatttgtcgctcgctattcatttttgaattaaaatacgataaataaaaaaagaactgagagtgagtagaaaatatctggtcttcgttcacgcgagccaccaattccgatgcaaatgcattctttgccgagttcagaagaccctcaaggcatcatcggctatctgctccagatttgctcgggagcttgttgcagttgcagtggaacttgagatccagatttcagaagttacagcctttaatttgattgctgcagctaccgtgcgatccgggtttagttttgccccgtgtgaattgtgttggggggccgggcgtgaaagccaagagcagtagcacatgcacgcc

SEQ ID NO: 130750 - DNA, 613 bp, Zea Mays
cattgtattctgtaattggaaaagtacgtcatcaataaaaagacttcgttctcaaaaagctctcgaaatatttattatcgatctgcatgcttactcaacttagggtgactactataccctactaacggagcaatcggcttaagtcgacagtgacttaagacggtgcgacatgctcacgcttacttaacttaggttgaccactataccctactaacggagcaatcgacttaagtcggcagtgacttaagacggtgtgacatgctcacacttacttaacttagggtgaccactataccctactaacggagcaatcggcttaattcggcagtgacttaaggtggtgtgacatgctcacgcttacttaacttagggtgaccactataccctactaatggagcaatcggcttaagtcggcagtgacttaaggcgatgcaacatgctcacgtcaactcaacctagtataaacatgcttacaatcactcatcctggggcggtctctatgcctcacaaaaataagaagttttgaaactagcatactgcatttacttctgcaatcgtaacgactgttgaattcaaacaacagaaaaacaaaaatagcattcagtaccaagaa

SEQ ID NO: 130751 - DNA, 301 bp, Zea Mays
ccggggtgcatggagaatttggaaagatgagcttcatccaatattttcttcctgagttcgggattcttaggaacaaccaatcgggcttcaaaccatagaactcccttgctgtcctgacgaaagcatttgtacttatccaccttttgttcgagcatctctttaatgacttgaacacccttgtcaccaatctgtgccatgattatctgctcatgtagagtgggttccactgagatataattcaaggtacccgaggaaacaacttccatgttcaacttgcacaactcgtcacacagagtagcga

SEQ ID NO: 130752 - DNA, 613 bp, Zea Mays
gaaaaacatgccaaaattaagccagatcctgacattgatgtttacatgaaggtagaatgtcacgaaatttgaatcaaaacccttatttgaaaaagaagtaacaagggatcttcaaagtatttgtgctattctgtgcaaacaggccatctcccaggaaggacaagagaacttcatcactgattacgtcctcaaagtgagttaaaaaaaggacacagtgcacgtagaaggtacaggagatatgccccttagcatctaacagtaacagcatggatttcttttgcagattttgggtctggatatctgtgcagatataatggtcggagactctatgatcagaggtatctcaggaggacaaaagaagcgtgtcacaataggtatgcaatctgcagctaagaagaaatatccatacataaaaccctgaagcataacagaaatatctgactcctcagcctgttggatttgcataggtgagatgcttgttgggccagctaatacactattcatggatgaaatctccaatggtctggacagcgccactgcctatcagatcgtcaactctctaaggcagtcggtccacatccttggtgccactgcactcatctcattgcttcag

SEQ ID NO: 130753 - DNA, 343 bp, Zea Mays
cggggcctcaattccaggaaacagcaggggtctcggtgcaagtgtttccaagacacagtctacagtccctatgggacggcgggttgattcttaaacaccatgaggggttttctgcaaagtggatacgcgaaggggtatggtcgattcctggccgtcagatttcgcgcgagtggtagggattagatccgcgcggatccaacccagagcgccgcagaaccatccgattggggaccaatggcggggattttaaaatgttaggatcattacgcgtccgtccgtttctgatataacggcaaggatctgattcagcaaagggttacgcattgaactgatctacaccatc

SEQ ID NO: 130754 - DNA, 768 bp, Zea Mays
ctggtcttgatagaactttatctgatcatgttcctctttatcttaaaactgagtctaatgtgtctcctaagagagacttcagatatgagttgtgctggaaatttcgaccagatttcaaagagtttgtttgtaaaagttggtcccttccggttagaagtcgttttaatattgatatttggaaagaaaaaattaaaagattgaaaaaatctttgaaaggatggaatattaatgttgaaggcaagtattctaaacttaagaaagagttaagtcaaaaaattgatctcatcgacaaaaaaagtgaaagttttggtatctctcatgaggaaagacttgaaaaattagatttggaatggaacttaaagaatttgatgattgaagattgctgcaaaaaaaagcaaatggctagagaaaaattcattaataatggtgatgaaaactccaagtattttcaccttattgccaaaggaaaaaaaagaagagttagaattctgtccttagttcatgaggaaaatgatgttaaaactgatgttaatatcaacaaagtggctactgatttttacaaaaatctttttggtccttctcctgtgtcgagcattaatatgtctaattttcatatggatatgcttagtgaggaggatcgtattcggctcactgctccttttactattgatgaaattaaatcggtggtgtttagtttaaaacacaatagtgctccgggccctgatggtattcctgctgaattcttccaagatttttgggagatcatcc

SEQ ID NO: 130755 - DNA, 513 bp, Zea Mays
gatagatcctggttctctatagcgaatcctcttgtggggtggggacacaactatggcagggacttgggcttcgggtggatttcttccttcaagttgagcttcaagggctacaatcctggcatgtgcttcttcaagttctccatgtacccttgaaagatccagggtagcattgtccatgtcagtgttaagatctgccaccacaccaacaagggtattgaggcgatcttctctagcttcacctggaacaacattggtctagctttctccacgaagacatagaggaagatgtctgtacctcatgtcatgcatctggcaccgctatgtgtggctaagagaccacagagctcgcctagcagcattgctgaccgaagcagcataggtagatagtggcgtcagggactcatgggctgatagagtcctgaaacctctatctcctgcatccatcactctgatatgcacgcgagtgatgtagtagcaagcccggggaggctcagacactcgccttgtgtcata

SEQ ID NO: 130756 - DNA, 679 bp, Zea Mays
taattagtgaatggtactagctagtatactcttagcatgaaaggaattaaaagaagagggcaagaaaaataagctgatgggatgtcgtcctccagttgaaggaaaacaaagaaccgacggaaatggccagagtcatatatatgatgttgcaaatgctccttcagcgtactgattccgtcattatggccgacatgttcagtactcggtacatacacgcatttccgagtctgaactttccactctagtagtccatcctattgcacttacagaagaattaagcagaaactctagctaaaccaaaccacaagaccacaccactcttattactacagaaactgagtaagacgcgacactgatcagtactgctagtactataaataaactgcgtatatatatatatttatcttagcgacaccactaggtgatcagggggaaaaatctgcgtgcgtacatctgcacgctgtgggcagcacgtagatacacatacgactacaacgaaagaaagaaaaaggaaccgcacctactatatcaacttctctccctgtctgccatcatgcttgctccgggagatgctgcttgtgctggaggctggagccacaagaacgggcagtcagctgagactgagagcgtcagaaagctcggcctctcaacgtcgtcatgcacgcgtgcatcgatggat

SEQ ID NO: 130757 - DNA, 363 bp, Zea Mays
cgcgcattaatttagaggaatgcaggggctccggggtaagaatccccagacacagtgaacagtccaaagcggatggcgggttgattctaaaataacagagggtctcttttgcagttttacagggccaaaaggggtacggtgaactactagccgctagatctattttcaacgccttggattagatccacaattgactgaatcgataagtaacgtggtacatcagatcatagatcaacggttaggattttatgatacccgatcaacgatcgacgctcggatttgatctcgacggtcactatgccacgatcccgaagaggtacacctatctaatcgtggccgcccacgcggaaattcatggctccg

SEQ ID NO: 130758 - DNA, 998 bp, Zea Mays
tccgggtagctgaccgaccattcttgcgacatgaaaaaccaatcgagtctctgaagaaggggttccctttgtttattcgaccaagtaaaggagaggccatggagagggatttccaccaggtctagctggctgattgcctcgttaaagctcagcatcaggttaatgtctcccccagcagtatttctattttcaggcctacgcgtcaggttaaagtccccaacaatcaaccagcgcttgtcggagggcatgttaatattggaaaaccagtggaggaaatcaattttcccagttggggaacagggcgcatagacgttggtgataatccaagattcctccgacgaagtagcaaaaaattcatccgaaagagcatactcattttggaaaataacattgccaaccagcttcgaactattccaaacagtaatgaaaccccccgagtttcctatcgaagggacaaaagcgaactcatcaaaagaactggggcagaaccttcttaagtctgccctaacaaaagattccttcttcgtctcctgcaagcagataatatcgctattggactcccgaatcacacaatgaattccattccccttagccacggcattaatacctcggacattaaaacttaaaacagaccagtcggagtaattaatagcattgtgactattcatcatagagattaagtttgtcaacggaaaggagcccaaacccaaaaactgggagggcaaaagtgtatctgttaagacagaacagagcacagccagaaaccaccaagttcatgaacacagaaatcagatataaacgccagggccgagacagccaaaaagcctggcgaggttgagacctgcaaaagacacccacccaaggcagaattaacatatcagttgtcatcatctgaagattcttgattcttgtccccctcatctttcttgcctgacttgctagagccaacacagccaggcggattcttttttttcttcagagctttgtcagccaattcc

SEQ ID NO: 130759 - DNA, 329 bp, Zea Mays
gaagaaactgctgcagctgctgaggaaactccggctgcagtgcctgaaaaagagaaggagcttgccgaagatgcttcggaagaaataaatttcaactttcaaaacataattgggcaagagttgtctaaggctgaaaaagaagagctgacggactatgctatatcttgcgggtaccagccaggggcgctgctcttcggtggtatagacaaagagagcttaggttgccttcgagaccggactggggcgaaagttgtcagcactttatcgaaaagtgttggtttcccaaagctcgaggccgatctcagcagataccgacggcagcatatcgc

SEQ ID NO: 130760 - DNA, 708 bp, Zea Mays
tggggggaaaggaattgttggaagaggaggaggaaggtgccgatcaagaagaaagtcatatcatctacgatggtgaaggagaacaagaagaggacgcatctgaggaggaaacacaggaattggatgaaacaggggaggcgcagccattcaatcctagcaacaccatggcaggtagcactatgaggtcaggaggcgatggcaagcaagtctttaggaggagggtttttgagggcatatatttgcctgagaatccacacaggactgttggcaagggcatccaagggcggacgcgatcacagcgaaaatgcaaggacaagaaactgctgaaacgcggaactttcagtaaaccttacaacattgatattccagactcgacttctgattccgaagaggaaatcgaaccaccagcgccacagcaagggctactgtcgtcaagtgaggaagacaacatgacttttggcaaaaggaagcgcagaagagcagcgataaacaagagatgggacaagaggctgagtgccagtagtgacgaggaggattacggagcatctgccatggatgccaaagagaggcctttccggaggctgaagaaggggctatccaatcttcaggctgccaaggaaggttgcagaaattacgaaggctcaaatcctgggcatgccaggtacagtggtccaaatggcgggaatctagagaacatgtccagtgcac

SEQ ID NO: 130761 - DNA, 585 bp, Zea Mays
ggagtaaacagccctacaaatcgctctgtcaggtgactgaatgggctttcccatggtacagtaacctgaaacggatcaggacggcagctcaactcgccgccgacgatccccaccacgattcatgcaggcgccatcctgattcgtgcctggtgaggaacggataacgccgaggatggataactcgtacgtggcgccatctcccgagtccagccgaagttcttcatcggcggccaccgtgactcggtaactttcgccgcggtgtcactcatgccgcgatctgcctcactgtgcttcctatcgacgtggtatgcatgcgctagcaatgctatccgtggctggagatcgtctgtcgggtcgccgtggttataaatagcacggtggtccacggcgaggtgtgaccatcacacacatagtgagttgaatcgaagccgaattcgcgctacctctgccccctcctctcaaattaagtgtgcgcagtaaaactagagttctttgctaagccgaagcacccgctaccaccctcgattagccaccatagccggagaatcaccaatttcccccaaatcggtcagccgcgccaccgag

SEQ ID NO: 130762 - DNA, 536 bp, Zea Mays
caccagtgagctcgaattcgcgttttcccccaaatctatttccgccaccgtgaaacaagcttcaccgtcgccagccatactccggttagctcctcccctctgctcccttgtttaaacattcttatgcgtctacgatgcttgccgagccactgaattgggctaagagtcctctggtcgccgggaacacgaccgtatagctgccatgctcatggccaccgtggccagagttccgtagttaatcattagccaaattaatttgggggaaaggcttagggtcgatccaattcggtgtctgttgctcggagaactcagccgttgccccgttcggccggtacaggtgctcgccggagcacggccgcgcgtgaacggcgtcggggactttaaactcagaatagatagaagaggaaggacttttatgcaaacgtcagtgactgtgttaaatagtgaaagggctcgttcgctgttagacaaaaacgcgagggcttctgtgcaagtctgccaacgcgggcgcgcgcgcgggcgcctttctgccctag

SEQ ID NO: 130763 - DNA, 774 bp, Zea Mays
atctattgctcgattggggatagttgctatagtcaatttgtagctggatcatagggctacaattttgacacaaagcaggtcgagtcactacatgaaattgggagaaaatatccctgcaagttactctgtcaggctgactgaataaggatccattggtacagtgcactgaaaatatcccaatccactgaacttcaccaccgacgagctgtgcgctcggattcgcgcctgccacggtgattcgtgcctagtgcagttggataacgtagaagggcaagaaatatcgcaccgtggatgaactccggccactattctactccggtcgtcgtacccgcctgagtcacggccgcttcggatagactcaccagagttagccacctcgcgaccttgcgccacgtgcctgggtgctttaaccacgccaccgtgagtcaccttagcccatccggtgatcgccggagagcttgccacggtaaacgccaccaattgcttgcgccagtgcacccccttctctccgaccgccaccacgacatctcaaattcacagaccacagctcggggagcctataaattgagcatgccgtcagttctgcaaggtaatccagcatccaatcccgctcgtgcctccaattactcaccagagaaccccaatttgggatttcccccaaatcggtccgaaacaccgcgcatagtgacctcgccgtggctagctcgttccaggtccgttcatgctctttgctctcccattttagtacccttatgttctcttgatgctcctcaa

SEQ ID NO: 130764 - DNA, 340 bp, Zea Mays
ggccagctccaacttgcgttaaggacctccgcagtttcttgggcatggccggctactacaaaaagtttgtgcgtcattttgggattatcagcaaacccctcactaatcttttacgcaaagacacagtgtttgtgtggacaagtgaaactcagcagtcctttgacatattaaagcaagccctagctgaagcacctgtgttaagtatccctaactttcagaagacatttgtgattgagactgatgctagtggagggggtattggagcggtgttacagcaagaaggtcacccaattgcttatattagtaaggcacttgggccaaggaatttgggattatccat

SEQ ID NO: 130765 - DNA, 318 bp, Zea Mays
cagatatccctcgggtccactagaaggttagaaggcctcgcgagagactttgggcccattatttcgcaaggccatcccttcgtgggccaggggaggaaccgctggtagaatggattgatgcaagactggatagactcgagcccatacggctcgttgggtttaagcattatccacagtgttgatccgattctcccgtgcagtgccctcaaatgtcgaaactaaacgaggataagtcggcatgattataggaagataagttcagtcggttcactattgctttggagcacatagttatcatacccgcatgtaactccccac

SEQ ID NO: 130766 - DNA, 311 bp, Zea Mays
gaatgctttttatcttgccctctgaatctaaaatatatatatcaggtaaatgatatggtattttctgttatgcaactgcagacatttgtagcttaatgatccattcataaatatatattgtttccttcagttcctattgttgttggctagttggtttgtgccatgacaattgatgcttcccatgttggggttacatgaaacatgatatcataggaaatgcaaacttagtgttttgaatacattattgagattttgcgttccttttttccaagctccaagatgcctctgtgtcacatatagtactgcttcct

SEQ ID NO: 130767 - DNA, 347 bp, Zea Mays
atttaatcgaaattctgggcaccagggccccgcctcgccatgccccggcgttgcgtcgccgtgcgaacctctgtccgctgccttgttaccagctcggtaaggaagaggggcgataaccatcgatcgattaatgcacggtcaggattagttcatcaggtaccggttgagtgctttaaatccgagccactaattcgcaaacgaacgttcctaaggcattgacatcgtcttaaatccaagtcgtcggtttagatcgagcggtctgcgctgcgtaccgcttcgcgggtgacctgatctaatctgagccgttgcgtcggattggacggtccagaaccacggataccccttcg

SEQ ID NO: 130768 - DNA, 414 bp, Zea Mays
gctcgaacaacccaccacaatctacgcgagtataagctctagcgtatctggcgtcaatgcgtgtgcggccatcagggcaacgataacacatcaaaccttcgtaaccagcgcaacagacgcagttgtggcttggtagttgggtacacgataagtacgcgcaacaggcacaacaggcgcaacaagcgcagctgtgactcaatagctgcgacacacatgcaatgccttcagggcgcacgaaaaatgtgtgactcggcgatggcggtccgactcaacgggagcgatccgattaagcgagagagcgacatagcaatcacatgacgcagccaagttcaaacgacacaaatattgcgtcgtgttgccagggcgcagtcaatattcagctaatgtcataactcagccgattaccaacgcagc

SEQ ID NO: 130769 - DNA, 988 bp, Zea Mays
ttcttaggcttatcttcttgctctctgacaaatattacagcttagcaaatcaattatctactatgttttttgttaattcttggcagttgcggttgtgggggcggcggacatgcgatttgctcggttggttgctgcacgccgaacaaacgatggtcgaatgttgtgaagatcacgaaagtctcctttaaaaggagtagagatagagatgatacagacaaaaaatcattattttcgacatagaaataacattagtatatttgtaaggacaaacttttctagatgactacattctcattaggttttaacaatgaatgcttagagaaagtagaaactgaagatatggtttgaagaccatgtcaatttccaaaacatcaaatgaaaaaagagtagaggtagtaatttcaagtttggcatgtagtagaaggataaatattaacacaagtacacatgactgcagtgaacttcaatactataaacaaacaagagataaaacatacatggtttcttcatgcgggaggtgagaggcggcttcatgcgggagagtggaggaggggtggagaacgcggtagcgaggagacggtgcgcgagggtgggggaggggcggagaacgcggaggtcgtgctgtggcgacgggagcgacgacgcgcggggggcagctgaggcgctaaccgtgcttcgacagtgagctttggtttgggccacaacaagcaaatgggcctcccagaaagcgtgtattccgtatttgcaagccaaacttagtaccacatcaggtactaaactgtgcacgcatctgtttataagtgccagtgcggatacaacattgtggtcttggttgggcggcaacctgtgtaggcttggctgtgcgcgagcttttattcctacacaactagattttttggtacaacttgctcaggtgcgcggcgcacgtgtgggaaacgacgagggtgtggatgagaatgtgggggataggaaacaacgagggtgggga

SEQ ID NO: 130770 - DNA, 342 bp, Zea Mays
atgatggaagtttgtgctgacgtgcctgatgccgggttagagttatctcgagcagcatctcgtgcctcgtcgaccttggagcgcggtcttaagagtcgagaggctgatctggattgctccgttcccatggaagttgttgaaggtccttcagccttagaggtggctgccacaaagagctcggttctcaaggatggtgctagcgtttgcccagcccccgagggtgttgccggagatgatctggctcggatgggtagcgcgagctatgacccagcccccgagggtgtccgagtgggttctccctctcatacttccatggatgttcatgtagggtcttctcctccg

SEQ ID NO: 130771 - DNA, 526 bp, Zea Mays
ataaagtcgtgcgacactggtcctttgcagtgggagacttggtccttcgccggattctaacgggggaaggacggcacaagttgtcaccactatgggaagggccattcattgtatcagaggtcactcggccaggatcatactagcttactcaaatggatggcacagaagtagtggggaactcatggaacatagagcatcttagaaagttttatccttagcgaggcctcaaaaattctcgaagcaacattgtactctgtaatcgggggacttcatcatcaataaagttttcgttttcaaaggcattcagactcttggctttcagctgacttcgatttgattggacttgaaatcagcacgcttactcgacttagggtgaccactataccctattaacggagcaatcagcttaagtcggcgacgacttaagacggtgtgacatgctcacgcttactcgacttagggtgaccactataccctactaacggagcaatcggcttaagtaggcaacgacttaagacgatgcgac

SEQ ID NO: 130772 - DNA, 315 bp, Zea Mays
tcgactaccaacgtggtgctcaccacgtgagtcgtgcaggagatgtacaacaacagatcttctgccggctgatttggcgtggctcggcgtggcggcttgagtactggtggtgtggtcaggaactttttcaatgcttctagagcttcctgtgcttctgtggtgcactgaaacttgtccaccttcttgagcaatttgtagaacggtaggcccttttcgcccaaccttgatatgaacctgctcaaggctgccatgcatccagtgagcctctgcactttcttctatgatcgtggcacttccattctcatgatggcttcg

SEQ ID NO: 130773 - DNA, 468 bp, Zea Mays
attagtgtgcatataccagaccatgcttttattggttcggaccaaaaggcctttcttgcattcgaggatatgtggttaatgataaaccttcagaaactcgacgtgcaacttgtgactctgtttgcactgtaagtgtcgctcatatttccacatctatgtgttattaattttcaatatctgacacacgcacgtgtgacttgtagaatgcaacatgaccaacaagagatcctgtacggtaccaagcccgatgctaatgccggtaaaaggattgggtatctgaacccaatactgatatgtgaggaaagccacactttcagaatcggcaaagacaatgaagtgttaaagggaaagatggacgaagaagttgagcattgcataaatactatgaagaatgattttgaagcaagatacaccacctacatagcaaatgcaatgcttaaatttcaagacagggaagctataatggcc

SEQ ID NO: 130774 - DNA, 1019 bp, Zea Mays
cagggtttctgaatgtgacaacaaggtgtgtttgtgaggagcagtttggtagtatgtgcacgatagcactctttgatttctatttctagcttgtcattactgtttctggttgtcaacctgggataccatgtgggggtgtggcccccagatatcatcagaggggcattagaaatttgttaccgcttggacgcttggtgtgtattgcttgccagaaatttcttgggatgcttcctttgtttacctttcctagcattatctgttatgcatggtcatgttggtaactcttcccttttttttttggcaatgttgtgtacaactttgcaatctgaagcaatgttgtctccatatgtttcaagtgttgccaagtttaagcatcctaaaatcataagcatgttgatgcatttaactggaggtgggacttttggcctcctgttgtgctggctcgacccattcgtctgtgatttatgttgtttcacgcaatgacaatcaatttttttggtacaagcatgatcgatggcccatcgattcgtctttgactcttcctgttgtgctggcccaagcatagcctgtagtaatactgcaaaaatctattcggtagattatcagcttgcacattttttgtataagcggatcgcggttctccgcgcgcaatttgcgtttttgtggcaccctgttgtgttcattatgcttgagtgttgagagcagcaccgttagagtgatgtactgacatggatgatttcaatcgtgcggcacacggaactgttattggccctgtttggttttcgcttataatctgtttgttgatgcaaataaatgagaatcccaccaaacacctagccatacagggtgaaatgggttatatgagaggttttggttattgcaaaatgatttagattagtccaattcatgttctcttggacatattgatcttagatagggcaacgactgatgtgcaatcatgcaggctttagatgtaagtgtgcaagccagtcttctggtccattaaattatgatctaac

SEQ ID NO: 130775 - DNA, 411 bp, Zea Mays
cggagataattcagctacagtggaaaaaattaatcagtctgaagccacaaaaacaaatgccgaagctagatgccgcgaaacaatacctatgtgtctctcgcgctctgcagcttcttcagcttttttgcttgtactcgggcgtcatggatgtctttctcacttttcttcataatttcgtgagccatcgctcggccaccatttacccagatgtcattataaaatttcccgcccattaaactcgcttcagctgagggatcctttgtatcatccacggagaaggcagcttcagcctaggccagggtcttgacatggtcgcatctaccttctccaggatggctgaaattccccttacaccggagaacgcgcacatccccgcgatcacttaaaatttcttcaaaagcttcggcctct

SEQ ID NO: 130776 - DNA, 576 bp, Zea Mays
gtgtacccaagttcatgggacgatgatggattttgccttccaacattgtgatgatcagctctctctgtgacatgctgatattgcagtgtgaaacttagaagaataatgatagcttggtgcttggacgtgcttgtgagaataaagggagaaggacggaccattcagctaccatgcagatcagccgtggatgtcaaataaatttgtgagttaagaaggcagtcagcaaccagttgctgtccacacacgtacaagcatgcagaagagtatcaaccatccaaacagttccattaggccaggctattaatagaagaggtgctacaacttcctgctgtgtgttcccatttattttatctaaactgaaaataccactagtgctatatgtatccatgtaatagatgacgactggagctttttggctaccaattcagaaatacaaactctttgagttctcaaggtgagtcttgagagacttgcggacttgttctttcgattcccgagggagttgtagaacgccgaactgcggttcacccagtttgtgccttcacgtctatatggcgtgattgcgtgggctggctt

SEQ ID NO: 130777 - DNA, 360 bp, Zea Mays
ttcagcttatttagctcttctccctaagaaagttgttgccttgtctgcaagagattttagaccaattagcttaattcatagttttgctaagttggtcaccaaaatgcttgctaatagattgggcccctaccttcaagagttggtggcatctaatcagagcgcctttgtgagaggcagatcgattcatgacaacttcatgttggtgcaacattcaattaagtctctccacaagaagagagtctctagtttgttcttgaagttggatatctccaaagcatttgattcggtctcttgggccttcttgattgaagtgctttcacatcttggttttggtcctgtgtggcgaaatatgatctcaaa

SEQ ID NO: 130778 - DNA, 530 bp, Zea Mays
agagcatcgtagactaagatgttgggggcgggtcatcctcaccggtgtgtcggaggtggaagagggcctatggccgtaggatagtacattggcgggagagattagtgctcgtatggtgagctcggggtggctcgctactgctgttatggcgttcggtcgtggaatatcaactgaggcaggagaaaaagaagagagagagggagccaggggttgaagacgatgtgcgcgtccgttgatttgatttgaacggctgggattaaaccatagatacccccttttagcactttagatcttgaccgtgggtcgcccatccgaggggtgggatgggcactggcgtggttggatttcgggcgttggctttggatccaacgatttcggttgattaccggttcacttaaagcgccatctgatcgagatcctcggagtgagatccagcggccagaaaccgtgcctaccccttcgcgtggccaacttgcataagcgcccctgtacttctggggaatcaacccgcagtcctcccctcggggttc

SEQ ID NO: 130779 - DNA, 440 bp, Zea Mays
ctaaatacatgtaccattcaaatacaattatcaaaggtctcggtatggattatgaaaagattgatgtgtgcaaaaataattgtatgcttttcatgaaggagcatgcgggagagaaaaaatgtctaaaatgtggacaatttatgtttgtggaagttgttaatgatgagggtgacaaggtgatgatagatgttgcacataagcagctccgctacttgccactaactcctcgagtgaaatggttgtttctatctaaaaaaaccgctatgcacatgcgatggcacaaagaaggtgtccgtgataacgatgacctaatcgtgcacccttcagatggggatgcttggaaggctctcgacacgtttgatccagactttgcagctgatccgaggaatgttcgaatcggcctcgcgaccgatggcttcacaccttttggtcaaatggca

SEQ ID NO: 130780 - DNA, 461 bp, Zea Mays
tgaggggttgaagagtggggagcaggttgggagcggcgggaagcagattttttggctcccactctctagtacaaatggagcagttcacttttttaccgtttggctacatgggagtgattctcgctgagagtggagcaatgggagctgaaaaatatagaatttgttgcccaattcttataaggcttaagtattcagtgagagagcgcattggttgcagatcaaaaatcccaccaaccacaactacaccctgctaaatttagtgactgcacccagttcttcatccaagctcccctttttatgtgcttgcttcttgatcgaactcaagcccatgcttgcaccattcagtagtgtgataggcaaggtagtcatgcaccatgcagtgtcatcctcgtgaggttgagaggcatctggaatttggtatggccactgcaaattagagctcgtcgtcatgtttcatgcca

SEQ ID NO: 130781 - DNA, 1722 bp, Zea Mays
gtcgattaaccagtcctgcccaaatcagtcacggttgcgcttcagttcacacccattcttgtgcgatctgttctgcatctcatattttgttcgtgtgcgtcttgtagaactgtgtctctcagcttgaatggttcattttgtttcttgtcgaaggtgttccttgaccacaccagttagatggcaacactaaaattgtttatgaaaccttccgctatgtgatgcattaacatgtgaaatatattttcttgctcccctttgttgattcacccatttcaaaacacaattgttctatgaaaggcacgtaaattttctgctgagctatgtgatgtttcaaatatgcattctatatgactggtacactattactgtcgagaagatctgatcgtaaccccagaactaactacagtgccatttaacaggtataattcaatatatgatttattttaaaatacattgccatcatgaaacatgagcgttggtagctactattggttaattgtcttatatggccatgtttttttaccggtggcgccaaataaaaagggcacttgtgtcctttagtttgtattatctagctcattatctaagaaaccaaacactccactgctagctaaaatttagctatttaatagttttggttaaattttagtttggatggaaccgaaggggccttagtcatcatcaggattgttgcatcgtcattactgatcaatcagagcattagaaagtcaggtggatatcacctattcacttcgccaagttcctagaatcagatccgtctaagccaaaagacctgaacaattatgtattttctattaataagtggatgcatccatttttggttcttcatcctttgtgtatttgattttaaagacatatcttctacaaattggacgagaaaacattatttttcatacaataggactctacctggtccaattggatgagaaatacaatgtataaaaataggaaaatgctaggagataaagtcagcaagacaattcttacttggagatgattgatacctctcatagatacactcttccattttttggatcgtttttagttttatccacaaactatttgaattttggttgcttgtataatggtattcctggaaataagttgtacactgcatagttgaagttatgacatttatgatttccacatatgggctatcaatatcgttttaaggtgttaataaattagaaacttgtgcaaatattggacaataatttgtagctacttcaaacttctgacttattactgcctacattaaatttagttgatgattctgatatttaaaacagtggggatcatatttttagatgcttcatttttagtctggataattaattcatcatattgtaacttttgtttatatccttagctaacctttcactctttcttctaggattgctagcaacaccttcaatgtcaggttgttgaatatgtgaatagtgataccccttctcttcctaagtaacaactcttcttttttgatgaataattttcataaatttgccaatttatttgagtaataacttattttcgtgccctttgtgtatcttgggtttgtacagctaacacctactgctccctaacagggaatggattatgctatgagagagatcctgcaagggtaaaacatatatattctgaacaaatggggcaaaatatgttacagctacaagtgctctatgtgtgctccattatcctaac

SEQ ID NO: 130782 - DNA, 940 bp, Zea Mays
ctcgggcgcactcggtgtgacacggcggactcaaccacaggcacggtaccgacgtgggggcaccagagagcgcagtccgcggcggagccgcccaacggcggcgtagacccactccagcgagcaattgtgcgaaagacagggcaacacacggggaaataaaggtgtgggggagttgttcacctcgagtggagactctggagcacttgagcaacgacggggacgtagggaggcctcgggtcgacggcggcggagctccagctgccaagtaaataagccggtgagagcggacagggcgaaccagaggagcttggggcgaaacaagaggtgtcccacgttgctggcgaaggggcggagttcaccgaggcaatgggcgcggcaaaaactcaacggcggccacagaacgggcggcagaccacagcgagtcagggcgtggccgggaaacgcacggtcgtgggtgcgtccatggcggagagcgcggacaggcggggcccaaggaacagagaaagcgggcgagcgaatgggcagccgggctgacgagcggggccctcgggacagcgagataaggcgtgcgtgtggaggaaatcggggctgctatgcgatattcacatatattgaatagctaattgtcttgtgaattggatatatattgccaaatagaagaaaaaataatgtatttttttatctcattgtgagcccaacaaacactagatattactattactattactatatattaaagcagcaagcaaagttgagctctcaagttatccatgtcacctcctaatttctaaccacacgactatattcggaaaaaaccaaagtttaagcagcttctcgtttggtgcttgacatcaattatgtggaggcaaattcactaaacgatggaatacacatacaatcacaaactgcaaacaatgagtgcaaatttcaagagctcacg

SEQ ID NO: 130783 - DNA, 441 bp, Zea Mays
aaaataatattgttgcaggaattgcattaatataaaacataccaagtgcgatgtcagcaccatcaggagtagcatcagcggtgacttgattaaccctggcaatagaatatcccttgccaggagtctattgcttgtttcgagctggtgtaccagaatttcccaccggacaagcattagtatagtgcccaacctgattgcacttgaagcatgtagggccagtcttctgtcctgtaggcctcgccggggtgccagtgggggcagcctgaagagtgggaggtgtccgtggagacccctgtggagtgtactgagctgggcgtggtcctcctcctggacgagctggggtaccctgaggcggaacgtagcggggacgaacactgctgctaccctgcccctgggtaatggccttcctcttcaagtcacccagttgaacacgcttgtgtt

SEQ ID NO: 130784 - DNA, 658 bp, Zea Mays
gccagcctgagttcgtcgttggtgttgtcgtcgacagaagcaaagttgttggttctactgccgcgcagggcctcgagctctaccgctgccacacatgcagcatccgccgccgctgcttctacttccgccctcgttgctgccagttctgctgccgccaaccttgcagccctcgtcgttgtcgctgcagatgctcgctcgtgttcctttgtcgcggcgacctcgtcctcgtgccggtgtcgcgcactccaagcaaccgagcgctgggactgttcttcggacatggcatgcaagcgaggcgttactgtgtggggaagaggctgacttggacggaaggctgctcatctgagcaagagaggagggttgagtaggaacagtcggtgctcttgttgccggctgagtaccgggagaggcgcgggaaagagatgaacaagagatgtttagactgcatgatagtttggcttcgatatcaatcgtaagcaacgagactcttactcacatcgagaggagacattacaagtggggcaatttttcttttttaattttcctcacactacactatgtcataaccagctaatggttggggatacataggatacatatttataacccaaagggctgccagagcatatgctaagatgctcttaaggtgctcctaacg

SEQ ID NO: 130785 - DNA, 448 bp, Zea Mays
gtgaaacttggcatgtgaggtactggtagtagctgaattgtgctggaaaaaattggggtcgatttgagctcgtttggctagtttgggcatttcaccgagcacatggcgtgtgaggttttagaaaggcagaaatcaaatctttttatggtgcgaaacccctgaggggatgaagcacctgcaagggaaggtacactagtgcaccaagatcacatagagaacattggattcacatgatttcacagagttttgattggatttgaggggtggaagggattcttcactacagagggaaaacagagagagtggggaggactcaccagcgtgaggagggagaccagaggagagggggagaagcaccctgagcatggataacgacgatcaccaccggtgagggcaagtcggtggaccacaggcagagagtagagaaaactggtctgtgcgcggtggg

SEQ ID NO: 130786 - DNA, 377 bp, Zea Mays
cggccagcgaaagccaatcgagccattccccagatggccttgcctgttccgtgtgcatcacgtgcctccatggaaaaaccattcaacaaactctgctctggttttcttaaacaagggggcatgagaacatggagccgcgcggcggtgtcagctcttctcaccgagatcctgtacaattctgacttcgccaacggtcacggtcagatggctcgacgactactcccgcaccgcatgaaggcgatggcggcggccaatcgtcttgacaacacatcggccaggaggccagcatcatggcgatccgtcctgggtcaaacggatgagtccggactccggagaaaggcacacatcgtctgccaatccgccatgcacgtccgtcc

SEQ ID NO: 130787 - DNA, 311 bp, Zea Mays
gtttgtgcaagcgatggagagtaagttggcgcgaatgcttatgccaaagcactcaggaagataaggagtctcaaacaagtggatactctagagaactatgtaggggagtttgatcaggctcggtatatggcctccatgcttaacccattgctagatgagatgttttttgttacacaatttatatatggattgaagttggaaattcaaggtgtggttcagatgcatcaacctgatactgtggacaaggctgtactgctggctcaaatgcaacaggaggtgctagataaaagcagacctaaaggagttagaca

SEQ ID NO: 130788 - DNA, 496 bp, Zea Mays
gtcagaaccttcacctttttgcacttcggctcagctagggtgaccaaggcggtaggttccgaagcggcagcttttctctttttcccttgccctcgcagcgagtagtgataatcagggtacatgaagccaatagcatcgaataccctgtttaatcccttcttgcttcgaccctcgaaagctacagacaaggcattgtcttcggccttggagtatgccccaagtagctcatcactggtagcttcgatgcacttcagccagtcgtcgtttggctcatcgaacttctccctgaatctgaaggtatacttcagtcggactagaccaccttcactagaatcgacggtggtctccttcggcatatcccagctttccacaagtggccataccctgaaggatatacgctcttgaatcagatcccttgtgccaataaaggcacacacagtgctaaaggccctctggcatgcctcgacattgctatcaatttccacctttggccttc

SEQ ID NO: 130789 - DNA, 521 bp, Zea Mays
tgttgaaactgaacccaatgggtgtgaccgtgcaccagttgaccccaatgggtgtggccctgctgatgctgatcccaatgggtgtgttcctgatgaagctgatcccaatgggtgtgatcttattgaagctgaacccaatgggtatgaccctgcgctgtctgttgtccgtattgttgacgaggacgaagaagaagaagaagtcccactaattcggaagaatagtcggcgttacagaggcagtggggggatagcgatattccttctccagctctgtttgctcttgttagcctgcaagaattatccataacagattttgatcaggctcttgaggatgtcgttcctgaggctatgctgtcagagccaactgatggtgatatgatggacgtctcctctgacactctagatgtgggattagaggtatcccgggcagcatctcgcgcatcgtcgaccttggaaggcggtcttcggtgccaagaggttggtcaagattgtttaactcccatggaggtgactgagaatcc

SEQ ID NO: 130790 - DNA, 504 bp, Zea Mays
agcacacactgcagcacaaaacttcggccacggtgccacacgtaacaccgaatcagatgactgtaaccaaaacgccgttgaccccacaaaatgcattgttgcaattttaacccaaagctcccggggtatggtgtacacatcaaaataattctcacttttagccttccacattttaggatgatgtccgtcaaatgagggaaaattaagttggggtaaggttgcggctaaacgtgactgataagacacccaataaggatcttgcgcatgaatcacaggggaatgaaagacatcagacgatgggattttagatgtacctttgaccggaggtggagtcagggtggttaccaccccaagtccatcgctccggtgcagagatgcaaggtgaagatcgtgattccctggactcgcctgttgcagagataaacccagagaggttgatggtaaaaaccccgactccagagccccggtgtcgaacaccttctgagtagtggtgttcgcctcttt

SEQ ID NO: 130791 - DNA, 315 bp, Zea Mays
tgtaaagctgcgcaaactgtggtcgcaatccattactgggtagtagcgagccaatgcgatggtgtacgacaccattgattttgaaaacataaggtgcagtaccattatttatcgatctatcaacgacggcgcctagtgaggtaaatgcgaaaagggaattgtatgagcgaatttgcctaaggaaccttctggcacgactatcaccatcgaatcgcagcaggtcacataagggtgccggtggacatttgtaaggctccaaaattatcttgcctcctctgcaacaaaggttgtacacaagcctgcgctgtgcaatag

SEQ ID NO: 130792 - DNA, 552 bp, Zea Mays
aagctctctgcgttgtactttcgaacaagcattccatcccttaagaacaactttgtctgagagaggctgaacaacaaaatggctagagtaagatcacctgcaagggtatcccacaagggagatgaaactgaaatgactgagacaacccccatctcagaaatgatgaggtggtcggggctggttgtgcaggaaggaactattatcgaaggtacccctaatgccgaagctgaacatgtcgtgactgaagttgagagtgataattaaagtgaagatgatgatagcattctatgtccaactaaaaccatccatgttgaatttgggaggtccacaattaaggctgaagatctaattcgaatgaagaagctaggatattttggagaaaatgatgatgaactggttcattttgctggagaggaaataattctagagccaaaggaatatgaagttgtggtattcaagagcttcttcagggtgggacttcggttccctctttatgagatgataggtgaggttttgaagaagtttgagatctacctccatcagctggccccg

SEQ ID NO: 130793 - DNA, 452 bp, Zea Mays
ctcaaggctgcatggcggcgtttaatgctgtgtgcaactacatcagcactagggacttagtgtaggagcacatagccttcaaggtttggcacctggctaccgaatgggaaatgtcaaagaatgttgaagcttatgccaatgctgggaaaagcggtctagttcatctgaagtatacttatcgatacagaaatcaatttggtgagccagatgatgattgtcttgatgccattgaagcaacaagtgacgaattgttggggacctatacgatggctgaggacgaagccatgaacgttgccttcggtgcccgaggaaaacaaagattgaataaggtttttgatgatattggatttatttaccctgattactacttccctcctcgaaatagggggtcgaaaaggaaaagtgcaccaaaaacttcttctgttgtgccaagaccaaagaaagcaaaaatt

SEQ ID NO: 130794 - DNA, 1688 bp, Zea Mays
caattttcttccttgcttgctttccttttgcccagaacttagtgctgggtttgcctcttgtgcatcttcttgctgcccttactcctcttcttcaccttcctcttcattttccaattgtatcttcgtcaagtaggctgctatctctttcttaactacctcaggtgcttttgggcacttttccacatcaccaaaacccccagcaatgtgttgtttgaaccttttgattcctgcaggggcaatcttcttgcaaaaatgcattgaatggctagaatccaaacttccatcctaggtctgaagattgagcctttctcttaggattcttagccatatctgccatttccgtcggcagtgtagctatggtcttctctgctatggaagactcatctgcaagattagatgaagtcatggcattagctatgccaccactacaaggctcaagaatcaatacttgtaccacatcatgctgttgtcgttgatccacatcatgcaacatcatgagggccaattggccaagcactaatagtaataaatgctagactgctagacaattagaggctagagcagcaggctagaaacactgctgcaggtcaacattcaagtgaatcaacacaacgttgcttatcccaaagagagaacagagcagattagcagaggcgtaccatctgacgaggaactcatctctagggctctaggcgtcgtcggttgcgggctggggcccggcggcagtccctggcgacgacattctaggcgatagtccctgacggcgatgatctgaagacggtggtccaggcggtgcgacggtttggcagctggcggtgcggagacaagatgaaagaggaaagaggcactcatgtatcgatgagaatgagagaagagagataagagaagagtattctgaaccctagtgggccaaaaattctcaagagacggcctcaaagcccatgttattaccatcatccattcatcaacccatctgattgtgggctagttggcagatcacctagtcagacgactagtcatgactagtcggcgactagttttctagtccacctgatcgtgtcgagccactttatctagcccatacgatcgatcaacgcgactaatcatgattagttagacgacttgagagcgggctaggagcggtgtgtcatgccattgtgctccctggcgatctgacacagctcgtgggagatgatgcccgagacttatttgatgacgatgttgttcattgatcccaacatgatttggtgtacgaccaagtgtctgacatgatgtgaccgaagaggacgtaccgattgagagcaagcaaaacctgatcatgctagcaggtgcaattgtcggacgaggatgaccatcaccaacgattggatgtcaggaacgactgtctagacatggaggatggcggcagtggcagccttgtagtctacaacggggtcgtccagtgatgggggctgacaatcgtggggggatgtactctgccagatggcgacaaccttctgcttgagggcagcgacggtggccttctcttgcttaagggtggctgtttggacacaagcgcatgtgttggcaggctcctttcacgcagcctgagccacatcgagcatggcattggtcttcttacggaaggccacaacctcatcgtgggctccaaggttttaaagtcggctagtcgactctagtcgcctgag

SEQ ID NO: 130795 - DNA, 883 bp, Zea Mays
cctgaacccatccatcccaatccatatgtcagccattgcttcaagtatttgcttaaaagagtacccaaataacgacaaactatgatcaaagtcgaataatatatccaccaaatctatgtcatccacaactcttatctgcacatcttcaatagatagataataattcttgactacagcctcaccttcaacatactccaaatcttccattgcagtaccaatgcttcgaggaaacggtgatggctggaaaagtggagaggaagaggcatccactaatgccaccacattcttgtttggctcgaacaatacaactccaggaattattctaacagctcctaccgttgccacaaccactacaatttcagcaacagatcagggttcttcagggtggtacctttgggatggtgttatgatcagcaccccttcacctgaatggaaaacattgagataactcctttccacaaccatatctctaattaaacctctgcgcatactcaggttagatgaaaactcctcatcccactgaattttactaagaatttcatcaggcaaaccttaagcatcactaatccatctcactgcactcataactatcacctgcaccaaattccctgctacttcttttccaaagagcatttcctcttccccagtcccaccatctgctaactcaacctgcatcacctcatccacaaccccttctttagataccacaaggtaatcttccacctcttcttcactaatttctctaacctgtagtatctcccaatcctcatcatcaaccttaggggcacttataatctcgcttgcaccattagtttcatgggttaattctggaaccaaatcttgagaaaggataccaccagcactagtagcatcagcattttca

SEQ ID NO: 130796 - DNA, 607 bp, Zea Mays
ctctaagcgagcccgcgccaaagaggaaaaaggtgaaggtccttactcaccgaccgcgcttcattgaaccggccacagtgcccgaatttgatggtgagacatcttcggctactgaagccaaaggacctgctcttacacagaagaatgaagagccggctacaatgccgaaggccgataatattgaagagatagagaccgagaaaacaaagatattagaagttataagcccttcggcaggaatgacagtgccgaaggcacaaaaagttctcacggcgactcccaagagaaaaagaatggtcaatgtactagatgtgctggagacaataaagtcttcaagcaccactccgaggaaaactgtcgaaccgtcaaaaacgcaaattgagacaaaaccatccgaagccgaagctgcaaagagccaaaccgaggccgaagctgggccttcagagcccgccaaggagaaatccttggaaaccggagaagaagagacgaaaaaagaggctacaaagcaaattctgcctgaaaaaactgtctcttcaactcccgaagcatcttctggagtacctgattatattgtacgacatgcttcgggcaaaaggctatctgaaga

SEQ ID NO: 130797 - DNA, 873 bp, Zea Mays
tggagagatagactgcgttgatgttgtcgcagtaaacgagagtgctccgggtaagagagttgtggagcttctgaagaagttgttgaagccaataggcctagccacaccattgtccacacaacgatactgagcctccgcactcaagcaggagacaatgtgttgccgcttggataaacaagagaccagattgtcaccaaagaacatagcgtagccagatgtggactgacgtgtggccaagcactccatccaatctgcatcggtgtagcaacaaactcggccattgaggagcgacgaagaagaaggttgtagtcaagagtgccatgaaaatatcgaatgatacacttcacaacagtcggatatggctcctggggatcatgcatatggaggcaatgaagattgcaaagtagaagcaggaagccatagagtgtacagggcccagagttgttacgtctaaggacgcacctagtggcaggatccttcacggacaaaccgaaaggatcaaactccatagaactgattttcggtaatgaaacgacgaatagataacaagtgttgaataatgtcgtgatcaacaagaacattattaaggctaacactctggtacttaaattctggagtaacttatcttgacaggatgagactatgtatgctgaagtagcctgagtttcatcctgttgtcaaattctgcatcatctcgcttggaagagaacaactgcttcaaagtgatttgcatgattgtatctagccattgatatatccattacgtatgcacctctaagtttgtgcaaggaggcaagcctgagtaattggggctgtcgaatactatagcattccatcaaacaaagtaagcatcgcatccacaaaataaagcta

SEQ ID NO: 130798 - DNA, 339 bp, Zea Mays
gtttggttctatgcctaggatgccacgcctaagcttagttagctgccacatttgtggcttgcctaacctgccttagcttagcttgtgtttggttcatgtgttcgcctaagattaggcttgactttaaaaagtgtggcacctgtttggattgttgccacgcctaaacttaggcatacatgtcaatgtgtggcagctgtttggttgttcaccaaactccattcacgccacataaactaaacaggtgcatcacatgaacacatattcaagaatataagaatcttacaccactttaatcacatgcgcatgataagctaataatcagttcataatagctccaca

SEQ ID NO: 130799 - DNA, 314 bp, Zea Mays
cgtggtcgtgccaggccttcgtttgggcttggtatttgttaagggcctgcagggcgaagacacggtattcgtcgatgagatatttggaggttagctcttcgacgtcgggtactgctgaagcgcttgtccgcggggacccatgtttgatttcctgcgtggtcatggcctccgatccgtatagcaggcgaaagggagtgaatccggtcgcccgacactcggtcgtgttcagtgcccagactgcttcaggtagcaggtcggcccatttacccttcttgtcatcgaggatcattttcttgatcgccgtgaaaatcttg

SEQ ID NO: 130800 - DNA, 389 bp, Zea Mays
cagtcgcctaagggtgcagccggaataacgttaatcgaagtctctcattacaaagacactccgcacagagtcgcccacgggcgcagccggaccaacacaagcgtacaaatacggccaacatgccacatcaccatacaaattacaattacatacacacggcgagggcatcacatattacatcggctcaaccttcgggatgatacccatctccctgtaattaaacagcattatcctcaattcctcactctcaaaaagcttccgtagatccccctcgcctatgcccgccccaatcggcgaggacaacaattctcgtttaccaacctggtctactcgaagtcggccacgctccatacccatgcgacgacgcctgccgctccgcgaaaattcac

SEQ ID NO: 130801 - DNA, 498 bp, Zea Mays
tgatgaggatgctggtacctcagttcctgctgctgaagaagtgcctgcgactggacttgctgacgttgaacccaatgggtgtacccaaactgctactgatcccaatgtgggtgctcctcctgttgctgatcccaatgggggtgctgcttgtgttgtcggtgtggatgacgagggagaagagaatgaggttcctttgactcgaaagaacagtcggcagttcatcgccagtggtgagagtagtggagttccctctcctgctttatctaccctcattggtctacaagaactgtctctggccaactttgatcaaactcttgaggatatggtcccagaggacttgttatcagagccagtggatgatggtgcaatggaggcttgtgctgacgtgcccgatgctgggttgaggtcatcccgtgcctcgtcgaccttagagcgcgatcttgagggccgggagactggcttgaatcgtcctggtcctatggaggtagaagagggccc

SEQ ID NO: 130802 - DNA, 316 bp, Zea Mays
gctgattatatttatcatcatgcttcggggaaaaagttgtccgaagaagaagttctggaagctagacactattcgtgaaaattgaaatatttgaagggagctttagtgtttaacggcactaacgatgatgacttcttatattgtctcccggacaacaaagaaatatctgtttgccgggagatagctaagagtatgggattcccgaagctggaagatggcctttcgattttgtcgaaagatgatcttgctgacagcctagcatacaacagtataaaggtataaaagttaactttgaagttggaaacgaagtatttca

SEQ ID NO: 130803 - DNA, 311 bp, Zea Mays
ccccgcacgctgtagttcaccgacatcttcaccaaggggttaccgtcgggtgtatttttagactttcggtccagtctcaacatctgtacaggatagagttgcgactgcggggagtgttagaatacccgttagggtttaggggcttccctgtgtatttaccctctcgcccccttgtaatgggcctggcccaactatcccaagtctattaatataacacccaaccctaatctagggtaagggtttcccacaatcatcgttttgtttctttagtttaccatataggaaaattcaattcagaaactacaagggca

SEQ ID NO: 130804 - DNA, 358 bp, Zea Mays
gttgtgttgccacagaaatttggaagaaaactggccctaaactatggctgtctggctgtcaaaatgagttagtcgccatggtacagtgctccatatggattagaccgccagcagggaatcctcactgccgacgactccctccgccatgattcgtgtaaccggtgactagattcgtgtctggcgttgatgaatggcatcgcgaggtaaaagtcgtgcgctggacgccactccggtgactcaccgtcgtagcccttccgctttacggctaaagcagataagctcgccggtgaaacgccgccgtccgaccttgtaccacgtgtcccaacctcgccaccgcatcgccgtgactcgctctagc

SEQ ID NO: 130805 - DNA, 911 bp, Zea Mays
tgctatgcacataataattggtaacgatgatttggtgtagaacgttagggagatgatcgcctctatggttgaaatgtttggtggtaggtcgtaattggttgtgttagcaacgtggaattatggtaggcatcgtcagtgtccatgatgtattagattgagcgttgttatacgataaaactaaaaacgtgaatgtcatatgttgtgttccaattgagttagcccgtagatttaatatgtgtcattcgcaatgaattattagtagggcctaaatggtgagttatgtgtgaactgtgttagagcacttccgagataaatagatttaacctatgctatgttgtcatgcaaataaccttgaaaggtggtatatgttaataattggaaggatagtcgttcaaattggtcagtccaattaagaatgattttgcgtgtgaggtgagatggtgacatgccaaagtagtcatcgcttccctatgtttataagttgagtcaatacccattaggcgttcattaaatttcacgtcgcacatagtgtatggttgtattcgtgacaaggaggtgtaggttttactcaattagaagtttggttgatgtggctaggaaatttgtttcggtttgggtaatgaagtggtgacgtgaccaagtagtccccccggttatgagtcgagtctagatgtgttatgccttcaccgtgatacccatcgcatatgctaattggatgtatataaaaaatgaaataggcgcatcatatgatttagtggtactgggattgtgatctaagtgcattatatatgtgtgatgagtgttgggcttgaggattgtcattcgggcgaagaaggtgtaatatacttatatgcgtagtatgattaagctagtaatacaaaatgacacggataaaaattagtaagtctact

SEQ ID NO: 130806 - DNA, 524 bp, Zea Mays
gaagaaaaaggtcacctcaagagaaaattccaagtcctccaagctcagcagcaagaccggcacctgagaactcgatcctttgggtttccacccaagggaccaagcttcaataagccaactggacccactccatcacgttttagtcagcagagtcagagctctttttaggccccctcagtcacaagcaaccaaccaccagctaatgcctgttggcactgcggaggccccagtcacttcaagaataactgccccaagttgaaggcatcaggacctacttactccaactcggtgaatggccccaagaatgccccagcgcccgcctccaaggcaccctcctccatcagcctgcagaacaagacccagtatcatggcagggcacgagtaaaccacgtcgatgctcaagaggctcaacaagctccaggagtagtgctcggtgagttccttgttgaatttactcccgctactgtactttttgattcaggagcatcccattcatttatagccactagttttgtggaaaagca

SEQ ID NO: 130807 - DNA, 515 bp, Zea Mays
tggaaattgaaaacggcagttaaaaagaatggaggcagccggacttaaatagggatttcaggaggcagctaggtaggtgacggtgacaggtgaagcgaccaagcgcgctggtcgcaaaggatggctggtgggtcgtaccgtatcagcatgagagaagtttgaaattttttgacgagtagaggaggtagcggagcggccgcctgccggcactggcaagtagcgccttcttttatgcgaggagaggccggcagtgacgaaagaatacataaattaataaacactcgttttggattgttggttaattaaaaacacatggctgttgctgttgtccatcgactaagacgtgaaaaatataattagcctggctgtttagacatagtagagctagctaatagttagttgcattgtctagatcaaaactttatctcgaactaataattttaaggcatgctaggtaataaagtaactccacaataaattccaaaggcagaattagtcacatgtataactattag

SEQ ID NO: 130808 - DNA, 548 bp, Zea Mays
acccttcccggtgtccaccatcaactgccaagtacacttccaattttccaaagatttgttgtgcctttagtcccctgctcgctcttcaccatcctaaattaaagctgcagcacacgcctgatccaccaatgtgcaccactcccgtgccgtcgccgctgcctgtggcgctggtcggagtcaagggagaccaccgtgtctacgtcacggtaccccagcacccggaaggcgacgtggccgtccatcgcagccggcagttcatgtgcagagccgtgcccctgccgacggcgggggagaccttccgggaggcagtagcgctgtgccggctggcgttcccgatcgcgttgacggctctgctgctctactcgcggatggccttgtccatgctcttcctgggcaccatcggcgacctcccgctagctgccgggtcacttgccatcgccttcgccaacatcaccggttactcggtgctgtcagggctctcgctcggcatggacccgctctgctcccaagcgttcggcgccaaccacccacgcctgcttggcctcacc

SEQ ID NO: 130809 - DNA, 498 bp, Zea Mays
tgtagtggggagaacctgtagtgctttgcattaactggcacggaccctgacatcaagggaatgtagtgatcaaacaaccttttaggaggcaaagcagcagaccgagagaatagatcctggaactctgtgagtagtgatgtcaattgcccctcctctttcttcatagttaccacctgttccaacaacaaaaatgcccatacctcattgccttcaaccacttatgaacctgtagggcttgcacttgagaggtatcggtgatgttagcacaatctccccgaatctgaatctgctggccattgtggtaaaaacacaatgtcttcttgtccgagtcacacctcataggactatgggccttcaaccaatgaaatcctagaatagagtcataaacccaatgtccaacactctcatgggaaacatagaagtatgccctccactccaccacttcacttcttccaccctctggtcactgaccatgatatcaccactagccacactcac

SEQ ID NO: 130810 - DNA, 486 bp, Zea Mays
ccagccttagtcttggattgttgatagagcaactcaagtctcctaccgtcactttactcaacatctctatgctcattgtcttcgttactagtctctcagctattgcctaaagaaggtctacgtttcatggacgctttgagtgccactgcggactattcacgtatgatcctggtggtactacaattcttcatcggcttaggggggagccgaagctcaagaaagggggaatgtgagcacggtgccggtgaaaatggatgagcaggtaggcgcgaatgtggaagaggctgatttggacggtgaggccggcgtcaagcaagatgtgtactgtccagttgttcatgccccgaggcgcggtgcatgagtccgtcaaccaaatggtcttgtaacaggcccaaggtgagtgaacgtgatggaagcgtaggtgttatattcgctagtttctgtttgtgagaggggagaaaatagaaccattttatattcttcctt

SEQ ID NO: 130811 - DNA, 426 bp, Zea Mays
ctaggtcaccacatcagtattgtagacctatcaaaggagaataactttgcttaagagtgtaagcatagttgttatgaagaaatggaagaaaaacacactcaaagtcgagctgtcacgctattgaagtctgaatttcagactgacattgcaactgcaggaactttgggcacaaattcaaacatgatttagtaggaatttggctatagttgttatggcaacattgtagctggaacattggtctacaacattgctgcagagctttgggtgagatgccataaaaattgagagagaattgaccctaaaccttgactgtctggcgctctgaatagagcttcccatggtacagtgatcggatcaggctgccagctcgatacctcatcaccggcgagccgcgcgcctaagatccgtgccgtcgttgcaattcac

SEQ ID NO: 130812 - DNA, 690 bp, Zea Mays
ctatttctaaaaggccatataggatgtcagtggaagaattaaaagaacttaagaagcaactaacagagttacaggaggcaaggtacattcgtctgagttcccaggaaattcggcgcgcgatccatgaccccttggtatatgggtaacatgacttgtgaaagtgcttcggttatacgctgaggtgtgtggagcgtgggcaatttctcgttggtgttgtaccgtcgtcgtagcccgaccaactcacgtctgcgccctagcagccgctccaattcgaggttggtaactatccctagtgtaggtaataccctttgtcgtgtgtagtgccttctggaatcgtggttcaacattggggaagggtggctgcatcggtccagccatggcgctgccacgcttcatgctcgcgccgccgtcccgagctagggggggaagggaactgggacctagaccgttgatccattagccaacacctcggattagatctcgtgcaacggttcggtttagggaatcagagcggtcggatggtaatcgtgctgtactaggcaagcgtcatatctcataaacgtggtaccgtccgatcgggatatgagggcccaagttaggagtagacgcgagccactgtgtgccgtcgatccctgatctatcagatcagggcgcggaccgatacgatctagggatagatctaatcgtgac

SEQ ID NO: 130813 - DNA, 506 bp, Zea Mays
aaacaaatgagtgcaaagacagtatttcacccggagtatagtcagatcgggaaaagctaaattacctggagattggagaagaacgaaggaagccccaaatcatgagaagtcagttggtgacttgacggaggattatcaaccgaggcaatctgcagagcatcattggggaccaactcagcatcaccagcagaaatcaaaactctagcatcaggtgcgctggcctctaaggcgacttcctgacccaaggcacgtgctgctgccatacaatcagaatgtggaggagaagacccgacgtggacatccatggaagtatgagaaggggaacccgctcggacaccctcgggggctgggtcatagctcgcgcttcccacccgagccggatcattaccgacaacaccgtcgggggctgggtaaacgctggcgccatccttggggaccgggttctctgcagcagccacctctaaggctaaaggattttcagccacttccatgggaacggagcaatc

SEQ ID NO: 130814 - DNA, 330 bp, Zea Mays
tggaccacaaatgtgctgctcgaggggttttcttgctggaattagaagatgacactggagaagaggaggcagtggccgagctaggcatatcactgcacgccctgataggaattgatgtgggggagacgatgaagcttacagttataatcaaaggagtgccactcacagccctggtagacaccggttccacacacacattcatcacagaagcaaaggtgtctgagctgcagcttccactggaaaggcgccaaggaggagtaagggtcgccaatggggacaaggtcaccagcccagggttctgcataggattatccgtacaaattgctgaag

SEQ ID NO: 130815 - DNA, 434 bp, Zea Mays
cgcccatgtcgtgcttctcctggccaccttcccacatgcccaaccccctttggagcctatgcctccactcactcactctcctcacccagtagttcccctctgcagcgctcccacactcttccctcgcacagcgtgtgcccgagaagcgccatcgccgtccatcgcgatcttgggcttgttccgcgaccgccgtcgaatctccgccgtgtacgttgctctagtgagctccgcctgcacaccagaaactcaggacaccccttggtttgccccttcccctctattcctctctgctcgcgctcactggacaccccaccgtgcagccgtgttgtcgccaccgtcaacccgaggatctgatgtgttctcaccgtcgctcaagtgccccagatccttctctcgaggtaacccacctccccatgcccctgatttcccattcc

SEQ ID NO: 130816 - DNA, 281 bp, Zea Mays
ttgtggttatatttatagttatgtagctagtaattagtgggttgtggttaggcaataaccatccacagtttatattgaatgtttaattcgtgtttcaaatagatggacaattttttgagcttatattatggaggcaatgtggaacaagatccgtatggaaatgccaagttcattgacatgcgacacgtgccggtactattcgatggtagaccctcgttgagtgatgtgtttacaaaggctaaacaaaagctaggttaccatgaagatgatgacattgctgt

SEQ ID NO: 130817 - DNA, 779 bp, Zea Mays
ccccaactcgcctaaagatcaagaatggtccaatatagcgaggggacaatttgcccttgactttaaatctcctcattccacgaagtggtgacaccttcaaatagacataatcaccctccttaaactcaagtagtcttctccgggtatcagcatagcttttctgccttgactgtgcagtcctcaaattttcccttatttgctgaacttgttcttctgccccttgtacaatcttaggcccaaacaactgcctttcaccagtttgatcccaatacagcggagtcctgcactttctgccatacaaagcctcaaacggtgacatcttcaaactagcctggtaactattattatatgagaacttagcataaggtagactcttgtccactactaccttcctaaagggcataagctctcaacatgtcctcaagtacttgattagtcctttcagtctacccatcagtctgggggtggtaagccgaactaaaattcaatctcgtatccaatgactcgtgtaacttcttccaataccgagaggtaaactgtgatccccggtccgacacaatcttctttggcactccatgtaggcagacaatccgtgccatgtacaactctgccaacttagctcctgaatatgtggtcttcactggaataaagtgggctactttagttagcctatccacaatcacccatatagaatcatatccagcaggcgtgcggggtaatccaacaatgaagtccatgccaatctcttcccatttccactcatgtatcttcaatggatg

SEQ ID NO: 130818 - DNA, 528 bp, Zea Mays
tgcaaaagtcgcctaagggtgcagccggactagcacaacaagtgcgtaaattcgaagtcttctcgaaaagactatccgtccaaaagtcgcctaagggtgcagccggactagcacaacaagcacgcaaattcgaagtcttcctcaaacgactacacgtgctaaaccctacgccaaactgtccgcgccaggactgaccacaggcgcgccggaccgacataataaacatactagaccaagcgcacaacgcctttacaagcatagcgcaggcgcataacctcatcatacaaattatagttacatatgtacagcgagggcatcacaccttacatcggttcaaccttcggaatgatccccatctccctatagttaaaaagcattatcctaagctcctcaccctcaaaaagacttcgcaactccccctcacctacactcgcaatggccggcgaggacaacaattcctgcttgccagccccacccacacgaagccgaccgccatccacctcactcactctatgcttcgcaaccgcc

SEQ ID NO: 130819 - DNA, 486 bp, Zea Mays
ccagcccaatctgtatctgaaaatgtgctaagtagcaatgatccatccttgataaaacgcaagccataatcaattgtgtcccggagataacgaagaatgtgtttaactgcagtccaatgcactgaagtagggcagccatatattgacaaacacaatttaccgagaacgaaatatatggtaaagtcagcgatagatactgaagtgctccggaaaaggatcccacaacactcctataccgagtggagtcctctggtgataaaggttctccattatctgttagagtaatcttttcagcggggaccatcggtgtaacaacaacactagcagcatgcatattagctcgggaaagatcatgaatgtatttgtgttgtgttaaagtgagactgtcgatatgatgatgtacttgaacactcaaaaatagctcaggggtccaagatcttttaccgcgaaatcatctctgagttgcccaagcaagcgatcaatggc

SEQ ID NO: 130820 - DNA, 783 bp, Zea Mays
agcttggcttgggccggtagttccagccgtacaactacctcattgatcatctctgagatgcggtatggaccgaagaagcgtggctggagcttccccttcggcgtctgggacaaagaagtaatcgaccgactgcgcagccgcagcaggacccagtcacccacgacatatgtgaccggtctgtgggacttgtcgtagtggcgcttctgcactgcttgagcttgttccaggcggttgtggacctcggccaggaactcctcgcgctctgccatcgtcttggcgaccgcaaccaccctagtgtcgcccgcctcatatgatcgtatggatggcgagtcgcggccatagaccacccggaacggagtgtcgcagagtgaagactggtaggcggtgttgtaggtgtactcggcccacgacagccaacgaagccactcacgcgggcgatctccggtgaagcagcgcaagtacttgccgatgacgcggttggcggcctccgtctggccattcgattgtgaatggaacgccgaggacatgtgctacctaatgcccgttaagcgcatcagctcgctctagaatgtagacgtgaagatggggtcccggtctgagacgatcgactggagcacgctagggaggcgtacaatgtcggagaaaatgcttgggccaccgattcagcaatgtatgggtgagctaatgcaatgaaatgacaatacttgctgaagcgatccaccacggtgaggatgacggatttcccgcgaacacacggtagtgactggatgaagtccatgccga

SEQ ID NO: 130821 - DNA, 774 bp, Zea Mays
ccaaaaccaacttgttgcctccacaaaggggcaagtaggggaggcaccatcgccaacatctgagaccaccgccaaccatcagcagaggagcggcagcaagtgccaccacgagtccgtcacccagaaggtgtatgcggcagagcctttcggctcgttggacccctcgtggttgaaaatcccaatcgcgttcgaccgacgcgatcacctaggcagggtcctgcatcccggaacctagtcccttgtcgtcgaggcaatcgtcggcccgaagcgtctctccaaagtcctcatggatggggtgagcggtctcaacatcatgtatgttgatactttcgatgccttggggattgcacgccccgcgctacgccccaacaccgcgccgattcacgacatcatgcccgggcacgacactcgcccgctcgggcggatcattccatctgttacgttctgagacccctctaatttccgcaccgagcagatgcagttcgaggtgatgaacttccctggagccgacttgcaggctggatcggacgctcctaaggctggttccgatacattcaaatccgcaacgttttcgcttgtcgacgacgctcctaagggtcccaatcgacgacgctgacccctccaagcacgttcgaattggggcaacactccccgacaaacaagaaagcacccttgtcgatttccttcgggctaatcgcgacgttttcgcttgtaagcccgcggatatgccggggatccctagggaggtcgccgaacactccctgaatatccaac

SEQ ID NO: 130822 - DNA, 365 bp, Zea Mays
cgtcagcatggacgcatagggataataacttcttgtttcagttatttttattacacatagattggatgagattaaaaaaataagaaaaagtttgacttactagggtggattgatagttacatgatgagcagcacacaagatagagattagttgtttattatcttccatactatatgtacgctggaatgggtcgtaggtgcagaaattatattgaacatcacagtgattgacagtgtagcaacgacgggcacggcaattcaactgtcatcgatcgacctttcagagcaccaacactatcaccagcgaatctccaataagaactagcatagagcctgtcctaaggctacaatcccgactcccgatcc

SEQ ID NO: 130823 - DNA, 541 bp, Zea Mays
atcagatgggtgtatgcgtgcctgctctgttgtatacttctggtgaatgaccatagataaacagtactctcgttacaagactagaaatttgggccagatgatttattgaacttggattagcagtctagcatagggatgcaattattccagtagttgctatgatcaaatatgcatacagttgatattccttctctttatgttccctggatgcgtttccccacttagatctgctctaattcagtgaattgataactgatacatgatggctatttgtccaaatcattattggacgtgtgtgcgccactaactgaagcagtgcgcacgacgacgccgtggccgaaactaaggagggggtgggagcggggacaggggagcggtggccactgcggccagcggtgtggtcactgcggccggggcggtggacgaggcgcggaggaggttagggtttcagattttgcaggatacatgttggcgggcttagaaggagggctcgggggtcctggccggactggtggtggtggcgagttgtgggtagcgaggg

SEQ ID NO: 130824 - DNA, 397 bp, Zea Mays
gtatgtaggagggtacgaataagcgaaaggttgaggaggaacattgatgataagagctttagtgataggaggaggagcgtctatcttaggaggttcagtggtaagaggggcatcaacggatggctggtatggaaatgaaggaggaggatagagatgtgaaaatagaggttatggaatcaaggaatggggacaagcaggaacgtcctcctatcgatgatggacgggagaaatatcattgaagaagacatgactcacacctgcatgggtctcgggatgttgtgaagattgcgtagtgaacaagtcgatgaacgtaccaaagttcggactccaccttggatctatatcaaaacagattgaaagaatacaaatggagagggcttatggatcaaagagtgag

SEQ ID NO: 130825 - DNA, 381 bp, Zea Mays
atttttacttcatcttgtccgtctaccgacgatcggacagccaggacgcttccttcaacctccacacacggacgacggcggaggaacgcctcccacagcggcgaccaattccgcgacggcgctccctaccagggagggtcgcgagccccaatcccaacccccgactagcgcagtatgcatgggaaaccaaggcaaactgggaggagagctccttaccgtgggttggcatctggtggtggccggccaaggtgaggtgtggatccatggcgaaagcgtgctccgatgagccattcccgcatcgatactaaccaaccacgctcggtgcggccataaacttcatcctggggacgcggcccagttcccagaccccaacggagggct

SEQ ID NO: 130826 - DNA, 578 bp, Zea Mays
gtgtttccctccatcgttgtttgatattatggtggaccttgtggtgcacatggtaccacaaatagaggcattggctcttatgtagttgcacgaaatgtggacgtacgagcatttcatgtcaatattgaatggttatgtatcaacccgtgctcgtcccgaggcatccatgatagaggggtactgtaccgaagaggccattgagtcgggaggaccattttgcaatagtatactaaaagaccaggttgcaataggtctgcctccatcacgacacgagggtagactgtatggaatcggtaggatgggatggaaatccttcatcccaccggattacaatacagtacttgaggcacatcacagcatcctacatgagctagagataatggagccatttatccaacaacacatcaatgagcttcgcgagcaaaatcctgggcaaacagatgattgggtaatgaagcaacataagttgcggttcaacacatggctaattgtgaaggacattccacacggagatacaatagaagaacaaaccattaaggggttggcatctggaccatcacgccaggtcacgacatggc

SEQ ID NO: 130827 - DNA, 420 bp, Zea Mays
taatagtttatgcgagggaccccatgcctcgggctgatgtgcgggttacctctgcaagggaccctatgccttctccccaccagataattgttggcctacacacatatggaaaagaggatgacttctgatgaagaacgatgagaagggatgtgcctttccaaccgctatcgttgtaggctttgagttcgccgcttgcgaaggggcagcatgtctaagatcttcgatgagcggacatgattgagttcttctgtgcaacttggaggtgttgtgacggggtgcgagggtgaatcaactactgatcatgtatctcatgcatttgccaacatgttaggaggccacatatagtagcctacaattgcaccaccgctaacaccagtcgggtaagcatcttaccgttggctccatcaagatgtgtgtcag

SEQ ID NO: 130828 - DNA, 759 bp, Zea Mays
agcacccatgtatccacctatgagagttagttcagttggtggaaggacccaaactgatagattttgccctagtgcaaaggttcaaataaaggggatagagttccccaccgatttaatggttatgggtaaccaagatacaactatagacgtcatcctagggatgaattggctaaccaagtatcaagccagtcttagttgtgaaaagagaacggtgaagttagtgtccttatcaggagaagaagtgttagtagagttggtcttgtcaggaccaaagaaagggagttgtcaccaagtcaccgcccgtattgaggagattaaaccatcagaggctatcagtgtagtattagatttcccagatgtgtttctcgaagagttaccaggtatgccacctgaaaagaaggttcaatttgccatagagcttattctaggcaccgcccctatttccaagagagcctatcgagtgtccggaccagagttggtggaactcaagaagcagattgatgatttgtcagagaaaggctacatcagaccgagtacctcgtcttgggcagccctagtgttatttgtggagaagaaggatggcacgaagaggatgtgcatcgattatcgagctttgaatgaggttactatcaagaaaaagtaccccctgcctagaattgaggatttattcgatcagttgagaggagccagtgtgttctcaaagatagatctaatgtcatgctaccatcagctcagaatccgaccctcagatataccgaa

SEQ ID NO: 130829 - DNA, 384 bp, Zea Mays
actacgaacttgtcgaggtagtccatgaacacattgttcatcaagtacataaagtaagctggcgcattcgtcaaaccgaatgacatgaccgtgaactcatacagtccatacttggtgatgaatgttgtcttcggtatatccaaaggttggattctgagctaatggtagtctgacctcagatctatcttcgagaacacactggctcctctcaactggttgaataaatcttcaattctgagcagagggtacttgttcttgatactaacctcattcaaggctcggtaatcgatgcacatcctcttcgtgtcatccttcttctccacaaacagcactggggctgcccaaggcgaggtactcggtctgatgtagcctttctctgacaac

SEQ ID NO: 130830 - DNA, 779 bp, Zea Mays
ggcctaattgcaaaaaggccactctagtgctcatgtatggttaagtataaaaatcagtcaatatgactagctttggagctttgtagatctaaaaatacaaagattgtgcctagggtcaacacaccaaacttgtaaagctactataggagtacaattttgctataggggttaagctttggtgtcatgaaaattttgaagataatttggctcaaagttaggctgtcaaagtctgaagactgattaacagtgtgtaggatcaactttgggaccttgtggagcttggtttaatggatgtttggcaaaaacccctgtgacaaagttcaagctggattgataagctacaactttgatgtagagtatcaatctagtcaccaaacaaaatctggagaaaattcgccccaaaccagctttgtcagaccaactgatgaagcctctaatggtacagtgcactgaaggagatcaagtgcagtgcacctcgctgccggttaaccgtgcgatcagattcgtgtcgatcgccgtgattcgtgtcgcctggaggtggattgcgtttggccgtataaagatcttgtcgtggatgtgttcgggacattgtggtcacgctgtccctcgaccatttgcgtcggcgacgtggcctaacggccgtcaccggagttggcgtccttcaccgcgattgtgccatgccctaggcctttaaccacgtcgctactaatcgcaacagctcgccaatgaccgtcgtagcccctcagtcggtgagtgccacggtaaaccacaccggtgac

SEQ ID NO: 130831 - DNA, 492 bp, Zea Mays
aacacttaatactctacctcggacgcacgtcggaagaacaaccccaactattaactccgcgcacgatttcttggataacacatgcgatcaagattaccaagttaggtgctttccaaattgcatttacttaaacgagctattccaatggcacatgatctatcgtgccatgagattattgaatcctgaacttcaagagatcttttgaatagttgtgataaacggatatgaatgtgatgtaatgagcttgattttcacttgatagctatgtttaaatccatactcgctgcttagtttaaggcaaacaattggggttttatagacacttcctcctgggactccttcagctcattccttttgtgctccagctcctccatggtaaactgtttgctcctctccaaagtggtaagggagttggaggcatccctatacagcctatctagattattctgagaaaagagtagcgcccgattctcatccttaagccgctggatc

SEQ ID NO: 130832 - DNA, 385 bp, Zea Mays
gatctccttgagaagccgatcgcgctccggccgtccaccaagctgatcaaggaagggttcgagttcaagtacaagacgctggagcacatctatgagaacatggtggagtacggcaaggccattgggatcctgcacaattgatgtgatgctgaccgatcctccgtgtgtgctttggatcttcctgtactctggtcgatcgcgtcacgtcgtcgcaagaggccaaaataactgcgggtggtttgaagtttgaatgtagctgctcagttcccctttaattttctgtatcgcgcgtgtttgatctaagaattacgtaggacgacgggatgatcttgttcttgttttcctttagatggaaaaccgtcctatttcataatcagttgtgaag

SEQ ID NO: 130833 - DNA, 796 bp, Zea Mays
ctcgaattgtcatgtcattgtggtcgagcttttccatcagccaagctaaatgtgatctgctgccgagtgcgtccagtctcatatcaagaatactggaaaatcccctccgtgcaattgcttggcgttgtctgtcatttaatatctggatgcttactaatacatcttgggggttgcatctgacgttaagcctctgctgaaaaaaagtataaaatgaatatcgtaaacatttacatatgcataatcgcaactcaatgtttaactcaaacatcaacacaacatgatttcacgcataaaatgatatattgccatagaccataaatctctaacctgtcgggggggggcactactttcctccgctttgtgactaccttcttcaaaactttcccaggactgtcgtccaagttacgcttcttggataatggcataaagtcatcatcctcatcagcagcctgccttgtttcgggtctaacagtctccgccggaatacggggtatgtcaacgctgaagcactcttgagtagactggattataatccgttttggattagaaggaggtcggtctacgttcttcatgtttgatgttcctgcaaaatgaaacaacacatatacataaaatacgtaaaggatcaaaaaaaagataagcgcaagtcaattcagttcagttcatgaccatgcattccattagatcccaacatatcatgcagcatcactactaaattgtaaattgcataattctatcaacaaagcagcataacacaatattgtaaattgcataaacgtgtgagactaaatggatc

SEQ ID NO: 130834 - DNA, 401 bp, Zea Mays
atataggattgcccaccttgtttttcacatttgttcttcatcgttgcactctttcaaaaataagaccgagacaagcactcttgctgatgtcgtgagttatatgatgggatcaggcttactggagctggagttcctcatttgccctcgcccttcctttccacgcgctcatggagctcgcttctttatccttgccggcgagccgggagactctgtggctcgttacttggctactgggaggagaagtggcgtgctcctcgcatggatccaccgtcgaccacggctgccttcatcctagagtgtccctcaccaccggttgtgaaggattcggcgccatcctattacacccagttttataaggtaaaccgaatgcaaaccaagtgtgtgctgggatcagaactcac

SEQ ID NO: 130835 - DNA, 298 bp, Zea Mays
ggcggctaggattagatcgcgatggcggtaggatattgaccgcagatttgagaagcaacggtctagattagattatgtataccccttcgtccacatagaatctcggtcgtggatcactcgatcgacggttctggatgagcattgtttcattgaatcgacgaagttgatcgaggcccttgatttctaatcctgcggcgagggatccaccgtaacccttcgccgtggcaacttgcaaagaaacccctctgttttcacgaaaataacccgccgtcctatataaactgtgagttgagtctgg

SEQ ID NO: 130836 - DNA, 549 bp, Zea Mays
atccgaagttgacaccagagccttcggcgccaaagaaaacgaagttcatgccatctagccgcggagaagaagagagaccttctccgccgtagtgttcagtagagaccccttcagcaacttccattagcgtgacagaaattctagaggtaatgactgaacccctgcctttcacgatgctaagtcctctaggattagagctaacaagtttattacagccacagaagaaaaatgttgtgagaactaccgaagcaaaggtaataaaggatcctttggcgcctagcggggggaacgctcaaaaaaacgtcggatgatgaatgtgatgagagctatccttgataccccagctccggtggttcgagaaaaaattgtatccactgtggccgacgaagatccccaacaagctaaaaatagcggtggtcacctcgggacaaccttatcagaaatcgatagacttattgctaatgttgcacttgggaaaaatactgagggggcaattattgcggagacttcagcgtcgaaggaaaaaagaactgaataagcctcttcgga

SEQ ID NO: 130837 - DNA, 681 bp, Zea Mays
agtatgggtaagctcttggatgcttggaacctgtttctgcttcaaaaaagtaaaaaactgtttaactttatttttctttttgttcacagcaagcagccttttcacatgacagtacaaagcacaaaatattttggcagacagtataaccaaacacacttttagtgcgagagctattttagtcgaaggctcccacgtatatgaggtctaggattaaacgaccaaagccagccagcttaaacagtttgcaacacgcaacagaatatcagcgagctgatcgatgccaaagtgtcaaatggtggtgttattattggtagttcaaaactcagcaagcagtttgataaacaaaacaactcagcaatgtgacacgacactatatatctatgagagaacagaacctcaacatcaacgccgccgttggatagaataaaattacaaacctcaaccgccacatcagcatctatgtaagctagctagagtttgttatatacacagggaaggtgaggaggaggagggtcaggtgccagcagcagctcaaatccatccgactactagtataaatgaagaatctcaagtcttccctctcctctcctgtcctctcccccaccgcacccgctcttctctaatgtacacttcggtattcaaaatgctattacaccttagggatctcaattgtgcagcgat

SEQ ID NO: 130838 - DNA, 1323 bp, Zea Mays
ggacgatttgaactttttttatggtgaaggacattagagtattagaccattgcacttctactgcactccctacagtcaacaatccatacagcatgcagccgtgcttgtacatcatcaagaaagaatcagaaaaaatagttttttgtttcctttctttctgttacaagatgagggagcatgactgaatgtatcaaacgctaaaattagaagggcccgatagatagatatatgtgtacctgcactggacaagatcagcaagcacatggatacaacaccgtaagagattgcttgggttagcatggcaacgctgtgctaatcgaaagtgctggctgcttccttctatattctactccagttgacagggcacgcggtcagggtcagtgaagctatcttgtcagagctcagctaatcctggattattataagagtcagtttcagtccacttttgacttccctctgaataacatcgatgtatgcatgacagtaataactgttagaaatgctcatcaggtgtgatccgacaaagagctaaggttgatccgtcagatcagaaccctcctttctacgacgaacgagaccgcacggcaatagatggatgtgtttgacttgctgcgtcatcgatctagcggcgacaaacccaagagagaactttcaggaaaaggggcgaggtgtatcgggagtctagtggatagcagccaccaacaagattgtttagtcagtgattggatgtcgacacactgatcaagccgtttaaaatcaatttatgtcatgaagtactcagttcagaagaaagaactgaacgcaatcaatcacccacgcaagcatgtttccttgacatggcagcctttttagaaaccgagaaagacagatgaaaggccaccatcttgccttttccctaaccaggacacccgtttattagcgtttaaagtcagcagagattactactcggcaggaaacacgtacgaacatgcgtagattaggaaagagaaggcagagatgattaccgtggttgttgcaccgaccacaagtccgcgaggagtacgccatttatgcagctggcgccaacacagcatatatatagacgcagcgcccacgtagagggagagcaccgaacaaactgaaccagaaaagaacggaagcaagagcttggcgagaccgatcgacgacggcgatcgcgatgtctacgtacgacgagctgagcaggagggtggtcaggaggaggaggaggaggaggaggaggagaagaagaagaagcaagatctgcacgatggacggaggaggagatggaatggagaggacggggttcttagagaataaagcggc

SEQ ID NO: 130839 - DNA, 1222 bp, Zea Mays
atctttaatggtgcattgcagaagatggatgaaggtatactaaacgaggtgtttttttagggtttcggcgtgtctttagtattagcatatatagaaattataaaaatataatcatcgacttatattcgactagtcacgactaacctgtcttagtcacgactagtctactagtctgtagctgcacttctcgactcaaaaacattggtatcacgcccgttgtggccactgctgaggttagtgttgttttattatagccaattagacctggttgtatttttattttgcaaccttctttggcctcctagaggacttctttctttcgcctcctagaggactttaaagtggctaatttgtgtgggacactttatctcccttttttctctctaatacaaaagatgcacagctttcatgcgcttcaaggaaaaaacttaattgtactgtgtcacttctatagaacaagtactgggagaacatggggaaaaacaagaagcaccttgcatgtctggtctaaatcatttgcatgaaaaaacatacaaaacaataaagtggagacctcagagccataaatgaagaaatgcaaaaacataatgataaagaaaataactagactaaggaaactagaatggtggagaaagataccattgggtctgcagcctcctctctgttctctatcaacatcacagtgttcatgcacgtagcacaaaagcccttgttttctctgacacagctaaactttgcatctttcatgcatgccttgcataatgaaaaggtgcaggtgtagcacatatggcgggcaggtttctgacagttgctacaaatgtgccaccctggcagtaaagtaaataagatcaaataaaccctgagtccttgtttcagaagccagaataacagaacaatatcaggtcttagaagtaagctagcatctaagagtgtccagtgcaaaaactaaacatatttcttaactcatatacagcaagagataacatacttttctaatccatataagttaaacaaatcaagactgatttcactagtctccatattcaggaacaaattaaaacactcaagtacaatacttctgtgaacaatataacaggatctcacagttctgtgaacaacaagatctcacagttgcccacatagttgttaaggcaaggtaaggcaacaaaccccctttttaccttttaagcggtaaagcgtaaggcaaagcgacgccttaaat

SEQ ID NO: 130840 - DNA, 479 bp, Zea Mays
gacaagacatcaaatagaggtggtataagtattttgacaatcttttcaatggtgagaatgagactatggacatccaattggatgactccttcaatgatttaaatatatgctttatacgcaagatccaagaattagaggtcaaagaagctttaaagaggatgaaagggggcaaggcgatgggcccagatggtatcctaatagaggtgtggaaataccttagggatattgctatcgtttggctaaccaagttgttcaaccatatttttagatcaaacaggatgtccgatgagtggaggagtacattagtaccaatcttcaagaacaagggagatattcagagttgtaccaactatcgagggattaagctcatgagccacactatgaagctatgggagagagttattgagcatcgcctgagaggaatgacacatatcaccatgaaccaatttggattcatgcctggaaggtcaaccatggaa

SEQ ID NO: 130841 - DNA, 358 bp, Zea Mays
ctgccagagaagtccgttggcgcacttgtctctgtctccccgcatggaccgtctgggccaagtggtcggatcgtccacataagccaaattgagtttgggcagggatagtgtgtttttaagtctttgcactacggattgtccgtggttttagtcggacggtaggtggtcctagtgcggacagtccggccatggttggcggccagtccgctcgggttgttttaatttgctggtgctctggtattccatattgataggtcccggaccgtctggcctaggcaggcgaaccgtctgggcttgactttttctgacagcactgacaggtttcaaacggtctttatagacgttactggtacggtgg

SEQ ID NO: 130842 - DNA, 501 bp, Zea Mays
aggcgaggtacttggtctgatgtaacccttctctaacagctcatctatctacttctttagttccaccaattctggtccagacactcgataggctcttttggaaatgggggtggtaccagggataagctctatggcaaattcgacctttctctcgggtggcatgcccgttaatttttcgggaaacacatctggaaagtccgacacaaccctgatagcctcaagcgggttggcctccttactatcaaccgaaatctggtgacaatctcctttcactgtcttaggcatccttagctcagccactacctcctctccaagcggggacttcaatgttacggtcctcttgtcacagctaacattcgcttcatactttattaaccaattcatccctaggatgacatctaccccaggggtgtttattactattaggtcgctggggaaccctattccccttatttacacccttatatttgagcatattttatctgcttgcactttgccacc

SEQ ID NO: 130843 - DNA, 495 bp, Zea Mays
gtgggtctggtcctttgtggccctcctagtagacctcaatgtcactaggcttttggccacgtgtagcttcctgtataaacaaaaaaacatccataagcaatcgtactatttggtgatcgacatagctatatcaaacttaccattcttttagcttttcggagcatgtcatcaccgccaaacttgtggttaggattggttcctcgacattgcccgtgatgcgctgacgctttctggaagccttcggaagcccaatatcgacaccaagcatagtacacatcaggcacgggcgccatccatggaaccatcacctgcacacacaatgttacatattatatcaatcacaacaatcaataaaaagggtaaaacaaattgaatactaacctcacgatattgatcctcagtcaaatatatctttgaggacccttcatttttattcaaggggcctgcttcttctggatgattttaaaaatacaggtttgtagcctgaattctcgc

SEQ ID NO: 130844 - DNA, 536 bp, Zea Mays
acggtgggcaatgggaaaactgcagtattctggaaatctagttggatccatggtcaagcaccaaaaaacattgcaccaagcctattccaaaaagcaaaaaggaagaacatttcgactttccaggccctgagaaataatcgttggatccagctatgctctccctttggtgatgcagaagaaatcaaagaattggtttccctttggcaggctatcaatagtacacacgggttgaatgatctagaagactccatttcttagagatgggcggaagatggtgagtatagcgctagcagcgcatataagatccaatttgcaacaaattattgcacaatgaatatcaaccccatttggaaagcaaaagctgaacctaaatgtcgtttttttgcgtggactcttttgcataataaagtgctgactgctgacaaccttcagaagagacattggcagtgtaacccggtttgctgtctttgtaactcagcgctagagacggtaactcatttatgcaaagattgcactttcagtagagaggtgtggaa

SEQ ID NO: 130845 - DNA, 473 bp, Zea Mays
aaagggactcctgacttcttcgaaaagaaattggaacaaccttatcgaaaaccatgctttctctatcaaacatctctaagaggactgtggtgacgattcttctctggtggtctgataaagggagcgccatgtgagaggcaatcctaaaccattagcagctctgttaaagaagaaaaggacgagggcttcctgtaactagatgggtgcctctaatcgacggtgaacgacgccagatcgcattgtcccttttatcttttcatttttatcagttaccttgaatgtacctgtggacgtccatctaaagaacatgatgtcccacatatacaccttctcgcagtaaggataacatcgtatgttgaccccaaaacagaaagagggttggtcactcctcggtgctgctaagggaacgaccctcgacaaatcctccaagcacccgacccacttttcagaaagttggagaaaaaggtgggagc

SEQ ID NO: 130846 - DNA, 834 bp, Zea Mays
tcaccttggcgggattcatggcgacgcttgcctcagatatgacgtggccgaggtaggcgacggagggggcgctgaagatgcacttgacgcgcttgacgaagaattgctgttgccgaagctcgaagaggacggcgcagagatgtcgaaggtgatccgcccatgtcttgctatatatatcaagatgtcgtcaaaaaatgccaggacgaagcaacgaaggaaaggccgaagtacatcgttcatgagggtctgaaatgtcgccagcgcgttgtagagcccgaatgccataactaggaactaatagaggtcgccgtgggtgtggaacgcggttttgtgtacatcttccggccgcatccgcacctggtggtacccgaaccagaggtctagcttggagaaggaccgcgcgccgtggagttcgtcgagaagctcatcgaccaccggtatggggaacacgtccttgacattgagcgcaattagggccggtagtcgacgtagaagcgccacgacttgtcgggcttcttaatgaggaggactggcgatgaaaacggtgagtcactacgacggacaatgccctgctcgatcatggcggcacactgtcgctctagctcatccttgtgggctaccggatagtggtacgagcggacggccaccggctgcgcgcctgccttgagggtgatgcggtgatcgtgcggacgcttgggtggcatcccggtgggcgcggcgaagatatccccgaaggagtccaggagctcatcaagtaggggctctctcgttgctgtggcgcccagggttggcacacaggaggacgccatgcccgtccaggagatggcccgccct

SEQ ID NO: 130847 - DNA, 423 bp, Zea Mays
ctagccgggaagattgatgccttcacccctatccttcggcttaagaatgatgccgaattcgcttggggggcaaagcagcaggaagcatttgatctcattaaaaaatacttgtcttcggctcccgtattaaaagcaccacaagcaggagtaccattccaattatacattgcaactgaagataaggtcattggggttgttctgacacaagaaactgaaggaaaggagcatgtggtgacatatctaagttggaggttgctggatgctgaaacgaggtacacttttattgagaagttatgtttatgcttgttttatgcatgtaccaagtgtagatgttatttactgtctagtcattgcactatttctggtcaaaccgatgtgatcaaatacatcttgcataacccaattatgagtggtagaattggt

SEQ ID NO: 130848 - DNA, 398 bp, Zea Mays
gtgcagtctcatcaaatgtaacctcacaagtctccataatgcgaatagtctctaggttaagaacacgataagcatgagaatgtaatgcataacccagaaaaaaccccatcagaagactgagactcaaacttgtctagattaccctattttatcaaaaagcatctgcagccaaataccctgaaatgactgaccttgggtggccgtccaaatcgcagctcataagaagttttgttcagaaaagcccgaagaaagatgcgattggacacatggcaagcagtgttgatcgcttcggcctaaaaacgcctacgagtcctatgctcatcaagcatcgtcctggccatctcaacaagggtccgatttttgcgttcaacaataccattctattggggcacatatgg

SEQ ID NO: 130849 - DNA, 369 bp, Zea Mays
ctccatctgggtcataattgaccgattctccaaggtagctcactttattctagtaaagactacctacggaggagccacacttgctcagttataccttaaggaaatagtcagactgcatggcattcctcgaagaatcgtatcagataggggaacacagtttaccacgaaattctagatgagtctgcagcaagctatgggaaccaagttagactttagcactgcctaccaccctcagtcagatggacaaacagaaagagtcaacaaggtccttgaagacctgttgagagcctgtgctctgacctttggcagaaattgggaatccagtttgccgtatgcagaattctcctacaacaacagttaccaggccag

SEQ ID NO: 130850 - DNA, 823 bp, Zea Mays
aaaggattgaggatatgagaaattatatatatagaggattgagtagtgttccctaaatttagacgagcgtttagagttgctgtttataggtgctgaatccgtagagagatgacgagtctctaaaatttagtgtacaggagtctcatccctattcagtcgtaggtacattacttgccttgaggatactggtacttgagttagggtcgttttggtttgcctgagtcgtctgttctgtactgtcgttgacggtcagcattcagccccctagctaattgctggtttctacgatgtgtcgttgtttgttaaacgttcaaccataagctatttcccatactgtagccccgatgctacggtttcaatatatcatgatgatatgagctacaatttaactctctaagctcggtttcaatatatcatgatgatatgagctacaataaaacaattatttgctgctttaaatgctactagaattctttttaaaatagttggttttgtcaactttgggtatttcaggtaaaacccgaatccaaactcgaaatatcgtgtacccaaaattttaggtaatatttttgggacaaaaattgggtagcggtttttaatacctggatgccggatttgtatttactcaaattacctgactccgaatatttcagtaaccccccgaatgccgaggcctaggtacaaagcttcttgccttagccacaagatcacccacttggcgcccctttgttaggcaacagccgagccaaagccaatatggcttgcctagtgccactatagcacatgaatgtagtctctaacattaaagccatttagtccggac

SEQ ID NO: 130851 - DNA, 943 bp, Zea Mays
tgttaattgaagttattcattgaataacagatgcgatcaaaagagcaacataataatatcaaataagcttagaataggagaatccagtaaatatgctactttaacaataaaagctacaatccttgataaaagtgatattactttaccaaattggattgaaattgaagcagcatacttcatgagaaacttattctcatacttgagactttatgagattactaagagaaaatgttagtcttaataggatcaagatatagaaatggagctccccctaaaggtatgcatcaagaatttgaacgcacttctcttttaaaaaatattggaatactatgaccatcttgatcaaggcatgtaatatttccaataatcaacttatgcctagtcttcttaacaatcaaaaggtttagaatacttacaaccacaccattgaccatttgaagatcttactgtccaagtgggtgttgttgttcttgatatcttccttttgagtgtcctccctttgtagttgtctctttttcttttcaaacttattgaaaatactcaagaaagatattagcagcactgaggagtatatgatgatttcttttagataagagatataaacaattcatcatccacaaatcacacatacatgaagtaaaatccttaatattagtgcacatcattagaaaggagaaatttgcaccttttaacatttttaatcaatcataggaaatttacttcttcatattaaatttattaacataacttaggagcatatcaatatgagaacatatatagcaaagatatgagttagaatctaatagactagtgcacatatgaaagcaagattgtatgcacttttagccatcttgagttaactaatgaatctaatcttcacactggtagattaagataatttagaataaatatcaattgaatgagaactattattgattgagag

SEQ ID NO: 130852 - DNA, 353 bp, Zea Mays
gccagcgacagcgaccctcatcagctcagctgctccccctctgtctatatatgggccttgtctcacactaatcctctcacataattagccaccgccaccagttagccctctgtcctgtttgacgaggaggagaaggaagcaaggaacaaggcgccggagggggaagaggaactcaagctccggcaaacagcaagcccatatacgtacattgtgataggtgagagctacggatcgaggctgcctcattctcccctcttgcatttctcttcctctcgctcgcgctccaaatcttcttcttgcgcatcaatcggttgctttgctgcacgcggtctcctgcagccgctacaacaagg

SEQ ID NO: 130853 - DNA, 397 bp, Zea Mays
gacgcaacggaaatcctgaaggtaatgactgaaacctttttgtttgctatcctaagtcctctgaggtcatatctaactagcttattgcagtcaaaggagaagggggttgaaaaggtgtggaagaggagaagaagactgcttcagcgactagaggaaatgaggatggtcagaagaaatgatgcatgatggctatgataagggccatccataagaccccacccccggtctcgacagaaaaaactgtttctctcgccggtgccgaagctgatgaaatggccgctgaagctaaaaatagtggaggccctcttggaaccacaatgtcgaagattgacatgattatagctgatgtggttcccgagagggaaatggatgaagtgaccgctggtagagcttcgcc

SEQ ID NO: 130854 - DNA, 299 bp, Zea Mays
aatttattacaacatatatttggtgaacatagaacttattcaattatacttctatgagcatgaccataatcctcacatatatagaaattgcttaacccaattaaaggctacatctattttattgtctagaacacaaatacttcacctaatcttgcattttaaatccgaatcccacatcacaccacatttggtaatcacaagagcattatcaacacaaacacctagcacgcatcgcacggctgtcctctttacgaaaaacctagagttctgcttcctcacacaagcacacacatatccac

SEQ ID NO: 130855 - DNA, 310 bp, Zea Mays
ggccgataccctctagccctgagacgtgcacatttaatgagatctgaacgaccacctaccccgctgcggacgccaaagtcaacaaaggacgacatggctacagtctaatccacctctgcccaccacgacgctggtcagagtatggatatggggcactgtaccccctctcctgcctctattccaaggtatggctacataccagactcggcctcggtcacggcctcgggagaggtttccgcctttcccgagcccagcctcggccaaatgccccgacaaaaacacacgcgtgcgctgcctgttctccacgaat

SEQ ID NO: 130856 - DNA, 645 bp, Zea Mays
ttatttttggcgatttttgtgtatacatgtgtatatgttatgtgtatatatatattttaaaaaccaaacatatatgtatctgtcccgacttcgtttttcagggcacagagatatgcacgcttcttcatgtatccctaatgtgtggcccatcaggcccattaggcgagcggacacaactgccttccgtggcatgttgaggtcttggctaatcgagtaatcgtggggccacgtagtggcggcgcaggggactgcaggagcagaccagccgggagggagctagcaaggagcgtcatggcctattggcctgtgcgcgtgcgtggaggtcgacgcttgctgtcctgtgccggtgtcactcgatttcaaagctggaagccttgaaggattggaaggttgttttgcaatacgtaagattgtctatgatatttaatatcctctatatattaaagatattgctacaagcaacttgattatctcaaacaattaatactttgatatgtgaagcattaaacaatattatcttataacatattctatgtggcgtgaattatgatttagtttgcgtgttatgtaatttgtatgttctattatatgatatatattttatatgctatgaactatttctatgagatactataatcaattata

SEQ ID NO: 130857 - DNA, 1074 bp, Zea Mays
agactccacgaggcagccaccacctccaaaaatcccgggatttttggccaaaaactctcaaagtgaaatcttctcctccccacgccccctctctaattctaagagttaggggacagtgatccgagatagcagtagcattactgtgaagagaacagtctggaaaaaaatcctcccagtccgcagtgcagaaaacatgatctaatttcacaagagtaggcacctccctctgatttgaccaagtgaatcttctgccaatcaaaggaatctcttttagctccatagaattgacaaaccccctgaagcgacccatcattagcctattgatgttggaattattcttatcttcctcccggaggatcatattaaaatccccacataaaaaccatggccccacacattcatcacgaaccgatctcaattcatggataaactcctgcttaaaaatatcctggtgaggtccatacacacctgtgaaccaccaggaagaaccagactcatcctgaaactggactgatacagagaaattcttcacaaccgaagccacagagacaaaagacccatcacgccaagcaattagtattcctcctctagtcccctgggcgggactatacacaaaattactgaaaccagtcccaagaatagacaacatgtcaaagtccgagatagcacacaatttggtttcctgtagacaaacaatggaaggcttgatatcaaggaccagagatttaaccgagtccctcctggcacgatcatttagacccctcacattccaaataagaaaacagctattctccattggaaacaaatcagatcgcccccacctgagggacctcccaaccaaacaaagctgccaaagcagccacatgtgcactcgaaagcccggaatcaaataactttgcataagtgcaggcatcttcgagagagatattctccatgtcatcacaaaaacctagatgcctacagacttgtgcagccgcattggatccaagttctggagggaatttggccaccctcctacttctccgtggccgaaaatcacttggcatggtctttttcctgcttttggtccttcgg

SEQ ID NO: 130858 - DNA, 438 bp, Zea Mays
tttcaggactattgatgtcatgaacactgtgttcagcatctgagtccaagttcacaggtaaggaaggtatagtattggaaccctgcaatggtgtactggtattggaaggtggaatggaatcaggaaatggatttacttcagctgacccaagaggattcctgacaaagttcaagtaatgattccagtacatagctgactgtgaggcgggaatcatggtagattgggaagaagtatttcctgtctgcatgggtgcccacattgttgtcggaccttgaccagggtttggaaaattgaggtttcccataaagttacaatccatagcactctgctgcatgtaacccgtaggccacaaagggggtggaggaggaaactgctggccaattgatgaatttgacatgggctgtgaagaagtggcattgtttgatgggtccattctag

SEQ ID NO: 130859 - DNA, 324 bp, Zea Mays
agaacaagttcgaatgataagagagaatttgagaattgtacaatcaaggcaaaagagctatgttgataataggagaagactactggagtttaaggagggtgatcacgtgtatctgaaggtgtcaccaatccgtggtatgaggagatttaaagttaaaggaaagttgtcccctcgcttcattggacctttcttgatcttaaagcgagtgggagaagttgcatatcaactggagttacccgatcatctggcagatgtacatgatgtattccacgtgtcccaactaaagaagtgcctcagggtacctgaagaacagctaccaatgga

SEQ ID NO: 130860 - DNA, 537 bp, Zea Mays
atttaaactcagcatgatgcaacatttcgtgactcataattaatccctccttaattaagctatttctactaaaaaggaaaaagagagagagaatctaaagatagaaagaaactagagagagaagagtaacaccttaatttgggtgataattagaaagaaattgtatacccccaaattcaggctgttacattcatccttagtgcaagtgggagaagtgcttccagtgggtacttctctcgactcttcgacgttatctttgggagcttcggtagaagcaggagttggaatattcgtagacttcaaaacaacatccaaaacactggtcatcctccttttcttaggggtcattgttgtggttggagcagttgttagcttcgacaactcagttgtggttgggggactcagcagccttgaatgctcttctacctttgagctccttgtctcagacttttctactggactggcactagcttagactatcacaacaggaatcgtctccgaagccaaggggatagcttcggtctgttcaacaatctc

SEQ ID NO: 130861 - DNA, 1438 bp, Zea Mays
aatgacccacgaaggggtatgcagcgatcatgaccgtcggattaggagtctatggcacagatcaaacccacccgagatcgaatcggtacgcactaattcacccttggatctgggatctgcggtcagggtttaatggaggtaagtttcaatcacagcccctggttcagatcgtacggtgcagatttgctgacccgaaacgtttcctacttctaatctgagccatcgatcattcgatcgacgagccgcgatcagctccccaatcccaggctgtcccgacggcggcgccacataggggcgtggcggcgccacataggggcgtggcggcgccatcgccggccatccggagccctcggttctagcgccctaaacacgattctgttgggtgctacgcattagtaagggaggagcgaacgtggtgtggtgtttactcaccagagatgggagccgaatgaagccacccacgacgcacggcggatcttccaacctcggcgaggaatttctggtgactgcgcgcttctccgaccgccgctagaccgcaaatgtgaccagcggacccaggcgacactgtctgacctcccggtggagccccccagaccttcctcgaacacaggcggcaatgagctcaaaagaaagccccggcggcttggttcccgttggtgagggcgaacggcggcgctaactggtgtcgtggccgcaatggctgacgagggtggtgccagatttataccccgaagccgcccaaccgtatggcgagcgcaccgggtcagcgcccgcgcaggttgcgcgtaattctgttgcgcggacgcggcggcgatttcgttgccgtggacttggggaggtaggcgagtccgaccggttgggcccacagcacggtgactaaaggaaacggatgcgtgcgcggcacaagggctggcatgcggggcccgtgtgacagtgagggtgaggcgggcgcgcggctgaagacttgggccgaattggcgcctggtggcccaattagggttttattctttttttttatatttcctattttccatcttattttcaaattcaatttgaatttcgaactcgaattcaaacttgtgtcaagtttattcttaatttataatgtgactttaaaagtattaaattttggaaatatatattaattttctttacatttatattctttcctcctcccattttcatttccaaaccctaattaccatttgggttccaatttcatttctctcttgttatgccttgattagtagtgttgagatggttgttaatatttaaatgcatagcaaacaaaactccaacgagatgcacttcttttattttagtgtctttggtttgatttaatcactcttcaatttatgtatgctctgttcatgatgcaaataaggcacataaaatgaggaaatctccatataatgcttttatatcattttgagtatta

SEQ ID NO: 130862 - DNA, 430 bp, Zea Mays
atgttgcttagctcttgccttttgaactgacactaatccgaggattttcaattttagacttctcctgaattctagctcatccccagagagctgtctggattcctgtgctttctcaaggaaggtaaggacagtctgaatgattgctagttgcactttaaaattgccgacagtctttcgactccagatctttagagctttagccgttcggaccattttcacatgcagccgaaggatggcatctgaggaactaacactagacgtccacgcttgctgaaccacctcaccgaacccatctatttttgtccaaaaagcctcaaatcgaaaccccctgtagaaaccaaaatccgagcaaccttgcataactagagggcaatgatccgaggtcatgatcccaatagcttgcagattggcctgaggaaacttaccatgc

SEQ ID NO: 130863 - DNA, 620 bp, Zea Mays
caaggaaacgaatgacaacataattttgcaactcaggcaagaacttgaggcaacaaaaaagttgcatgaggcagagactcagcaattagagaccaaagctgccaaagtaaataaggagtttgaacagaggataaaagaaatagaactcatgttagaagattctacaaagaggagaagagaacttgaggaatctactgaatctagaatccaattttggaagcagaaggaaatagtggtaaacaaatttgtgggtttgcaagtaaagaatgctcaggtattggtcaacccactctgtcccctggccttttttttatctctacggtgaatatttgtgaactcaagtgtatagtgctctttttcttcaggaattgaggctctcttctgtttcagttagacttgaaatacaaaattgtcaaaaaagatggtttgaagaattggctggccttggtaaggatgaagccttgtgactagttagggcctacattgacatagtttttttcaccaataggtcagttctaaattttcaatttaattttctacaggacaaaatcttaagatggtaacaagtgctgcagaaaaatatcatgcaactcttgcagataatagaaaactattcaacg

SEQ ID NO: 130864 - DNA, 951 bp, Zea Mays
caccgccgccgccgccgccaacgagaagggtaaacaagggaacccgtgagcccacaatctgctgcttgttgggcagcttgcttatcctcctgacccgtgtccccctcagatccaggtgcttcaaacttgttagcttgaacacttggagtgggagctcatcgctgatctgcgtgcagctcgcgtccaatgtctgcagactccacagctccttgatctccggcgggatcttgcttgtcggagtgttcctgacgctcaggtacgtcaggaaatacatcttgcttctgcatatctgcagcaggtcatcgtccttgagattctcccagccttccagatccagcaccaccaagttgacgaacttgtccatagggatgccgctgacagcacctgacacagccagggaacgtgtctgagatagatcaatttgttgaagcagagatgggagatttgggtcaggatggtgaaggattagcctccgctgtgtcctgttgttgttagctcctgctcctgctagtaataagtacttcttgaggctactggcggtgaaatagaaacccatctctgcagatttggaggcaaggaactgctgcataaaatgattgacgtgccactgacagtggcagccctcttcttcatccggacagtgcctacagtcagcaccagcaacacgcgtgatgacattcctgtccgccagatgcggaatagtaaagcgcatcgccacttcattgtcttcgttccatctgaagaagaagaaacggtcattgtcgaacttgtaaccagaaggaaacatggtcatgcataaagattgtagcttggactcataaggaaggtcatcataagcaagggacaatgctcgttcgatacatttcggtagtcgttgggggccttgctccagctcgctgctgtaaactgcaagggtcctctgatcctcggcgtccttctgctgcaataatt

SEQ ID NO: 130865 - DNA, 439 bp, Zea Mays
cgcccttcgtcgatgaccggctcctgcgctgtccaatactccgataaggccctccttctcttagataccttctttggttcaattcgcgccgaattgtgctcggattagggtgtcggggcgtcgacgattgcttgtcgttgtttcttacgccatagatctgcgcctcactgtggctcggcatcatcgcgagccgattcgtaatgtgatcacttccctggaacccaccactctccctactatgtatagcaactagctaatttttgaataaggcaccggggcatcgaatagccatgctccactgatgctccgtcgtgggaagttatggcgccgccgcctgctatcggcagggttggaggagggggtggttggtggcaccgtggtcgttggatggcgtctggacgacccggattagaagtcgcgtacccttccgcgtaaatcc

SEQ ID NO: 130866 - DNA, 407 bp, Zea Mays
acgacatgcaaggtagggcccatgtactgtttttccttttgttactgcatgcacatcacacgcatgggagagaacatgcactgggccccacgcgacagttctttcttcaagtttttcctgcaaccgcagaacacgcacgacacctctccttctccacttcgcatgcacacacggttactgcatgagcattttcttcatccaaaaagaatcagccatggcgccggaggagaaggcaaacaaccgacgtggctaggcgggcggcatggcggctcgctgatgggagtggaagcagcatagggacgtgactatgtgcctaggagacaggagttcggtcggctgggtctgctgctcgctggcagtaggcaggtcgagggctcgaccacgtcactgagcacaaggaaaggaac

SEQ ID NO: 130867 - DNA, 713 bp, Zea Mays
ggtggcaatcttgcagaagggccctcggggttttgactaactggagttgggttcggttactattcttatgagtcactgacgatttgcacagaggtccttgaagttctattcctttacaccgactgatccccgacagcgtcgagcgtggtcgagctccggcgagcacgtagaccggccggaggaggccaagacaggtgctcccgagcagcgggcatagaattgaaccattcccgatcacttcccctaagtcaattttaccattggctgcccaaaggcctctggccacggagaccgtgcggacaacccaatgatcaacacgttcccggggattggggatggtctagttcgattgggcgggtgggtgagcatcaccagcatacaaagatgctaaaacgagaacaaagaggacatgatcagacctgtggagggctggccacggcgagctcggttctgcggtggcagaaacttgatttgggggaagactaaaattcaagctctctgatgaacgattgctagcgattttcggtggctgggtgggtgatgaccttgcagggctggcgggggcttcaatttatagggctcaacggcggtggccgggaatttcagtggggacacgcggtggtcggaggaggaagaagagtattggcgcagtggcttggtgtccagcgtcgtggcaattgctccggcgatcaacggggagccactaaggctta

SEQ ID NO: 130868 - DNA, 310 bp, Zea Mays
gttttgagtagagtttgtgttcacagggtggagatgcttacccaaagcgtatatcagatgtgaaccaataccagaggtgtagtcgttagagcggagtaattgagtgtgctggagtttaccttagctcacagtgttgagtgcgtggggatggagatgatatctctctaggtgtatttataactaggtgcatatggcttagtacggtagagctcactgttttgagaatagtggcagaagaatcatcggactcagtttgaacggggaaattatagatagaatatgggacaacagtattttttggagttttctg

SEQ ID NO: 130869 - DNA, 2088 bp, Zea Mays
gtcgcacagcagccccttctctgcctccgctcgcgaggcggacgctgccgtaaccaccgcgcgatgacaccagactccagttggctcaagggccctccaaccaactcgtctgcgtggaagataaaagctccctagggtctcgcccacactgtcgtattcccaccgccgtcctgcaatcgccgtgagctgagagggagattcacgccgctgccgtgggattcacaccagcgcctccgcttgggtgccaatcgcccgctcgcaagcttcgccgagtcgtggggaaggtttccgaaggccaacgctaaggatttgtcgtcgggacccagggaattcatcaccggagttgcgcccgaccgcggagccgctcctcgccgtggttctccctgcactgcgaccctcgttgtcggtaagtgcattcctcagatctgcaagcatctagtgtccacgtagcaccatctaggtcagagttcatgggctggggcgggtaaaacgcgaggtccgaccatggcgccgccgtggaatgttacccgccgccgtgttcagtcaccgggttggggaggaaggttgtgcgtcgtcgatcatgtggacgatgaccccgattagaagatgggtatcccagattacttcccttgatgaggatgttgtgcccccaaatggtattcctcaccccatgcatggccatacagtgagtgggaactagaacatcccccatcattaggtgcactagaataagaaggcgccctatcgggcgctctaccagatcagtgagtaaattgttgatgagtaaccacgctaataactatgttatagatccacagaatagtcattagtgagttgatgtgaaaaatgatggcaaaggaaaaataccataccctaaaaaaagtcacaacatgtatttacaaaaaaaacttattagttccgggacaaaaacataatccacgctgctgcaacagctagtcaccaattgacttaaatttcagaaaatattattgtatatcaagattgcctaaaatctcgatgataggagattggacatgctcgttcctccatgccaacattttatccaatcaatttctatatcaaatattgtcttataagtctagtattccacagcatgtaccaatattcttgattttccacctgtacacatcgaacctctatatccgtagcagtcaaatgtgtgatcagcgcactcgaattttacagcagtcagggaactataaccatttcaacaacccaatgtggcaatgtgaatatgagtgaaattctctgaaaatggcaggctcccaggttaaattacctccccaccaatcaaaattcgagcatatgaggatcaacatgactactttctagctcaatttcagaaggctccaatgcacaaatccaagctagataacttgacatagtcaatcattcctaacgaagccaaaggcaatgatttcacagggataaaaagccttgggaccatagctagtggaagcttcatgatgagccagtttcgaagtggtgcaatggtatctcagtacgaatttaatacactataaccccgagtacatttttgaaactgatcactactcttccatttgtgattaagtatagaatatttaaacacaaatgcatgcaggttattttggtccgtacggcgatgcaatttttgtgtccgtacagtgatgctatttttatttatgattaagtatagaatatttaaacacaaatgcatgcaggttattttggttagttagttgtgaatgtgggctgagagccaacaaactttgtttgaatttccatttgtgcgttaattataacttttaccattttagtttcttaagtcgtcaaaaataattcaaagtaaaaaaagggccatcgataatttctaagaaagtaactcctaaaatatataaaaaacagatttaaagagagctttttaggaggcgtagtttttttttacgagggatgatatgcttgcacgacattctggtcgcggccagtggcggatccaggattgatctaagaggggggctattaagctaaggctaattttttttaaaccaaacaaaaaaatataattgatgtttaatatgacaccag

SEQ ID NO: 130870 - DNA, 464 bp, Zea Mays
catatcgaatgtttggttggctatgcgaaagggaaagagacagattggctttaattaaggccatattcaacccaaagaacgcataatatcagtaaagactttgtgaaatcgcaaaacgttgggtaatggggtctcgacgccaacacgccatgttctctcatgtactcccatccattagcagcaacatagacaacaacagtgatgccaaactaacagggtcgtatggaagggaagataccactgccacatctccgcgaggaaggaggcagcaagcgcagcaatagaaccaatgagaaagcagcaagtacgcaacaccatatatggctaaccggtcactgcgctacgcgaaccacatagaaaaacaacaacagtaatgctagctagatgtgcaaaactcatcagtaaggaaggttaacactttacaatgatcttccttaatgggttttggctatttactgtgttct

SEQ ID NO: 130871 - DNA, 709 bp, Zea Mays
tgacaatattttctgcttgttgcccttctgtggtagtagagaaacgactagcatgccattcttcacaataaaataaagctctcagtccattcctatgcctacacatatgcttgctaatgtaaggaaggaggtagcaaatcaagtcactgttggccgcactagatccccacctatcttctctctcatttggtcaagaagtctcccatgcttgtagatgaaccttgacaccttctttgccatattgatacaagtactgaaatcttttatcttagcaatgtcttccaacatcaaatccaagcagcgggcagcacaaggtgtccaaaacaaatggggcatcctatccacaagaatcctacctgctgccttgaagttggccccattgtctgtgacaatctggaccacatattccttcccaatcttgttgatttgcttctccaataaatctgccaacatttgagcaatagctacctcacttgaagcatcaacagactcaagaaagaaggtacctactggacttttggcaagaaaatttattatgtggcgttgcctcatatcagtccatccatcagacataagactgcacccatattctttccaagcattctcatgtttctttctcaattatgttgtcctatccatagctctatcaagcaaaggcaccctagtgtcatggtatgatggtgagcgatatctagggccatactgccca

SEQ ID NO: 130872 - DNA, 302 bp, Zea Mays
tctggacaaggtgcataaatatcagaaactacaggggctatctcgcaaaagatcataagactcaggattcccaccgcactggacgacgggtttatatgttaaaagttcagggtttcttttgtagcatgcacgacgaaggggtattggttgatctgcaccggccgattgactacggagcgccctgattagataggcccctagccaaatcatccgcttcccaactaccgttggatccgggatccatgtccgggatctgaccacgccagagccagatcacaaccgtcggatgtttagcacacggt

SEQ ID NO: 130873 - DNA, 509 bp, Zea Mays
cagcatcaagatgtcaccgttcgaagcattgtatggacgaaaatgccagacccctctcatgtggtccaacataggggaaaaggcacttgaaggacctgcctttgtcaaagaggttgaggagaaagttgccctgatccgcagaagattacttgaagctcagagtcggcagaagagttatgcggacaacaggtggagagaactcaaatttgaggaaggagacttcgtctacctcaaggtctccccgatgcgtggtgtcagaagattccaagtgaaagggaagctagcaccgtgattcgtcggcccctatcccatcattggcagagtgggacccgcagcgtaccgtcttgaattaccagaatccatgtctgatatccacaatttgtttcacgtgtcccagctccgcaaatgcctgcaagtaccagaaagtcacatcaaagaagaggcaatacagattcagaaagatctttagtaccgtgagaagccagtaaagattcttgactcagcagtcc

SEQ ID NO: 130874 - DNA, 865 bp, Zea Mays
tgatcgatcgagcccaacagcctcatgcactgcactagtattgttttatgtacgcgcgcgtggtagtgggctctacgtacgtacgtacacgtttgcgtactgtacagagggcattgaacagcaccagtacttgactgtcggtcaggtccttgtcactggctcactgcatgtgttgctcaagtcgcccgtacagtacagtacagtacgtgcatgccgccccgcggcaggaccgcacagacagaagccaagtttaactgtccaaacagacgcgtgtgatttccgaggcgcgcgtgcatggcaggatgatgcccgccaggcgccagtgctcgtggcttcgtgtaataaccaagggctagctaaacaataatgcaaactaaaatccgcatcactttgctgatcggtcatatgcatgcatgcatggtcgttactacatctatagaacggaaagcgagcagcacgaggaaacgctcgatctaggcagctttctcgtgttcaaagatacgtacaacactaaagggagattagaaaggtactcctattattaagcatttacacgtactacaagctatctgacgacggcggtactatagtaaaaggggaaaaaaatctagggaaaaaaccaaaacagatcacagggcgatgtagaaagttggagctctaacagaatctagctatcacaattcacacgacaggagaggacaaattgaacaataataataatcgatcgatccctcgtggtcgtggatgcaggaccgcccctccgcctgctgatagcttcgcattttttttccctgcaagtgccataaagtacacaactctctctcacaccacacgcaaagagacacaaacaagtactagccaattc

SEQ ID NO: 130875 - DNA, 462 bp, Zea Mays
gtgatggccgatgcagttgatcgttacagtcgttcgttgttgaaatccttctcgggtagacaagatggcccacgcagtgcttttgagttaccccccagcagatcatgatctatgcaggtccagaaatgggggttcttgtctcgaatcatgagatcactggtgccagtgaccgatgttctggttaactcaacatggaatttagatgtgaaaaatgcagtatcatagatccataggccattcattgggggaaagtagccagcctcttgcagatgtagacatctagctgacctgaacgccaccaaccccggtgtcccttctcctgatagactcgcttgtcagcagccacagtgacgcttgatggctcgctcacatagaagtaggtaaggtgcgcctgccactagcatttaccgaactgactgacgtgttttaatgtgccagatctaatagctagttggcaaaaat

SEQ ID NO: 130876 - DNA, 463 bp, Zea Mays
cctgggagaaggacgtgctctgaagcgccaactcatggcactcaccaccttcgatagaagaagcatcttattctccagctcctctaggcggctttgaacctcaacaaagttcccctcggaggtattgaattttctgtatggctgaccaaacaaaacataagccatgatagggggaagtgggcagcgaacgcctagcttaaggaaagactattaaaaggtgttactttgcagagaggctaggactttctcctccttcttggatcgaccacccagttcctcctccaaggccgcgactcgagcctcggtgacctattttccttgctccaggatatagaggcgagagttcgcttttacgctcttaagacatgcaagggtcgtcgactctgcatccccccttgttgctccgaccagggtatcataggcattttggatcgatgcaacgcgggcgcgggctttagcgggt

SEQ ID NO: 130877 - DNA, 421 bp, Zea Mays
gccgaagaagatgcgtctaaaacagcctttatatgtccaggcttcattggtttatttgaatgggttgtcatgacattcggtcttaaaaatgctggtgctacttatcagagggctatgaatctgatcttccatgagttgttaggaaacactgtggaagtctacattgatgatattgtagtcaaatcggctgagtttagtcctcatatagctgatttgcgcaaagcctttgataaaatgtgtcggtatggtttgaaaatgaacccacgtaaatgtgcttttggagtgtcggctggtaagtttttaggatttgtcatccatgaacatggtatagaaatagaccctgactaaatcaagtctattcggaatgtgggacctccgacttgtaaggtcgaagtgcagaagtttctcggcaaggtgaatt

SEQ ID NO: 130878 - DNA, 452 bp, Zea Mays
ggaagacgaagctagtttcaaagctcaggccgaagcccagaaaactgaaattgaagaccttcggagacaactggccgaagctaaggaaaactgcgcactcgcacaggctaaccaagaaattagcgaatattggaaaaatcatctagagaaaaatgttgaagaacttcgcacatccaaggaaaggtgctttgagaaatccttggattgcgtgaagaaaataaaagctagcttcgccaaattgggtgcctactcttctgaaaaaaacttcatatgaggcgaccccgaaggcgttgttgaatggataagtggagaagccgaaacctttgaagaaattttgagtgattgcggggatgtttgcgcgtttttcggtgcacggggaatttgagccatgttggagaaggctggatgtgatcatattaaacccatagcctaggccgaaactgccttctccg

SEQ ID NO: 130879 - DNA, 484 bp, Zea Mays
ttctcagggtctcttatgcaaaatggcccggccgaaggggtacgggtaaactctagctgtccgattagaaacctagggctcagattaaatctttcccctgcccaaaccggtactgcatctagaccgtcggatcgccatccaacgctccacattttaaatactagaggtccaccccgatccatccgatcgacatctaacggtcgcgggcgaagggttacccagatctaatcctacacgatcaccgcggaacggacgaccagatgcacctcgtcaattcccccgcaccaacacctgagcaggggcggcgccgcccgaggttacggcggatccaggccggagttgaaggcgtccggcatacccccgcaccaaatttctccccgaaaggtcctatacgacgagaggagactggtaaaccgcatggaggttgtcttacctcagatcgagcgccgggaggggctatccacgtgatgaggcggtcacgcgg

SEQ ID NO: 130880 - DNA, 532 bp, Zea Mays
cccccttgatccttaggttggcaaaggatattccatctagcaagcctgtatttcttcgtatgattttcaccttgccagaaaaatatagataaaaaataatccaatttctcgagtacacccctaggaacctcaaagaaagacaacataaacatagccaagctggtaagtaccgaattaattagaacaagacgaccccctacagacatcagctttcctttccaaccactgagtttcttttcaaacttttcctctatcatttttcaatcagtatttcttaacctcttgtagtgcatcgggatacctaggtatttaaacgggtaccccctttcttacagccaaaaaactgttgatattgatgttcctcctctactgccttaccgaaacaaaatagctcacttttatggtaaataattttcaaatcggagacttgctcaaaggctacaagaagcgactttaggtttgctgctttctctacatcattatcaaaaaacaacaaggtgtcatccgcgtattgcaaaatagagagccttcc

SEQ ID NO: 130881 - DNA, 457 bp, Zea Mays
tagcgcgtggtgaagttgttcatagactcggcagagggagttgatcgtcggggcggagagaacttctcacaggagaaagaagatcgaggcggatcgaccatcagtgcgggtgggcctctctgtgccatcaaagctggtatgtttcccttgcctacactcgcacggcgattcgttaggttaaacgctggtcaggttggggaaagtgcaccttggcgcggggttagagttcaccggcggggtgcgccaccgtgcgggcgctgcgccgctgtttggtgacctccatggagaaggataggtctgttgccgtagatccaaaattggacatttaggatcacgtacggtgtaccggttcgagggtcttcatctgggtcgtccatttttgcttgtagggtagtgattggatctggggtattttaaaaccgccaccgttggatgatcgattggtggccaggattag

SEQ ID NO: 130882 - DNA, 585 bp, Zea Mays
ccttctttctccattattaacaaattgttcttctcttgactaccaaatggagggcacctttgtccttaaagtgtcctattgcttggagctagaaggattcccttaccttcttcaatgttgttcgcttcgcctcagagttcgcaagaaaccagagtatgtctgaaaggaatactgagagaatggagttgagaagtgcttcatggcagtctacctgggggaaagccgaagctacccaaaccacccacctttccagatcaccaccactggccaccgcttccaagacacatgccaaaatgctgccctaaaagcccactgcatgccaaactacaactatgaattcgccgagacaccccttcactacttcccatccagcaacaaaaataaccctccttggaggaaaaggcaccaagctttatcagggagagatcataatgaggaccacccctccgtaatctacatggccgaatatctccacacccttgacacccactttgatgaccttttctcccattgcacccacctaaactcctgggtagaaagcctagagcaacgaatcaaggaactgaaggaagagaatgcagcccg

SEQ ID NO: 130883 - DNA, 584 bp, Zea Mays
tctgccgctttgtgttgaagtcagcgctggacccccagtgatcatatgaatgactccgcgatacggctgatcggcgaagtcctcttgctttggggcgtgggggtggtggatgttttgttgttgctgttgtggaggtgggggtggggaggtacgatttgtacctcctggtggtgctggtatgcgtggtgcggtggatgcggagcggggccgtggatgtatggcggaggggttgctgatatgtgtgcgcgacaactctagggttgtcggctggctgcgcccgtgccatcctgtctctggtggccttcgtctcggggcagtctctggtagggtgggcgcagtcttcgccgtggaacaggcagtaaaatctgcgcggctgctgcacgcgtccctggccccgaccacgagttccgttcccgcggccctgggggggatactcctggcggcgaggggcctcgccagcggggtgctggttggcaatgttgtgcacctgctgctgattgcggccgtcccgaccggagtctggctacgaaggccgcgtccatgtgcggctggactgtggagtgtctttgggtttcctctgagac

SEQ ID NO: 130884 - DNA, 857 bp, Zea Mays
gcgcgattcttcaggctccgatagatcctcgccgccatggactcgttccccgccccttaaagatgaccaccgctcctttcccctcgcatctccatagtaacctaagtactcgaaacatagagaaggcgtgggagagagtgagtgcggtgtgtggcttcgccgccgtcgctgccccaggccgtgctggtgtgtcagcctagagtgtcgctcgggtttctacactaagctagagcgaagccatccgtggcgttggtgggcggagtcgacgactacgcgccccttgattgctcgtcggtgtgcgcatcagggcggaattaccacctcaccgtgaatggctctccgagcatcgttcctgtctctagtaagtgtttcatcgcatacgccttgttctcctttgcgcgaaatcctagcgggattggtgaatcatccggtggccggccagggtcggatgtcgccggtgggttacgccgcgtccaggtgtatagcgccgccgcgtttggactcaggtggaagaaggccctaggggcgttgatctgttgtgggacggctaggattagcccgcggtaccgttcggctgagttaacctgggacgttggattcggatccggcgtgcgcgagtcgatctgggtatggtggaatctggggcacccaccttgaatccgacgaccaggatcgggctcgggcgtgggcagatctcggccatggatcccggatcctagggtcgtgagtgaaagtagtataatggtccaggtcaaactaatccgggccgtccgtgcatgatcggacgtctgtggaaccgccataccccttcattgggttgatttgcgtctgaacccttgttctttttgtaaatcaac

SEQ ID NO: 130885 - DNA, 1066 bp, Zea Mays
gtatcgaccatgaaaggtttggtacaagtctgaaaaagtatacattgttgtcaatcgctatcatatttactgctgtcgcgatgtgtagtagccagtaggctgaccggtcactgatgtgcgtcatggctagatgcacccttcgctgtatgaatagtcgccaacatgggcagcacgtagtgatgtagccatgtaggtccgctgatgcccgaaggagttaattaggagcacaacaagtagtttggtggtttccttttctctgtcacgatgaccacggcgccagggctccgaatcatcgctgcgtcggttgcgcaatttgctcgggcgccgttcgccacttgccacttcccccctgccgtggactctgtgaactccgagtgagggcagggcatggtgcggtggtgtcgttttctgttctttttctgatactgctagaaacaagagaattcccttaggataggcaattcgatggcgagaggcagcagcagtgctgcaggagccaacatcatctactgctaggtacgtgtcatcacacggggaagggaagggacgatctgtaaagcctgaagcggcggtaccggcagggcaagcagcagcgaagacgcagctgcccgttctcgtgctgtagtaagagtcaaactgggaggattcgttacgtgcgagcccaaccagccgtcatttcgctgcagccaccggaagtcgaagccgtcgctatcctcctgctggatctggaggctggaggagcgagcgagcgcgctccatctccattgagcggggcccgtcaaagttggacgagtggtgcccgagacctggctgaggagtgaggctgagcaccggccaggggggcggccaagagagacgtgtgacaggctgacagctgatggcaacaacaccgagaagtatacccgccgaggctgaagctgaaggcggaagggtccacgctggccgcccaatttgcgacggcgacgcccacggcccgcgggctattctcggacagcgaggccccgacgcaacaggccgggtcgttgaaggggatctgtgccgatgtcgtgcctgcccactcctgctg

SEQ ID NO: 130886 - DNA, 485 bp, Zea Mays
tctatatttgattcattaattgactctagggagccaagacatcaaggtcgagcatctatatcatcgtcctcacaaatgtctcattctagcacctctgcactggacatgaagaatgttaggctgcatgaagctttgaggcaacatccggagtatcagaggcaacaagctaagcaccaaatacagttgaacaagtaatatgcgaatctatgggtccaagaatagtctttcctttcaataagttgaactaatatgtcattcataacaacgacaagattgtgtcatttcatacatcataaatagtgacttgcatctaattcgtagcaagttgcacaatgaatgggcatcttgatgctagcgttttggatgcttcctctagcttttgcactactgcatccacctctgctacaatttacgtggcttaatccacaacaggtatttgtttatatgtatattcgtgagttttacaaatacagaacctagtgtcg

SEQ ID NO: 130887 - DNA, 575 bp, Zea Mays
tgatgatcgtcgtcttatgcgcgtccaggaggccaaggttggcctttttggtctactcggttgcctgcatggccgggattggagtcacttctgaggacaggatcgggagatcgtccttcgggagtgtattcgcctctgctatcaactgcttctatactaccgaggtgctagaagtgagagccgattggatagtgcctcgatagcactccgccgaggctaggaagtcggccttcatggtgatgatgccttgcgggcctagcatcttgagcattatgtatttgtaatgggggacggacatgaatttggcaagccctggttcccaatgatggcatgtaggcatagttgaaccgagcaacctcgaagcggaggaactaagtgtggcagttgtcaggcatgtcgaacgtcacgtgtagggaggtgtgacctagggggtattccccctcggataggacgatgctgaagaatgagcgtctgactcatgaaggtcagtgatggaggtcccgagcgtctcgatcacctccgtttcggcaatgtcgaggactcatgattgttgttcttgatagacttaaggtccc

SEQ ID NO: 130888 - DNA, 358 bp, Zea Mays
cggcactttaaccacactgttgtgactcatgttagcctatctggtgatcgccggtgagcttgccacggtaattgccaccaatcgcgtgcgccagtgcccctcctcttctccggccgccgcgcgtctccttcaaattcactggccactgctctagggacctataaattgagcacgccatgagctccgtagggtaattacccatccaaagcactagcacttgcctccaattgttcaccagagaccacgaattgctcatctcccccaaatcgggtttccgccaccgtgaaaaggtcctcgccgtggctagctcgattcaggtccaatcttgtcctctgctctcttgtttcagcactcttgc

SEQ ID NO: 130889 - DNA, 495 bp, Zea Mays
gcggaggggatggatccgacggtggggacatgaactattgagctcgtggaaggggaagagatagacaatgttttaacgaatttaacgatagtgatgtctgaaccaaccgatgagtttggttctttatttacatttttgtcttggagttgcaaactacaaattcgatcgcacaagtttatagtgcttgcaaggtacgcagaagaaccattcgttcagataaagatcttggttagatgtcagtgcagatggtacctcgtcatgaagaatcgatcctatatttcgttgtgtagaaggaatcatcgctcaatccactaccatggtcaagttgggggaaagagcacactgaatcaatgacaagagtgacctcatcatatagcgatttgtttggcgtcattgtctatatcttggccaaatccaaagttgaatgtttattcaatatttaagaagcataactgttttactgagacaaccacgttggcatttggaaaatataaa

SEQ ID NO: 130890 - DNA, 271 bp, Zea Mays
agatgatgccatgcttggtgctgatgctacggtgaaccttcgaagcatcatggggcagcgtgttcttagttctcagcctgaatcatcagagaagcagcaacgccataatttgttccagactttctttgccatcgagaatcggtgtgcacgtgttattattgatggtggaagctgcaataatttggtgagttcagatttggtcaagaagcttggcctgaccacacgtccacatccacatccataccacattcagtggatcaatgactcaggc

SEQ ID NO: 130891 - DNA, 362 bp, Zea Mays
tttatactttgtgccattaccgatccaacataatgacacatatagtgtctacctttcatgttatcttcatggtatatcgacactatacttcctccccctcatccttaggtgctaatagatctagatctacataaatgaccgatcaatcagtggtattttcattatacacatttctatattgaaaccctttcagcatgataaggtaggtttcgaacattcattcaagtatgcctcaagctatatgcttaggccgaggcttgctcatacttcaagtatatttgctttcttttcatcattctttcaatgcttatggtaacttttcgaagttacactatgcttaattctatttgcctttcctagga

SEQ ID NO: 130892 - DNA, 607 bp, Zea Mays
tcttggtccctaactattgtggcacccacaaccctggtttctagagggtctttctttctttgatactggaagtcagcttgtgattcagtcatggccacaaccccaataggacacttctaatagttctacatcaggataacattttaagtctcgacaccaagcaacacattgatgaggttacaatactttgtgaacttgttattatggtaccactgctgaagaaccgtgtttgaggagtagaagttctagagagttttcttaatcatctaaaggtatgtaactatctagctatagaagtacagttgagcaacaatatagtggatgatagtgttattagactccactgtcttgaagtcgaggaagcgatggcccattcttgttgcggctacataaacatcacatgcctctatacaccaaaccttatatgcaacttcatctatggtaccagagtgtctttcacctccaaataccccattttcaaatttgggtggatgtggtgtctgatgaagatgacaacttttaccttctcgtgaagttgtaggccaatgtcatcattcagttctagccaaacaattgttttttcaatggcatcgcctccagaggaaat

SEQ ID NO: 130893 - DNA, 1352 bp, Zea Mays
caaggtcccgctgctcgctggttccaatccattgagcggaaactcatccatctctcctggtccagattttgtgccctccttgacgatcgttttggccgcgatgagcatgccattatgatccgcaaactattccacattcgccaaacccaatcagtagcggagtacatagctgaattttctgaactggttgataacctccatgcttatgagtcggccccagatcccctatattacaccactcgtttcattgacggccttaagggtccgatccgctctgctgttcttcttcagcgccctcccgatttcgatactgcctgcgtgcttgcttctctgcaggaagaggagacggaaactgaagcagctcgaaaatcggagttcaaacgcccatattattcagcagctcgactagaatcccccaatgcaatgaagccagcattccgaggtgcctttccattgccggcaccaccccaagcaacagatgacaagactcccttgccgatcaacaaatacaatcaatcagctgctgataaaatggaggctgtccgaaattaccgtatggccaaggggctgtgtaaagtctgcgcagaaaaatggcacaaggggcataaatgttcaactgcagttcagttacacgccgtgcaagagctttgggatatctaccagcatgaggacacaaattcaccccaagtggacgaggactcttcttctcaactttatatgacactatcctcagcagcttacacaggatcagttgctccgaagactgtgaaatttctgggcccagtgcagtctcagcaggccttaatattggttgacagtggcagtactcactccttcatcagttctgccctcgccgagtcattgcagggactatccccactaaccactacactcaaggttgctgttgctaacggcaattctctacattgttccactcagttggctggctgcaattggtccacacagggcgtcaccttccaaacagacttcaaagttatcccccttcaatattatgacatcatcgtgggtatggattggcttgaaaatttcagccccatggagatacactggaagaacaagtggatgctgctaccttataacaataccaaggttttgctgcagggcaatcttccagagcaccctccgcatacagtagtccaactccttccactcacagttgcttgttttgctgttgatttttcacaatttcctgaagacctgcaagcagttctatcagaattcagtgatctgtttcaacaacccgaagggctaccccccagtcgagcctgcgaccatgccattccacttattccgggagccagaccagtgtctattcggccataccgttaccc

SEQ ID NO: 130894 - DNA, 1134 bp, Zea Mays
gcttcccatgggcagatttccccaccgctcggcccagcctcgcacctctgccctgggcctaatgggccaaatatacaaccgcgcgacccacttaagccactcgcctggctgagcttcagacgactgtagtggtgtgtcaccgccaggcgggacccacccgtcagaccgccctcacacgcgtcacccaagcctctgttattgggccccacccgccgggaccttcctctacctgaagccgatctccgaccgaatcgcaccgaacccgtccttaatcatcggagatccatcaccggctaaatccttatccgcccagtctgggaatataaaacccgaggcccccgccgtccattgccctcaggctgggtcactagatgaaacccatgagcatcccgctagaagcatgcagataggacagaggtagtgagagaaagagaggttgtcgccgcctggaatcgcttgggcgtcgtcgtccagacctcgagaaccagccgggggacttcgccgaggcacggcggggatggccacagatccagtacgagagatgggagatggttatgccgtcgccgtgtgcgttatcatgccgcggtcgccatgtgtcatggatgaagctcctgcacacgtaaaccacggtgagcccaccatctaattcgcgatcgcctctgcatcgttttgcgtcagcgcttatggtgaatcggtcgctgggggggggaatcagctcgggtggctccgaaagtggctccgccgttggcgatgccgccgggactggttgaccagaagttgggagaaggccactggtcgttgatctcctgctgacggccacaattagaagttggttatcatttcacccaggcgatcggtgaccatggatctccgttgggtcagccggcgttgatcgccgccgcgagcggggcctcactgtcgcggtggatagaggatagaggaaagaggaagacgggtccctggccgtaggattgagatggacggctgggattaaaagtagcatttaccccttcgcgtattgaatccaagcctttggcgcctgatcgagtggggggtttgaaatcgtctggaaccgtggatgccgcatctaagggttgtgggtgattcctgttcactttaggggggatctaatcc

SEQ ID NO: 130895 - DNA, 1040 bp, Zea Mays
ctgaaacgaagcatacacaaagcacgttagtcatccatcgcatcaccaggacccatgatctgtctccccactccagaacttgcagcccgcaccagaagtctcgctccctcctgaagaagatcctgcagttcttttttgctaagtcctgcccaagacgagatcaaagcaccaatgtgacaaataatctcattaggggatttaatcagaatctcatcaaaacacattttatttctggctttccatatcgcccaacagatagcagatattagcacaacatgcgtaattttattgatcttaagatggtaatgaagccatacaaaacattgatcaatatttccaggaatataattcgtgttaaggcatttcgcaaccacaccccagataaccttagcaaccgagcatctaaagaaaaggtgatcaatagtttcatcctgtgaacaaaaactgcaagtctggtcacctttccactttcttttaatcatgttatctctggttaaaagggctttgttttcaagtaaccacatgaaaatttaatttttgggggggattttggctttccagatatgttgcatgttagggccagagatgtttgtttgacaaactgttatacattgatttaaccgtaaaggttttcttccctccccatttccactgaacagtatcaggaaaatcttgaaactcgaagttctcacaattaccgcaaagtgatatccatcgaatctcattttcattatttagccatcttctgaaggacagttgccaattttttattcttgcatctttaactagaataaacttgtcatcacaaatctcatataattcgggatcaattgtacataaaggcctctcatttacccagctgtctagccagaatctggacttatctccacacttagttgtgatttgtctacctttcaggtagaaagctctgattttcatcaagtctttccatacaggggagtcgagtttctcacttttatattgtataagtcttttccatggaagtatttcttgacaattgtcttttgccaaagaatcga

SEQ ID NO: 130896 - DNA, 444 bp, Zea Mays
aaaaatcatgcagcacctcctgtttttgctcatgagatgtgaccactctctccccatccagtaagctacatatatgatttcttttcctgcggcagcaggcctgcatatggaagaaggaagtgttggcatctccatatttcagatactgaacttgagatctgagtcttgcaacagttctctccagggaagcaaggaccaggcactgttgcttgagttttcttaacagccataactcatctggggataacaccctgctgtcttgagccatttccagcctgtgtaaaatctctcttgctaaacccaattgaattttaatgttgcccactgttttgtgcccccaagactgcagggctctggttagtacgtatattatttgttcagcattaaaactttattctttggagttcgaagacagttttgcctcttgacgttaattttctttca

SEQ ID NO: 130897 - DNA, 377 bp, Zea Mays
gatgggtcaagaggcatttggtttagttatttgcaattaaagccttcatatcattgctgtgtcttatggttccatttcaaggcacaccgttgcttgctttgcacctactttgatttatcaggaaaaatttgaatgtttattacattctcattggacatttgttactgtttggttgcgactttgcttagcaattttcctcaggaatcttgtgtttcctatgcgttatggtcctagacttatggatattctaatttatttaggctgattggaagaagtgcatttctcattagatgattctttctgttcagctagatttcccgttccatattagcacattgcttattttgattctttcagttcagttcattttcttgttc

SEQ ID NO: 130898 - DNA, 512 bp, Zea Mays
gcgattctcacctaattcgcggtgcagaggcactgaccacggcgaggcgcgggtgagcgactgggctgtgctccggtgagcaattgccccagccaccggccaccccgagctgcgcaccaacccagagaagattccccgcatgcttgcgacgccccagaaccacctcatttgtgcagaagggcagcgccggcgagttaagggtgtggcggatctcttccccttcatcttggtcagcggcgatggcaagtggatgtggaggaaaggcacgagagtgggcatggcgagcagcaaggaagaagccctgatagggaaggaggctcgtccatggagggagctccgcggctggttgttgagatccgcccgcgagcccgatccatggcggctgggttctgggcgcacagcagaggggaaaggcgctggtcaaagcggacgcggacgcctgggtcttataacccaatggtcgggcatccgaacggaaccggggagatcgcggaggtggctgagctcgcgcc

SEQ ID NO: 130899 - DNA, 505 bp, Zea Mays
aaattattgctcttgcaaaactatcttaccctatgtctctaacccaaatggttaatagcaggaggggaggaggtgtcaatctacctgtacgtattcgtcgaagaagggcagtagctaatccagaacaaaaaatgaatcctcctctgaatcccacctactaggactgatgtcgtggttgcagctcaaatgcgactactacaacaaatggccaacacgatggcagaattacaagctcagctccgcgaagaccgacaacagccaccacctccaccaccgccagctccacctagggataagcatcgtgaattcatgagccacaaacctcccacattttatagctctccggacccactacaagctgacaattggctgaagtcagtagaaaagatgctcaacatagcacagtgcaccgatagggagaaagtactctatgcatcgggtcgcctcaccggccctgctgcggattggtgggatgcatattgcgctgctcacgccactgctgaca

SEQ ID NO: 130900 - DNA, 808 bp, Zea Mays
gccgaatggtggtagagctcgacacagtcatggagaactgggttcatgacgcggtcaaaggccacgaacgtgccaaggagaaattggtcgtcgtgaagggagacatggacacgataggaaggcaaatggacgacaacagagcgaaggacgagcgtcaagggagcagacatagggaggctccacggtgtcagatgaagggaacgttcgggagccgcgtggtggaccgcaacgtggcagggggagcccgagaagatcgcccctagtggcccgcgtcgactgaggggcctggtgggggcaccacgttgggggaagagaaggcgttaacgcaacgatagtcactagcgtaggaggatgcgccgaagctgcatacgctgggacggcggcggctcgcacgggcttatcagggaccaacactatggcgtcgtggacatcatgacgatcgttgaggcagaggttgatggaataagtcttgtaggcgttgtgaaggacatcacgtggtgaacaacagtttggacagcagctttgctgcagccttgactgtgctttagcatctaaggacagcatgggggactgcagtttggacagcagctttgctgcagcctcaactgtgctttagcatctaaggatagcatggaggactgcagtttggatagcagctttgctgcaaccttgactgtgctttagcatctaaggacaacatgtggaggactgcagtttggacagcagttaggacaacaaccctgctgcagttttttactgtgctttagcatgtaaggacaacatctaggatagacctttaacatttgta

SEQ ID NO: 130901 - DNA, 605 bp, Zea Mays
ggctacttcaggtaaaactttatgcacgaggagagaacagagatttaacttatctgtgtttcattttatttcgatttaatttcccagatttaatatagttgttatggccacttggcgatatatataaatatacgatgccacacaacacaatcaaacaaaatatagagcgaaaacaaaaatgtttacgaaggttccacataatgtgacttcaggaccttgaacaatccaccataatccatacgaatacaagctcaagcgtatccggcgttaatgcgtgtgcagccattagggctaggacaacacaacaagccttcataataagtgcaacaggcacaattatggctcggtaattgggtacacgataaatccacgcaacgtgcgcaacaagcgcaattgtggctgaattgttgcgacacacatgcaatgccttcagggcccacgaaaaatgtgactcgaggatggcggtctgactcaacgggagcgatccgattaagcgagagcgtgatatagcaatcacatgacgtagccaagttcgaacggcacaaatattgtgtcgtgttgccacggcgcagtcaatattcagctaatgccataactcagccgat

SEQ ID NO: 130902 - DNA, 578 bp, Zea Mays
cgctagaaggtatacaccataagatgtaagtggtttcccatgtttcagaaggaatactctatagttcacatcaacattactaaactaccaaaaatgcactatttgtaactcacctattatgtaatgcatgaccatgtatattttgtaatgatcatggtcatccatatcactctacatatgtatgtgtaatacagtatatgtatgactatatgttaatgttaagtatttaatttccacgcgtacgctggcgcacgccattgactagtattctttttgattctcttgtgttcctcatgaacgtgaatgatttcgcaatgcaacaaccatggtgtgtgctaccaagggagtgggagtgctaattttctcggatccatctttgtagactagtaatataatccacctcaattcgaaggtgaccttgattctcattgtctcatctcctatctcatcctatattttaaacttcattctgtaaacagtaccaaacaatataatatcatctacagttccgtgtcctcgtattttacattatcctccgaacattaaggactcattttccacaagccgcttcagtccca

SEQ ID NO: 130903 - DNA, 517 bp, Zea Mays
ctttcttaaaatacatgttttgtgggttaacactaagaaaatatttgtataaaaatggtaaataaataggtatcataaatcatagtatgcatgctggatttttgttgtgcatctaacctaaaagtttgaaatttaaacttggatttgaattgaaatagaaaatagggaaaaagaaaaaaaaagggaaaggactaaggaccgcatctgggccgatttccccaaacccaacccaattggtcactcccgcgcagccctctcctcaccttccctttggcgtctatgacatgtgggccccacactgtcagctctatctcccttatcgccatctccgcgaggctcaaacatacagccgttgatatcgcgtccagggcaacagaagcgcgcgctccctgcgcaacccacccagcatctccagttccgcctacaagccgatgacaggtgggcccatgacctcagcttcgctctcatcccgcgcagtctcgcgttgtacgtctgccgcgtgggccacatctgtcag

SEQ ID NO: 130904 - DNA, 604 bp, Zea Mays
gctggatcgacagttcacgacgcggattaaaaggccgagccaaacgagccagtatcctattgatcaattcctagccgcccatcccgtgatctacgaccacgattttaaattacaagatttagcagtacgcgtttgatctcagatcgacgacccgcgtccatccaggccgaaatagtacaccattgatttaatctagatcgttgatttcttgatccacaaccatgacttcttcttctacctcccgactcggctgggcaacgacgcctcgcctcagggcaatgtccccaccggaaccagacgaagggcccccggacgcttgcaacacggcgacaggggatggcagccccccaagcaaactcccacagcaagcccccaaaaccaaaacccaccgctgctaaattatgcatgggacatggtgattatgagggggggtccataccagggatgatcagaacgatgcggctgaccacggtctagcggaaatcatcgacattcaaacgacacccagagctgtgatccttctctagcctccgaatttgacggtcccagctagcttctgccacggtttggtgatgtcgaatccctcccctcgctcagttcttca

SEQ ID NO: 130905 - DNA, 450 bp, Zea Mays
attgctccttgccagtagccttcgtctcacacagcagctcgtgcatgttgcaagagcattttgtgcttggctctagcccctggcttctcacagcccgaatgaaaacccccatcctgataatggcttcaggggtaatttgatgaaggaaaatttcgaaggtcttcagcgctccaaccaggaatttgcttaatgggaaccgaagccctgccttcatgaagctcctgtaaacaaccacctcatcttcttcgggagcaggtgcggcactgtcccctccagctctcacaattgaaatatctcggaaatatctccatttcatagcgtcaatttgactctgcttaatggatgattttccgaagatagtgtgacttggtcgccagggccgattttccgcatcttcgtcttcactttccatatcaaagcttccactatcttcagaatattcagacaaac

SEQ ID NO: 130906 - DNA, 468 bp, Zea Mays
aaaaaggaaggtgggcgtctctgtggcctacggtcaccttacaaccacaccatggctcagaggatgacaagcggagtaggagcatcaccgtgatacatcgaagccgaggttagtgctcggtgtcgcgatggtcgattgtgggttgacgaattcttcaccggagatctatggtgccgccaaatccgcccctcgccatggattaaagccgctaccgcatgacgataggtgaagcaagccctgttatgttcgcggaactccctgtttgcgtaggaccttcgagataggggggatcgacgacagagggacaacgttggcgagtcgtcgaccatgaacaccattatgggccgccgtgcgccggggtgagggctctgcattgcacgaatcatggtaatgattccccgaaccaactcacctgtcccactacatcgtgcagcacctaccggggttaagtagagggcactagggccg

SEQ ID NO: 130907 - DNA, 642 bp, Zea Mays
agaagttcgagatctatcttcatcaacttaccccaaacgctatagctagactcaacgtatacatatgggctctccaaagccaagggaagagtgccaacgctgaaggtttttgctgggtgcatgaactccactaccagactaaggctagagctgacgggctgcataagaacttcggatgttacaactttgcataccgaaaggatactaaggcacatgtgattggctatcgcaccaaatggccgactggctggacagaatggttttacgtaaagaccgacgagaagaagagagagaagcttatgactatggtgatgagtcccctgagaatgagctttggcatgacatggccactgtgcaatatgcaactcgggtccccctgccagttagccgaagtggaatagagtcatggcggagcatattagtactcgggatttggtgcaagaatacctggccaacaaaacatttccaacatctggtggtggggtatgccgaagaaaaaggaagaagggaataaatacgaacttgtatgacttccctatcggtttaaatttcagacaagattcggcaaaccctgtgccgaatggttggaattaatagaaacattgtgcaatgagattcttgggaattacacgaagaaggaag

SEQ ID NO: 130908 - DNA, 280 bp, Zea Mays
tatgaatgaggtggttggagggtatttatagccccaaccactttcatagccgttggtgaaggctgctggcgatggacgcaccagacagtcactgtgcactgtccggcgcacgccgcgtcagcgcatccgttagggtttggagcaattgaccgttggaatgccttgtcatcttgctgcaccagatagtccggtgccacaccggacagttcgatgccctctgacttctgcgctctgacttcttccgcggtactgtttatcactgtagctctacacagtcgac

SEQ ID NO: 130909 - DNA, 316 bp, Zea Mays
tgtccatcgcagagtgtacgaccaccatccaagcggtatcctaattctaattcggacctatcatcccaggatcaacggcccacgtcgaccattgccagatccgatcagagccgtaaattccaagatccaacgatcatgaatttatgcaaacgggatgtaatcttatccaccggtgatcaaatcaatgactcaaatttggttacccctagatctaatccagtgcgcacaacatggatctaatgaccggagggcttcttccccaacccggcagaatgcggtggcgcgccccagcgctacggcggcaacttggccggcc

SEQ ID NO: 130910 - DNA, 464 bp, Zea Mays
gtcccaattcttcccatagtgcaacacacatgccctcaacatgtcctcgagaatgtgattcactctctttgtctgaccatctgtctgaggatggtatgctgagctcctaatcacagtggttccaagtgacttttggagctgctcccaaaagcgtgccacaaacagtgcccctctatcagatacaatagttctcggaattccatgcaaacacactatttagtcaacatagatttctgcatatttctctgtcttgtgggtggtatgcactggcaagaaatgagctgtcttagtcaacctatccacaatgacccaaatagaatcgtggtgccgggaggtattgggcaatcctacaataaaatccatgcagatatcctcccatttccaagatggtatgagaaggggctgtaaggtgcctgctaccttcaaatgactggccttgactatttggcaagtgtcgaattcag

SEQ ID NO: 130911 - DNA, 386 bp, Zea Mays
ctcccttcgtggccccttccccttcgcccatgcgcccaatgattcatcaacattttcatcaccatcctcagggtaagggccataatacaagccatttagcttgaagaccctgttaagacgaatgttggagccccaaatgtccacactctttgggagctcaactttcttggcatattttccaaaaaccttaattgccttggcctcaacctcattgacgaaggttgccccatccctcctgtccaagctaacaacaaaggctgggctcaacaccacaatctctcgcttaataatcttgctcttaagcgacaaaacccttcgcaccacctcctccagtatccaaccatggctcagtggccacaccccataggcgacgaactccttcacca

SEQ ID NO: 130912 - DNA, 368 bp, Zea Mays
ccggttcaaggacaacatctgttacttcaacggttcgattgggaacccgaagacacttcttcaattgggacacgtggaacacactatgaacaacagacaatgtttcgggtaactggagtcggtatgccaatggcccatatctttcaagtataggaaatggaccaatgtaccggggtgcaagctttccttttatcccaaaacgcgatactcccttcattggtgaaaccttcaagtagacgtagtcccctttaagaaaatacaagggccttcgccgtttgtctgcatagctcttctgccgagcttgggctttcttcagattatgaataattttctgaaccttttcctcggcctccttcactatatcaggc

SEQ ID NO: 130913 - DNA, 539 bp, Zea Mays
ttgaaatctttcatactctcatcttttttatgcttacctttatatcccaaggcctgattaacacatttcagttaacttgcccttgaccaccctttgtttcttaatcatccaggaatggtcgttctattttgcacatccttggaaatcccgttgttgccttgtaacttccctcggtaatgaattttttatttgaactcttctgttggaacctcacttatcttatcttttattgttttctccacttcgtcagtcttgccttaactctatccttggttatgcttttcatgatcatcatctttacccttgtcacctctatatcttaccttgatgcttatattatacctgtccaaaaaaaccttttctccttcgtctcaatcttatagttgtattttacctatttgcccttggtcgtattctcttccttgtcgcttgcgagttttcaactccatcctttgttgcttgttactaccttcaccttcattgtccctccatcttaccttgatgactatcttatgtatgttatttaaaatcaatctccc

SEQ ID NO: 130914 - DNA, 420 bp, Zea Mays
agctagctgttggtgggcaattggcacactacacgatcactcaaggtgttattcggttcaaaggaaggatttggctgggcagtaaccaagagatgcatcagaaggtgatgtcggcattacacgatagtgtagttggaggtcattctggatttccggttacctacagaaggattaaatctaattttgcctggccaggcatgaagcgccacgtccgtgaatttgttcaagggtgtcagatctgtcaacaagctaaaccggaaagggttaagtacccaggattactattaccgcttccggttccgaaacaagcatggcaaacggttagtcttgattttatttccggacttcctccaacaagcaaaggaaattgtattctggtggttgtggacaagctatccaagtatgctcactttatggttt

SEQ ID NO: 130915 - DNA, 518 bp, Zea Mays
tgtcgtataataaagtcaatatcctcggacagtgcttcgggaacaggagattaagctttttccgccacatcctactccagagtcatgccagcatccggagattcttgcttagccttatcctcagttgcagcaggctttgtcttagtaagcactgaaggcccagcttcggcttcagcctgggccgtagcatcttcggcaactttcttcgcaagggcaggagttaatgcctttgtggtttccatgacagcgtctagtactctagccattcttctcctcttgggagttgtggcgggagcttttacaaccttcgacaattctgcttctaccggtgggctcagaatttctggcaaaactattgttttttcaaactctggatttttggtcgccccatcttcggcttcgactagctcaactataggcaccttcagcaccatagtcgattccttagcgctccgagcggtgggagcagcttgttccgctttggcagcggaagatgtctcttcaccaaattttggcac

SEQ ID NO: 130916 - DNA, 728 bp, Zea Mays
caggtgtaaagggcgcgcagcgaaggggtatccgacgatctaggccgttggattataagccgagcgcccagattaaaccacaacccccgtgaaccggtatgacatcgagaccacaagatcaaggatcaacggccctagttttatgaacctagatcgaagcgtgcgcgtttgattcaaaacgaacgttcctgatcatcctattgactcggtatcctgcgatcagatcacagccgttcatctcgtatcgacggtcagagagccttcgccttcctccggcgctggctcatggggcgcaagacaccgcacggcggcgcgcgcgccggagatcacaaacccggcccatacgaacgccataacccgattcactcgtcccacgcacaattgacgactctccgaactcactgctgcaaataatttcggccgatgtcaagtgtagagccctgcctatggcgcagcccaaatccacggtggagcgtcgacgacgcatgccacacttcgctcattgaggtttgattactaaaattgacaggcacaacgtgaagtgtatagcattgcgagtgttgaggaggtattattaccggcaatgaagtcatgtagccccctgatgacggtagagcggcggagcggcaagagacacggagagagtacagagagggcgaggcccaggaggacgtcagtgcatcatcggccaagtcgatagagggaaaggggtgggtacgtggccggat

SEQ ID NO: 130917 - DNA, 389 bp, Zea Mays
aggggaggttctggtggctatgactaccttggtttaccctccaatggttgtgccaggtcaggtgtggcagccatgtctaaattcgttgcatctaatgcaagcgatggatgaggagcttcctctaatgtcacatatatggcctcattatcggctgaattttgcaatacatgtgggtttgcagtctgcaccagaggtagagagggaggttgtagttgtgttaactttaaattttcaaaccccgaaagttaggtacaaacaataaaaaagcaaatttcttgttccataacgcacaagataatcatgaatgcaacatatgcaactgcttaatcactaagatacaccaagtattgtgggtgccaacgtgacataaattatttaataaaatgtta

SEQ ID NO: 130918 - DNA, 465 bp, Zea Mays
ctcgacgtggcacatatgctaacgctaggatgagacaaccgaggtagaaggggcgaatgacattgcaccatggaactcgcttaacactggcctatcagggggctcacagacaaacccattgtgtcctgttgttcaatgccctaggttcaatgtctccataacttgaatggtgtgggttgatgtttggaacgatagctgcgatgacatcttaaatgttgccatgacagagctaggttcatactctagatcccaattaggtggacaactttgattatgttggagcgcttgcatgtctctaggtggcacatggttgggggtggcacgctcgttggaagaagggttggcaataatggcatgatatcctcttatctatatgtgggtgtgagatctcggttcttagtgctgacatcacacatcaatgattagttagtgctgagcccaataaatcaagtgttgcttggatgt

SEQ ID NO: 130919 - DNA, 547 bp, Zea Mays
tttgagctcgattttgaaggggatccagtgactttttgtgagtacacattatagcaaagatatagatggattatagcactacaactttgctataggtcactgggtgtgttgccatttgaaaatcagagaaaaagaagcttaaacattgcctgtcggacactctgaacaagttcctcgatggtacagtgcacagattaggacgccagcgcggacagctcgacgccggtgaccctccgccgcgattcgtgctgccgccgtttcgattcgtgctcgggttggtcggatagcacccagtgacctgtcgccgtggataagcccggtcagtaaactattccggctagtcgccgtacctccctccccttgctcatcggtcactcggatagatttccgccgtcgttgagccatcactgtcgcccgccgcgtgtccagacactttaccacgtcgcggctaaccgtgctacacatatccggtgatcgccggaggtgccgccacggtaaaagccacgttgcgcggccaccagtgactcacccttcgtctcggccgccg

SEQ ID NO: 130920 - DNA, 598 bp, Zea Mays
ccgacccccaaatgctgaggacaaagcatcatcttcggctctggtatacgctccaagtaactcgtcgctagtaacctcaatacatttcagccactcgtcatttggctcgtcaaacctgtctctgtatctgaaggtatatttcaaacgaattaatccaccttcgctggacccggcaacagtctccttcagcatttcccagttgttcacaagtggccatactctataggctatgtgctcttggatcaggtctcttgtaccaatgaaagcataggcattactgaaagccttttgacatgcttcgacatcattatcaatcgccacagtcggccttcgaaggctgaagcgagaccagatggggcgttggatgatccccttgatgtcatccctttcaatcagattattcttaacatagaaccactcctccatctaggacccaggccacctcttccgaaatgttggaatcgggtaatttgcattagagcgagcaatgaatccataacaaacgaagttgttgtgatactgctctttgccagtggccttcgtctcgtacaacagttcatgcatactgcaaaaacacttcacgctcggttccagccct

SEQ ID NO: 130921 - DNA, 633 bp, Zea Mays
gggtaagaaatatcgcattgaggatgaacttaggtcactgttccggtccggccgccgtgtccgcctgactcacggccggttaagataagctcgccggagttggccacctattgatcggttgccacgtgcctaggtactctaccacgtcgcagtagcatgccttggcatgtccgttcatcgccggtaaccttgccgcggtgaaagccacgcacctcttgcaccagtgctctcccctctcttcggatgccagcgcgccatgcaaaattcaagagccaccgccctcgggtcctataaattgagcatgccatcagctccgctaggtagtcaagcatccagcgcacctactcgtgtctcggattgtccactagagagctctaatttgagattccccccaaatcggtcaagaagccgtagtgtgagagctcgccatggccagctctccacaggtccgatcatgccctcctcgctcttgttttagcatccctgtgtgcttgtgatgcttctcgacccggccaattgagctagaacacgttggatcaccgagaacgcctggatttgtccgttgatcgagctatcaccgttggcagagagattaggggctagaaccttgaaattggttgaggggtaatggtc

SEQ ID NO: 130922 - DNA, 488 bp, Zea Mays
ccaagctctgtcgcgtcaacgggaaataaggtcccttatccagttgatgacataacaaggccagtgacgtgcacactagttataagatatggtattaacaataatcgcatgaagaaagtaggaataggcattgcgatcccaagatgcaagtttcatggaagcgacataccagatgattattgcaaggtagaagtgacgacggtcgtccaaggatccgaggacgacatgctagacatccctaggcccgaaggaatcaagacacttggacaagccatcaaaaaattcatcatttggcctcgaagggatgtcgaattggttgatctgccaacgtcgtcgtcgtatcatctccaaccatctccgcctcgtcaaactttagtacctgtacatccatcatcacctctacaatcttctcatgctgctcctcatcctctttctaatccaccgtctccgccacaagcatcaacatttaggacaccaccaccttctcc

SEQ ID NO: 130923 - DNA, 550 bp, Zea Mays
caaggagaccctagctgcatattaccgtgctcatgagcttctccctcttcttcttatcagccttcacataaaaccactcattcgtccacccggtcggtcatttagtctggtagccaatcatgggagccttggtatccttttggtatgcaaaattgtagcacccgaagttcttgtgcagaccatcggccctagccttcgtctaattatgaagttcgtgcactcgacagaacccttcaacattggcactttttccttggcttcgaagagcccaaacatacaccctaagtctaacaatggcattgggggtcagttgatgtaggtaaattttgaacttcttgaaaacctcaccgatcatctcataaaggggtaaccgaaatcctgcactgaagaagcttttgaagactataacttcatcctcttttggctctggaatcacctcatctccagcaaaacgaaccagttcgtcatcattttctccaaagtatcctagtttcttcattaaaactatatcctctgccttaactgtggatcttccgaattcgatatggct

SEQ ID NO: 130924 - DNA, 464 bp, Zea Mays
ggggaggccgagagcttcgaagaaatcttaagtgatcgtggggatgtctgtgcattttccggtgcacgggggatttcagctatcttggagaaggcgggatgtgatcacatcaagaccatggcccaagctgaagctgccttctccgcagacgacacgaaggatccttcagctgaagcaaccttgatgggcggaaaattctataatgatgtctaggtgaatggtgggcgagagatgactcacgaaattataaagaaaagtgaaaaggacactcttgacgcccggagagaagcgagacaagctgaagaagctgcagagcacgaaaaacgtatagataatatcttttgatattcagcttcggcattttgcttttgtggcttcggactaattaatttttcctacttcagctgaattatcccctccaccagaaccgttcgatcccctggccgatccagagacgaaggaag

SEQ ID NO: 130925 - DNA, 508 bp, Zea Mays
gcaaaactgctgtcatcagttccagtctggatgacaaataggaaagcgcgctcatccagtttctgcaagataaccgagacatattcgcatggcaacctgcggatatgccgggagtcccgagagaactggccgagcacaaattgaaggtctaccaccaggtgaggccgatctgacagaagttacgtcgcttcacgcccgacaagagagaagccatccgtgctgagctggctcgcttggtcgcggcagggttcattagagaggtgttacatcctgagtggctagctaatcctgttcttgtactcaaaaagaataaagtggattggcgcatgtgcgtcgactatacggatctcaacaaacactgtccgaaggatcccttcgggctccccaggatagaccaggtggtggattcaaccgatggatgttctatgttgtctttcttggattgctactctgggtatcatcagatcagtctagcaaaagaagacgaggaaaaaacagcattcatcac

SEQ ID NO: 130926 - DNA, 1049 bp, Zea Mays
gaaaaagagcgggggctttttgagaaaagggcgcgacgaaggggtatgcttgatcctggaccgcacgatagaaaatggatggcccagattagatcacccatcaagtgaaccggtatgcgacacagaccgttggatccccaagcagcggcccagatttaattacccgagattccatcgcgaccctcggatcctgatcaaacggcctcccgcccgagccgtggaggggatcctcatctaatctcaaccgttcccattagatccaaccgtcaactattagcgtaccagcgccagagccatagccgatggttccaagatcaacgaaccaggatcgatccatcgaaggatatgcctatatctaatcctagccgatcacagtgggacggacggctagatgcctcccattatcctcccccacgccaacaacagagcagaggcggcgccgcccagcccatgcgacggcgccatcgccggtgcacacgacacatcaccctggcgtgcgattcttcaatacaatgtgatcattacgaagtggaagcgatggcgaacacaacgaaagtgatcataccggcgaacatcgaggcgcagggacccatccacggtcgtggcggatctgcgacgatggggttgctccggtgagcgattccggagtcacgaacagcccaatccgccagaaggggccacggaaacgttcctccgtgccatggcaaagctcaccggcaaagcttggaggcccccacggcgaccgaacttcgatttccccctggcggccaaccttctctctctcagtctcttcctccgttctcagctgaccgcacggcgaggggggggtcacggctacctatatatgcgtcaaagggggagagtccgagaagggagggttggttgcaccatgcacggcggccgagcggagatccggtgaagacggcgcgaaaatcggccaaggaaacgcgttcagttggggaagacgcctgcagctagggcccatacgtcactgacctgaaatgcatctgcgcaaggatggaacgcgcctggcgcctgggcccgcgtgg

SEQ ID NO: 130927 - DNA, 497 bp, Zea Mays
ggagaaggagcatcgatcataggaggttcaatgtaggttgaggagcatcgatgaatagtcgatatagatacagaggaggacatgatatgtaagtataggttatagacttagggaatggagatgggaaggaacatcctcatttcgatgatgaacgtgagaaagaccatcgaagaaaacttgctttatactagtaggggtctcagaacattatggagattgctcgttgagcaagtcgatgaatgtatcaaagttcatattccacattggatccataataaaacataaagtggaaggttgcaggtagagaataaggcttgtgaattagagagtgacgggtgtgaatgcacccaaacacatccctatttatagggtgaatgagtattttttttaaattgttgaaatccaaatgtctaaagtggcaccaacatttcagaaaccaccatgtcaccacgagacggtcgatactgaccagacctagctagtaccgatctagactc

SEQ ID NO: 130928 - DNA, 596 bp, Zea Mays
gttcacgttaacggtcgtcatcgccggcgccgcgggtgttcttgtgcacgtacgcactctgatggtatttatgagcctggttggtgtgcctttggtagctaggtcagtggccgtgaggaggaaggaggatggatgaacaggagcgcagcgagccttcactcattctaagctttttcctgagggcaagaaaaatctaatcgttgtcgatttctttgtgatctgagtctgaccacggaggagagcaccaaatggcttggggtgaaggatcggacaaaggatctcggctctggcggagccaccacggcagcaccaccgtacccaccagtgaatgagtgaaagggtgatgggcatgtattgtacgtgctccgttccgttgcctttcggcgcgcggcacggtaacgcactgctttggcttggctacctcgcctacctgcttcactacaacgttttccgtttgtccaaccaattcgtgaattcgatcgatgtatatgatgggctgatggccagacttcaaaccctggctgcattgaactcacgtcttgtcgtcacggactaggtgccgtcaactgactgtgacaggaggcacgcactgcttt

SEQ ID NO: 130929 - DNA, 306 bp, Zea Mays
gtttggtgtcatatcctatttttattgttcttatacgatcacaaacttatttgcggaactggttgttaaacgagaagcgggggagaggacgatggaatggtagaacgatagaccctggtggtgtataggagtagagatggcatatggctcttgatgactataattgtgcacacttgggtgttgaagagagcgtcctacacttattctcaacttgtccatttgtaatcagatgttggagccgtatacatctgcaggttggacgattgattgcttgagccttttcatattccggtcagtgtcaagaat

SEQ ID NO: 130930 - DNA, 805 bp, Zea Mays
gggtttggtgctcgtgcggccgccatggattcaacccggctgcgcggtcgttcggatcgcgtatggtggtcggagtgcctaattgaagaacgctggagcatgtggtgctctcgacgggcgcgattggtgggcttggggtgatcaatttctcactggcaaacaaatttccgccgtgggccatggtgcatcgtgtgcagacggttgtgccgcgctagttcatgtaaggatgattcgttcggatccgccatgatcttctgcccattctgcgcttactctcgtatggattggggcactggggtggctgatgcttctcctcgtcggcgtgccatgccgtgttgggcggcgcggctgccaccgccgtggagcttgggatggcgagtgggcacgatggactgtgaccgttgatctggccaggaccggcagagatcaagtcatgggataacgataaagcgttctgaatctcgaccgtccgatttggattgatcgggtgagatctggtcttaggggttttaaatctgggacgttgcttttggatccgagggcttggattgcgtaccggttcgataaagccaagatctaatcctgacattcgatatttgatcggacggccgagagtaaaccgtaccccttcggccgggccgttttgcagaagagaccctgcgatttttagaaatatacccgccatcctttccaggcaaaaataaattacagccgatcccagaacattatgttttagcccctgcgttctcgataatttttgctcgcagtccataaatcccagaaattcataaaataaatgttaaaa

SEQ ID NO: 130931 - DNA, 501 bp, Zea Mays
gggagcttcgccatgttgctagaaagctgctagtatccccctctggtggtagccggctctggtgacatgccaattgctcaccgatgtgcgaatgcaatcgggtaatccacactctgacgtgggcaactcgcttgcgtctgcgtcggggccctggcgcgtggtctggtggtactgggccctcgggacatgcgggtggaagtcgtgccctgctattagagtttggtggtcggcgctctcggatctccccgttaacacccgtctccaccgcagctccatgttccgtggatctgggccatgcgactcttgattcacaggtatagacctgcaaactgtttctgcatagtctctgcctcgcttagctacattttacggttgggttggtctcttggttgttggggaggggcgtgtgatggcaatggcgccgccgccttgtgcctacgccgagggacccggtaccagggaagaagaaacactcttgaccgttggatcatgatctggcgc

SEQ ID NO: 130932 - DNA, 681 bp, Zea Mays
tgtgcttgtgacatctttgtagatgccccctgaccataaccttcttgtctttttgggattctttcctctttcgtcattaaattgctaccatatggcgaactctagtcctttggtattgacatgcttgtatccctttagtactcttgttttgaatacttgcctctaaatttctactacctacttaggcatttcagtttatatgtccatgatcttcctgtcttttgagaccctttcctcttctgttgttaagtcgctatctttcggcaatttcttgtctcttggtattggtatgctcacctccttgaaatctttcatactctcatctttttttatgcttacctttatatcccaagttatgtttaagatatttcattctacatgcccttgaccacccttgtttcttaatgatccatgagcggtcattttacctttcatatccttggtgatctctttgtttccttgtaactccacttggtaatgattttttttacttcaactcttccacttcgtcacgttgcaagtcttgccttaactctgtccatggattatgcttttcatcattatcacctttgcccttatcacctctatatcttactttgatgtttatcttaattcggccctttaaaatctcctcttttccatctccatccgagagttgtatgttttacctatttttctctt

SEQ ID NO: 130933 - DNA, 573 bp, Zea Mays
ggaagttcgaccaccactgcccctgggtcggccagtgcatcggcctggtgagtgctacggccaggctccttgcatgcgtttagctgacacttgcattgagacgtctgctgtgctgacgacgttcgcgacgaccgcgcatgcagcgcaactaccgcttcttcttcctcttcatctcgacgtccacgttcctgtgcctctacgtcttcgtgctgtcctggctcaacatcgccgcgcagagggcgagccacggcgggtcgctgctgaggtccgtcaccggcgagccgctgtctctcgtgctcatcgtttactccttcgtcgtcgcgtggttcgtcggcggcctcaccgtcttccacatctacctcatgagcaccaaccaggcacgtactccaattccaatccgtcagaccaaaccactgctatgcatgcaatgcaattgatgttcatgtccatccgttccggtcctctgcgcagacgacgtacgagaacttcaggtaccggtacgaggagaaggagaacccgtacaacaggggcgtgctggctaacatgtccgaggtcttctgcaccgggatgccg

SEQ ID NO: 130934 - DNA, 456 bp, Zea Mays
aggttggagatctttgcgtatttgggcatgatcactgcacaagatttgctctcccgacagagctttgtcgtttatgtgtggaagtcgagtggtttggggctgtgtactgagagttgtcgcgtcgctaaggtggcagtgtcacaaggtcgagtcccgaggtaaatccatgtcaagatcatgtcaaacggtggagagaggtttccaaactttgtcatggtgtgttccagtaaatttggcgccactttgttatttggacttgtttgatttaagttttgaaaaatagagaacgcggtcgatctttggaatggggctgaaattcagatttctgaatttctgattttttctcaagtgctttagttcagtggctgatttagggattttgaaaaattcaaatggcaaaactttcttactatattttgttggttatttagtgtactaaaactttgttatttggtt

SEQ ID NO: 130935 - DNA, 303 bp, Zea Mays
acgagcttcattaccagaccaaggctagaggagatgggctacatgaaaactttggctgctacaattttgcctattgcaagagtacaaaatttccagtgatcagctatcgtagcaagtggccagctggctggaagtatgagtggttttacgtcaaagttgacgaagaaaaggagaagttggtccagaatccgctagaattaatcttcggagagaccagaccccagtgcaacatgacaccagggagtccaagccaaattgctctggctgaatttagagttattgcggagcatatcgacactaggg

SEQ ID NO: 130936 - DNA, 314 bp, Zea Mays
gttagagtgtggagagcaggtttttttggctttcactttctagtacaaaatagagactatattcactcaactcccacacggagcaattcagatttttatcgtttgacacggcaagactgattctcgctaggagcgaagctgtgggagccctcccaaacgccccctaaagctaaactttagacacttctagctaaattttagttgaagtgtttggatcatccgactaatagatttggctagaagtttaattagtcttttagctatgccttttggattcatagcagctaaagtttagttgatggatgaatcctatg

SEQ ID NO: 130937 - DNA, 337 bp, Zea Mays
agcgattgttcggcctagattggtggttgctgatgcagaatttccaagttcgtgcttccttcgaggaatatttgatgctggtgtgcggggattgagtcccccgctggtgtccgttgcctggtttcagtgtgtgctcagaatcgcgaccaatttggtccacatccatccgattcttctcggttcgttcgtttccccatcccgttccgattcgattcgttgtatgggttatgctcagtaatattagtatctgaatcggtgtctcgaatttcctgtccataacactccgttcggtggcgataactcattggttacatacgtacaatccgatttccaaacc

SEQ ID NO: 130938 - DNA, 764 bp, Zea Mays
caaggtcgaggtcctcgtgcgtatccctccctctcgaggttggatcacagggcctcaagttacattgtcatggtcccccttcttgttgggggtcccacgggaggtggatgcggcacaacagcatataacgatgagcactctttagagtaaataagaaatcttaaaatggctagtattcgaaaggaggaataatgtaattggttcattagtgaagacttatgtcgatcctcttgctagtcgacccgcgtcattgacattcgttccatcatctgttgtgtcagctactagagatagagagaggagttggcctgtccctaggccagggcttgttggcccttccttacacctaacatgggcacttattgatgatcactaatggttacaagtggagtaggaactcgctcctgcaaagaactatgaggcatctctggtagaaacactacgcttggcaatccctccgtctccccgatgcacttaatgacgcatgttctatcagggagcaggggtcgcacacaagggtagttagggccatgagggccaggcagcctccattcacaagggatagtccttggtgcttgtcagggagctaggatccgagtcgagtccgagcagaaggcgtcaaagataagatcttcactgccattgaccatccctacaaattctaggtcatcgatcgttggaaatggtcatgggctatgagggcggcaatcgcccctcgttgtgttgtgaaggtgcaatgggaacaccatggggttgccattgaa

SEQ ID NO: 130939 - DNA, 806 bp, Zea Mays
ttggagcgcaggtataagataggcatcaaggtaaggtatagaggtgtcaaagatgaatgtgataataatgaaaggcataacaaaggatagagttaaggcaagactcgcgaaatggcgaagtggacaaaataatcaaggtaagataggtgagggtgcaatagaatggttgaagtaagaattcattatcgagagaagttataaaggaacaatgagatcaccaaggatgggcaacataaaatgatcgctcatggaccgttaagaaacaggggtggtcaaggacatgttaactgaaatgtcttgaacagttattggggtatgaaaataagcatacataagaatataagagtatgtaagactccaaggatacgagcatactaagaccaagggcatagaaattatcgaaagataatgacttaacaacagaatagaaagggatctcaaaagacaggaagggcatgaaaatataaactagaatgtttatatgggcaacagagttttcagggttaagtatttgaattaagggataagggtatggaagaatccaaaagatgcagcaagtcaataccaatggaatagatatggtcaaatggtagcaatttaataatggaagacaaaaagaatcccaaaagacaagaaggttatgatcagggggcatctacaaagatgtcgcaagcacaagagtgagatcagatctaatagaatgaataggtgaagcatagacaatattagaacaaaatacatttggcaaggtgatatatagaagcataacatagaattagtcgaggtgactaatattttgaagcagc

SEQ ID NO: 130940 - DNA, 490 bp, Zea Mays
tggatatcccccgcgtccaaatgaggcacattctgtacatgggccgaccgactaactcaggcctgaggccaacagactgaacaaacttagcacacaagacaaggactttattgtaatctaaaccgtctaggagatacatatggaaactgacttgtaacccaagccatgtcgtattatataaggcgagctagggatccctcccaaggcagatcttaggagatctgatctcatacacgccccctcctgatctctcatcaaacatccaaaccctagccctcattgtaacctccagatatcaaagtaatacaacccaccgcaaataggatgtagggtattacgcatctcgcggcccgaacctgtataaattgtgtgtcatgtcgcatctcgaagcgaaccattgagctacaattgatgttgtcgactcacaaaagcatcccatggtacaccccatggtgcattgccggtactaaacaccgatagttgacacgcc

SEQ ID NO: 130941 - DNA, 433 bp, Zea Mays
catgaaatagctgggcaatatagctgtttgttgttggagccagccttagacaaatgcatggccaaaggagtaaggtaggttctcggccgttcgatcaggagcctgcggttcagattagatgagctctataacgaaccggtacgcatctggggtcactggatatgaaatctacgatcacgatttaacctagcgaagggatatccgcgacccgatcacagccatccatggatcgatcaacggcccaggtccttctcctagctccagctgcccaggcacagacaccgcgccctcccagtgcactctttctctctcccgttgctccaccgacgtgcacaccgatctcggtccgcatctaaactttgctcagggctactgctcctccacagattgcgcaaaagccatagaatggagaaaggaggaaattccgaggtag

SEQ ID NO: 130942 - DNA, 433 bp, Zea Mays
ccatcgcaatcgccaagttcaatagcgaaagtggggcttacaatcttaatatcttttcgaaaaagcgctcttcaacagcatccttcaccgcacaacttcaccaactgtccaacctgcgcttagaggccacacctgatatgaaatgtactcttcgactaaatctctgctgctgctcatcaccctcgcgcgacgtagcaccgtctcatcagggtccttttccacgacttcaaagtcaagaaaggcgacaaagtcgtgcgccattataaaactggccgccggttgagccacaccaggcaccccttctccaaggtccacataaaactaagatttaaaccaactacccaatctattcttcgcacacgacacaagctcatagaccttgctaccaacttttctggtcttcggagtaaatgtgcaactcccaaactgcacc

SEQ ID NO: 130943 - DNA, 307 bp, Zea Mays
actggcgcaagattcccgagacacctagaatagtgaacgaggacggcgggttctatttaggaaaaacacaggggcgcatgtgtaaaactaacccgcgaagaggtatggatctatcctggtcgtccgatccaagatctatggccacgattagatccgcgctttatgaaaccccgcccagatctgggccacacgatcacaatttaaccgcccgaactccacgatacgaaggggtacgcaagttttaatctaccccatccgctcaccatcctacggtcctggcttcttcatcccgttcctctaatcctcg

SEQ ID NO: 130944 - DNA, 453 bp, Zea Mays
attgcccatgaaagtcttcttaaggtcaacctagtcgtggatggtgttgctcggcaagtgctcgagccaagggccccttttgcgagatggatgggcaagaactggatgatcaagggatcatccttgattcccaccatgttgtaggtaagacgatagtcttccaaccaaacaccaagattggtggtctcgtcgtatttgctaatgtaggcgggtgcgcgcaccttcgttggaatgtgtgccttttgaatcgcacgaccgaaggcgcgcggtactagcctagttggatcggggcttcgctcgcgcctcctcttgggcgctcgcgattgctccacctcatgtggcgggcgtcacgaatgttgccaaggtgggtcgtcataggaattcatgatttcatggattgggaaggcaacatttccttgctccatgttgtcatggaacgggtgtagagactgc

SEQ ID NO: 130945 - DNA, 469 bp, Zea Mays
gtaaggtttttaatgaggcggagccatgtaatataaccgcaaaaatcccccgcaaaaactaagacacaatatgtcgaaaaagaccgcatcgacagtcttcggcattcgaccacatcgaagtcaccgcgaggggcagcgctaactaccctcgcgtgcgacactccgcgcaaaagtcacttaagggtgcggccggaatagcacaacaagtgcgcaaaatcgaagtctttcccaaaagactctccgcgcaaaattcgcctaagggtgcagccagaatagcacaacaagtgcgcaaaattgaagtctttcccaaaagactctccgtgcaaaagtcgcctaagggcacaaccggaataataggcgcgcaaaatcgaagtcttttccaaaagactctgtgcaagagtcgcccacgggcgcggccggatcaacaaaggcgcgcagccttaatatacaaatggtggttacatataca

SEQ ID NO: 130946 - DNA, 543 bp, Zea Mays
tgggaaggagagctcgctcggacaccctcaggggctgggtggcagcttgcactacccatcggagccagatcactaccagcaacaccctcgggggctgggttgcagcttgcgctacccaccagagccagatcattaccggcgacaccctcgggggctgggtaaccgccagcatcacccttgggggctgggttttctgcaacagccacctctgaggctgaaggatcctcagtcacctccatgttagtcaggcaatcctgaccaacctcttcacaccgaagactgccttccaaagtcgacgatgcacgagataccgcccgggatacctctaatcccacatctagagcgtcagagcaaacattcatcatatcatcaacagtcggttccaacaacatatcttcatgaatgacatcctcaagggcctgatcaaaatctgttatggataaatcttgaaggctaacaagagcagacagagctggagaaggaatatcactatcccccctactacctctgtaacgccgactattcttgcgaattagcggaact

SEQ ID NO: 130947 - DNA, 421 bp, Zea Mays
aggaaagtggataagggaattgccttacgtcgtttggagcctaagaactcaacctagtcgagccctgcatggaaacactcctttcttcatggtctacgtgtcagaggcagtactgcctactgatctcaagtttggggcgctaaggttgatctttgaaagcacagcagaggccgaagcgaccaggctggaagatgtcgatgtactcgaagaagagcggctgaacgcagtaattcaagcggcacggtaccagcagactctgagacgctatcacgacaaggccgtgcgacaacgatccttttcagtaggagatctcgtcctccgccgaattctaacgggggagggacggcacaagttatcgcccttatgggaaggaccattcatagtagcagaagtcactcggccgggatcatatcgtctcact

SEQ ID NO: 130948 - DNA, 397 bp, Zea Mays
aaatttcaactttaaaactcaaactatagggcttgagaggagaagaagcaacttaaaagaatataccatcaaatttggcacaaaatgttacaccccgagggctgagtgttgttacggccacacttcctcaaaaatccatgaacctagatgatatggtttcaaaacatctaagcatctcctagctaaagagaaagaggaggactataaactgagtgagggaaatgagtgtgctaaaagagacagttgaatggttcaaccctcccctcctatttatagagggttattccttttaactaaactacccctgtatacttagagcctatctactcagctagggacaaaatagacaaactcttggaattttgatctgacaaccatgtagtcttcaagaagttgc

SEQ ID NO: 130949 - DNA, 291 bp, Zea Mays
cacaaggaggcctaaccagctagtccatggaccagagtggacccgttaagctgaaggtggggttttctttttgtgtgagtatttagttgtgagttggggaggagcaggcaaggaagaaggggatgaaccagtaggtggccggctgcgtccggaaaggctgagaggtgaaactcttgtaacctgttattctggatttgtcgtgggtaaatctcttcgtgagggggttcaccgccaggagcggtgctcagatcgtcgccggtttagtatcgttacatgctgtctcagttgtac

SEQ ID NO: 130950 - DNA, 513 bp, Zea Mays
gggaggagggccgctgatgccgaaggctcccagcacggaccgcacccacaaacggatcaaagggtgcaaaggtgcccaaaccgtcggatgcgaaggcaccaagaggatgaagacccaaatggagcatagacaccagtacaccacaaagttgccaaacctggtgggggccacccaaccaggtctgcctgtcagagtagctgccatgttgatgttttggtgtactcaaccgtgagggatgaggcgtcaccgccctgtaattaccccgttgtacagcatattccgaggaatgaggatgtagttggtaacaggggtatgaatgtacgttaggttatcgacccatggttaccctataaatacccctgccctgtagctagatgggacacgctcgacgagacgctacaattccctacctatcgttttgtcatgcatcatggttctcacctactcccgagtgttggggcccacctatcagtacccaacacatgtaaaacagtttggattactttactagca

SEQ ID NO: 130951 - DNA, 514 bp, Zea Mays
tatagtaagtacaaccaaatctaatgaaacctagttttaatctaactttttcttgacagtccattgctcagcccgctctccatacaagtagtttgattccttcctctagcggctagctactcgacctactcgtggctcgatcgctccttcgatcatgactgggatcggtagtaggtgaccagacccgtccgctaccagtgtcaccttgtcttctcgtcactcgttagttcatcgcgttgtcgggatcccacacgcagcgccactactttgcctcctattccatatcgactggtgggcaagctattggtgggatcctgccttggcaccatggtgccaccaccatctgccctcactatgccaccagggtcccaccacgtcgtcgcaatgcaataattgttgtcgcttgccactgcctacagccgcttgccctcgctgcccctcgcatgttgctgcctcatcatcgccatctcaaggcagactcaccacaatgacgcgtcgatgtggccgcttcacc

SEQ ID NO: 130952 - DNA, 315 bp, Zea Mays
cccatccctaaggctgacaaagctttggacgctcagaagtctgtcaatgttcgtccaaaacgttctcgccgagccgatcaagcctcttttcctgctgagggggagaaaaagaagaagagacgtcttcgtcgggtgtctagcttagatcagggtgccggtccttctgctcctgttgctgaggaagtgcccgtgcctgaatttactgaagctgatcccaatgggtgtgacccgtccgacgttgaccccaatgggtgtgctgtctgtgttgttgatgagaatgatgaagaagaggacgaaatccctctgattcggaag

SEQ ID NO: 130953 - DNA, 425 bp, Zea Mays
ccagtcgcggcggcgtcgccaacggcggagccactttcggagcaacccgagctgattccccccagcgaccgattcaccacaagcgttgacgcaaaacgatgcagaggcgatcgcgaattagatggtgggctcaccgtggtttacgtgtgcaggagcttcatccatgacacatggcgaccgcggcatgataacgcacatggcgatggcataaccatctcccatctctcgtactggagctgtggccatccccgccgtgcctcggcgaagtcccccggctagttctcgaggtcaggacgacgacgcccaagcgattcccggcggcgacaacctctctttctctcactacctctgtcctatctgcatgcttctagcgggatgctcatgggtttcatctggtgacccagcctgagggcaatggacggcgg

SEQ ID NO: 130954 - DNA, 676 bp, Zea Mays
gtgcattctagtcgacaatgcagttggtgctcctgctttccttcgttgccagagacaataccattgccatgctagccagatagataagatagctaggccgcaaccagaggagaggggaggcgaaggaaatttgaatcttttcccctattgttcacattgaatggaaaaactaattgtacgatctctaggctgcttaactcgtggtgtcaatctattggacgtggaggatttaaatttcaatgtgtcagtgtgttggtgcatccttgcagacactagccgttctacccctgacgaggaattgaggaccacgttagctttcgttgtgtcttcacgccgactgtggagacctaatctttgtcctttgttccgggaacacgtgagagattcgtgcccgtccgtatatttgttttgatccaatttgttgtttagctcagttcagcaggtcggtcaataatttatgcttcccttctttgaaaggttgaattaaagcattctgttccatcgttggttccatcttttcatttgaaagagaaataaaaaggtaagggctagtttgtaaacttaaattctctataggatttttgagaatttacaggaaagttaagctaatttccccctcaatccccggtaatccggaatttaagtttcaaactagccctaagtaatgcaaattttg

SEQ ID NO: 130955 - DNA, 395 bp, Zea Mays
cgcacgtcagcggattttgaaatttggagttcgaaatcgtccagatggaccgcgagaaatttcttgctacttggatggatcatgagtcatgatatctcgtcatcttttgttacttaatggcgatgactagttaatgtggagtattggctaatgagcaggtcggctatggatggtgactttgcagctactcgcgcgccgcgagtttgaaccgatttttgccttgaaccactgtacttcgttgaccgtattttaaatatgcggacatttagccagggttaaaaaaacgttttgttttaatgccacgtatattaccccaaagattgaagcggttataagaaaagacaatgtaaaaaaagaaagttttaaacacctcattctaatcagagacttagagc

SEQ ID NO: 130956 - DNA, 628 bp, Zea Mays
gctaactgagtttagcttagatggtgtaatgttagtttgctcattgatgcatattgtttaggcttactactgagctaagaagttttttaggttcctcagaattttgggccctgtgtaatcgcacttgtcgcacgtgcataaggtccgaccctggctctgtgaacaactcatacgagaccattagaggatgttgagggtaaccatacgttcgtgtgcgtccatgtcccaacgattgggtggcatttttcgtcggccgtaaaagagagagataaaaacatgcacggtggattggacgcgacctatcattttacatgagcaaagaaagacggggaaaagatgagggccgctacgccggtgtgggggaaaaaagtgcttttgcccgcgtacgcatgcacgaacttcagagcacgtcgcacgcatgctgtagcaaaagcccgccatcagcgcagttggatctctttgcaaggcgcacggcaacggcatgcataatgcatgctatcgttcttggacgacactaacgcatgcctatccatgcattgttccatcagtggctgcctctatacattattgagcttcaccagcagcagcagccagctatagctctgcgccgatcgtacgtggcttttcg

SEQ ID NO: 130957 - DNA, 383 bp, Zea Mays
cttgatgtctgtgacggagaatgccccaacgtcataaaatatagtggagcagacacattccttaagaggcttttcccatacttagcactgtgtcaagcactacggtatgggcaacccctcaccagggggtttgggtacgtgatcgagccctcggcctcggcctcggctctcagcgggaaacaagtgggcgcaagtcatgaacacatcacaataccataccgtctataagatatgaaagacaacctctcacagtatgcagcagactcccatcctccaggaagcacctcttgagcctataaatagtttatcctaccgcttctcaaagggaggcggatacttcacaagtcttctccactcagtattggcacttgcctcaatcatcc

SEQ ID NO: 130958 - DNA, 452 bp, Zea Mays
cgggacaagggatttagtgcaggagcacatagccttcagagtgtggccacttgtagagaaatgggaaatgccaaaggaaactatcagcaagtctgacgaaggtgggctggttaggtggaaatacgccttcagatatgaaggtaagtttgttgagccagatgatgattggctgaaatgtatcgaagctacaagcgatgaactgcttgggccatattcaaaggcagaggataacgtgttatctgcggccttcggaggccggaagaagaagaggctgaatagagtttttgatgttattgggtttatgtaccctgattaccgctacccgtcgtgggggcagaagagaaagagtgccatttccgggaaagatgctgctccagctgctccaagcgagcccgcgccgaagaggaaaaaggtgaaggtccttactcaccggccccgatatattgttcccg

SEQ ID NO: 130959 - DNA, 482 bp, Zea Mays
gatctatctccttaaacgcaaatctgatgttgaacatgccttccatctatttcagaaacatgttgagcgcttgctcaatgcaaaaatacgtatcttccaatccgactggggaggcgagtatcaacgtctctctcgtcatcttgcctccaccggcattcagcatagagtcacttgtcctcatacttcccaacaaaatggtattgctgaacgtaaatatcgccatatagtcgaaactggtcttgctcttcttgcccactcctctctaccggtcaaattttgggatgaggctttcattactgcttgttatttaatcaatcgtatgcccacacgtacacttcataattccactcccttagaacttatattccatgaaaaacctgaatattctcttcttcgtgtttttggttgtgcctgctggcctaacctccgtccatataacaatcacaagctatccttccgctccaagcaatgcgtttttctcg

SEQ ID NO: 130960 - DNA, 662 bp, Zea Mays
acgggcttgagctgtggtgagatccacaaggagcttatagttgcgcttctctacattttctgctcgggcaatcatctgacggtggtgtcgagccaagaaatcatactgtgcatctagggtgagcaggtatgcagtgaggtacacaactgtggggtcatcctcaagcagctgcttcccttccaatgcacgcatcctggccatccaaactggacggtctctctgaaagggcggaaagaatctgagcagggtgtcgaccactttttcttcatagatctgacacagggccctcaatgccttgcgagcgacgacttggcaggtgtctttgaatctgtgccccacagcagtgacactccattccacatggtgcggactggatcaatgtatacagtcacgacacacttctctgtgccatgctcgacgaattcacgaccatcatactctagctggatcctgattccgaggtgaactgtgcatgctctcaccaacttggggaaaccatcttcattctggcaaaagctagtttggtagcgaacctccatctgacttctgggagaaggaaagggggaaagcatttttgaaatgaagggatgagagcaagattttttttaagaaaatagttttgactcaaaaacttttggatcaggctaagggttatgtctgcg

SEQ ID NO: 130961 - DNA, 443 bp, Zea Mays
cctacacctcttgtgcgccactgcgtcccctaccccctgcgtttcgtcgcctgtccctgcttccccatgtgccgccacgcacccagcacccccatgcgtcgccgctcgctcgacgacgcccccttctttcgcattcatcatgtctgatttcaacaactgatgtgagcttgtgtatgagattgtgttatgtatgggcttatggctcagctgtgtattctctagttcggtgtcgtcgcttgtttataggtaacaagtataccatggctcggccttagtatcgcatgctttcacattatcgaccttgtgtatatccatgttattgtttggcatctttgtttggcaacttctaccaaaaccgagaagtaaattgtgatccccggtctaacacaatcttcttaggcactccatgtagacaaactattcgagccatatataactctgct

SEQ ID NO: 130962 - DNA, 325 bp, Zea Mays
gttcaccagagaccacgaattgctcatctcccccaaatcgggtttccgccaccgtgaaaaggtcctcgccgtggctaactcgattcaggtccaatcttgtcctctgctctcttgtttcagcactcttgcatgccactgatgctcctcgacccattcgattaagctagactgccctagatcgccgggaacacccgtgctcatccgttgtttgcactgcctccgtggacagagtgatttagagctcgaactatgaaatcgatcgaggggaaacgcttgttaggtgttgaattaggttttagagtactgaccagtcatgtgagtttgt

SEQ ID NO: 130963 - DNA, 722 bp, Zea Mays
gttgaaaaccactacaataaatctgtgccttttaaaaaagagaacttttgaactcaaaatttttccaagagatgcatgttaaaaattgtttcaataccttgttaaaacagacaataagtggaagcggttactatgagagtgttaacactagataaaaagctagagttgagttatggccctcttgataagttgtaacttgtaaggtaatgatgatgaagggtacaactataatttccgcacactacctattcctgttgtctgttcagggggaagcaaagtggcaaaagaggatcatatttaactccacataatttgaagcagacgttcccacaagttttaagggattaaagtgggccaggtcaattcaaatagaaaccatttctttctttcgttttcgggttctttgaacgcaacgttaggtggtttattttatcttttttttcttctttctaacctcaaaggggtcaaagtcttaaagctacctctgttggcggggctagttctcaagggaaaaagggacgatcctgttccctgtttggtccaccattcatcagtcttctacaaaccttctattaatccatttccatttacgtacagggaaaatgaggaattttaaaatatagcattcttttgggagtgaatgttcgtcgtgatggaaatcagaatcagttgacttggttatcctgttttaacctttttgagccctgaacaattagtctact

SEQ ID NO: 130964 - DNA, 679 bp, Zea Mays
ccaagtataaggtcataaccacttagtggtaacaacttgaaatctgttgaaaaagtaacaccctcacagagccattgacagtttgggactatgtgtgtgctccacagttttccccatctgccactcttacttgaactggtggatccaaagcttgcactcctaccatgactcccatcaaatgactacacataaaactggcagagctacctgagtccacaagaatcagaacctgcttgcaatgtatggtggcccacaaccgaatagttttgttaccttcactcccacttaccacaaccactgaaatagctaaagcagtttctagattggcttctttagactactcttctgactcactctcttctcccttcatggctaatgcccacatcgcttccactaagtgtagaggtacactggtggaacacttatgagagtgaccccattgttctccacacttgaagcataactcatttgccttctactaagccttcaaagcaaccatcttgtcttcttcacccctagcaccagctgatgttggagcacgactatctttagtcattctgggtgccttttttcctgatactggggtagtggtaatggcataggtccatattaaggaggcaccctagcaaatggtcctggttcaaaccacttgttgtcctatgcccaatgttactcatca

SEQ ID NO: 130965 - DNA, 462 bp, Zea Mays
acaagatgcattgtttcagggatggaaataagttagacaacatgtaccatcagccactacacatgattattacctcaagtacctagataaattttctgattattacatcaagtaccatcagccactacaccattctcgccctcatccgctcatctccgtttctttggagccagcagtctgttgcttataagcatacaatccagtgactgagagaaaaatatagctaatataagtctataaatagcatcagtccctacagagatagacatattttacatgcaaccataaatgaagtaggattaaatcttgatgacaagctaaataaggactggaaagttcaattgattaagtccacataacgctaggaacaaatagattcccccatacaggtacttttttaaaataaactcaaactctcgattagatataacagaatgttcttaaggagtagtaaagattact

SEQ ID NO: 130966 - DNA, 552 bp, Zea Mays
gttttctatatctcaggcgacttagtactcgtctatgacttcatccgtgcatgtgtcacgtgtcagcgcaacaagacgccaaccctgcaccaagttagttccatttagccactcgatgtgttgtcctaggtatgaatgggcatcttggacttcatcgagggccttcccaaggtccacaggaagtctgtcacccttactgtcatcaaccgcttctccaaatatgtgcacttcattgcccacaatcacccatactcgacggcatcgatcgcacatgccttcttcaaggacattgtctacacgacttccccacctccatcatcaatgattgtgatctggtcttcactagtcacatgtggcacaacctcttcaagatggtcggcatcaaaatccgcctgagcacagtattcgacccccagatgaatggccagttagaggtcatcaacaaggtgataacaatgtacctttgttgtgccacgggagaccaaccgtgtgcttgggtcaacgaccttctgtgggcaaaatattgctacaatacctcattccacacatcac

SEQ ID NO: 130967 - DNA, 296 bp, Zea Mays
tttttaaccacttagatgttgtatggaacgtctagttagtgttcagtataaaaacaacagctcaatcgaatctagtttataatttcaattatgcgtcggtagatatttggtaacgtgttgtcatgcgtgtccgtctcctgttgttccacgcatgtcatgtgcgtggtcgtcgtctattttcttgttcgtgcgcgcgccatgcatccggtccgcatgttaaatcatgtgttgttttgcacgtgtcgttcatgtaaatcgcaattggcacgcttcaataggatcacttcgccatatcg

SEQ ID NO: 130968 - DNA, 309 bp, Zea Mays
cctacatcatgtagtctatctcatccatacctatcttaaccatattctccagcccgataatatacactaactcctaatcaatgagacaagaccgaagaagatgatcaacttcatcaagaaaggatgagcaacaactcaagtcttcaaaggtcaagtgaggtcaccaagatgagtcaagatccacaatcttgaatggagtcttttcttaccccattccttcttacccaaaactatatatgctttaaagatatcattcatcctgcataataaagtggctatacccatatatacccaggccttcctaatcac

SEQ ID NO: 130969 - DNA, 478 bp, Zea Mays
tttcttcctcttttgccctttccacttggatagctttgttagagaggtgagagaagttgaggaagtcttggctggcgaggatggtcttaagctcgggtcttagtcctttcagaaaacgggccatcttcctggactcggtgctgacatcgtcaggcgcgtaacgggccaactatgtgaacttgtgcacatactcactgactgttctcccgccttgagttagctcccggaattcatcctccttgagttgaattatcctctggggtacatggtgctcacggaaggctgtttcgaattctgcccaggtagcatctctgacagcctcactaaaggtgtcccaccatgctaaagccattcctgaaagctgatgagctgccagttggacacggtggttttcggggcacccgatggcttccagcttcctcttgatcgtgcgaagccagtcatctacatcgaggggattgctggaccctgcgaacgt

SEQ ID NO: 130970 - DNA, 491 bp, Zea Mays
tctctcacaccttacacaatatgatcacaattatgaacaagagtaagagcacaaatgcagcaagaccatggacacaagtgaagaaaagaatgcacgaatgaaaaccaacagagtttcaactagaccacactcagatctctctcaaacaaaccaaggcgtgattggaataccagaatatgttgtatgttgttgtgtttgtctcggtgtgtttctcatatactgctccatggcacctaggggatccttttatagccccaaggagcctaggagccattggatcttcatttggaaagcaatcagcattccctgtctggtagcactagattgaacaatcagcgatctgtttccttcaatggccgagctgtccgttgtgcgcctttagtcacttggcacaccagatacgatacgctctaggccacaacgtacctgaggcagcaatgcatccgaggccacaatgtgctcgaaggtgcaatgcgttcgaggccacaacg

SEQ ID NO: 130971 - DNA, 387 bp, Zea Mays
aggtagttggtacaaaccagttatcaagttccaagttttttgaatgtatgaattcctagccaaaccaaggttactcaaattaaagaaccattgttgtactaaagacaaacttccctaactaatttgaagtgtgtgcacaagaggaaagtgtgttatgttcctaattaagtgtggccttggtgcatattaagatctaacctaacataattataaggggacaaaaataatataatagcacaagaagtgctataagagtatgctgtaaaaaaccaaatcatgtgataatagacaaaatcattttcacccattcacttccttggcctcaaattaacatagggcaacaatcacacacatggattttattgaatggaaggaaattgaatcaac

SEQ ID NO: 130972 - DNA, 615 bp, Zea Mays
caagggctaagggacccacacacataacctttgttgtgtagttcttgtatgtcgccttggtctcctctaggtccatcctatatggcgctcggtttggcatggaagccccagggataagatcaatctgatattcaatcccttttatcgatggcagcccaggtggcatttctagtggaaatacatcagcatatatattctagcaaaagatcccttgtgcaagtatatcagtcacgcccgcctcactaagtaactgcacagttcgccagtgcgccatcgagcctatgcggccacacgcgcgtgccgccgtggtcactgcatcgtaggctcgatgtctcctacacgtgggaccgtttcgccaggggcatcttctacactgattccttctcgagaccggttgttgcaaaagaatcgcacgccctgcgcatcaaccgccttaagacaggatcgttccgcttcaataggatgggcgcgtgggtggtgtacgtgaaagccggttcactctcgagtcctcggagcaccctaaagacctcaccagagtacgaaggtcaccttaaatctgccctacgtcgtcgccacgatgattaacactcggtgagtcaccctctaccatgttca

SEQ ID NO: 130973 - DNA, 835 bp, Zea Mays
acaggtgtcccaaccgcatctccgcagctataaaatgggtgctggtcgtttgcgcacccctcttgctagtgcttgaacgccgtcaccaaccgaggatttcgccggggagggagtgcgggtcgtgcgcgccgtctggggttgccgccgccgccgcaggtgaatctcggccatgtcgccggcggtgatccgggtccgtgccgaagacgtttgcgtgacaaccatgcgacgattccctgtcggaaattaggcgcggaagcggcggagtgagagcaattcctcgtcggtgaccgcgcgccgccgtgaagccgctcacctccgtggacagtgccctgcgttgcctgaacttcggtaaggtccccaccattcttcccgccatctttccctcttcgatttgcgcctggacgagttaatattaaggccccgctgactgctcgggatccgtcgccggcggcgctgtcgtaacagtgtctgagtcgccggccgtgcgcggatttgggacgatgaacgtgcaccgtcggattcaacttgcggtgcggattagatccctgtgcgttctagaggggagttgatcagggccatggatggtgaaacggagggctgagattagaaactatggtaccggttcggcccaacgacatagatccgtccgatttaaatcgtgcgcctataactcgatcctaggtatttaaatccggtccgttggttgctgatctggcgaccacgggcgcacaccgagtcgtttaaacctagacctaatctggcgcattcgtctctgatcgggcggccgagagatcgcgataccccttcgctgcgcagcttttgcacaagagtccat

SEQ ID NO: 130974 - DNA, 593 bp, Zea Mays
cgtttggaaagaataccgcgagaatggaactgagaaatgctctatggcagtctacctgggagaaagccgaaactacccaaaccaccctcccttccaagtcaacaccactagacaccacttcccagacacttgccaaagtgttgcccgaaaagccctccgccagctatgccaaaactacagcagggaagtctttgagactccccttcgttactttccacccagcaacaaaaatacccctacctggaggaaaaggctttaggccctgtcaggaagagatcctactgaagatgaccccaccatagtctatatggccggatacctccacactcttgacaaccactatgacgatcttttctcccactgcactcacttaaactcccgggtggaaagcttagagcaacaaatcaaggaacttaaagaggagaaggcgtccctccaagaaagtctcgaaatagcagaaggtgaagaggccaacactcgtgaagcctaccgaaccctgaagatggactacgataagaagttaaagaagctcgcccccactaagaagatccgaaagcgaaccaagagccaaggatgccagactgaacggaaaa

SEQ ID NO: 130975 - DNA, 572 bp, Zea Mays
ccccgtcctccaggagctcgcctctaggacacctccttcgtcagctgcgccaccgcctccgcagactacacttccggatgcaccacgcgaacgtcagcgcgtgtacgctcgacgctcgcggactacaccagctctgcccgagtacgtggctgagccggctctccacgtcgtcgacaacaacgcctcatcttcaccggcaccacctccacctccgcggcctcccgagcctcgtcgggtcacccgcacccagtctagcgccatccaaccggtgcggtacgtgggtctctcggcgactgcgacgacgcctgcctctccgatccccgggaactaccgcagcggtttggctgatccaaactggcgcgcggccatggccgaggaataccaggcgctcatcgacaacggcacctggcgcctcgttccccgaccccccggcgcaaatgttgtctccgggaaatggatcttcaagcataagtaccactctgatggcactcttgctcgtcacaaggcacgctgggtggtgcgcgatttctctcagcagcatggcatcgactacgatgagacgttcagcccgg

SEQ ID NO: 130976 - DNA, 1105 bp, Zea Mays
gggatatagtagtttgtatccttaacacctgcgaaatagcaacaaatatcacaaatatatgttctcaaacccatcccgaccactcggaatcacatcttatatctcaccactcatcatcccttacaacatcctcagtcccttaagtataagcgacgagacaatcttttcacacgcccctcatcttggcatcccacaaagttttgtaaattatcagtttattaacaattatagcaatatgaaatgtcacatttgaaaacatcaagacaatgattatgaaaacaaagtgtgaacatgaagtttctaaaggtatgatgaacggaacaaagaagctttaaattaaacaacatgatgtatttaatgtgtgtgccaacccacgccgtggcagcagagcacagttgcagacacgacagcgatcatgtctggcgcagcagtataattatgtctgcacaaaacagtgcacgcatgccgcctgacgccctccgatgggacgcctaatacgacaagctgagcggacaggccttcaggcgcaacctctccgcctcgcccgaccccgggtctagccttcgggcaatttctccgcctcgtccgacgtcaagcctagccctcaagcgagttctccgcctcgcctgagctcggcctcggccaccgactacgccgcgaatcccgcagacagccactccgctcgactacagcgcatgtcgagggacggctcggctaacgcctcaggaagacttctgcatcaaccaagcaagggctctgatatcaatgagtgcaacagggaatcttgacgtcgtcacacgctaggacgatgacgcaccccataagtagcctttggcccatacctcggcgctgttacaaccaccagtggcggagccaggatacttctaagggtagggccagagttaacactaaaaaaatatttgtatcggctaaaaaatttaaaccataaaaatgcatagataatgacacataagattcatatgaacacaacaattccaaaataacgtaaaattgactaaaacaagtggttgcctaattaagaaaatgatagatctttgtctcaatgaccaattcatcaattacttaggttgctttcatcaacaat

SEQ ID NO: 130977 - DNA, 955 bp, Zea Mays
ccatctagaacgagattgagaaacatagaaatttgtctagtaagaaaacatgttgttgggtgagatactaacaaactactagatccgtttccgaatatttgtgatcccctaatttatttttaaactaaaatacgataaataaaaaaacagattaataaccatggttctgcttctgcatgccatgcagagcgccgagaaatcgtttgcgcgcgtgctgccggtgtgtgcggatggattgcgacagatggatcagctcattcttagcgcaacacatattattctactactagttattgctgaggacggtaaacggaactgaccttgacggagaagtcgtgaaccgtgccggacgcagtggccaacgggagctgagaggaaggaggcggatgcgagccaccgatgcgtcgtgggcagacaccgcggatgtgaggcggcggtgggtaggagcagccgagcaggcggcgggcagaccgtggatgcgagccaccgatgcgtctggggcttgggggcacgagataggagcaggcggcaagctgtggcggcgacggcggctgcgagcaggatcaaatgaggaagcagcggggaatgacgaaaaagatgagaaaaaagaaaaagggttttagaggagttacaattacaactaatctatctatgttcgctggagtaaccttaaaatataaaactgtgggatggatcccatcaacccgacccccagcaccctcccacgcccccgcacatccaccccgctgcccccatcgccacccgtcccaccacccaacgccgaccttcagacctgcaccccaagctctagccgcccccgcagcagctggccgccgaccgtgacgacatcatgggcaccaagtacagactttgaatcgccgtgagcactccttaaagacctcttcttccacaacctgttttccacaatcccccctctccgctagtccaacaaccc

SEQ ID NO: 130978 - DNA, 361 bp, Zea Mays
gtggtggttaggcagcgtgcaagatgaccgcggggcaatgcaacagtggctggctggatccgcgatgtttgtgcggaggcggggtaatgaccggcaaggaggcccgtggccttggcggcagaggtgcatttggtcgatcagaggttccgtagtggtgtgccactactgccagtgagacagaggaagctgtggcgatgtcccaacatggcacgagaagggagggcatcgacggcgaggaggtgtggcgagcatcgtacctgtagcgtccgcgtgtagaagtggagacggagcacggtccgatggcagcatggtaccgcggctgggggtggcttgtgcaaggcctcgctagcggtgcctgcca

SEQ ID NO: 130979 - DNA, 373 bp, Zea Mays
aggcaccatttttccaccatacagttgataaaaagttggaatataaagaattcaatataatagatcaccttttaaacaacaaatgacgtttccctgatgccaagggtattttattcgcacgagagggtattagagtacaagtagtggatgaagacgtgattgggctagctaatgaccttttgtgataccaggtttcctataatcccctctattcaagggatacctagatggtgtttatgtccactcaagtaaaacacaacacatcaatatgacacatcatttctcaaaataaaataaagactatggaaaatttagccaaattgcgtgagtgaactgtccaaacataggctaaggttgtaaggcacctttttcc

SEQ ID NO: 130980 - DNA, 374 bp, Zea Mays
tgtgtcctgtccattccactggcaggcagcgccagggccatcctgcagacggtgcacctgtccaatccgttgtcaaacagtatgcccgtgttgtgcggcgcattgatctcatcatcccttgtacgagaagcttcccctgcacgccgatgctacgcagatctcggatatcagggcacaaggagattgctccagcaacaaacattagtagctccaagtactacatcccttatgttcctgggcccatatgtcggggctcagcactcttgtacatgccccccttagctataaaaggggaggtatgcaacgttacaaggggagggcacttagacccaacttagactctcaattctcaagcttccacagcaatccaacgt

SEQ ID NO: 130981 - DNA, 489 bp, Zea Mays
gcccggtttgtcaaggaggaccataggctttgaaaaagcagaagactcttccgaagccgaaggattcaactcccgagaagcgaaaacttgacaaaatatcatctgctgatacaaagatacatgatgtgccacagaagattatgagtcctccttcaccctctgctgccgaagtgccagagattctgaaggtagtgactgaatctataccatttgcaatgctaagtccactaaggttagatctgactagccttttacaatcgaagggaactgcttcggctacggaggagaaggtcgaggggcagaagaaacgatggattgtgaatgtgatgcaagcaattgagcagacaccgccctcagcttcggtggcgaaagcagcgattcctgccgatactgaagatgctgccggagccaaagctgaagaactcgcaaccacgatgtcagaaatcgacaagctcatatcagatgtggttgcggaggaaaatatggccg

SEQ ID NO: 130982 - DNA, 677 bp, Zea Mays
ggggggccaaaaaaccacatgataaatcaagcaaaggatcgtataaaccagcattgcattgaattcaagttttatatcaatacacgatataaattcaaagaaaaaataaataaacaaaagaagtaaacatactgttataagttcttactagcctaataaaaattgggtgtaccttgtcgaatattgatctcttcgatgggcatgtgtgccaagaaaggggtaggtcaaggaacatctctagttgagagatagggcttgttggttcgacaagctcgctgacctccaaggacgggtcacatcatcgcgacgaacgagatcggacatgccgagctagctagcgtcatgaggatgacgagcgaggagggggcaccgggaaggggtggggttgtgcagtgttgcgacataaggaatgagacatcaaagcggattggattaggcggtgtcgacaagaatgggactgggccatagtcaaaatgtttctggatcgattggattgaggagcggggtcatgggtcgttggtcgacactttaaaaagggaagtatacatctatgggacgggaatattatgaatttgatatgttgagtctaatgggctgatgatctcaggttgattctatgggtcaagggccgtgttctaaaatttcaataacaacctaacaccagtctaatatcatct

SEQ ID NO: 130983 - DNA, 911 bp, Zea Mays
tgagactttgcctagtccaccccctgtctttgagcctacaagtccaaatcatatgggtgagaccatcttcatggaggaggagcacgacgacgctgactggggcgattatgagccgtctccaccggctcccccggttgagcctgtgtcgatgacttcggatgacggacccgacatcacttcttctaccacttgaggtccagtcgagccggaacctgttgcgcctggaggtggtcaggttgctgttgagggggaggccacttctttgagggaggctccacgacatatccagcgtgatcaccctcctcaacaaatgattggtgagcttaatgagtgagtcactcgctccaggtatcagcagatgtcccactttgctcactcagcttttgttgcttcttttgagccccgagatgttggacacgttttgtctgatccgtcatgtctgtaggactcaagagcagactacaaaccctcatagagtgcacactgcataggtgtagatgcactcactgagctagccttctcaagcgaggctatcctagcgttcttctccgctagctcagtctgcaagctaggacaagtctgacatgcgcccaacaagctagacctagattgaagctcaccgcactcatctagcagggtggcatacttggtctgcaaagtggcgatgttcgacatgtgaagggcaaacccatcacatttagtcttgtcggacaccacaactgaagctctagcggactcaaacttggatttaaactctttcctctcacaagcagcaagcctaagcaacttgtactaatttgccaaagcaatgttcaactcttctacctcagtgggcggaatttgatacctcaaaagcagagtcgtcgctgatgtcattgctgtcgccaccaactgcataatcaccatgggcc

SEQ ID NO: 130984 - DNA, 388 bp, Zea Mays
gggtcccgctccccagcttcatgatgtcaccgaatattccagcgtcggttcctccgtcgccgagcttctcgctagggaggctcttcccctggcatggttggctcgtcgtcggagatgggagatgactctattctccctcgatgaagaggacgtcggggtagaaagaagttgttgtggtgatgaatttctttccgtccttctttgagggtgaaggtgtcggaagaacaacttgacggacctctatctcgcttgcttctttttttcctcgtaatccgtgtccactcctctatggacgaggtggacaacggggttcttcgggtaagtgaattcccggctcttgacttgcagaaggtagtctttgcctgggggcacaggaggttgcgatatc

SEQ ID NO: 130985 - DNA, 297 bp, Zea Mays
gttgtcatcggtaaccactgatgtcagactctagcatcgggaaaccaatactcttagacagagtgccgattattttcgccccattatggtcgtgaatacatcccaaaatttcttcatcaaccccaccaaagaccaaagatccaggctgatagccgtaagatattccatattccttcaactcctccttctctgcctcgaacagttcatggccacccaggtaccgaaggtcaaaatctttctctcccgaagaagtatcaacaactttcttccccttatcaggcactacgaccatgcttt

SEQ ID NO: 130986 - DNA, 614 bp, Zea Mays
tgttgttgctcatgatgaaggtgatgacttatgcatggcaacgaaggctacacaccaagcatgacatctagcggctatatcgtgacgagggtgggctgctggtggtggctggtgggcggcggtcgccaggtgatgagggtggctagtgttcgcaatgtgagggctattgcgtctgtgattgaattacgtgagggatttgccgctgtggtgtgacagcatgagggtatgtgcttcccgcggcatgcagggttgagtcaccctggtggcatgaggctgagaggtgaggggctagcgtagtcgcatgaagggctaggctcgtgggattgagatttgagaaggttgcaagcttgtatggctagcccatgggtaaaatggtggtgcacagttgggccaaaaagggaaacatgagctggtgggctaatagttcagatttttagtttaaaccgaaccaaaaaccaaaaattgaactaaaatttgatttctgaagaatggtaagataatacaatttggttagttctggttctttcggtttcagttccagttttttcggttttggtgttcgatttttatgccgaagcctcgcgattaaacatgcactagtgtatgcatatgcc

SEQ ID NO: 130987 - DNA, 636 bp, Zea Mays
ggcgaaagcagaacatccggcaagcaattgcttgcgcgcaatcggctccccgaatctgacgacttgacgagtgctcccacgagtcgcggcgaagctctgggccgaggcaccgtggatagttcgccaatgtggcggagatcactggcggcggcactcttctctctgtgtttttacttttcatgatgcagcgttcacggtgatagtggctcccagttctctcgcttgggtactcgagggggagaactcgtctagggctggtatatatcttgggtaggctcatctccaacgtcccacgccgaattcttcgtgatgcgcgtgacatgctcgggcggaagccggtggaggggatcgagctgaccacacgggcccacgcgtcattggtttaggtgagttctttgagcgggcagccccaactgacagtgtaacacagcgcgacgtgtgggtatggctgactggcgggccccagatgtcggcgccagcatcacgaccgcagggagactgtccagtggacccagggagtcggcgccggcatgatcaactgggtcgcgcggtggaattaggccgaaagcaaggctacaggcccgattagtattcttttctcattgttttttttattttctgatttgtttttccttt

SEQ ID NO: 130988 - DNA, 664 bp, Zea Mays
cgctacccatgtgagccggatcatctccggcagtaccctcgggggctgggcagtggcttgcacttcccacccgagccgagtcaccctcggcaacaccctcgggggctgggtaagcgtcaacaccatccttgagggccaggttctctgcagtagccgcctctaaggctgaaggcccctcagttacttccatgggaccaggatgatccaagtcaacctcctgaccctcaagaccgcgctctaaggtcgatgaggcgcgggatgacctcaacccagcatcgagcacatcagcacaaacctccatcacaccatcatccgctgactctgataataggtcctctggaaccatatcttctagagtctgatcaaaatttgccagagataactcctgtagaccaacgagagctgacagagcaggagaaggaaccccactactttccccactgacaatatactgccgactgttcttccgagtcagagggacctcatcttcttcctccctgtcgttttcatcaacaacataagcaacacacccattgggatcagcatcggatggagcacccccattgggatcagcagcagatggagcacccccattggggtcggcgtcagcaaaatcaggcacgggaacctcctcagcagcaggaaccgaaggaccagcgccccg

SEQ ID NO: 130989 - DNA, 692 bp, Zea Mays
gagggcagactactaacagcacatatcacttctatggtatgctttgcgcccacttagcctctccatgtgttgctcaattatgtcatgtgactcatgtcttatgacaggtgagaacggaaggccaataacatagcttttttgtagggaaggtgattccacaccaacaagaagaagccaacattctataatttttgtagacaagggaacaccaaaccaacaactaatgatcgaccaaaggatgaagattcttcaagacccgatgccaggatgtcgccaggatgtcggtggtctggtttatgaatgaggaagcaggaaaatcaagaagcggtagaagttgatctatcccttgactagccacaaggcttacagaatccttctgctgagatgttgccagttcaggtgatcaacaaggcactaatgctctacgtgcaatcactgtaacaacagtttgaggcaagtagtatagtccgttcgaagctaatcatgtgccgtgggattcatccacctttcgaaagtcctacgaatttcactattttttggcatcgactcctctttatcgagcttgtgactgtgagcccgctcgactttagcgacataactaccctcatgcaagaagttgtaagttgagcatgtcctataatggatcagttcagtccaccagattagtggttgcttacacatacacacggtgc

SEQ ID NO: 130990 - DNA, 662 bp, Zea Mays
ccgcgtcaacagacaccgtgggtgactaggtgcccacggcggcgcaccagtgaacgacggcggagctatagccggagtgcggcgatccagggctctggtacgctgattcatgcgtaaataagtgcaacacgcagaggtcactaaggcgaaaacaatagggggtgtattaccggatggcacggcgtggaggtaactgctctcagctagatgcggcggagtgaggattgcatcccgacggcgagcgattgccgcataatcacaaccccgcgcaccaggagactcccctgaactcgatcagtattcccaatcggacgaccctgaccacccagcagaccccaaccgacggcgagggtgggggacagcgtcggggcggtgcgggcgtagatgaagatgtcgccggacttgaatccgcccatggcgtgctgcgacccgccgaggagcggagaggtacggtggagcaggagcttggggccgaggagagtggattcgcgactatggacgagcacgacgtgaaagatggccaggcttgtcggcggcgtctagaatcccgacctcgccatgcatccgaatcaaccacggcggcacctcccgcagagtccctcacaacccgcccaagggtagcgcgccgctgcagacatgaatcaccggttgcgccatcttgc

SEQ ID NO: 130991 - DNA, 542 bp, Zea Mays
ctcgattagaaatgaattagaggggattaaattccttgcaggttaaaattatatagaaagtaaattaatctctctcaatcctcttcgattcctatgtagccgtatggcactaatgtgcggctgtgagggcgaggaaggtaatccatctttcttttatctgtcgatataatgcaaagcaatcaagggttccatctgacaaatgtagtagtagcacactccttgacctactttgttggattcgaatatgggaattgatatatttaggttggatggtttctgttcatcctctaccctgggttgttcttcaacatcagctgcacacagttcacatgtgcctctacctaccgttggctaacctcctttttctcggcacgtggtctcccgtccaccatgtcttgctttgttgttcattctatcacgctaaaacggcttgtcgtgttgtccttgtgcaatggcagggagagggggttgagacaccccctcacaagtcacacattctatgactcctatgttatatataattaatcactttcctactatag

SEQ ID NO: 130992 - DNA, 619 bp, Zea Mays
tgggtcgaggagcatcaagggtacatcagagtactgaaacgagggaacagagggtatgaacgaacctgtagcgcgctggccacgatgagctcactcagtacggtgttctggaccgattttggggaagtctcaaattggggcgcgctggtggacgatctggggcacgggttggtgtactggttgcgtgactacctagcgaagccgatggcacgctcaatttataggacccaagggcggtggcccatgaatttgacatggcgcggtggtggccggagagaggggagagcactggcgcaaggaattggtggctttcaccgtggagaggtcaccggcgaccaacagacatgcgtaatacgagttactgcaacgtggtagagcacctaggcacgtgggcgcggtcgataggcggccaactccggcgagcttatctgaaccagttgtgagtcaggtggacattgtggccagagcggaacagtggcctaagttaatccttaatgcgatatttcctaccccgagcagctatcagtactccgttgagcatgaatcgaagcgcttggcgtgaatccgagcgcagggtcgcaggcggcgaggttcactgaaccagtagatctttttgcta

SEQ ID NO: 130993 - DNA, 1205 bp, Zea Mays
tttatcaatgtccctatctctttgtagcattgattctaaaagatatccttcttgggtactatttaaccttccaaactaacatattctttcttatgtgtagtagtgtaaaagtcatatctcatgtattcgattttagttctattgagtttaaaacttttggacttcagagtctcctgctataactcatttcctatttagtcatgcctagctttcatcaactagcactatgtcgtccgcaaaaaacatacaccaagtcattcgtgtcctcatcacttgttggaacactagtcacaatattgttttacatgtccttaataagttcaacatacttcgataaaactttatgtttgtccaataatatccaccatatgccatttcttggcattttgttataagccttcttcgagtcggtgaaaatcattcatatgaccttcttttgctcccatggataaccttccggacataaaactaaattggttcatagagatccttattatttctcttagacgttgcttggtaattctgtcctatagatccatagtatggtcatcaacttaatttcttgataattagtacaactttgaatacccccttatcgttgtagatcggtacaaatatacttctccttcattcgccaagcatcttgttcgatcggattatatggctgaataacttggttaaccatactatagttatgtctttgaggcatcttcatgtcttgattaagataccatcagggctcattgtcttaccccttgcatccttttaaatgtctctctaacatcagttttttggatcctacgtacaaaatgtctatcggtgtaattaaagagtcactcaactggaagtttgtgtccctaatctccccattaaataattagttaaaacgctcttactatctatgtctgttctcattctcgttcactaagatgtgctatgttttatctttaatgtacttaacttggttgaagttccttgtctttgtgctcaaacattggtgatgattctcatacaccctacccattgtgacacaacttttgctttgtcgtattttttgataccttatacttttctatgttgtacacactcttgttatagcattctttcttctccttaatatccttctgtacttttttgtttcaccaccaagtatctttagcctcacctccactttttttgttgctctacacacctctagaccacct

SEQ ID NO: 130994 - DNA, 511 bp, Zea Mays
ggtggtgctacatttgtcctagatttagaggagcatggggcttgctggagaaaaagggcaggtcctgcctttgtcatgttgtgtagaatgggacaatagtggacacatgtatggagcgatggtacgatcgtctagccccgagaggccctatctaacctgaccgatcctctcctatccatctagagtaggcataattgcatcacagtagctcacctgtaggtacctctaagcttatggcgacgacatcaactcgactggcgtgatgagaaaggagatgctcatgttctgctcctctagccctagtgtgcccagcatctttgtcggcgacatcgcgtttggctatgacgtcgacaacggtgacctctcgtgtaattccactggcacggtctgcctaggccgtgggagcatgtcccttatggtgcagcttgatgggtttagcgtttgagtaggtagctagatattatagagtaacatgatagcaacatggatgtttggaccgtgcctgactttg

SEQ ID NO: 130995 - DNA, 459 bp, Zea Mays
caggggagatgcagagcacttcttattcttctatgggtttttggctggttttaaaccagcaatcacccacactttcagaacttccaacaaaaaaagaaacaatgaggttacaaaggtggagctgaaatgtaacaagcatggaaaaacaaaaaagctgatcagcaggaacaagataattgcatagaacatcaggggtgcgagaaagggccaaaaaggaatacaaatgtctaggttaaaacagactgcagagtagtcatggttataaaagaacatcaacagaagtgggtgatcgataggttagacttggaacacaatcatgatctcagaccagccgacagcaacaacatgtttagcggacataaatacatgactgaaatggaaaaaggagttatacgaacattgaaccacaacaacatacctactcgaaagatgattgctatattgtcttatctgagagga

SEQ ID NO: 130996 - DNA, 751 bp, Zea Mays
tgttggttgtttatttgttgatcgtgtgctcttggtgcggtggaacctgcagcgacgtggctcacctcctttgccctcctgtttaacctccccgcttgtgatggatccaggcgccaacacggtggtggcagggatctctgacatcagctgcaatgattaggtggtggcgtgcctactgctacagtgaaatggcgcccagtgaggtgagcgacgccttatttatgcggaagaggtcgcatcgctcgtgcgtgttctactgatatttgttgttaatttgccgcccgtgcaccattttgttgctgttggttgttgatttgctcgtaagcatatgtgtgacgtctagcgcggggccgccacacagccatgcagtcaactactcgctgattccctcgaatctagataccaacggccaagcggaagggcctttttgcaaaattgtgggcgatgatttgggtcgacgaaacgcacaagcgtggacgacgatttagttgtttgttgacagccggcaaaataggacagcggcgggtgggccttggcaaaacatgggacgaggaaggtgggcagagtgcatcgatagaataggtcggctggactgtgggtttgatctaaaaaattataaagagttttttttgcaaaagcgacgactctagaccgttgaaccataaaaactggtactttattaatacagtaattttttttaattttcatatgacaacatcaaagaactcaagcattaatgcatgcacgcggg

SEQ ID NO: 130997 - DNA, 441 bp, Zea Mays
gttggtaggccgtctccccaactcacttaaagattctgaagagtccaataaagcgaggggataatttgcctttaactttaaatctcctcattccatgaagtggtgacaccttgaggtacacatgatcaccttcctcaaactccagtggtcttcttctattatcagcatagctcttttgcctggtttgagctaccctcaagttctcccggattatacggacttgttcttctgcctcttgaataagtttaggcccaaagaactgtctttccccagtctgatcccaatatagaggagtcctgcacttcctgccatatcaaagcttcgaatggtgacatcttcagactgccctggtaactattattataggagaattcagcatatggtagactcttgtcccaactccctccatgctaaagggcacaagctctcaacatatcttcc

SEQ ID NO: 130998 - DNA, 486 bp, Zea Mays
taggacacgtatgcgtgtgtgtgtcgtggtgtattatagtggtggtggcgtaagatatttgattgaggtgtgcgggtatataccgtattatggttatactcgcaacgaggaaagatgtatgtattgtgtgacccgacgtttaggttgctattgtaaatcgtgtgaaggatgctccctatggtcatgtgactaaagggtggtgtagtggtaaagcgagaagtaagtttaatatttttaaaatgattagttgatagcatctgtcgatgtcgtcatgctttctgttgtatggcgggtcgatgccttgccttgtcaaatattgcattccatgcccctttggataaataaatgtcttgttgatcgattagaggtcttatacgagtgttatcgcagcctaatactttttggaggcaagtagcgtgcacaagtcggtccttgttaaaattgaagaacaatccgctaagatatacacataagtgctttaggtcc

SEQ ID NO: 130999 - DNA, 722 bp, Zea Mays
cctatccgaacagttaggtatctgcagccgttcgatcagaaacagacgcgccttattagatccaggcaagttacccatccgtgttcacccccgaccgtccgatcagatcctacgatcaggatccaaccacccgaaccggtgcgcgagatcaaatccgaagcgttcaagcgaagagcaacggccgagagccagctgagcaaaaggggcaccctattccaatccacgccgttccttcattatccaacggccgaacccacttctaccccaacaccactccacacagcggcggcatcgccgcgagcggcggcgaaattcaccggagaccctgattcaggtgccctgagccccaaactatggtccacacaaccataccggaagcctggtatcatccgaagtcaacactctcccacgcaacaccggatttctgcgcccgcgcacgtcttctccgatccgcaacaggccacggcggcgcgactctgcccgcgacgcaccctcaccggcgaggtacccaacccgcggacaagagcacaaaacccccaacccgaaagccccaacgcgataaagagaggacggcaaacttcatggacggtttcttacatggaatccctgcggcaccgacgctctcctcggcccgcgacggacacggcaacagcgaggcgaggcaacaacgatggcagcggcaatcaaggtcaatcccccagcccagagagcactgccagcat

SEQ ID NO: 131000 - DNA, 301 bp, Zea Mays
agacagggtactggtcgttggattgtatgtggacggttgcgattaggcgcacgcataccccttcggtaggatcatcctgggccgtccgatcgggatcccgtgacccagatttgatctcgaacgttttaaatcaatgtcgttgatctcggaacatgcggtacggattagatctagcgcatcatttcggttgagcatgttcggactgtcaatcgttaatcggatgggcgttgggcgatctccactgtttaaaaacccgaccgttagatcttgatccaggggctagcgtagcgtgccagttcta

SEQ ID NO: 131001 - DNA, 352 bp, Zea Mays
cacttagtaggctagtgcataaagagtttcagtcatatttaggattgtcaagtattaatgcagtaaaggcctatgtattatatttcctagtctgatagctcaataccaaagtttatcgtgcttccaaagttggccatatgcgtataaagcacctagtaagctagtacataaagagtcccagacaagtattaatgcggtaaaggcctctgcccactaaattgggcttcaattggagccacttctcaacagggaaagcctgacagctagatgacaatctgcccctctatattactcagaattatgcagttcaagacagtggggagagttttctccttccatgggttctccatgg

SEQ ID NO: 131002 - DNA, 554 bp, Zea Mays
caacaaccgaccgaaatccctgctgccgctgcgcgatttctgctgaccgcgtccctagccgacccggctgtactctagccataaaatcggtgcccttgcgatgcccacaaccctcagaccaagcctccattggctcttgagtgctagccgccgcgcgtgattgtgtccagtgagggagaaagcgccgctgccgtcgaccccctcgctacaccgtcgccgtgtccttggagtactgtcccggtgactcgccctatcgcgccgctggtgtgtgaccacttcagaaaggcgggaaccagccgttcactcctcaattgctcgccggaggagggtcatcaccctggtcccgcgcctcgccgtggacaaagggtcctggcatcacgactagctggtaaatctacctcacatgaattgctgattcctaatcttagtgtagcacctgtatgggttcgatttggtgcacccgcgccttagtaactgacctcgccggagttctctccgtggctctgcgcgcgccgccgtcgcccgtgagctgggagagatgatggtccctgggt

SEQ ID NO: 131003 - DNA, 339 bp, Zea Mays
ttctaattcatttaatcactttaaaacagcactggactggacctcaattaatgggaaacgcaggggccccggtgcaattctacctaagactcagattacaggcgcaatggactgcgggtttcattcttaactaaccgaggggctcttttaaaagactgccagggcgaaggggtacgggtgaaccacagccgcccgatcatcaactatcgctccaaattagatctgctatcaaattcaaccggtatgcctccagagccgatggatccgcgatctacggtcagaagacactcccaccagcattaaccgctccatccatcggatcagaaatccatggcccag

SEQ ID NO: 131004 - DNA, 362 bp, Zea Mays
ttcttggggctctaggccatccttgtggttaaattgggagttgggacagaaatgaaatgatcactgcacattctagcaattagccttgtcataagttcgatcagcgctacaaaaaccaggaatcctcaatgacacaggtgtcaaataaaagcatgttttcttatttttaagggccagtttggcagccgcggttattttagcacaggagaaaactccagcggtgggttttatccatatattcatttttcagtgggtaaaaaccccggataggacaattcaaccggtggtcgtttggaaggagcaactgccatccagtttagtacaaaactgaatgcatacactaacgcatactggtgacattt

SEQ ID NO: 131005 - DNA, 392 bp, Zea Mays
gttggatgtagaggagggaatttgacggtaacctcaccagcgtccttgagatcgaggagcgttgcgggattggcctcgctgcgttggccggggagctaatcgcgtcccaagcgagctgttcccagtgcatttcatggcgagaaggcgcacccgccggcggtggggagctccgcctccccgtagtccgtagtcgtaccccagcgcggtcacccctcaccatatcgcctcacccggccggtacattaagcatcgcccagatcaacgtcggcacggtctagaactcgacgccgctgtagcacgcagcctccaactgcccggaggcttggagaagattgacattgatctccttcccaccaccactgcactctcgacggactgatgcttcctgcttt

SEQ ID NO: 131006 - DNA, 693 bp, Zea Mays
tgtttcgccgtgtcgctgacagattacagaatagccctccggtttctattccttcgcacggtgaagtcctcgacgacggcagcgcgcggaggagctccggcgagctagcaggccagtcgattggggaaaggactgacacccttcttcggtcgaaactgaattcacgccccaaccattgattcccctaagttaattgcacaaatggtgaactaatgtggtctggccacggtgagcgcgcggatgaaccaaagatccatgctatcccgacggtcagtggacccctagtctaattggacgggtcagcaagcatcgtaaacatgtgagaatgcttaaacgagggagagggagggttggactgaccggagtacggttggccgcggtgaggttgggcttcgggtggcggagaacagatttggggtgaatgtgaaattggagagctgtggggagtaatcagagttgcgtgtgggttctttggacgcacaattacctagcggcactggccaaggctccaatttatagatcccagaggcggcggccgtgaattttgagcaagacgcgcggcggccggaggtggaagaaagcactagcgcatgtaaatccgtggctaacagcgtggcaatctccccgacgacgatgggacagccttaaggtgtcaaggcggtgcggtggaaaggctaagccacgcggcgcatg

SEQ ID NO: 131007 - DNA, 492 bp, Zea Mays
attatcttgcaccggggtgcttgtagtaggggatacaagctttgcgagagagggaacggatcccgggtctcttgagagatctagtgttgtggtgagaagatttgcactgaagtgttttttgtgggtgttgtatgagccgtatgggtggtgaatgcgtatggtgtcgagtgttcgatggttgtgaaattatcaggcctaaagaacctaaagagctttagcgcttccaaaagcttgccttgggaaggccctgggcatctccttttataggtacaaggaggtgacccagctgtacatgtgggggtgtatctatgcactaatgtggacagcggagaagtgcctgagccctgtagaagcgtggccggcggcgcggccccaagtcctgacccctgtagcggcacggccgactccgccgagttgaagccgagctctgtagcgccgtggccggtgatatggcctagtcgtcgaggtggccttgaagtgtgtgccctgctg

SEQ ID NO: 131008 - DNA, 1153 bp, Zea Mays
aacatttagaagcatttctgagagctgtcccacatacggttaagcacagtctttgttctgaagatgctgatctggggagtttagttgcacgtgtgattggcttgtccgtccatgcaatgttggttaaacacagaatgattgcagtgaggtcagtactattgctagtggacaaggcaatttctcagaagacaatttctccatcggcttggggacactatgctcgtgtgatttcgctgaagatttatcgcagtgctcgggggttaggcgactgttgtgctgaaaagtggttcccaggtcacaaatgtgccaatagtgtacaactcaataccatagaaaacatatgaaccgacaggcgacagtgcctgagcagctcttcatgcatctgtcacaagcagcttggggtggtttagaatgtgcccacactgtgaagtttcaaggttatatcaaccaccaaccagtgatcatcatcatggacagtggcagctcacattctttcttgagtgattcactaaagcatctgtttccaccttcacagttgctaccattttcattgttagtccgagtggctaatggaacagtggtgcattgtccacatgaattgttacaactgcagtggcgaattcaaaagtgtgttttccttttggatgtgtccttgttgcccctgccttgttctgacatgatggtcggcatggatgggttgcaagcttgcagccctatgagagtgtattgggcacaaaaggggtggactattccatatcagggcagaacagtggtgctgcatggtcagtcagctccgacgcctatgtgcatggtggtggagctctacctggttcagaatatgtcagtgcccatatcacgaagtgcctatatcaggtgcctgtacgcagagaagtggtttgttgaacacaagtgggccagtatagtccaattacatgccatttacgaagtatgggattctctgactctggaggagtgtacagactcagttcctgcatactttgcgtctgcctggagggcttcagagtctgccactactttgcgtctatatggcaatattcagcagttaccgttggtggttctcatttcctcaggatcatcacacaccttcatcactgattgtttcttacacaagttctcgaaagttcaacacatg

SEQ ID NO: 131009 - DNA, 619 bp, Zea Mays
ctgattgtgtttttctgcagaactatttagaacccatagctcttattgaattgtacattagttttgtgactggaagtcgtgtgtttgcagtcaattgcagacacatgatgatcttgtttgttattgcaagaacctgagtcttgttgtacttatctgctctcaagatgttcttgtttagattaactgaatctgtctacttcttctgatactttatacgcagtctgcctgtccgagctttagcctgagttcctaatatgtgctgcaccccctccccctgtccgagctctagcctgaatttgtctacctcttccgattccttatatgcggtaacaaattgtccacaatgattgtagcatattactcattaatatacacttgtgtgtgaacctgtttgtttgcttgtctgctgcctgcccagctaagctactccactggttcctgctgctagatggaactatggaaggtgcatggttaatttagtcgtttcagcttgctacgctaaggaagtgattgataatgcttgccttattagattggtgggagtatatatatacgtactctagctatgctgttaagctcaagtgttttatttgcactatcctcccctggcaaataatct

SEQ ID NO: 131010 - DNA, 295 bp, Zea Mays
cagctgcagaccatacctgtaacatggccatttgcatgctggggattggacatgattggacccttcaagaaagctcagggaggctatacccacgtgctggttgccattgacaagttcaccaaatggatagagtacaagcctattggttctttaacttcaaccaaggcagtggagttcatacaagacataatattcaggtttgggataccgaatagcatcataaccgacctgggatccaacttcactagctctaaattctttgatttctgcgaacaacggagtatctagatcaagt

SEQ ID NO: 131011 - DNA, 312 bp, Zea Mays
ctaacatgctcttgttagaactctaaagtacctaactttcaccaggcccaatattgcatatgttgtccagcagacgtgccttcatatgcaaatccacatgagcctcatcttatcctgatcaagtggatcctttggtaacttcatggtaccctcaattttggacttcaacaccacttatcctcaacatctaccattgtgtcctattgtgatgttgattgggctaattgttctgatactcacaactccaccttaggctatgtagtgttctttggtgctatctggtctcttggtcctctaagcgttagttcacaa

SEQ ID NO: 131012 - DNA, 385 bp, Zea Mays
gggttgcaaagcgccaaggagatttgggatacactcaagatggcacgtgaatatgacaagatcactaaaatcttgaagatggagttcatcgaaagggagctcaggaggtttgccatcaacaagggagaagatacacaagagatgtacaaccggctcaaggcattggcgaaccaaatctaggactacgggagcaccaaatggaccaaccatgaagtcatcaaattcatgataatcgtaatgctaccctcattactttacttcgtgaaaatcctaggtatgaggtgatgactcgagaggaggtgcttgggaagttatttagccttgagatggtgcttaagtactcaaagcacattaaagacttggctcaaggcaacatcaccaccac

SEQ ID NO: 131013 - DNA, 310 bp, Zea Mays
aggtcggttatgatgctattcggtatcccaaacctgaatattatatcttgtatgaattccactgccttggctgaagttagagaagcaatggatttgtattctatccatttggtgaatttatcaatagcgaccaacacgtgagtatagtctccctaagctttcttgaagggtccaatcatgtccagtccccagcacgcaaatggccatgttacgagtatggtctgcagttgctgtgctggtaaatgttgttgctttgacaagaattggcaagcttcacatctctggactaactcggttgtatcactctttg

SEQ ID NO: 131014 - DNA, 382 bp, Zea Mays
ctagccttgttgagtagttgtgcagaaggggatgtaggtaaaccactagggatctccaggttcaaggatcccgtccctcccccggtcccaccccacccaacccaacaaaaatattgcggtaggaagatagcttaggagagctttttgaggctggtcaagtgggaagtgggatagtgtgtctggccgaaaacaagaagcaacaggcaggtgaatggtgccttgaactagaggtagccacctggttgttgtccatgtgtgagcctgctttctcgaatgttgccttgaccctcgaactagagacaaccaggttgtatccatgtgtgcacaagaacacaatctgaatgagcatttgttgttatgtctaacaaagtttaaatttcac

SEQ ID NO: 131015 - DNA, 426 bp, Zea Mays
cctgcctcaccggaacagcgagatcaccgtcgctagactttggccgcccgtcaccgcacgtagaccgagctatcaggtgagccattcttcaattcctcgcgtccatgccttccctgacacctagtgaagctcaccaaccggtttaattgaactctaccgccctggataggctggagccctcgtcgtcgacgagctctcccgcttgcgcacgtggaccggcctactccgaccattcctagcgacgatccgcacatcgacgtgaccgtcacgagtcacgacctcccctacgccctcgaccacctgaccggagcaatctcgccgccggtaagcccctccgccctttcctccaccgcgggtactgtttaattgggggaagaatctcaggttaggtttagtagaaccctaggaggttttctaaattgtcag

SEQ ID NO: 131016 - DNA, 649 bp, Zea Mays
ttattgggatgtgataacgctcatataagactcctactcgatcaacaagacatttatttatcccatgggcatggaatataatgatttataaagcgaagcatcacattgccatacaacaaaaatcatgacaacaccgatagatactatccactaaccgtttgaaaaactaaacttacttctcgcttgccactgcatcactcctcaatcacatgaccatcatgagcatcctccacaccattatataatagcgacctaagcgccgtgttacacaatacatacatcttttctcgtcgcgagtataaccatattacagcatatacccgcacacctcaatcaattatcttacgccaccaccactataatacaccacagcacacacacacatatgtgtccccacgttacgcacaagacatcaaccacaccagtgactccaataagatttatcatattccccattcacctcgactatcacaatcgtcgatcatatgcataaaacaaatacacctttcatgtagacacctatcgatgcattccccaacacataatccgcaatttaaaaatttatcctcacagcaaaccacacatcaaatacattattaccgaaaattaaaaaacatccagccctctttctaactcgtttcctttcgcc

SEQ ID NO: 131017 - DNA, 649 bp, Zea Mays
cactagccccttccatcctaggcgctatcttaccaccctcggtagtctcttcccatcgatggcgcccttcaattccccatctggccggtgctatatattaatacaaagggaaaacacaggcaagccacgaaaggaggtcttctaggttgagctcaacgaacagtctattaatcccccatctgggcagacatcgagaacaacgacgaggattacttcgccaccaccaaagcgtcgcgccccgtctggatttggttgagctcctcgccgcttttcaggaggtcagtttcccccccacccaccttctctatatgccttgtgatttggttgtatgatttggtctatgcgttcaatattagctaccagcaaaacaatccgcctaagccagtatagcagttcattcaccagcattttcccttgaagaaacaagttctaggaggatcatcatcctgattgtttgggatgccagtattgttgactccaatcaggcgcaacatgtcgtcaggttctatagactccactgtttgttggtctaaggagcacttgatttctaagaatcagtacaatcagcaagtagataacctaagcacaacattttgagagagacggttcgttttcattcagcctcagctgttcttgtttccttttctac

SEQ ID NO: 131018 - DNA, 428 bp, Zea Mays
gcggggatcaggcatgtgcttggtactaagaagactccaaacccgcgaggggaaatcatagtgttcgagtcattctttgaggctggtctttgctttccatgccacgtgtttgtggtcaaagtgctagagcatttcaacgttcaactgcatcaactgacgtcgaatgccattgttgcattgtctaaatatgtgtggcgatgacatatggtggagagccttcaatcaaagtctttgcgaagcattactgcctccataggcagaagaagactgtggatggtagggtgatgtagttcgagagctgcactttcacaccgaagaccggcaagatgggtggagaagtgtatgaacccatgtcgtgtgcaaaggacatgtggggcagttggttcaagtcttggttttatattgatttggagaaaatgtactaggtg

SEQ ID NO: 131019 - DNA, 461 bp, Zea Mays
catgcaataaacccttccaccaagtcgcgacagctgctcatcctagccacgcgtcgaagggcgtcttcgcctttatcccccttttttagcttaaactgcgggaatgcgatattgcagtgcgagcatagaatagacggaggtagcccggaaacccccttagtgtcctccagtgtcacgtaaaaccaaaaatccaaccagttaccccatttattcttggtgcatgacacaatctccacaacttcactcgaagtctttctagtcctcggcgtgaaagtgcatgtaccaaactgtgcaatcttgccaccaatgacctttttctaccaaaggagacaataattcttggcgaagacctcgacctagggctcccagccatatgaagtcactgcccaaagaaactttgtcagtgccaccatggcgttcgacgcaagctgatgactctaaacttcgaagcatcacaaaac

SEQ ID NO: 131020 - DNA, 432 bp, Zea Mays
gacaaggcgaaggcgtgggcgcgtgcaggtgtgagggcttcgaggaatggaattgccgaatgggcggagccagctgacccggacctgaacggcgttgagtagacagtagagtggtagtgataatagcgtggcgggctggcggcccccgagcagagaggagcggtcgggtcagccgtgaccgtgagcgtatgagttgtggacttcgcatgtcagtgggtgtgtgctgctcagctgggcaggagcccaggagtttggcactgacgagtaggagaaatttgctatttagtcattgtcagttttgaatgtctgttattatgcttgatcgatgagaccatctatatctataatttgtggatctaataatgtactgacgacgtctaaaaatggtaatgtcaaaattgccaatgcctcgaccagtaaagtgcacacatg

SEQ ID NO: 131021 - DNA, 338 bp, Zea Mays
ggtgtgggtggcttgatgggatgcgaaacagcctgtttgctatatcgtgcacgagtggcatgattgggtggttaaccgccctgcccgttaccagcgcctctcccaccacgtgctcctctaacgcaccatcctaggtggttcatgccctacaaaacgcatagtcttccacgcggctccctaggcggaggtatcccagagcgatggatccttgcgagcggtttgcggggggcaccttccaagccttgcttgggtttcccattcttgcgcataaaacagagtgggagggtgcttgggtttggttacgcttaccacattctcgtgcccaagcatatgtttcc

SEQ ID NO: 131022 - DNA, 551 bp, Zea Mays
gtcaaccccctcgaagagcaaagcccccggttgatatccgcatgatacagcaaattcctgtagctctgacttgtcctcttcagacaattcttggccgcccacgtaccgaaggtcgaaatatctttgcttggcgctgcggccatttcttcctctatagacacatctttaataacatctgatatgagtctatcaatatgtggcattgttgtttcggcctcatcagtgtttttgacttcggcagcagcagcagcttcgacagcagcatcaactttggcacccgcagtagttactattttagttgctgaggttgaaggtggtgtttgcttgacggcttgcatcatgttaactatttgtcgtttcttttgctcttcaacatgttgttctttcttctgaaaaaattgtgtcagttctgatcacagaggacttagcagcttgaagtgcggggaatcagtcattacctttaaaatttctgctacttcggtaacagagggcgttgaaggagcttcttctcctctctcatccaccttcggctcagcagagggcgttatgtc

SEQ ID NO: 131023 - DNA, 454 bp, Zea Mays
tatgattttcggaagacttacgtgattgaataatagaaactagattctatgtggattaatgtatattatatgagagagtatattaaagatataactaattcaactttactctaagttacaacctgaggagggcatatcctaatttggttataatcatggatatatattaagaaagattaatctacccaaaacataggttaaatactacctatatataaaagctatgggacatgatcaaataatattgttattgtgtaggcaatattattatgaagttaacacaactggaacgagtgaattcggagttaaaccggacgagatatggattaaatagtttctaggtattttattattaaatttatacctaaataatacttccaggggttcatttgctaattccagggacttaattgtgaaatactcatactattgagggatggcgggttagttatta

SEQ ID NO: 131024 - DNA, 485 bp, Zea Mays
gtttgttcatcttcgctctctgagaattagttttgccaagttctttggtctttagttcggtcttctgacgaacaaatcctcacactgagcttgattgattttctccattttcttaggcggaagaaccctaccctattcttcttaacaaaatccctattcatctcggtcttccacccacaaaacatcttggccatagcagagagcatcgacttccttattgcatcctctatgccttttgggaccttgaatgactcgaacatcttagcccatagcttattgcgggtgtattcatctaaatccttccatttctgaagtgtgattggcactatatatctaacaatagactcgcaggaatttcgaaactttgtaaccacgtcaagtggttcttcaggaaacccatctgcattgagttttgttacgtacataactgcaccttctttcaactgattgggacctcgtcgtcctcatttttgcttctgtgaaat

SEQ ID NO: 131025 - DNA, 745 bp, Zea Mays
tttttggtatgtttcacatgaacgaattacgcggtttgctgcacacacaatggctggccagtagaacccttggtgcatgactttggtgcgagggctcttaggctcgagtgagaacggtatatgccctcgtggacctctcggaggagtttgatgccctcaacctctgtaatgcaattgagcaagggtcggttgagtccttttctgtatagttgcccttgtattattgcgaactcgcagcttctgtattttaacctcttggcctcggcctgatcagtgggatggtagtggccctgtaggtacagagttatggcactctccattcttcaatcataattaagtttacaaccctctagcctttaggatcttccatgattttggaccctcggggtttttgaccacgggtgtgcctatcgtatggaagaatacatccgagggcatgggatcaccctttgttgctgcctttgctagcatgtcagcctcttcatcctgctactgcctatgtgttgaagcgtgaatcctttgaattgcctttccaaactccgcacaactgataggtattgcatgaggaccggctccctggcagtgcagtctttctcaatttggccagcaacgattttggaattagttttgactatgcaggtctttatgcagagggctttgaatttccgaagtcctaagatgaaaacctcgtactctgttatgttgtttgtgcatttatctaactcgagcgtgaaacttaagcgtg

SEQ ID NO: 131026 - DNA, 885 bp, Zea Mays
cggctaaggcctctggaggcatttataggcgagggcatggcataggcacgcagggcggggcgaccacgcgcggggcgcgcgctgccgcggccagtccgcgctcggccggtcaggcaagcgatcgaacccgtggctttttgcttctgccagagttcaagcgctcataggttgaagatcttcgcgaatttgggcatgatcactacgcaaggtttgctcccccaacaaagctttgtcgtttgtgtgtggaagtggagcggtttggggcagtgtacagagagttgtcatgtcacaaaggtggcagtgtcacaaggttgagtcctgaggtaaaactgcgccaaaactgtgtcaaaagaaattggtttgagttcaaatttttccagggcgtgttcaagggaatttggcacaactttgatatttggacttgtttgatttgagttttgaaaaacagagaacgagattgatctttgggaaggggctgaaattcagatttctgaatttctgaatttcccccaagtgcattagtttagggttttttttggggattttaaaaagttcaaaaggcaaaactcccttactatgctttgttatttaattagtgaactaaaactttgtaatttggttttctccaagatttgtatttttctcccaaggttttctcccatttaccctttatgcttaaatggttcacttaggatttattagggtttgagagttttccttccttaggattcatgacaagattaagcagagtttaagaagactcaacataaatcttttttctcattgttaatgtttattccttcattgagattgcatgtgataataggttggggttagcttaaggaagaaccctaagtgacattgtggtgtcacagccttcccccg

SEQ ID NO: 131027 - DNA, 1808 bp, Zea Mays
gtggtttgcttcttttggcttgaacctttctgataaataatacagtcagatgttcattcattataaaccgtatcatactctccttttatttttgtaagtcgcggtttgactcagcactatcagtaacatcgcgacttgactgttaatttttcatatattataattgttatgggcaattgatggggccagctaggttagacctattggactgagcagatccattaggatagagttagttagagataggagtaggatagagtttagagataaggtagattcggttaggatatttgcttaggggtcaagttgtctctataaaaggagcacccttgtaccagttgaaattaagcagaaaatagatcaaagaagtgcagctcagcctccaagggatggcgagtcacagatccatctgctatcccatctaccaatcaataaactacatcaataatgttcatgactatgaattgaacatatggaagtgttttcaaattttcaaatatgaatccaataataccaaatatgtatgctgtattctacaaggttgtaattaattgttggtcaaaagttaacaaccgtcagctctctctgtcagcaaaccagtttgattggaacaggttatcctgggttattctactgatcccgttggtccaaatccttgctgagcttgcaatgggtaaaacagttgcacactttactcaagctgttctaagaattaaaaggaagagtctagattggtgtcgatagtgcactacagctcaattctgctctccatgccagtcctttgggagggcacaatggttttccagtgacttacagaacattaaaggaaatgtttgcttggccacatatgaagcagtcagtctatgacaaccttacagaaagcacctatagaagctccaaataccagtaggcagtagctgaagttttttcttccttctagcacatccaatggtatcctagctcctgaatctgttgacattgccaacctttctatgttcatgatttctaattgtttcttcgtgcttattgttacttagctacttcagtcatgtccggtggatgatcactcattcctctatttttgcattgctaggataggatatttttaatgaattgcagtaccctgtcttagaaggggttgcaatagacccaactcattggctttcaagaacagagagtgcaacacatccatgactatgtatgaacagcattggtgaaagagcatccccctgtctcaaaccacgctggtgggaaataagctctccgggcattccattcatcaacaccctagtagatgaagaacacaagagctttgagatgatgttacaccagatagggccaaaacctaggtgcccgagaacttcaagtagaaaaggccacgaaacagaattgaaggccttgccaatatcaagtttgaggaggattccggatagcttttgcttgtagatggctttggctatttgctgcaccagtaggaaattgtcatgaatacttctccctttcacaaaggcgttctgatttggcgacactaactcaggaagcctggcagcaagcctattagccaatattttggtaacaagttttgcaaaactatggatcaggctgatcggacaaaaatattttacttcaagagcctctatcttttttgccagaaggatcacataagctgaattgaggagatgtagtttggacatcaccatggaggatcacatttaaagcaaccaagaaatcagcatttataatcggccaggcaatttcataggagtggccggtgtacccatctgggcctggaagtggggacttgtcgg

SEQ ID NO: 131028 - DNA, 464 bp, Zea Mays
aactgggttcccctgtctgacactatcttccttggaatgccatggagtctgactatctctttaagataaatccgggcaagggtggctcctccaaaggtagttttcactggaatgaagtgggctaccttggtaagacggtctattatcacccagatagagtcgttccatttttgtgtccggggcagtccggttacaaaatccatgcctatttcctccaacttccatttgggtactggaaggggttgcaataggcttgcaggcttctggtgctcggctttagctcgttgacaagtgtcacactgggccacatattgtgctatctctttcttcatccctctccaccagtatctggttttgaggtctaggtacatcttggtggttcctgggtggatggagtaggctgagttgtgagcttcatcgactaggacttctcgtgcctctccttttggtacacatagacggtt

SEQ ID NO: 131029 - DNA, 577 bp, Zea Mays
caccccttggcatatgtgagcaaagcacttggtgtcaaaaatcagggattatccacttatgaaaaggagtatctcgccatactcatggctgttgataagtggcgacagtaccttcaacatggtgaattcttcatatattcagaccatagaagcttgtctcaccttactgaacaacgacttaccacaccgtggcagcaacgggtgttctccaagttaattgggctgcagtacaaagtggtgtacaagaagggtattgacaatggagcgattgatgcattgtcacgacggccatcatctgaattatttagtctgtcttcagccactcctcaatggatgcttcaggttatggaggggtatacgggagatgatcaggcccggaaattgctggtagccttaacagttagtcccaatgactcgggacattatacattgaattcaggcatcatcaggtacaaaggtcgtgtatgggttggcaataatatacatcttcagcagcaaattatgttggcattacacgatagccctgttgggggtcattctggttttccagtgacatatcccaaattaaacaactttt

SEQ ID NO: 131030 - DNA, 377 bp, Zea Mays
tttcctgaggtgttctatattccaggagttcccgacttctgtgtcgtccatctgagtgagacgatatgatcctggccgagtgacttctgctactatgaagggtccttcccataagggcgataacttgtgccgtccctcccccgttagaattcggcggaggacgagatctcctactgagaaggatcgccgccgcacagccttgtcgtgatagcgccttagagtctgctggtatcgtgctgattggattactgcattcagccattcttcctcgagtacatcaatgtcctccagcctggtggcttcgacttctgctatgttttcgaagatcaaccttggcgctccgaacttgaggtcggctggtaatactgcctctgacc

SEQ ID NO: 131031 - DNA, 318 bp, Zea Mays
gttacaggaatggtctgcagctactgtgcgggcaagtgtgttgttttgacaagaattggcacgccttgcacttttggactaactcggcaacatcactcttcacagttggccagtagaaactagatctaaaggcttttcccactagagtccttgatgcagcatgcatgccacactacccagcataaatttcatctaatagttgtttcccggtgggcgagtggatgcatttcatgaggactccccctacgcctcttctgtacagcaagccccctatgatggtgtagcgggctgactgccttgcaatgtgctctgtcgtag

SEQ ID NO: 131032 - DNA, 667 bp, Zea Mays
catttttcatagaatggccatattcagttcacagaaataaatggaccgcagttcacagattagaattcagttcacagattacaaccggaattcagttcacacagattaaatggactgcagttcacacagcagttcatagattagaattcagcggctagggttgccatgctgcctgtgccgtacaccatcacacagctagagctagttcaattccctttcccttcccgttgtcacccctctgttcagtccacaccacaccctcctcaaccgcaccgtcgtcgtctagccgactagcggcgggagctatagcttcgacgagccgacgacaaacaccaacaggaggggaaaggagggaagagaagctagggcctagggagggaggagagctgctgggagacgacgacgagaagactggcgccgtaacgctagccgtccgtgacctgcgcctgatagaccttactgaaagatcgcaaggctaacaacgacgactgctgatggtatttttctattatggcaaagagaagacttgtatcctttctattttgataaacatgtgtacaccgaattgaagctcagttctgtaggaggtgactcatttccgttgaacatattcatcgacgccactcgtgttttgttcatcgacattaattctatacacgatgcttgg

SEQ ID NO: 131033 - DNA, 888 bp, Zea Mays
gtggagatcaaaagggtttatctccttgttctttttctttgcaaactaggtccagagaagtgtatctcggttttctctatgctcttcgaccaaaacttggtagtctagcgtctgctaatgcttttgtaaccgaagcaagccaactaaaactgtcccaccgcccagagcacacccttgcactccctgcatccagatcgtggtgaccacgcccattccttttcggtctcatcgtggccagccgttctcaaggtgacgcctgcccgactggtttatgttttgtggtctctatgccatggtgatgctcaccgagctattccttcgaacgctaccgtaacaggttaaccggaacatcgccacgccgccagtaaacaccgccgagggagtgtcttcgcgtcgaccgactaaattgttgtctctccgagccaaccaatgtaagaattgggtgttaggtgtcttactgatgcccgtagtggcttttgattaagtgctaccgtggtgggagcctcggccagcctcaccggagctcggtgtgccgccgccaccgtggccagaggcggtttagcttgtttgggcccgattaacttaaggcataagatgtgttagcatcgggggtcgcgtaggtgtgttcggtttcaccagagatgaccgccgccggcgagtctgtgcgagggatggccggcgtccgcggtccgccggagttggtgtcggggttaacgaagtgcgaaaggacagaaactcgggagcctcgttgtgatgtcagtggaacagagaaatagggcccagggtctttgttatttagctggatcagcgagggggtttttgcgcagcgcgggcgcagggccggttttccccgagttcgtgggtcgagctcattagtttcggcccagt

SEQ ID NO: 131034 - DNA, 739 bp, Zea Mays
aaacacgcccgcgcgcgcccgcgccctggcggttttgcagaacggaccccgagtttctgactaactgagaacaggttattttactgtttaaccaagtcactgacccttacaaaaagacccctgcgtttcttcctattcacgattggaagtccacgacgccgttcaagcgcggccgtgctccggcgagcatctacgccggccgattagggcaacaacagggttctccgagcagcggacacgaaattagcactaccccgactatttcccccaacataatttcactaatggtcacacagtttggtctagccacggcgaccgtggacaaggcggaccaatgcatgcgttcccgtcgattcatggcggtctaattcgatttaacgggtcggtgagcatcaagagcaagcaaggatgttgaaacaaggaaaccgagggtgagattggacctgaatcgggctgaccacggcgaggtgttcttcgcggtgttcttcaacggttttggggaaaacttggaattggagctcacggtggcaggactgggggtgatactggacgatggggtacgtgatgaagttgcggagctaacggtgggctcaatttaaagactccgagagcggtggctcccaatttgcccacggcgagctggcggccggaggggaggaagaagcctggcgcgcgcagttacgtggccaacggcgtggcaacctctccgacgatgatgggatggcccaagggagtcaca

SEQ ID NO: 131035 - DNA, 640 bp, Zea Mays
cgcgaccgtagggatttttggagcgaaaaataaggggaggtctagccgccggttagtgagcgacacctcggtgggcgaaagagggtgtgccaccgccacaccattgcgcctctcgacatcgctctgcccccgatattgcgtctaggagtgcggcagggatcctgattgcgtgtgcgtcgagaatcaggatggttgggcgctccgggacttggcgattgctcgtcggaattcgtctccccttgtcaaactgtggcaaccgtggatgcctcaggccaacaccctaattcatggtaatgatagcctctttggatttcccatacttccctcactgtttttcattccgccacatccgcgtaagagctccgaaacgggcaaattgcatgcgcgggggtcacacctgccgctgaccacaatgggcgccgccgtggtgtgctcgattggggaaggggatgttagggtcgggtcatgcactgtcggatcgggcatcgatggctcggattagaaaggtgttaccgattcagtggtaacgaatctagggcgttgatggcagattgggcgacccacattggttcgggtaaaataaaatccagaccgtccacatctgatcctagggcccctgtttagtgccgattcaggttat

SEQ ID NO: 131036 - DNA, 292 bp, Zea Mays
caagacactcttctagcgaagaattccttacaaattctctgagaccacgaacagcgatagagctagaacaactgcagcttccgctgccgcgatctctttgaactcgtgtagcgcaaaagatcttcatgacgctgggttggtctgtgatctgtgctactaaacggcgcgcatcaggcgaaattgttgtgttggcctatcctgctgcaccgcacataccagtttcctcctccacgctccacgtgatcatcagtcgcaaagtggtgcaaggctgcaactcatgctaggacgaggc

SEQ ID NO: 131037 - DNA, 645 bp, Zea Mays
gggaaagagaaggggcggtgtcaaatcagggcggcagcggtcgaatcgacggaggcggtggcgaactaggggcaacgacggctcaatcggggcggtagcggctaaaccatggaggagaaggcaaccggcggctgaactgtggagtagagagtcaacctaggcaaccagggtaatgattatatgggctagctagtgggctgggcctcctaacccttccccttttcccttcttttttttctttttcttcctccatattgctggttttgagactgataaggtgtcgtcttgctcgtcttagacgtccatacggtggtcctaacgccttatatcgccttaccaccttaataaccatggctgcaactgcagcttcgcagctgggacagtactgttagcatatcatacgcagcagtacagtagcgaacttacgattgttaggagtttgtattcattgtcagtgaacagcaaagtttcaccttggtttggccttccaactctcgttgaactgttacattaataattcattgctaattcttaggttggagactttgggttgacaaggttcaagcgcaacactctggtttctggtggtgtacgcgacactcttccatggatggcaccagagctactgaatggcagcagcagcaa

SEQ ID NO: 131038 - DNA, 460 bp, Zea Mays
ccgctggtggaaaagtctgagccgatagtgtatgcttgaatgtaagtgtgtaaataagggggatagagtttcccgctaacctcatagtgatgggtactcagggaatagatgttatcctagggataaactggcaagataagtaccaagcagttatcagctgcgataagacgacagttaagttggtgtccccactgggagaagaagtggtgactgagctagtctcacccaagccaaagaaaggaggttgtcaccagatggttattgatagcaaagagatcaatccacttgaggctatcaaggttgtgtcagattttccggatgtgttccctaaagatctaccaggtatgccacctgagcggaaagttgagtttgccatagagcttattcctagaaccatccccatttctaaaagagccaacagggcatctggaccagaattggtggaactcatgaagcaaat

SEQ ID NO: 131039 - DNA, 354 bp, Zea Mays
gatgattccactcttcccctgatgaagaggatgttggggtagaatggagttatcgtgacaacaagcttctctctgttcccctttgagggcggagatgccagaagagcagcttgacgggcctttatcttatttgcctcttttttccttgtagtttgcgtccatctttacgtggatgaggtggacagcggagttctccgggtaaacaaattctctgcttctggattgcaggaggtagtcttcgcccggagcactggaggttgcgatatttcctgcttcgttccgactttttttggagattttcgaggaaggctcctttttcggtggatccgctatacgatgtagagtcccctcttc

SEQ ID NO: 131040 - DNA, 427 bp, Zea Mays
cacaatttcagagttcttcgatttctgcgagcaaaaaagcattcagatcaagtatgattcgatagcacacccgagagccaacgggcaggtggaacgagctaacgggatgatattggaggcactcaggaaaaaggtcttcgacaaaaatgagaagttcgcaggaaagtggataagggaattgccttacgtcgtttggagcctaagaacccaacctagccgagctctgcatgggaacacttctttcttcatggtttatggttcagaggcagtactacctgctgatctcaagtttggggcgccgaggttgatttttgaaagcatagcagaggccgaagcaactaggctggaagatgttgatgtactcgaagaagagcggctaaacacagtaattcaatcggcacggtaccagcagaccctgagacgctat

SEQ ID NO: 131041 - DNA, 538 bp, Zea Mays
gaagaaaacacataccttcaattggtcttgagctgggtttcaaaccgtgagctccaattgggcatggtggtcagtcagttcaagaggggaactgatggaccgagaataagctttgcttctaggtcttggagtaacgttcatcttagcaaggttggtgactggagtggattgaaaccattagagaaacattcagccacacctaagcttatcaaaatcaccccacctaagcctatcacccctctgtgagatggtgtaattgaggagccaatgagagcccctcctcaaaaaagtgtggtttccaaaacctaaccacctcaggaacacacttgataccctttttgaaatctctagtgtctccttcttagatcccctcagccacccaaacatttaataaattatttaaaacatgtgacatgatgaattaatgttattaacatgtggacaacatctttacaaatttaacgtaatttgaacagggtgaaatggacttaaaacgcaagagatatcacatttttattagctctcggatttaaatgat

SEQ ID NO: 131042 - DNA, 477 bp, Zea Mays
gtgggcggtccacgacggcgacgcgcgcggagagactccggcgaggtcctggaccggccgattggggctacggctgggttctccgagcggcggacatgaaattggggtcagcctgaccatttcccctaacttaattgcgctattggtcaactatggagctctggccacggtggccgtaagcatagcggttatatggtcgtgttcctggcgaccagagagcccttagttcaattcaatggctcggcaagcatcgtagatgcacgagaatgcttaaacaagggagcagaggggagggactaaccggattatggctggcgacggtgagcttggtttcacggtggcggaaatcggatttgggggaaattctgaattcgagcacacgagtggatgattgtggccgattagcggtggctggttagcttaggaccttacggaactggtggggggctcaatttatagggagcgacagcggcggcg

SEQ ID NO: 131043 - DNA, 503 bp, Zea Mays
caaaattttggtagcaggcacatgctctgcaagcacctaatatatccggtacaaatagggcatttgactacaacatcttggacattcctacaagacctcagactaacatcaataagacttccaacgattcactctcacacttataatcctctgtgagctgagatatcaccaactttgaatcctcgaaaacttccactacttctacactagcttagaggagcaactccatccatttatgcacggcatggtattctgccatagtgttgatgcaggggtcgggtaacctgatagagaaagaatatagtgccccccaaggcgacacgaggagaattcacatgccacatatgtcatcacaagccgatccatcaaagaacatggcccatacacgcatagaaagtgcagccacatcagtgctaatcctctttgaaataagattggccaatgtctgtcccttaactgccttcgcaggcttgtaccggatgtcgaattctgacagtgtgaac

SEQ ID NO: 131044 - DNA, 507 bp, Zea Mays
tgctctgtcagccacctgaatcaagttcccatggtacagtgacctgacgaagatcgccagatttagtgtatcgccgccggtgatcccgcatcgtgatcgtcactgccattgcgattcgtgctcagtgaagtgcagataattgctcggggtaagaaatatcgcattggggatgtgctcgggacactgtttcgccctggccgtcgtacccccttgccttacggtcggtccagattacctcgccggagttggccgcctgccgattgggtgccacgtgcctaggtgctctaccacgtcgcagtaactcgccttaacgtgtccgttaattgccagtgaccttgccacggtaacagccacagtcacccgcgccagtgactcagtccctctctccggccgccgcgcgtcttctcaaaattagctgccaccgcctatggaacctataaattgccgccccagtgagctccgctaagtagttgtgcaccaagtgaaccagccctcacctcaaatcgt

SEQ ID NO: 131045 - DNA, 376 bp, Zea Mays
catttatcggggcaccgacatgtttccgccgagttttgcatgagctagcacgcggcctcaacccctatgtccacgcaagaccagtctacagtgaggcaaagggtaaagctttactggtgtttggacagggaagcacacctacagctgagtcacaagtttctaccggcttccttggactccacctggcttcagatgcagtgcgtccatttttcctgggcaacatagttccttttctttcagcgaccccatctccaaaccatcggctcttcttatccactacagcctagaacacgtaggtagggaaaatggaagaaaagaaaaactcttcagatatatacagacccaatctaacctgtccactacatataaattaagt

SEQ ID NO: 131046 - DNA, 347 bp, Zea Mays
aaaagtagtgagcaacaagttcttaggttgggtgcgaaaggagcgaagaagatgagcagaaagtgccaaaagtgtggcatcgctgatggtcacaacagtcgtacgtgtttaactgtggaggataataggattcgattagctaacctagctggacgcaagagaggacgacctcctggttcaaggaacaaaatcggaggtgcagcaccacagtggaatgagacatcaacgtcaaaaaacgaacagtgtatgtcgaagatgatgattcatctggtagagagtagaataccaaaagaattatgagatcatgggttgttttcgtggtaactagtgttgcaaatggatgaacg

SEQ ID NO: 131047 - DNA, 420 bp, Zea Mays
gagtcttgatggattgcataatctattaacccccacctgaccaaccagattttgacctacatcatgtagtctatctcacccataaactattctaaccacattgccccaactccgataatatacactaacctcgaatcaatgagctcaagaccagagaagaaaagatcaacctcgtcgaaaaaggagagaagtcaaactcaaccttcggatgcattaccacctagcaccgagttcttcctcaccataaactttcttaccctggctattcttacccaaacctatccatctcttatatcctacataataagtggctggatacctatgctctacaaatcacccactattgactataaaaaaatatgtgaccctggatttttgaaccaattatagactaaaagccgaattacaaaccaatccttt

SEQ ID NO: 131048 - DNA, 405 bp, Zea Mays
ttgcgatggcgccgaaacggaagaggcagagctccgccgtggctatcatcccgcccatcgaccttaacaatcaattgccattcgcgggtaaccatatgtctgttattttagaatctgatcttcttcattttgtcgatgttggggttttacctccaaaagaactctgctcttggcagatttgccgcggggtcactattccgacgcacccatgagtctgtcatctatgttccttttcttatccgcgaccttgctcttctcgtttctcctttcttccgtggcctccttgatttctacgatctgaacttgacccacttgaaccctaattctatcttgcaagtttccatttttattcatctgtgtgaggcctatctctggattctcccccatttcggcctctggaagtat

SEQ ID NO: 131049 - DNA, 355 bp, Zea Mays
cacatattcctcgtcatattctcctaagggcacaattctccaatgcgttcaaattaacaaatattctccaaatttgactcgacatgctgcgcgcgcacttatataggactaggagtagctgaataactctgcaagatcacctcgaacacgtgtgcatagatcatatgaaactttgcttggaaattgtgctcagctaggcaattaggagaaactatatgcatatataggtagattggtgtggtcaaagaagacgagttagagatgtgtatttggagctgagttgaaccgagaaatggccgagcacgccacaacgggcgtcgaagagcagaggcaggtggccatcagcatgtgctcg

SEQ ID NO: 131050 - DNA, 490 bp, Zea Mays
tagcgcctgctctctcgtccctcaacaccacgacgcatttgcacatcgctgcacagcaaccgtgccacaaatatcatcgtatggacgagttcgccgttcgccatagtttttgctcaaaccaccgacgtccaggccactccttaggcgaggaatctccactggtgagtctcctttcgccttcttttctattctcggctagtgtcatgtccaaggctccaaatccctgtcgttgtcgcccccagccgcgttgttcctggtgagcaggccgagcagcctcgccccacgcctgtgttacctcatggcgctcggccgtgctgccccggagtgccgccgctgcctgctccatgtccgccagcgatccatctccggcgagcaccacacctcctcgaccctaagacgacgaccgaccgagccctgtgcctcctcgtccccatgacgcagctttccgtgctgttgcagctcgtctgcatcaggtgcggcttcatggcca

SEQ ID NO: 131051 - DNA, 913 bp, Zea Mays
gaaagtgcaactttgggtaaattggtaaaactatgaagtttgaacctttagataagttacatatgcttgttacaatgtttctagcactttattttgatgtctaactcaattttgtgagaaaaatgcattttagacttagtatggagcataactcaaatcctggtgaaagattaagtaaaaggtgagtttcctagacttagtcgatttgattatgtgctaatagtatttgtccaagtcgtatgaaagctcacaagaaagtccaaatcaaatggaacatgttatgcaagaaaatgacttagctatgctggtctgggagtcattagaccggtccggtggtgcaatagatcgcatctgtacgaactcgccactctcaggtttttatttataaaaatcacaacagatgaggagagcaatgcatctattgtggtggagtctcaagcatctaaggtgcagcttaaacctagttctggtacatcagccccaaaaggcaatcaaccttgcagttcaaggcaagtagtaaagcacaaccaaggacaaacaagtctgtagttgtgatgttgtggagaacaccaggaggggtggtggatgagagactttcaggttcttatcagcctacaatcttggctagtgcaaaaactaaggaggacaaatactatgtggatatgcagtgggctttgttcttctatgaatgtggtgtgcctttcaatgctacagcagctaaacaatttcagattgcgattgaggccacaacatagtttgttttagggtataagcctctaacaccttactaactaggcgagccattgctacaagagattgtgaagtcgacaaatacaatgagggaggaacatgagcgtgcatgaaaatactatggttgtacactcatgtccgatggatggtttgatagaaaggg

SEQ ID NO: 131052 - DNA, 766 bp, Zea Mays
gcacaactaaaatagtgcgtgcagcccaaaacagaaattaataaatttcagctcctatacaattcaagaattgccatgttctagagacttgaattattctaacactttgacaattgttagagttaaaataactaagtgagaactaacatgtagacttactaatttttatacaagttatttcgcgcactaaaagtaccatactcaattaacaatgcattctctataacaatcaatatcgaagcgcatttcaccaatagtttgcattttaatttagacatcacctgagcactactacttttcatccgcgaccataaacatacgcatttagactacaacatcccaaacggatgcgagaacactagtttctagtttaaccccatgattattcccttaatcattttaactacttaatcggcatcgaccgacttaaccttcatctcgacggtccgagcaccataattctcgaacgtctacctagacatctagcatcacatacagagcctactacttcacattgcaattcatacagaaccacaaggtgacaataataacacacagacaatcgacctttctctacgaccttcagttaggtcaccaaccgacgacatgatgactacgaaggcatgtcaccatttcatcacacccattcatcgcctatatgtgcactaattcttttcttgcgacaaatgcactcaaaatcaatccacactacacaaaatacacttatctcttatttatgcgcagacttaacacctttcgggataaa

SEQ ID NO: 131053 - DNA, 378 bp, Zea Mays
aaattcgcggccaccgcccatccttcctataaattgagcccgtgtccagctccgtggggtagtccgctacctaaccaccgctaatcggccacaatcatccactcatctgctcgaattcggagtttcccccaattcaagcttccgccaccgtgaaaccgagctcaccgtcgcccagcccaactccggttccagctcccgtcccctgcttcctcgtttaagctttctcacatgcctacgatgcttgctgaaccaccaatttgaactgcgagctcacccatcaccgggaacactatcaactgtccgccacccattcggttcacgcggacagagcttgatagctcactatttgtgcaattaggttggggaaaacattcatgg

SEQ ID NO: 131054 - DNA, 272 bp, Zea Mays
ttggttttgttggctacacccaatgctaggatgccacagcagccgattagcactgtctgtaccgtgtattagaatatacgaagcatgattagaccaaaagattctactatctggcaaagactaatcaacttgttatatatcgtaacggctgcagcttttggtcagggatctcgatgcatgtgaagtgagcatgtttctggcatcagtcagtgacccaggctcttgctcctaaagctggtcttttgcacttctgctacgtactgatgtgtcac

SEQ ID NO: 131055 - DNA, 386 bp, Zea Mays
cacgaggaaggcggatctgacagggagggtccatggcacagagagagaaaaggggacgcgcgggggcaacggctcggcactggcgaaccgggcccgcgaaacagagagagagagggagcgaacgggcgaaggaaactggcgccaacaggttggtcccactgggcagcgagagagcgagggagagtgggcgctcagggttgcgccgacaggtggggctcgcctgtcaggcagagagggcgcgcgggcgcgcacgcaggctggcttaatgggctgccctgggccgaattagcttttcctattttcctggaatttctaatgccttttctatttattctctctaggtttttcaattcaaactcaaattaggtttcacattcaaataaatt

SEQ ID NO: 131056 - DNA, 454 bp, Zea Mays
gtgacacatccggtttagggtttggggcagtgctacatcaagacaatggcccaattgccttcttcagtagaccgttcgccacacgacacttgaagctcgctgcttatgaacgtgagctcatcggtctggtgcaggcagtacgtcattggaggtcgtacttatggggccgtcgttttctggttcgaacagaccatttcgccctcaagttcatgctggaccaacacctctcaactgttccgcaacaccactggattagtaaactgttcgggtttgatttttccgttgaatatcgacccagacgttttaacacagtggcggatgctctctcccgcagggacgctgaagcaatggagtccctagccatatctgtaccatcgttccagctatatgatgaaatacgcagtgatggcagcagcagaccggaatggaaacaactacatgaacaaatcctcaa

SEQ ID NO: 131057 - DNA, 480 bp, Zea Mays
gcggcggcgcgaatcttcgcacagagaggttgccggcggtgaggatatgacgctggcgatctgatccacatcgggctactgtaccatcagaaatccttttcagagcatctgacagggtgatttgaggcccgattttctccacagtttctctagtaactcactcaactctctgtagcaaaggtgcagagctacaaaccagctacaaatcgactatagggattgaactcagttgagcactggatcaaggttgaatccaagtccaaagttagctctgttacactgcaattctgaatttcagagttccatcagcctgacagtccaactttgggcttaattatttccaatttcttctcaacaactatgcttatactctcaagcaaagttgttctcctttgtttggtctacaagtttgatgtggtgacctagggcaaattcttattaatttgaaagatacaagggctcaaagttgaagcaatcaca

SEQ ID NO: 131058 - DNA, 473 bp, Zea Mays
ggatattagggtgttacacccacacaacagggttgcggtgccaacaccagaggcagaggccgagctccgtagttgcgaaggttctagtgcctttttcatggtgaagactacgcacatcccaccaaggattgccccgagaccaaggccaccgaaggcagaatggccagaaatcagccagccgacaaccaacgagttgttatgcacacctaccatccttagcaataccaccagcaataattacacaatgaaccaatccatcccaaccagcccaaccatatgtaccaacaacaccaagagatccaagtcctccctccatctccacaccaccaaaatcctccaccacccccaccagcacccaaacaagaggacttcaccgaacaaccttttctgtgggttcatccacatgattatcggaggatcaagtgcaaacttcaacaccaaatggcagaagaaggatcactaccgcagagtca

SEQ ID NO: 131059 - DNA, 702 bp, Zea Mays
gctttgcacccaaagagctccgtatataggtccaggttatcttgggttgtcccgaagcagaacaactcactcttgtggaagttaatctttagacctgacacttgctcaaaagcaaaaaggagaagcttcatgttgtgaagaagactatagtgtcatctgcatactaaaggatcgagagactctcatcaactatatggggaaccactccttcaaatttcccatccaattttgttctgctaatgaacacttttagcatatcaaccatgaaattaaacaaaataggttacactggatctccttttcgaaggccctttttcgtttgaaaataatgcctcatgtcatcattgacattcaccgctacactccctcctgatatgaaagtcttaattcaagatatccatttggacgagaaacctttcatccagagtgattagaatagaaatggtcatctcactttgtcataggctttttcaaaatctagcttaagaattaccccgttctgtttttcgatgaagttcatgtaatgtttcgtgaaaattcaccaccccttcaagaatgttttgaccctttagaaaaacagtttgagtcgggctgactaccttgtctgctacttagctcaacctatttgtttccaccttagtaaaaatcttataactcacgttaagtagacagatcggtctatattgttgaatgacatttgcc

SEQ ID NO: 131060 - DNA, 858 bp, Zea Mays
gtttggtagggctattaacttcctggacactgtgttctgcttcagattcaaaattgatagggtcagtctggttgggaacatgggtagaaacctgtggacatggaatgggtggtacaaactggggttgacagaatgatgtttgtggtggaggacccccaggattcatcataccaaaaaatgggttacatggactacgaaaggtatatgtagatgggtcattagctccctgggaccaggtaggattgctcatatgggatgtaggactagtaaatgtagaaggatgggttgggtctaaaccttggccctgccacatctgaggatcccacatgggtggggggaaagactggttacctgaattggggctggcaccagtaggtcgaaaaggtgtgtttgtgttgttgtcagccattctgtaatgaaatacatgaatacattaatttggacaacataacagacttgtactataaagtataaactttaatgcattgcacataaggttcatagaaaaggaacacaatgatgaagcattgcacataaaggttcatacgaaagcaacataaggattaagcattccacataaggttcatagagaaggaacttaaggatgaaccattccacataaggttcatacaaaataaacataaggttcgagcattcgtacatcggttacccatgcatcacagacataagacaaaagttcttatttgatttcgatgcattactaccactaagaccatagtctacgtaccacaattacaagttccaaatgctatacctagtggacctgtccgagtcgtacgagtcattgtcactggcctcatacaattctggtgaggaaggggggtgaaagtaatttgt

SEQ ID NO: 131061 - DNA, 377 bp, Zea Mays
gcaacaggtgcacaccatagccaaccaatatcccgccgaagacacagttcgacgtcaagagtacctctcccaaaaccgcggcaacaacacaagaggcagaggtagaggccgagcccaacagccatgaagattttactgcctctttcacggcgaagactacgcacacccaaccagggactgcccagagaccaaggccaccaaggatagaatggctagagcccaaccagccaacaaccaatgagtcgtcgcgcacacctatcactcccaactataccaccaacaaccataccacaacgagcaaatccaccaccaacccaatcacacataccatcaccatcaagaggtggaagttctcccaccaccaccaccacaccatc

SEQ ID NO: 131062 - DNA, 970 bp, Zea Mays
atttatttttatactaataatcattatatcggatttattttacttaatttaataaactgtggattgcgagtactatttctaagaagaacatggttcaatatataaattctaggaccaatccgcaagactctttacacagtcttggatggcgggttaatttcttaaaaatgtgagggctcttaagcatatatcctacgacgaagggggtacggttcattatggactgcccgatcatacccgagtggcctagattagatcttcataacacctggaccaatacgagttctcaataattggatctcagattcgtggtcaaggtttggccacaccatcgattaatctcctctatccgactctgatccagtggatcagatcaaaaaaatgaaggggtacgtggacgctcaatctcaaccctcggttactcgatcaacggccatgtgcctcatccacaccacaactcttacccacggcggcgcagaacagggccccacgatagcgtattctcccctacggcggcgccatggtcgccgagcacccaaactctccccacagctccatcatcgacacgattgggaagaaaacaacgagaaggctactacggtttggatagtaggggacttaccagagttggtgaggtgatggcctgtagccacggcgatgggaggcgttgtggctgtgaaggccgacaagggattatcggccggtcaagctttaggagtcttcaatttagcgcgatgaagaacttgggcacaattttgagcgcagtatagaggcatggaaggggatcactaacggtggccgcaacctttctcttcgccccgctgatggctcactctgatccccaattgctcacgacggcggtggctattaacttctatgatagccctcggcggtatagtactagatggccaaggcagcgccgagctcgggttttatattggagcagagctaggatcgtaggggggagaat

SEQ ID NO: 131063 - DNA, 400 bp, Zea Mays
ccgggatcctcgtgtgcacgccactgacgtcggtcgcacaatatgagagttggattacacctcctaggtagtttctgacctgttgttctctttgatgccgggggtgtcatcgtatcctttaggcctcgttcggctttgacggaacgacatggaacacgaccgattccatcaggaattatttgatctggactcaaattagaaccaatctaaaatggttgttcagatagacctgttctgtaatgaaaccaagctattccagaatgaaaccagacctttttacccactcaacgacttggattagagccacacctataatcacttggaatcaaaccaaaccaagcctttataggttttagtgaaacatccagatccactctatccggctcagattgaaaaaaat

SEQ ID NO: 131064 - DNA, 784 bp, Zea Mays
aagaggattggtaaagaccaaatgaataagatatgaggaatcgtgaattggcttgaccatattctattagtttatatatgcttctataaaattcaaactagagtttgattgatcttagcatttatatctagatgacattcaagcaaggttcatagtattgaagaaatgattctctcaatggatgcttagtatgatgtgactcaagaatgacttgatagggtgaagataacaaggaaagggcttcaagcgactaagcgaaggtgaagtccaagcgatgatttgtggaccaaggtactatggctaaggtgaagaagagagtacttgcactaagttgatgaactaatcagctatgaagagttatattatattgatgcgtcagtaaggtgacttgaagccatgatttgaactcatatacggtaaaatggttcaagtcacagacttgatttgtgtttgcttcaaaaggaatcgtcgcactatcaagggggatccaaaaagaaggttggtgtttgccaaagctcaagcctctaaaattcaaaacctatttcgaaaacgaaatcttttgaacactctatgagttcaactggagtgaggtttgcgagacgaagaatcttcctgctcaaaaatagttgaacttgtcttcaggagagttcaacttaacttcaactgagttgaacttgtcttgaggacagttcaacttgacttgaattgagttgaacttttcttcaggacagttcaaattgacttgaattgagaagccctctgatcaaaaccagttaaacctgcc

SEQ ID NO: 131065 - DNA, 717 bp, Zea Mays
cccaaaccctaaatctttaaccctaagaaaaattaagggcaaaccatattaaaatcataaagatagtactatttatccaaacattaataaatgtctagagacaaaattttttgcccaaaccataaatccttaaccctaagcactaaacactaaacccttaactcgaaactccaaaacccagaccctaaacctaatgtatcgaaggataactcctatggcttttgaccattatgctctccactaaagacccaagattgtgatttctatccaacctatagtaaaatttaaccaaaaaagtagaaaaatctagaaatcaaaaacatttaggccgaaccatagtaggattgaagagatagtacaatttatgcagaccataatcttgggtctttagtagatcataatggtcaaaaagccataggagttatccttcgatacatagggtttagggtttggtgtttagagtttcgagttaagggtttggggttcagtgtttagttgttagggttaaggatttagggtttgggcaaatttttctgtctttatacattaattaatgtttggataaatagtactatctctacaattttactatggtttgcccttaattttttatgatctttcgattttactattacttggtttacattttaatatgggttggatacaaatcacattcttgggtttttagtggagaccatttaatggtaaaaaatccat

SEQ ID NO: 131066 - DNA, 395 bp, Zea Mays
gtttccgtcaagacagcaagggagttatatggtttgaagactgattggttgttcctaaaaacccataactcaggaagaaaatatcggacgaagctcatctttccaagttttccatgcaccccggaattaacaagatgtatcatgacctcagatccttatattggtggaccaggatgaagagagaaattgctaagtatgtatctgagtgcgacacttgccaaagaatcaaggctagtcatttgaaggtagcaggtaccttacaacctctccccataccatcttggaaatgggaggacctcagcatggattttattgtgggattgcccaacacctcctggcaccacgactctatttgggtcattgtggatagactaaccaagacagctcatttcttg

SEQ ID NO: 131067 - DNA, 415 bp, Zea Mays
aaccaacctctttgtaaacagcttttggcactgacagctggagaccaaggatcgatagttatttgagcttttgccgttcgcatccccagtggcctaaagtatcccaggtctttaatcattttagggtctggaaacctcattaaaaacttgttttcaccaatggatctggcagtccacctccaaacgttttttccaactagatttacaaactcctgctcaatctgtttttccccaactgtcccttgaaccacagagatcaccgcaatactagaccgctccattatcattctagtatcaatgctttcctcaatataaaagaaactttgatcttcaacttgagccgcacacaattcaggacccagattccagggtaagcattttttacaatcaaaaacagtatgatcatcacaaccac

SEQ ID NO: 131068 - DNA, 295 bp, Zea Mays
aaatctgggtatacttttgatacaagcgcagctaccttatcaccctcaacccggagcaacaaatctttagggattgtaatccacgtagcctcacgctcgctcgctcttctttcagcaggcaaggtaccatcaccaacagatagcacccatttggcaaacatgtcgagctcgtttcgcgcatctacttgcaaagagggatcaaaaaggcgcatgttggtgcgcagcctaaggaggacaacgtggcgccagagattagagtttgtaatagaggcgttaactatggaagagcgagatc

SEQ ID NO: 131069 - DNA, 713 bp, Zea Mays
atttgggtgagatcctttctagaccgacactgtgggtagtacttgtaggcaatctagcttagaccggtgcacttccgttaacagaaagataacagtgccaacctagctgcatcattgatccctgcgtcaaagttggttcaagcagcgatggcataatgtcgtcttctcaccacttgacctttgaaatcatcagggccagaaacctcagttgtgacatgccactctataggatagagtctgagaacatgctggcggcgcacaccgatgttggtaacgttgccttcatccagtctcgaagctattagcagatttcgaagcatgcgaggaaactggagggttagaccactactgcggtgaaccaaagtcattcatagcggttgtggtacagacatagatgttgggctctctagctcaggaatctcaggtgccggggattcttggtcgggtactctagaaatatgtggctttggcattcccatccccatgatgtcgatgaactcctccgggtcatcttcctctagctcaacatctgcaatgtcctcatcatctaggtcttcgtcctcgtcagacgagtccgtaaaagcttaatcaaggtatgagttggtaaagactagtacttgctaagtaggtaatctcatcaaaattatgcatatcataaagcgtaaattgagttgtcatggtgatttgggaacaagtagaaattcaagggaaga

SEQ ID NO: 131070 - DNA, 557 bp, Zea Mays
ggcggtttgaataactggttaagagtcctgtgcactatttactcgtgtcactaacatttacatcgagaccccctttctgtttcttcgtagtgctaagtccacgatggtggacagcgacgagtgtgtctccgacgagcctgtactggctggagaacgcaatgatcggcgctccggtgcggctgacacccaattctacctataacgaccataacccctcaatcaattgcaaggttccagctcacaatcgttctgtccacggttgcgatggaaaccagagataacttaacgtgttctgggtgattcaaggcggtctaattcaatcggatggttctgtgagcaacaggggacatgagggaggctagaacatcccacagaagagcacgaaaaaacctgtagacgtctggccacggcgaggtgttcacgggtgcggaaaaccgatttggggagaaagatgaattagagagctatggtggctaatcggaggcaggagcgggtgctttagctttgtgattacctaacggagctagcagtgtgcttgatttatagtgttcatgagc

SEQ ID NO: 131071 - DNA, 402 bp, Zea Mays
gaagcgcactaaggcggcgtccgggtagacctttagctggtgctcgatcacctccctagggatcccaggcatctgcgatggctcccaagcgaagacgtcgacatttgcttggaagaaggcgatgagcgcgagttcctattttttcccaggttccctgcaatgtgggtggtctgggaggggtccacgccgacctggatggtcttcgcgtgtccgtcgtctacctcagacagctgcacttttggcgccttggagggcgccctggtactggggcctcttcctccgtcggccgcccgagcgatctcggccaccagagtgtgtagcttctcgacgactgctagtgtgtagcttctcgatggcttccgcggactctcctcccccgccgaccgccatgcccgccggtgg

SEQ ID NO: 131072 - DNA, 413 bp, Zea Mays
cgcaaacatgggtgataggtggcacgacaaaactgatggttgggggctcaaatgtcttgtctagagtgtcctgcccagctacagggtaggggtatttatagggcgactggggttggtggcctaaagttcgtccattcctctggttaccgtctacaatcctagaaaatactgtacaacagggtcattacgaaacaataagccctacatccaatttacaccagattttctaccttacagtgagattaacaggtgtgatcatcatctccgttgggagcgggccttctcttgctaggacatagacgatgtctccactgtttgggtggcgatgtcatcaaactctttgctaggagtcggcgtggggcctttgtttactagcgaggactcaccctagccatcctcactttgggccttcg

SEQ ID NO: 131073 - DNA, 345 bp, Zea Mays
atctttgacaatcatggccatgctgggggaaactttataaaaagcacatgcattatgatgttttcacagccaccaagccacaaaagcaactaccgagtttaaaacctcttcaactcagctgcctggcagagtgattgagtacttgctacttttggcagttgagagtttaggaaggaagacagctgattgcttgtaatcactacatatataatgtatgatcaagggaataaaacaagcaaattataaccaatctacactcacctccattctccattaccttatcccctgctgattgttcttcatagcagtcaccacgggaaggaagcgactggctgaatggctggc

SEQ ID NO: 131074 - DNA, 391 bp, Zea Mays
cgaaaatgtgccacatgttggaccacatgagtcacaaccacacaagatgaaagagagtgggatctagtgtggctaactccttctacctcacgaataggaatatgttaccttcttttcttctctacttatggcacaatgcaggtaagggtgggcgaggcgtacgcttaaataccccagcaaagtgtgttcagttggcaaacatcacaggcgcagcatatgcgcacggcggctacgaatcagcccgtgattctgttatggtgaaggggaataaggctgacggcgtgggctccacaggacaggaacaaagtccgagcgtgggggttgggaggtcttatctgtgggcccatgtgccagcggctggtcgatgggagcgcacgcggatgcgtctccg

SEQ ID NO: 131075 - DNA, 1195 bp, Zea Mays
cgggttcgagtcgatggggctctgcaaggaggtgtaccacggggtgcgccacaaggggtaccgcgtgcccacgccgatccagcgcaagaccatgcctctcatcctcgcaggcgtcgacgtcgctgccatggcccgcacgggctccgggaagaccgccgcattcctagtgcccatgctgcagcgcctccgccgcctcgaccccagcgccggcgtccacgctctcatcctctcccctacccgcgacctcgcgtctcgcgatgcagacgctcaagttctctaaccagctcggcaagttcacaggtgcgtggtacgccttgcgctcgtagccatgccaacgtgccgttatgcacgctctcagtaggggtgaaaacgggacggatacggacggatactaggtcatctcatatcctaccctaatacaattttctcggatacaggatcggatacggatagttaaaattcgggacggatataggacgagatcggataataattgaggcgggtaagaaacggatatcggatattacccggataggtaacggatattagtcggatagtccgtcctgatgatattaggttcccaaccatccaacaaataaataaaataataaatacacaatcatatatatgatagctcaaatatagaaaaaatattaacaaaattgacacatacaattcaaagttgtttttgccgtgtggcgcttcaggcacagcgtcgtggtggacgaactgaggagtgagcgtctcagccactaaagatctcaggcaacatgctttggtctattgggtcacgtcattaaacaaattaacaaaagttgttttggcccaagactgcaaggcatgttaatggatgggctggccgactgggcttgttcgcatgtgcgatgtgcatgggctagccgacgaacgagtgaaaattgaaaaacgtgtctagcggcttgcactggagacgatccacggaagcagaaactgaagccgaccagccgggtacccgcaaaccgggtacccgtatcctacccgtactttccgggtatttgtcgggtagtggtcatcctgtatcctacccgtatccgactgatttatattcgggtagtatccgtatccgactcgtatacaaaattacccgtatccggtacccgaaaaaccgggtattttaagtacccgtatccggtacccgccgggtaatcccggcccg

SEQ ID NO: 131076 - DNA, 341 bp, Zea Mays
ctctattcagtgtttggcaggcataatagaatcgctctatttttttgtttggttgaagactagaatagagttgagtcactctattttctgtttggttctagagcgatgtcggtaccctgaatcaggggtaccctcttctacagtatgaaggcgctgcacccgtacgacaccttcaggtcacaccgagagcggcatctgatcccaccacatgggcaggcctaagggcaccacgtggcgaggaaggataatacatcccaggaagcaccgttgggtccggacctccgcagaggaacaccggacccctgtgagtacgagcccggagctcccgaggagacatgtcg

SEQ ID NO: 131077 - DNA, 320 bp, Zea Mays
ggaatgaccaatatgcgtaatttgcaaacctgatccattgccgacgtggacttgttcattgccttggtagcgttcacggatggcaagacgatccaggtcactggtgatgtggtcgatggcgtcgacgtcggtgtaccagtcggtatcaaccttcaagtatgtggtggagatgtgtgtggaaggaggttcctcagagtaggagtcgtccatgcggtaccagccgcgtatggccgcatgaccttccttgccacaaattttgtagatggggtgcgaagtagagctaggcgggcgatggtcattgggaagtgacatagcacccc

SEQ ID NO: 131078 - DNA, 294 bp, Zea Mays
gcgctggcagtggactgggcggctggtgaaagtgtgtagagatcgcccgagctattgcagcgaagaatcactcgccccgtcctgggttccttgacagagaaaccaaaagtgtcaaattcgatagaaccgccattatcgcgggtaaattgacgaacagataataaattatggactatggaaggagcgacaaggatgttgttcaggacaaatttagtggagttgatgtcaaggatcgatgagccgcgggtcgtgacaggaatacttgcaccattgcctaccatgatcgaagaagca

SEQ ID NO: 131079 - DNA, 751 bp, Zea Mays
aaagagaagcactaataacatgaaataaatatagatgaattcacccataccatgtctaagatgaatatataatggtaaaacaaatttggcacaaagttgaatttgaatgggaattcaaatttgaaaataaaaagggaaaagaaaacaaaaaaggaaaaaagaaaaaaagagaaatgggggtgatgggcccaaacttacacaggcggcccatttctcctgcgctgtacagcccaaccgcgtccagcaccaacaactaggtcccactcgtcattcccacgcgctcactcttacctcacgactttcgctaacatgtggcccgtgtctgtcagatcctccccacctcaccacgatgcgcgagccgagtccttcgccgaagatgccggacctcattcacccacttccgcacctaccctgcgcatcgctcgggagccccggcctcgtacataagaaccgacacgccgttctttccttgccccttcattcctcaccatatagtgaccactgctaccggtgagacgaagcagagaagagagagggagagtgccgctaaccgggttgtcgctgacgttgtcctcgccacggctggtgtccgggggtccaccgggagctttggagggtgtccacggtgtcctcgtccgggttcgctgaccggagaaccaaagattcatcgccgttgccagtgctccgccgcgaagccgcatcgtcgcgtgggcaaagcattcaccaccccgatttgaggtaaaaccacccc

SEQ ID NO: 131080 - DNA, 713 bp, Zea Mays
ggcggaacgagcgccgggaatcctggtgtgttgcgcgatctccggccagctcgagccgattccacgatggataagtaggagcaccccccttgctccctccgtctctcacccatcctccttgcgcgagccccgtgaccaaatcgccaccatccgaccgttccatcgccgccatcgttgaaccgcgcctgtgctcatcaccggtccatggtgtggggcttcgaatcctcagaaaccctccacgaacacgcgcggggcttcttgtggcgcgtggaggcaccacggcaccggaattcctcgtcgctgcgacagcgcctccgccaacccgcttcatgtcgtggccagctgctcctagtaacccaaccgaggtaatccgcccttcacctcactcgccaggttatcctcggggtctagcaccggttaatttcggacttggggtagtagggggccggattgcatgctcgctggacttttcggccgtaggtgcggcggcgccgccgtcgcggggtaggaggagatgaggggtaccgttcggccgttagatggccaatggacggctgcgattagaacaggggcgtaccggttcacggggtggatcgggtacgtctattttgaatcgaacgctcgtgctttgatcgggaattcataaaataccggccacggatctgtgatctaacggttgcgatcgtataccggttcgcgggtgtgaagatcta

SEQ ID NO: 131081 - DNA, 883 bp, Zea Mays
gacccaccgcacaaataaatacaattgtgccctccactaccgccggacaacgcgagggcaccacacactacatcggctcaaccttcggaatgatgcccgcctccctataattgaacaacattatttttaattcctcaccctcaaaaagatcccgcagatccccttcaccaatactcgtcccaatcggcgaagacagtagatcttgtttgccaaaccgatccactcgaaggcgggtccgctccacccccatccgacggcgcctaccacttcgcgacatctcaccaacactatgcttcaaaaccacttttcgtcgccgtcgttcgatcctcgcgctggggagatcagacacctcgccaacctccaaccgcggcgaggactccgccgcggccgcatctaatgcaacaaaataatccaaatcttcacccgacgactcttcgctctaggaaaacgtactcccaaactcatcatcaaacgaaaaagactcagattcagaaccagacacactataatcagcaggcactacggtagcggccaccacaaaattcgtatcgtcagcaagggttgtctgcgcaggcccacacgtcggaacctgcgcagcaactgagttttagtatcacaaaaacaaaatcctacatccaacacccctagcactatcccgccacctgcgaagggcgggccgacgccgccgggtcttcggcaactggcgcgaccgccaccgaagtgtcttcaccagtcggcacggcggcctccacaggtccctcgccaacatcagtcggcgccggcgactcctcgatccccgccctcacacccactaccagaggcaccgtgctctccaggtcaccgaggtcttcgacctcctcatcatgcgccatctacaaaaata

SEQ ID NO: 131082 - DNA, 355 bp, Zea Mays
cagaaacggtgtaaaaggtttgtcttctatattccactatgcaattgggacacgtaagtttcaagtgatgtttaaatcttttcttcatgtagggctattttctttgatgatgaaggtaacatactagaaaacgtaccttcaaatcccaatgaagtggcaacacgaaaaaaattcagaagcgcgcaacatgtttgaagatcttatccaaatggcaaagcaatccaatgaaggaatggacattttaacttccagtttgttaaatctgcaagcagctatcagagtcatggttccttctgttatcagtaccaaacatgatgaaattgagtctttcattggtacaaagattccaaatgaa

SEQ ID NO: 131083 - DNA, 449 bp, Zea Mays
tggcagcacttgatgttccatcggaaaaggacacatgcattcaccggaagtacaaatcgacatactatcatcttggggacaccactgtcctaagacaagattccaagacatcgttttcatgaacacaacgaggagagcacggcctccgcttggcccgactttcacgggctcctgctccggcacttgtcttacaagattaacacagtctaagattaatttgatcatattgtgtaatacataaaagaatacagatttactagcatataactaaactgatgctagtacttcataaatattgattaaaccatgacaataaacacacagaaaataaataaacatcagaactatccaaaagatctgcatcacaataatcagaaaatgcagatctacttacaatgcttcccacgactggagttgaagaacacgagcggagaggcgtactttctaga

SEQ ID NO: 131084 - DNA, 346 bp, Zea Mays
ggaagataaggggcatacaacaaggatatgccaagtcactattcagaagccgaaggaaatagctgaagccgaaccacggtagaatcagcggaagcaggtgtaatacccaaatagtgggaggaatagaatgtacaagaattgggaaatacaaaaggtttatttgactacttgtgtggactaatgggcctgattgtaatagtttttctataagagaggacggtgggttgatttgtaataatctgagggtctcttttgcctaaacacgtggccgaagggatatggctaggtctcagccactcgatcaagcacgtgtggcaccgattagatcagtcccccatccaaatcg

SEQ ID NO: 131085 - DNA, 456 bp, Zea Mays
cagcaggcagactgagagagtagtgaacataggtaattaatacacagcaagcaggggcaagtcatgtacgtagttggtaaatggtaattactacgagggcgatgtgcactgcatgcaatctcaagaagggcggagcgaggatcacatcctatatatgcatgcagacttggacgatgcacaagagtcagagacagagtatactacttctgaaccagtgcttatgtctttgtcacagtcggattggggtggatcggacagtggctgcaccttgaagtctcagggcatttttcagaaccaactaatgctaattttgatggacagtggaagttcccatactttcatcggtgatcaattcggtggcagacgacttcaaacaacccaagtgggtgcctatatttgttagtgtccgagtggctaatggcgacgttctgcactgtcaagagaaatggttgcaag

SEQ ID NO: 131086 - DNA, 667 bp, Zea Mays
gtggtttatagttgataattatggaaattctctcccctcgcggtcgggaagacagccagacgttcgcgctccgagttggactgagtctcccacagatcaggaagtggccgaggcaggtgtgttgctgactgaagttggattgctaaaagagagaggtctgactgctgaagctgtggtcactgactttgttttcaagaacattcagccactgaaagacagggcctatccggcatatctgtatagagggctagccgactcgactcgagttaccaataggagaattccttctgcagacttggtgagccgacttgaaatgatcctcaggggtaaggtttcaaacgttggtgctccagtggcatactcggtctggaacctacctcctcccaaagctttcactctttttgtgtcaaatccgcctgtgactgatagcaatttgggccttagagtgcgaccctctgctgaagaagtcaatactttggttgcttcgctcggggaaatttctgatgatgaacggcagatttattttgaagtgcctctgaaccctagtgatgcagacataaatgacatgcttgatctgttagctgaggattcgtccgatgctgctcctgatggtacgttggcagtggtgccccttccagaggttgatacaactttggatgtcccgaaa

SEQ ID NO: 131087 - DNA, 295 bp, Zea Mays
ctatttaaacataactgaaatgttcttttgttcttaactatttacacatacctgaacttttctgttgtaggttcatatatgtacccgctccacatactggtgaagttataagtgatgttcttcatgatgtactacaagattggcaaattgaaaagaaggtgtcaacgatgactcttgataactgcagcacaaatgacaatttaatgggtgctatgcaagataagctgcctctttcctttctcatgctaggtggtaaattgttacatatgcgtttgaaagggaaatgtgcccttgg

SEQ ID NO: 131088 - DNA, 751 bp, Zea Mays
gccgcgttgtacacaacatttttttgcatttgttcagttctttttcttcttcttctttgcggtatgctgatttagaaccgcatggaataaggatgtcagcacattctacactgaataatgaacctatcattcgtctgtatcagcaggccataaactgctttacctaactgtggaccgtcgtttctttaatcatattgatggccaccttttgttttttaagaagaaattaaagatcatgctccagtctgcagcactattcctaaacggtataaaagcacctgtactggtcttcaccaagcgagcacctcagtcgccaacacctaccgtcacaatggaggatggagggttagtcagggaggccagctgggccgggttcgacttgctaccccatggctaggagccggaggtcgtagcgcagctgttccacgcccagcatgagttgccttggtccgatcaaagcttcttatgtacggtgacaacaacatgcctcatattcttttggcaatttgcattgcttttaaaaaatctacttctttcactaaaaacttccttatccatgtgatatctgatggattctacatatctccaaaattgctactgggcaatactcagccttccctattcttttacctccacctcccctttaactgatatgtccaccttttcaggttatttcggctatttcatttttaatgattgtatgtatgcgtgcctatgtatgataaaaaacaatgtcgttttttttgccatt

SEQ ID NO: 131089 - DNA, 403 bp, Zea Mays
ttggcttcccagactaaaacctgcaggtcccgtgcatgtatcaaaggatggctaatgtcagacgataggtcctatgggtgtactactaacgctccctagccgaagctgtgttcaggtccaggtcccagtcgaggctgcctcccaggggccgttcccaactcttttaggtatgctggcatccagtctcgacacgtcgagcctacatcccacggggcccaggtactaaggaggagtcggtaacaccacacacaacaggcacaactagtacacagataagtactaatactgcttgataaatagtactcaaaagtaccttacaaaaagcaaaagttattacatccgccttcaagcggagtcctagctccatctctactctacaggtaggactactctacaccagcag

SEQ ID NO: 131090 - DNA, 526 bp, Zea Mays
ttagtacttaatccaattagagaaacacttttggcccttcaatttagctcatatggactagttgccttcatcttgcttttggtaaaccatgtgttcatgctcgtattcaagtgattagtccaatgtggtgtgttgagcatttcatcatcaaaacaacaaaaatggcccaagggaacatttccctttcaactaccgacacctatgttggtcgatgctcgtagtaggggttactagtgggctataagtgggcaatagagggaggataggctcccaagtctcttatgagggagtggtcctaaagactatggacatggagtcctatgctaagccttcacttcggtctccaggttttcaggtctctccaggcgtatgtggttgccttctatcaagtgtcttttgtcttgggtcttcttaggattgtcttggtccgtctaggtccatcctcttctcatgtcgatctcctccttttataggccaaggcgagggtcggtggttagtggcttctttgagaaggagccattattct

SEQ ID NO: 131091 - DNA, 644 bp, Zea Mays
acaagaaggtgtggagggccgagtgtcagatgcgtagggaccacggtgctgagaccgacttgaccaatgaagatgagaacgacgacaatgatgcgagtgcgggctctaaccttggggccattccgaattcctcccttgccgtgtcaacagctgactccgtctcggtctttactagcagggcggcaagtgccttctcgatcatggaggagaccgacttcccagaactcctcgccctattctctgggccgatgactttggtggtactcattccctcacccactaagcccccgtccggctgaccacaaaggtctacttgtgtgggaagctcctcttccttgggcccaacaatggtcccaaccggcgcaccttcagggccgtccgttcttgcttccaaggcgggtggtgggaccggcgcgtcgcccgggtgccacggaggcgaggtgcctttcagagggcaacggttcatcgggggcgtggccagtcaggcgagggccttgccggtccatgccatctgattccattttcactgtaacttcctgatattttttgttttccccctaatggctcccctcagtctgttgccttcatgttgtgcgtgaggaaagtggtttccaagaggaggagaatgatgcttatcatcagcg

SEQ ID NO: 131092 - DNA, 381 bp, Zea Mays
tgatctttgcgataggccacgcctcgatccacttagtaaatttatgaatcgcgattaagacgtgtgtagtcctcgggtgcccttttgagaggtccgaccagatcgagcccctagtcggaaaatggctaggtgatggggatggtttggttggcctgtgcgggtagatgggtatatcgcgcatagtactgacatccttcgcatgttctcaccatctggtgtgtgtctgataccgcggtatgccaatagaaaccttgccggaatgtgttctccacgaggcttctcagggtagcatggtgcccataggtcccgctgtggatgtctttcaggagccacctgtcttgttcgatcggggtgcacaaacgctttattccgatactcccc

SEQ ID NO: 131093 - DNA, 891 bp, Zea Mays
caagccttgtccaaactcattacctccagtgtcatttcctgcaataaagatgatgtcaaccacatatgtcatgcataccaacttggtcgtcatacacgtttgccgttcaattcatctagctctcgagcttctcacaattttgatttaatacactgtgatttatggacctccccaattgttagtgtgtcgggctataaatattatttggtaattcttgatgattgctcccactacatttggacgtttccgctccgcctcaaatccgagacttcttccacacttgcaatttttttcacttatattcgcacccaatttggcatcaccatcaagagcgtccagtgcgataatggtcgtgaatttgataattctcaggcccgcacattctttctctcccacggcattgccttacgcatgtcatgcccctacacttctcagcaaaatgggaaagcagaacgttcacttcgcaccataaatgacattttgcgttcccttttgtttcaggcaagtctcccttccgcttattgggttgaagcccttcacactgctacatatcttgtgaataggctccccactaaaacccttgccttctccacaccatatagtgctcttttttcctcccaaccctcctatgatcatctaaaagtttttgggtgtgcctgttatcctaatatgtcctccaccgcacctcacaaacttgccccccgctcttccttatgtgtttttcttggctattcctccgaacacaaaggctatcgatgtctcgagctcgagtcaaaccgcattcttatttctagacatgtcgtttttgacgagtccttctttccttttgccgacatgtctactactcccatggcatcctcctccttggattttctccttgatgaacatgat

SEQ ID NO: 131094 - DNA, 479 bp, Zea Mays
tcacaaaacaatatcattttcctttctctatgtcaaaaccattttgaagactagatacgatcaagtaccaaaaaactcccccttttcccataatcgaatttctgccccacaagagagcggtttttgcaataagagggtttttttttcaaaaaccaagtattcttacactttaaatttttgaaaaattcacaagtggtagttgatccatttgctttggccttaatttgtcccctttggcattaagcaccaaaacagaagaactatttggccctataacctcattgccgcacaaaaatctcgaggaaaaccaaagacaatgagaaaacacaaagagggacttggaacaagatacattgataccggaatgcagtggaagcctcttctttgtccaagtctacctgttccctttcaatccatctttgagactatatcaaaatcactcaagcaaacatattagtctcaaaggggtcaagttgtag

SEQ ID NO: 131095 - DNA, 708 bp, Zea Mays
cgcgtgcaggactgcctggccgtgtcgcgcgcgttcggcgacgcgtccatgaaggcctgggtcacctgtgagccggaggtctcgcggcgccgcctcaccccggactgccgcttcctcgtcgtcgcgtccgacggcctctggaacaaggtgtcctgccaggaggcagtcgacgtcgtcgtctccgccccgccaggtggagctggagcatcgtcctccgtggaatcgtgcaaggacctggtcgccttggccaggaaaagggggagccgggacgacatcaccgtcatgctcgttgatctgcagcgattcatttgacagtcacaggacgcggaggccaccgttcatcaatgctgccaagcaaaacattcgtacgtgatcaaattaatgttctttttatagtgtatatttttctctttttttttctttcacttttattattggatactctagctagatgatttcccaagagattatattgtacgtagtagtgtagagagggctgccttccgaagagatttgaattcaaactcgtcagaaagtgcagaagaagattagcgcgacgtgtaaaaaatagctatgatgatttcctctattagttcgagcaaatatttcggtgtgtcacaggctcacagcagaaggaaagctatcgaacattcatggaaaacgacgactccaatgatacccttatgatttatcctttctacaaatttc

SEQ ID NO: 131096 - DNA, 643 bp, Zea Mays
atgataggatttccacattcagaccacaatataatttttaccttagcctcacaaattttaaggagttgaatatttgcagtcacataatctgttccagagaagaccttggtaatctcattaaacatcttgagtctatcaaccacttatctagcaaaagcccactcttccttatttggtgcataatcataaagtttttcaacacgagtggcacggttaaaaataggctcatatggaatagcaatagagagcatcttgtatgtagagttccacctagttttgcaatcaagtcctagcttgtgtaccaaagagactttgacaaacttagtcatctcttcaaatttctctactcaaaaaggtgtggctgtccaaaatgctacactatcacgaatctttttaattccaagttgtatcatatctaaaccatccttcactatcaaattcagaatctgtgtagcacaacacatatgcaacagagacccctataacataagtttagatggaccaatctttttggtaaggtcagagattgccgcattattagttgtgcaattgtctagtgtcaaggtggagatcttctcatcatatcccattcaaccaaagcatcatatagaacctcacagataatctcagttgtatgcagtgc

SEQ ID NO: 131097 - DNA, 581 bp, Zea Mays
ggctattgtggcctcgctgttcctcgaccacttgcaccggcgacgtggccttgcggccgtcactggagtttgtgcccttcaccgtgaatttgccatgcctccggccattaaccatttcgtcgtgagttgtgatcgttacccagtgaccgtcgtggcttcttatcccgcaattgccacgaatcactacgccagtaacctctcctcctctccgaccgccgcgcgtctccttcaaattcactagccaccgctcaggagacctataaattgagcacgccatgagctccgtagggtaattacccatccaaagcaccatcacttggctccaattactcaccagagaccacgaattgctcatctcccccaaatcaggtttccgccaccgtgaaaaggtcctcaccgtggctagctcgattcagatccaatcttgtcctctactctgttgtttcagcactcttgcatgccactgatgctccttgacccactcgattaagctagactaccctagatcgtcgggaacacccgtgctcatccgctgtttgcactgcttccatggacagaatgatttagagctcgaactgtga

SEQ ID NO: 131098 - DNA, 1149 bp, Zea Mays
gttaagtctgccaggaacactaccccacttaaaaggattctgacttgggagcacttgagctggcatagaaagtctgaccccggggtttgggtgaccaaaggaatttctaggggtgtagaggggatgccatgcttttccacgaacttagttgctataaacgaatgggatgctcctgaatcaaaaagcacagtagcgggagtaaattcaacaaggaactcaccaagcactactcctggagcttgctgggcctcttgagcgtcgacgtggttgactcgtgctctgccctggtactgggtcctgctctgctgactattggagggaggtgccttggaggtaggtgctgagggaatcttggggacattcaccgagttggagtaggtaggtccgggtgccttcaattggggacagttattcttgaagtgactggggtctccgcagtgccaacaggcatttgctggcggttggttgcttgcaaccgagggggcctaaaaggagctctaactctattcgctgtaacgtgacggagtgggtccagctggtctattgaagcttggtcccctgggtggaagcccaaaggatcgagctctttggtgatggtcttgctactgagctcggaaaacctgcaatttcctcttgaggtgccctttttcttcctcttttgccctttccacttggatggctttgttggagaagtgagagaagttgaggaagtattggctggcgaggatggtcttaagctcgggtcttagccctttcagataatgggccatcttcctggaccaatgctgacatcgtcaggcgcgtaatgggccaactctgtgaacttgtgaacatactcactgacgatccttccaccttgtgttagttcctagaactcatcttccttgagttgaactatcccctggggtacgtggtgctcacggaaggttgtttcgaattctgcccaggtagcatctctgacggcctcgctgaaggtatcccaccatgctagggccatcctagaaagttgatgagcaaccagctgaacatgctgattttcggggcatctgatggcttccagtttcctcttgatcatgcgcagccagtcatctgcatcgaggggattgctagaccccacgaacgtgggaggattgagtctcagaaattctc

SEQ ID NO: 131099 - DNA, 452 bp, Zea Mays
cctgggatctaatttcaccagttcagagttctttgacttctacgagtagaggagcatccagatcaagtatgcatcagtggcacacccaagagctaatgggcacgtggaaagagccaatgggatgatactcgacacactcaggaaaaaggtgtttgacaaaagcgagaagcttgcgggaaaatggatcagggaactaccatatgtggtctggagcctgcaaacccagtgtaaccaatctttacatggaaacaccccattcttcatggtgtatagatcggaggcagtgttaccagcagatctgatctttggagcacccagattaacatttgaaagcatagccgaagcagaagcaactaggttggaggacatcgacatattagaagaacggctgaatgtggtcattcagtcgaccagataccagcagaccctgaggcgctatcacgacaaagcag

SEQ ID NO: 131100 - DNA, 380 bp, Zea Mays
gtttgggtgtgtggaatgagcaggtggccgatcataaaaaccaactaagatttacttttggtcactgcaatattttctaaaaaccatctagcatgtttactcagttctgatgaacccaagtttttgtgcttgcccatatgtttcagtgcttgctctttgtgtgctatatgtgttcaggaacacttcaaacatgaattggcaattatgaaagtgcatttatattttttccccaaaaattactttagcattgctagttgagacacattatctcccacagtggtaactgccccgctgaagatacgtacgtcaagacatctaactagttagcaattactagttccttttcttctcttagaccacgaatgggttagccttggaaa

SEQ ID NO: 131101 - DNA, 322 bp, Zea Mays
gggaaatgccgaaggagaccatcactgactctagcgaaggtggtttggtccggctgaagtataccttcaggtttggggataagtttgatgaaccaaatgatgattggctgaggtgcattgaagctactagcgacgagttacttggggtgtattccaagaccgaggacaacgccttgtccgcaaccttcgggggtcggaataagaaaagattgaacagggtatttgatgctattggcttcgtataccctgactattgttacccgctgcgagggcaaggggtaaaaagaaagattgctacttctggaaaggttgctgcttcggc

SEQ ID NO: 131102 - DNA, 525 bp, Zea Mays
attcgcgccaccgccgttgtgattcacgtcgacgatgacccgataaggccgccaagtaaaagccatgcacctggggataactccggtgactcaccgccgtacccctcgtgctccgcggctgtggaggataagttcaccgacgagagccgccttccggccttgtgccacgtgcctgagtacctccaccgcaccgtcgtaagccttagtgactctccgttgatcgccggaatgaccgccacggtagaagccacgaatccattgcgccagtactttcttccacctccggccgccgcgcgtcctcctcaaaattcacggccaccgtcttaccctcctataaattgagcccgtgactagctccgtgaggtcgtcagctaactagccaccgctaatcagccacaatcatccaccagcgagcttgaatttcacagttcccccaaatctttttccgccaccgtgaaacaagcttccccgtcgtcagccctttttccggtcagtccaaccctccctctgcttcgtttaagcttc

SEQ ID NO: 131103 - DNA, 1472 bp, Zea Mays
ctatattaattcttatgacaaacgagttcttaataaaatactcacacttaacacatatcttttcaatagaagttatggacttggtttgtatgaacatgccatatcctttttgctcttattgtcacaagtccatgcaaatgatgtttgcaaacctcaattccactattatacaaaatacttgaggttgtgttttcatcaattgccaaaaaggggagattgaaagcatctaggtcctagttgggttttaatgattaatgaatacgctagactattatggttaatatatgttttgcaaaaacattataaattaggtcatggtactagttatttcttgggcatatgtgctactcatgtccctattgatggaattcaattctagtttataaagatgagcataaagattaatggatgactagttctaattgtccttggagttgagtgagggacacttaaattccttacttttcccttttaccatactataaaggggcatgattgggtagcttgatctagttgagtcttctaaaatccagtgctagcttgctctatggaagccaaaatattattgagatcaaagccaacttgaagattgtttgaactagatagagttggatatgttgtctatgcacaagacatgcataacaccttatctcgattggtttcattcaatgcgacactgttgagtctggtgtgcaccatacgagagttactatgctaactctaagtagttggggaggctttggagtcattgaatgtatctggtgatgcactagatctcccatcgtacatgcatcattgcaagttaaagactttgactagggagtcagtgcactcatcgaacgtacctagtagtgcactgggctcatcactaaatcgatctatttgtagatggagaacccaagagactagcatggttcactggatgagtatggtattcactggatgtgtcatatattaatgactagtttggaaactagccattatagactcatcagatgtgtttggtgtgggaagaagtggtgcactgaacacactcgataccctcgattctcttgagtcgatgggtaatcgctagtcctttacctgagggctataaataccaatccatgtcatccatttgtttagtacaagaaaccctttgaagagaaagagagagcctttgtctagtgacgtgtttgagctttgataatcgcgagactagggacctcattagtgcatagagagtgacaagtgtgcatttatgattctcattaggtttgttcaggtcaagtgagattttgttcttattactcttcgagatcgacatcacctacacagtttggtggcgatcgagagtttggtgatcactcgatggagagtgtgggtggcccaactcatggtgtaaatggtagttggttattgactatgctagagtgtttaataatcgacatgtagagagcacttgatatttgagcgtattaatgctttgtttg

SEQ ID NO: 131104 - DNA, 476 bp, Zea Mays
cccctgtcaccttccccctctccctctattctctctggactgtgaggaggagtttcactctcttttgcaaaacctctaaaattcttgtgaaatcctatgaatctggtgcatgagtgtgttctgtacctcttttgagttcccctgcaggtaatcttctccctttgggaggtttcaaacttcaaaatacccatttcactgttgtttcaaatccccgcacgctaggtgctcgatgaaatgcccaaaccactcaaacttgctcaaaccgaccccagatttttcaacaccttcatgacaccccaagtaacaccttcgctaaatttcacgccaaactgatatcctagacaccgatttaccaccgttttccatttatagcgattgattctgagccgagtgccacaaattcattttctttgccaaatttcgaaccaagcgcacacttcactcatatgcactcatatatacctactcgtgaagta

SEQ ID NO: 131105 - DNA, 396 bp, Zea Mays
gttcaacattactggttgctctccggtcacttaacgaaagacatcataccatgtattctatgttttgatggtcgtcacactaagggcattagaccatacactaagatagaagttggtggtaacaatggtaacattcaaatgcctagtacacatgaaacgatctatggtcgtcagaccttgagctttggtctaatggtgacgtgttggatggtccgacaaccttgcaaaatgcacaagaatggttccaacggctagttggccattaggatcctataagtagagattatgtgggcttgcagtgagaatctaggcttctcaacttgatatgcaccctagtaagcccaaaggaaactttttcactcacatccagtgatagtgatttatccaaagtggggc

SEQ ID NO: 131106 - DNA, 295 bp, Zea Mays
agagaagctccggtgaggctcgggtgtggtggagaagtaagcatgggagctcagctccgaggggaagggagatgatgccacaccatttatagagaggagaggggagacaaaatcttgccaaatttatacttatctgaagcttccattaatggagaaacatagaaggaaggggatcgacacgtgggagaaatggatcgcgagagagaggaagtaaatcgcgacgggagaaggaaagaaatctgatcgaatgatgcaattgttgttaatggtggtagacgagaaaggaaaagaatta

SEQ ID NO: 131107 - DNA, 364 bp, Zea Mays
cttaccgcatgttgttgtactcattctacattattttaggcaacagtactcgttccatcgcatgttgttgcattgtccaagcaagcctgaaacgaagtgacacaaagctgtaaagtatagacgagccgttacctttggaggacaccagggacaagcgctattttaacggatcctttggcgcatgctgctggagataaaaaggacacaagcacacgctaaatatagaggagaggagcatatagcgcaccttgctggagagagcctaaaactggtgttgggcagttgggctattgggttgattgattgtgggcttttttctttttatttttttcctgtttttccctactactaggctgaaatggac

SEQ ID NO: 131108 - DNA, 688 bp, Zea Mays
gcaccggcagccgcgcgcaaaattcctcttttcctgtgcgctgtccggtggttcaccggacagctactgtgcgctgtccggtgtgcaccggacaggcactgtagactgtccggtgtgcccatctcgcgttttaaaaaacagcctccagcccgagccaagccagaggctctctgtttcttttctcccagccgcccagctctctgcgtctggcgatttcctccacccggcgacctctccggcggccaccatctccggccaccatcgccggcgacctcgcctctctctctccttccctccctcggtgagcaagtcttcctcctgtctcctgtttttcttcctctcagtcccctgtgataagtctgcctcttctccaccccttctcccaccttttgcaaatcttccaattcctgtgaatccaattgatgaaatgtgttcatgtacctccattgtgtatccctgcaaacttttagctccttcgggagggcattcctaccaaaaatggccatattcctaaaaccctagctccccgcacaccaagtgttcgatgaaatgcccaaaccagccaaacttgctccaattgaacccaaatttttcaggcactttcaccacacttccagtaacctacttgccaaatttcacgccaatccgagatcccaggcttaaatttcaccaaaattcccgttttgcg

SEQ ID NO: 131109 - DNA, 589 bp, Zea Mays
aacattggtggtggcgcccatccctgaggccgacaaagctttggacactcagaagtctgtcaatgttcgcccgaaacattctcgccgagccgatcaagcctcttttcctgctgagtgggagaaaaagaaaaagagacgtcttcgtcgggtgtctagcttggatcagggtgccggtccttctgttcctgttgctgaggaagtgtcagtgcctgaatttgctgaagctgaccccaatgggtgtgacccgtctgatgctgaccccaatgggtgtactgtctgtgtcgttgatgaggatgatgaggaagaggatgaaatccctctaattcggaagaacagccggcgttacatacctagtggggaaagtagtggtgttccttctcctgccttgtctgccctcattggtctgcaagaattatctctggcgaactttgatcaaactcttgaagacatggttccagaagatctgttgtcagagccggcagatggtggcgcgacggatgtttgtgctgatgtgctcgatgccgggttggggtcatctcgggcagcgtcccgcgcctcatcgaccttggagcgcggtcttgagggtcag

SEQ ID NO: 131110 - DNA, 285 bp, Zea Mays
ggagacttcgtctacctcaaggtttctccaatgcatggtgtcaggaggttccaagtaaaaggaaagctagccccgcgattcataggtccctatcccatcattggcagggtaggacccgcagcataccgtctagaattaccggaatccatgtccgacatccacaatgtgtttcacgtatcccagctccgcaaatgcctgcaagcactagaaagtcacctcgaagaagagacagtgcagattcagaaagaccttcagtaccgtgagaagccagtgaagattcttgat

SEQ ID NO: 131111 - DNA, 391 bp, Zea Mays
tgcgtacgtacgtccgtccaagtgcaagattggaagacctcacctaacaaggggaatcatgtaaacaagtccttttggtccccttaccccttcgagagacctcctcgtcgtgacatccaacacagaacgaatgatgtgcttatatatgctaattaatagatcatcactagctagctacgtctcccagcagggattaacaagtattgcaatttggtacggcaccctggcctggtggtcgcccctccacgtacccctctggtccctctcgatatctcgcctcgtcagctaattaatcatctctttcaaaaccaccaactagggtacaagtgtgacttgtctacgaatccgtagatatatttaacctttataataatatatatgtatacaatct

SEQ ID NO: 131112 - DNA, 726 bp, Zea Mays
agattatacaaaataaaggaaaataaatatatgaaagagtacattttgtccctactaatattttaatttaggtatttaactcagttatgaagctcacaaacaagtttgaattcaaaatggagatttaaaattgaaatgaaacagaaaataaaaagaaaaaaagagaagaaacctaattgggtcgtgaataaccatttcggcccacttctgattccataccgcgcagcccagccatatcaacactggcacgttggacccacgcgtcataccacgcactcatcaccgctcggtcaatgccacagtgggcccactcgccagtcttccctcgcgcctacttcctcgtctgtgccactgagtcactggacccacttcccagccgatcgaccgcacgtctgtgttcctccggtgtgacttacatgtgggcccgaatggattgcgctcgtctctaacaacttcaccgcgcatggcggagctccgccgtgagcttcggagttgcccgttgcgtgcgcctgggccgctctgaggagatttaagtgcggaggaaccgaagccttgaccctctctcctcaccacgtctctgctcacctcgccgggaaaacagtttgagagagaaaggggggggggggcgagagggagaagagggccgccaccagtgatcttcgtccgtgtcggcgttccgacctcggcgtgtgtccgtcgacgtgcgttggtgcctggggaagccga

SEQ ID NO: 131113 - DNA, 470 bp, Zea Mays
caatgtcacactgaactgcccaagagactccctgaaatccttcagcaaccgaaaaaacaatgaattggggaacttcttgcagatacgtcactctggcccgaacaagcaacctagtcacattagacggatcagggtcccacatgagcaccctaccaaatgacccgaccgcattttgaatatgctcatgagtccagaaatccaatgggaaaccaagaaggaagagccagcactcgtggttgaaattcagggcacgctgattctaggcctcattatgcctaataacggtaaaagagaaaccaagggcttgctgcggacccattgccactaagttatctctatcgaaagcaaatctgaacctcacaagggcctgacccaaatgggagcgcagaatgctcctgacctgaatatgccgaacctccactagatattcgcagataatgtcatcaaatatgtgaaaattaacctcatgc

SEQ ID NO: 131114 - DNA, 425 bp, Zea Mays
gtctgagtcacccgactcccatggaagtgactgaggagccctcaaccttagaggtggttgttgcaggagacccagcccccgagggtggtgccgtcagttacccagcccccgagggtgttgctggtagtgatccaactctcgtgggtagtgcaagctacgacccagccctcgagggtgttcaggtgggctctctttcgcacgcctccatggatgtccacgttgggtcgtccccacctcggtccgatggggcgacggctgtacatgcttccactgttttaaatggaccagtcgccttagaggtcgacgaacttgatgcgaggagcctgatgtctactggtggggctgagatcacccctgatgatgcccttcaaattgttcctgctaatcttccttcgtcgagccatgacacaactcttcctgctttg

SEQ ID NO: 131115 - DNA, 335 bp, Zea Mays
ctaaaacttcctagccaaggctgtgtgcaggtccaggtcccagtcgagactacctcctgggggccaggtcaccaattctttcttaagtatactggcatccagcctcgacacgtcaagcctacatcccaggggggccaagtaccagggagaagttggtaacgacacacacaacaaagacaaatagcatacagataagttctgtcactgttagattaatacttcccaagagtatcctacaaaatcaaaagctattacaagccgcaccccagtggaacccttgttctgtctctgcagaatggactactaatcatcagcaggatcccactggaagcgct

SEQ ID NO: 131116 - DNA, 1037 bp, Zea Mays
gcctaattttgttttaaaggatggcttgcttcggttcaaaggtcggatctgggtcggcaatgatgccttattgcagaacagactggtcgctgctctccactcttcgccagtaggtggtcattctggcgtgcaagttacatattgcagactgaaacagttgtttgcttggcaccgcatgaaagtcttcatccacaattttgtcgactagtgtcagacctacttacaagccaaaccagatcatgcagcgtatcccgacaaacttcctcggtctgggtcagccaactgtattttcgtggtggtggataagttttctaaatacgggcacttcattcccttactgcatccatatactgctgcaacagtggctcactcgttcatcgataatgtgcacaaattacacggacttcccgcagtcatcatttcagatcgtgacccagtgttcactagtaagttgtggcagcacctctttaaattgactagcactcagcttcagctcagctcttcttaccacccacaaacagacggacagacggaacgcgtgaaccaatgcttggagaccttccttcgctgtttcgctagcgcctgccctcgcaagtggaaagagtggttgcctgctgctgagttttggtacaatactagtttccattcagctttgggtcagtcaccgtttgaggtgctctacggtcgccagccccatactgtgggtatcacagtggatgacgctactccggctaccttgtcctcttggctgcaggagcgttcggcaatgcaggagctcgtccgtcagcatttgtcacgtgctcaggcacgaatgaagcgctaggcagataagcaccgatccgaacgctgtttcgagatcaatgactgggtttaccttaagctacaaccctatgtgcaatgttcagtgatgttccgctcccaccataagcttggattcaaatactttggccccttccaggtgctcggtcgggttggccaagtggcataccgtcttaacctgcccgctcacagtcgcatccacccggtggtacacgttt

SEQ ID NO: 131117 - DNA, 526 bp, Zea Mays
cgccgcgcctgacaacccggccccaccggtcagcggctccacccctctccctctcgcgccgctctcccactggtagcccaggcccgcttgtcagaaccatcgtcccacccatgccatcaccggcgcgttcgccgtagaccgcctcacgccccgtcgcttcgccattaacactcgcaccggcctcagcgaccaccccgccactgtacccgagtcgtcccctcacccctcgcctgcccgagccatctcgtcgccgtttgctccatccccgccatcatggcaagctcgtcaacgctcgccgtcccctcccttccctccccctcccgggcgcctataaaagggaccgcctgagctccgtttcctccacaccagccccagccatctcctccactcctccccgagcccaatcgagctagcgccaccgcgttcccccgccactccggtgagctccgttctcgcctctctggtagctttcgatcgaattactttggtgcttgagctccgccacacactcacgatcgcaaggcac

SEQ ID NO: 131118 - DNA, 292 bp, Zea Mays
tgaaagtatgtgatgcaccagaatcaaaaaggatgacggcgaaatgattggcaacagaaaatgtacccatcatcacaggttctccttccggggtggtagccacttgcgtgtagtcccagttttccttgtatttttacctgcatgagtgcttgctacatttcccttgccttgagatgtgcttctagaagtctgttggaaattagatttattttgctttggatagggacagtctttgatgaagtgtccagacttctcacagttgaagcaactgttagatgaactgggtaaggcc

SEQ ID NO: 131119 - DNA, 541 bp, Zea Mays
gccacattggcttgttgaacatggttaacatcactggccatgtgctatggtcacttttcctcccattcaagcgattcagtccatcaatgttcaagccaaaccgtacattccttgggtctttgataaatttgggatgtttcgcatcgaagcattgccactaggtagcattggctgggtgtccaatcttaccattaccaaccttgtgttcatcttcccaccatgtcataagtgcaacatccttagggtttaggaacatacgcctcaagcgatcgatgactagtaggtaccacattactaagtcaggaattcttctatgctttgcatcattgcctaatggagtgtcctcttggggttaagaatcttgtaccacctttttacacccttctttctcttgttccatgtggaggctccatcctagttgtaaaggtcattgttcttgtaccgactagtgccacacttggggcatttatctagtgacttaaatgtatcacaacagtaaaggatatagtggttcggtcatgcatggactttttcaaccccc

SEQ ID NO: 131120 - DNA, 480 bp, Zea Mays
gttattgtgaagttagacacatcctctagaatgtaagcctctgtaatggaagcctcgattttgcatctatttctacatttctttcgaatagtctttagacatctctcaattggatagcacccacgtccctacatttctttcgaatactctcataatattcgtgccacatatgggagatggagtatcaaatgttgcttggattaaagaagccgggtggaaatatcttctcaagattacacagtaacatgggtgttaatcattccaagtctacaatcatggtccgagataactcttttgcacaaagctggcggaagaaatatctcaactttgtaagtgctagccaaacatgctcagggacatagcctcgaaccatcgccaaaagaatccgttcaatccatatgtggaagtcatgacttttcagccctaagacttgtagagtagataagttcatgtaacaccccaggatcctcaaacacccag

SEQ ID NO: 131121 - DNA, 530 bp, Zea Mays
ctagtcgcattcattctgtggtgcatgtgtctcaacttaagctggctaaaggattcaaaggtccagcacctcttccactacctgatgacatacctgagctcagtgttgcaccgcaaattatttagtcgcgtggcatcaccaagggtaaccggctcatgcaacaagtcctggtgtcgtggtccgggcttccatctgaattgacaacatgggaggatctcgaagcacttcaataatgctttccctttgctcctgcttggggacaagcaggccttccagagggaggtgttgggggtcttcttccccaccgaaggtcctcaagacacaaacaccttcgacaaaatgatacagaagtcttcccttcctctgccaaaggtcctcaaggcgaagacctcgcgttgaagcaacattgacaaatgccaaatctatcatcagcttcggttcaagccaagcagaagaagaaaagacctgatagaccttggtaatctaggttgactgtagataaatattgagggtcacgaatgtaatttcac

SEQ ID NO: 131122 - DNA, 588 bp, Zea Mays
tgcagctaagcttttgatctagcaatgcggtgttgggtgtaggacacactaggaaataatgcttcactgatcatcaccagcaccagacacttctactaccgcactgcgcactgtcaatattctattgcctgcctgacatgctttcgagacgacatggcgtcgaacgcaagcatttggacggttcaacaccgcaccccacggggctacagtatgcagtgtctcggtctacaagctcggtgttgcctagtagatctatagttgttgttagcatgattgggtgtgtggctgcgtgagtgagtgatcgagtggccacctcatcccggacctgttgggtagggcctggcgtccggagaatgattttgcctgaacatgcatgcctccactacccccctctgcgcacttcgattgcctgagcatttggccccagagaccaactccattccttgtttttctcttccttttccctcgaggatctcgatgtcattagaagaagcatatgctttagtattaccgtctcacatcagtgacgaactcgacgtctacacgtatcattttcaagtccgtttttggattggtgttaaaacctca

SEQ ID NO: 131123 - DNA, 273 bp, Zea Mays
tgttactggcgccaccttgacgattctgggaattcccaccagacctctggttggtctgagagttgctcctttgttggttctgactctgattatttctctggctttgttgtccagagtgttgcacttgataattattttcgccttgatttccagagcggaactgcgaaccttgagcgttgtttgggcgagtgttcctgcttgactgaccttgaaatttccttttgtggtcagatagctcctttcttttactctcaaggccaattgccttgttca

SEQ ID NO: 131124 - DNA, 415 bp, Zea Mays
gcgaaccggtatgcttctatgaccattggatccaggatcgaggatccggatttaaaataacccctatcgaccgccgcccgcacgatcttcatctaatggttcagatctcacagcgcgaatggatacgtggtcgtctaatctcggtcgcagatcaaagattcaacggcccatgttactttccccataccaggatacgcgcgtggcggcgccgatgaacaggggcaccgcggcgccgccccgtgccgacgagcaattactccaccaccagagcacgcaactacctaatcgataggctcaacgcaaccacagtgaatgtggatagatggggagggtccataccgtcaatggcgcggcgcggagaactggcggcagaaatgcaagctccacggcgatcctcgatgctccgacgaggaat

SEQ ID NO: 131125 - DNA, 527 bp, Zea Mays
ccatttgcaaccatgtggaaaagaacttgtaaggcatcatcttcaattaaacttggtgtagcagtttgacggctcgatagtgctttcattatatgtattacgcttccctcatctccatataacacaaaaaagaataaaaatcaaaacccaagttgacatggagaaaatgaaccatgagaaaatgaagggaacaaatagtcactatataacatatatatgaacacaaagggaaaaacatgtaataatacagacaaagcaacaagcatatgttaactaatttacgattctgtgtatgtcaacagtacaatcttgcaaataaggccttgctaaaaaccagaagattgaggtaagattacctcaaggttcaagctgtcgtgattgcattggatccaaaattttgtttttcccaaaatcatatgaagctcttatattaaacatatagacgagcggcgtgatgatctagacaatataaaaaggaaatggtgtgacgtacattgttggtttttttgtggcagcgacgaatgaat

SEQ ID NO: 131126 - DNA, 385 bp, Zea Mays
ttttctcgctggagaaggccccgatagagatgaaactttccatcaacttttcacatcattgggcctaagtggagaagctttactccctagagttttgaagttcatcaacaattttctgaagatcgctcttctcatcttcaacaatctatttcttcgttttctacagttcaaaattttatttgtagcttcaagtttttccttcagcttagtcatttcgaccttatgcatctcagcctcctttttaatttgagtctcaatctcctcaatacgtcgcgcgctctaaacgctttcggattcaagcttcgaaattttacaattattttcttcgacagatttctaaatctcagttcgacttttaatgagatccttggacagagtattaagc

SEQ ID NO: 131127 - DNA, 365 bp, Zea Mays
cttgatctcatgcgtcgtgatcaaatcaaatctattcgtgctgatgtggaggagtattattcagccctgtgttgtgtagtattagtatatgcagatcacgcattgtcagcagtactgtcagagttaacctaatacccatgccgtgctgttctaagaactgactagagattcttttttcgttaagtggtgcaatgatatgaaagctacgcaaaattaaactattatcgctgcaatccaagaactctgggacgaaggaatcgcaaccctccttgaaccacgttccagccaagttttatgccttagttttgacatatctattttttcttcgtaacttattcctttgggatccggtttctgaatgcgag

SEQ ID NO: 131128 - DNA, 483 bp, Zea Mays
ccctaggtgccaaaggagaagtcggtggagaagggagtgaaacccacctccccgcaccttcggagctgccattagatttagcccaagttctggccaaccaaacccgactcattgaggtcctcaccagaagccttgaaaactagcgcccaaatggtggaaggcctaaggataggatgggagattttctaaggctcaagcctcccacattcgctggatccagcaacccgctcgacgctgatgactggttgcgcataataaaaaggaagttagaggccattggatgccctgaaaaccaatgtgttcatcttgctgctcatcaactctctgggatggccctatcctggtgggatactttcagcgctgccgtcagagatgctacctgggcaaaatttgaagccgccttccgagagcatcatgtgcccctagggatcgtccagctcaaggaagaataatttcgggaattaacccaaggagggagacctg

SEQ ID NO: 131129 - DNA, 700 bp, Zea Mays
ggcggcgctgcacagggacaacacggcggagcatcccggtgagcagtgctccgacacccaggtgccccagctaggctacagatctatgctaaacagagcggagggtaagaagaacttaatggagtgcttcataccggttatggtagcgtctacagtgttgtccatgccgcggcacgaatccacgacatggtcgccaccacggcgagaaattgagcggcttgcagtccaattcccagggtgggaaggttacaagcaccatctgagcaccactgcggtatccctggccaaccgacgaggttgaagcgccacccaaatcatgagtcgaccatggcggacccaatcacccgcggagaatgggtacggcggcgctcactccatcatctctctctctgctaggcatggaggtttgccgggctggataaaggagggggagggctctacggatcacaaccttaagtagccccgaggacggtgttacggctggaccaaccgcggcagcggctcgagcgacgcatagaacaacggcgcaagctcgcgatagaggaggagaagagagagagggctcgatttgtttatggcctcagccaaggacaggctcggtcagacttaccccaaggttctagcgcggatcacggagaatcagttgcttcggcgcgtcaggttgttagctccgtccatggcgcgatatttgcgcgaggaa

SEQ ID NO: 131130 - DNA, 774 bp, Zea Mays
accaccgaagtatcttcactagtcggcacagaagcctccgcgggtgcctcgccagcattagtcggcggggccggcgactcctcaacccccgccctcgcacccaccaatagaggcgtcgtgctcttcaagtccctgaggtctttgacctcctcctcatgcgccatctacaaaaatagcaacacacataaaaaataatataataataataacagcaatcactaaaaccccgtacctgctccatcgcccggtcggacctttcccggacaatatcacggccatgagggccccacatcctaacataaagcgccccagcagagcgctttagcaccgggtcttcgacctagaagattccacgttcgatgtcttcgtccgagcgatcaaagacttcaaagtgtctgcatccctcatgggacaaggcattcacggccccttcacaggtgacgagcgcggcgaaggacatgagacccgtcacaatcgtcggtagcacctccagctcctcttgcaaccacccgagaaagcggaggccaacttctttaccagacgcatgaaagggggcggtacgcgcaccaagctgacggtacgcctccacaagcaatgcatgcgcccgaccgacctctgtgcggctcgaggcctccgccttgtctaggtagccgcgtaggctgctacggttcacctctgcctccgtggcgcgttggatggcgagattggcctccgcgcgcgcaagcttggcctcggcacgagcggcctgggcctccgcgcaggccttattcgcat

SEQ ID NO: 131131 - DNA, 1048 bp, Zea Mays
gtatttttatttctctgaatacatgaatggtcaatatgagatgtcaaattttcaccgccaagataagaaaggtaagtgtaagaccatgtagatcggggctagtcggctgtcctcatgtgtgggtcaccatggatgttgtataaggaccgatagaattacttaccgcaacttagaaaggatagtggtagcttgtttttacctttcaattatcattgttgcatcatggggatgtgctggaatgatcttttctgcaggtatactaaccttgatacgagtagtttgtgtagttatgcaataatgagtgaaggggtatgccaccgcttacgacgttaacgtgaataggtcatgaggccgtaagttacgtgcatgcattatggcataaccatcatcttgctcatttattgcatcgttcctctttttgaagcttggttaggggttttgtctgcgctagtaactaattagaaatttcttttcctatttctccccctatataaccttgtaacagatggcccaccgcaagctcaccgcccgtaagtctatgggaggacgtgttcctcgtcaccagctcgttgtgagtgtttctcgctgtcataacacttttctttcggagtacggtttactcaccctgctgtgacgcgttcttttcgctttgagttacccagagggagatgaaccacgttacttctgggaagggaggccgcgctctggaggagaaggtatttgggtgacaattgtggttgagcctcgggcagataatccagtgatgtgtggctggcactttggatcttcaggtcgcacacccagagaaggggcaggcagagcagcttacaagatacttcaagacttgctagaccgtttccctgggagattgctaccgccatgcctggagtctttcctaggggtgatattttcaaccctaagtgggaccagctagagggtaaagctttgacaggaggtgacagcgagcagcagcacaatgacaccatagcttccagtgctatgtttgtagtgatgcagttgtacatcaatacagagcgcagtttgggga

SEQ ID NO: 131132 - DNA, 528 bp, Zea Mays
gggtaataccccagtggtgaagatggtgaggacgtgaggtcccttgcaccaggtcacgggttcgacccctggcactgcactaaaaaaatccccttgttgttcctcactctgctctcgggttgcggcttggatgtgcgtcagtgcgtcacccttggacctgtcacctgtgtgggcagcttgacccgacccgttagtgatgggagcaaagggttcgggggtttctcggtcgggactggtaccacggcttggcggggacggcaatgggatagggtggggctagggaccagttccccgtccctgccccgttcccctaaacctattccccgggccctgtttagcctaacggggacaacctcatccccgtccccgcggatgcctgttccccatttgggcccccatggagaatactgtaacaaaaaaatattcactgtatgataacaattacaaatgttagaatcccgtgttaggttatggtcagtccccgtgtaattatctgtatacccttctgtgtaatgggcttggcccaac

SEQ ID NO: 131133 - DNA, 331 bp, Zea Mays
gtcaactgtgcatgggtcgtgggattggggatgaatgtacaactcgtttggcttgcgagttactcacgagccagctcgagtttggctcgttaagaaccgagttaaattgttagctcagctcgtgactcattttcaatgagctaagtcaagtcgagcgagttaccgaatatcgagttttttgtcgagctctacttatggtatttgtgccactcctccatcgattggaaaaagcctttgccacgtaccatcggagtgtggtgcgtactgtagtggtgtttattatgcctccagcttaatcatgaccctagctcctcaagtagtacaagcgaac

SEQ ID NO: 131134 - DNA, 923 bp, Zea Mays
tggcgaccaaattttacctttccacactttgacggtgaagctgacccttgtcttggatcaacaaatgcgacacatattttcgcggcatgggcgttcatcaagatgagcgggttcggcaggcatccttgcacttggaaggcgtcgcaacggagtggttttatgccctggagcgtgacattggtggcgtactcacttggtcaaggtttatagaatttctccagatgcgttttgggccaccactccgtttcaatggcatggctgacttgaaagcattacaacgcaccagcaccgtcgaagactacactcgacagtttttaacaattctgtgccgctgtgatgacatgactcatcgacagcagaccaacatgtacacaccaggattgggggagcccctgcgcaccgatgtggagatggagatgccagagacacttcaacgggcaatgcatttggcccgagtgtatgaaagacgtctgctgctatctgccagctccagcaccacctcatatcaggcaccagcagcgccatccaaatccccaacaactgcagcagcacaaccaacatcatcggcctccagcaggcctcgcttccggcgtctatctcctgaggagattgctgctaagcgagccaatggtgaatgttaccattgcaaagagaaatattctcttgatcacaagtgtactgctcgctgcgtgttcctgctagaactggaggaagatgacaccaccacagaaactggctcaccagaagacttgggtatttcactgcaggctatgaccagaataggagtcgctgacaccctcagacttccggtcagcatcaatggcatcacactcactgcattggttgattctggttccacccacacttttctttgtgacgctgcagtatcgcgcctaggcttacaagtggttcctcaacccggt

SEQ ID NO: 131135 - DNA, 1141 bp, Zea Mays
acaaaagaaatctagtgattcttatgaacgaagttatcatttcagtagatcccaacgcaagaatgctagatccatatacaagcagcccaaatcgataggatctgaagcatattttatcaatgagaagatataggaatggaaagcgcagggaacaggagccaacgttgagttgtaatacaaacgcaagtgagcaagtgctattttatcgaaggaatggagatctctttccctgcagaacacacgcccctgtgacctttcctcctctagtgctgcagcctcatcaccgtcgactcaatctccactgccgccaatgcgcgcgtccgtgggtagcatcagtagaggcttcgtgtggtgcgtgttgacaggggattgagggtggcaccagtcaccgtggagaagacgatactgacatcaccgaggccattgatggcaaggtgccggtggggcacatgtcgagcgcttcgatgaggaggcggagggagaaggggacgcgtcagccgttgatcggcgcccgccggtgcaccgcaagctcgcccgctcgggtcgtttcgatccgtcgccgggcggctgcgaaattacgcgttttctgcagcgcagggaaccgggaaggtgtcgcctgggttctggaataatcaagaatgaagtcggtcgtccgctgatggaaggaaacaccaaacgtgatgtcgtcggtatctgatcggacggtcgaggaaaaaaagaactacgcggattctgtctctgtggccgttttgaaccgcctttcatatataggaaaatgttggagaagaacagttaaaatggagtatcagacaaaagaaatctagtgattcttatgaacgaagttatcatttcagtagatcccaacgcaagaatgctagatccatatacaagcagcccaaatcgataggatctgaagcatattttatcaatgagaagatataggaatggaaagcgcagggaacaggagccaacgttgagttgtaatacaaatgcaagtgagcaagtgctattttatcgaaggaatggatatctctttccctgcagaacacacgcccctatgacctttcctcctctagtgctgcagcctcatcaccgtcgactcaatctccactgccgccaatgcgcgcgtccgtgggtagca

SEQ ID NO: 131136 - DNA, 422 bp, Zea Mays
ctggtgtttcagttccataaagccgccaccatgatgctgaaaataaaaacctctctattagttagtaggtacaacagattgcttgttacaatgctgaaataaaaaacctctctatcagcaaacaactgttacctggattataatcaaagttttcaaaagtacttgcaagcttcttgctaaatgggccttctctattttgaaacttctggagttcgatgttggctgcttgttcttgcatttcgtcgtcatgataataaaaagtctccacacaactgataaaaccttctgttattttgggaacatcaaagattgatgggtcagcataactgtagtgtggattcaacaattaagctgtcaaatgcaatggagaatcaagtcttccagccatcttcttctcaataacaacaacaccatccttgaaa

SEQ ID NO: 131137 - DNA, 406 bp, Zea Mays
gcgcgccagagaaggacaacgacagccatggggagcggtcagcgagggagatggacgccgagcgagcagggtggagggagaggggcacggtaccagggagccgcaagagagagagatgggcgcgcagcgagccagggagccggacgcggcacgagcgagcagagcaggcagctgggactgcacggacctgagcgggcgcatgacagggagggctaggggagcacggagggatgagccagggaggagcgcgcagccaaggaggaaccttgggcgcggcgaggaagctccagggagcagggagagagcgccggcagagggagctcctcgacgagcagagagctgcacggggaggaccgacggccggaggaataaataccacgcgccaagaaaaaaatcacctggacag

SEQ ID NO: 131138 - DNA, 389 bp, Zea Mays
tagacccaaagtacatacaaatgcccacccgacccagccaaaagactcggccagcactcaagccatgatcctaaactcacgccatgatcctaaactgacgccaccactaatgaccatgcacactaatcaggaaactaactgctgcacatgctaacagacgagtctcacgccacttcacactacatgtacgcatgtaggcttcgtgcttcagcacgcacgtcgtatcacacggcatgctggcctctctccttgcgtacgaatacgccggctcaagtgaacagcaactcacacgtctcacataatttttgctgccccgcacttgatctgccgttgcacacttttctggctacatgcatacacaaaaacataattaaacatgcaaatgctaa

SEQ ID NO: 131139 - DNA, 372 bp, Zea Mays
ccgcctggcgtggccgccgctggagtcacccagggcagccccttttcagtttagggtaatttgggtccgaccgactgccgccaagttcttccgacttggcgctgattcacctccccctccctctccttttctagtcgacgctgtcctggaataatgggagcccacttggtcgtgtctggtgttggattgagagctcagttccgttcgggtcgaactctagcttgcctagggtttagttttgcggcactaatgattcactggtcgtgcaagttgattctttttcttttagttttttttttgttttcagatgtggaaatggtacgcactacacaggggattttaggactgatatagttgtatttatcaatatca

SEQ ID NO: 131140 - DNA, 602 bp, Zea Mays
aacattggtggtggcacccatccctgaggccggcaaagctttggatattcagaggtctaacagtgttcgcccgaagcgttctcgccgaaccaatcagcccacttctcctgctgaggggaagaaaaagaagaagagatgtcttcatcgagtgtctagcttggatcaggatgccggtccttctgttcctgctgctgaggaagtgccagtgcctgcatttgctagagctaaccccaatggatgtgacccgactgctgtggaacccaatgggtgtgacctggatgacattgaacccaatgggtgtgatctggccaaagctgaccccaatgggtgtactgtctgcgttgttgatgaagatgaggaagaggaggatgaaatccctctaattcggaagaacagtcggcgttccctagccagcggggaaagcagtggtgttccttctccagctttatctggcctcattggtctgcaagaattatctctggtgaattttgatcagactcttgaagacatggtcccaaaagatctgttgtcagagccagcagatggtggcatgatggatgtttgcactgatgtgcctgatgctgagctggagttatcccggg

SEQ ID NO: 131141 - DNA, 1135 bp, Zea Mays
ggttttctagggtctcttctgcaaactggcaaagtgaaggggtacgggccatttctggccgtccgattaggcgtggacgcgcgagattagatccgcaacggtgtgaactggtaaggaataggcatcgtccgatcgaggatcgatggtgggattgatttgagccgagaggaggccaccagatctaatcctagccgctattctcggatccaacggttctaaacacccttccacccatcatcgcaccagggccatccattaagagatctacggtcctggcgcgccatcaaccacgagctcccacgttacggcagcacacccagagccacggcggcgcgaaacctggcgcggcggcgccatggccgggattctccctcaaacctacggtgcacgatttctaggcttactaggtgcgaaatggaattgggaagggggcgaacatgaggagcggatacttacattaaatccggcggtgcccagctccgttcacggcgcacggcgaacaggcggagaagcgtgcactccggcgtcgaatttccgaaatcaccagccgccaaaccaccgccgcgaggccaccgacggtcctggcgagcgtccgcgatcacccgtataggtctcaccgttggcggccgcgaaaattggtctggcggaggcgtggattcgacggcgacgaaatcccgggacccccggtcaccaccgcacctgaggacagctgcgccctcacccgagaaggtcctggggagctttagcacacgcggccgagtacaatcccgcagcaccccggtgttaatcgaaaacggcggcgatggatggctcagagcttgcggcggaaacaccctctcccaggaccgggtctctctggcggcgggatggtggagggtttggctcggcgcacggtgcggctacttaagcctaaatacccgaggcaaaatcgcaacggcaatcaccgggattgaaggcgcgacgcggtcggccatgcggggtagcagcgtgaagttcgcgggaggttgaggaaggagatgggatcgtcgctgacgggcgggcccaaagaagcagaggtcgagcgtgcaggtgtgtggacgtgagactgacgtgccgggcccaccggtcggcgcgcctgcgttgatgctgggccgag

SEQ ID NO: 131142 - DNA, 737 bp, Zea Mays
atgcactaactcccttgaagaaaatgtcaaggacttgaggaatgccaagaggaaggaacaaaagaagaaaatcaacacctcttccaaaagcctcaaccatgcctccataaaaggtaacatccaaggtaataatcaagtcacacttcatacaaagagaaataaaaaatgtagtgaatgctttgagaaaggacatttgattaaatcatgtccctatattaaaaatggcttgattattaacaaggatgataaactttgttttaaatgttcaaagaaggggcactttattaaatcttgtccccatttgaaacaaaaaggcatagtgttagaaaagaaaatattcactaaccatgtagcaagaaacaaacaaggaaagaagaaatcttcaagacttgaagatcgcctttgctacatatgccgaaagaagggacatcaatgcaaggattgtcccattggtaaaaaccccacctccagcttgtcaattaattctcatgtaactaggcaacccaaaattgcaacttgtgctagaaaggtaatgagtttaccaagcactaacacaaaggacttttgggttcctagatctttgttgactaaccttgatggacccatcaagagatgggtaccaaaatatgcttgacaagctttgcaggaaaaggagatgatatgaagctttggggtgcttgagagagtcaattcaatttctattaactcaagctatcaatcttcaatgatatatatcc

SEQ ID NO: 131143 - DNA, 366 bp, Zea Mays
gggggcacgattcggttcggaccgtggtgtgtggccgttatcttcgtcgtccgcgctgaccttgtttccctcttgcctttatattaacccccatgaacctccccacgtccatccgaagaacaagaccggcggcagctgagaacttggggagccgccacagactttatcatgccacaaccaaattggcgttcgggttgccattttgcgtgacctctgatgcacaccactcatacctgtggcctcgctacgacgggacgacaatctggggcggtgaatttccggtcggatcacgggaagtcgtctggaatctcgctctaccacaggcgtgcggatatgcgctccaaatctcggtgaggccttcttcca

SEQ ID NO: 131144 - DNA, 574 bp, Zea Mays
cagcacccctgctcccttcttttccaaaccgcgtagccatggcgaccgagcaccggccctgctgccacgtgcccagctcgcccaacgccgtcgagtctcgtcgtccacccgagtaagttgtgcccatgattcttcctcgtcgaattcgtcgcatggtgtgaagtccggagctcgcctgaagtttctccgaacccgcccttcgttcactcatggtgagctcgcttcttcctctgtccatccctaccctcctcgcctcttgtcgtgctcgtcgctgcactcgctcgccgtggccgaagtccggtcgaaccagcccaggccgccgttgagccgctgcgcagacacgccgccgaagtttgcactccctctgtggttcatcactgtgaggagaagcccatcgcctactcctctctcttccgtgccctacccggtgctcgccatggccggccttggttgagcccattgcggcggtaaggccctgtggccaagctcccctgcgcgcaccgtcagtcgatccgcccagtcgtgtgtgcaacagcagcctcgccgccatcgcgcaacctgtgcaggtcgtcga

SEQ ID NO: 131145 - DNA, 734 bp, Zea Mays
agaactcccagcctcatgatcatgtgagcgtggaggcataggaggcggaggcggaggtggaatcccaaaatcatcatcatcaactgctgcatcctgagcttcgaactgatgaagagcagcatcctcggcctgagtgtcaaaaactggagcagaagctggcacaggatcctcaagcactggacggtaggacccaaagacgaggcgtgaggcctcaagtgtgccctggaactgtggaggccgaatcagctgcgcaaaaatgtgacacaggtagtgagcatatggcaactgtcgacgagcacgcatgccatccaaaacggtgtcctcgatctcacaaataaggaaattcacaacgtcaaactcagagtgagagaccagggcaccaaggagccagagctgcacatgtgtggtagcctctctgtatcccatccgcgatagaagtgtccgtctcataagctgaaataggaactttgctgctgtagtgaaatctgccggtgagcgtcgcgacccatctgagaagggcggtcggaacagagccgcgacgtgagctgtacccggagccacaccgccgtgagggcgacgaggagggtcagaggtgccgtagcataagctatgaagtcgagtcgatgactcgtgaaatccaaagagctagcgaatctggctggcatgaatagtgacatcctctcgctcaaaacgaaacctcatccaatggtgatctgggtctatccatacagtcg

SEQ ID NO: 131146 - DNA, 537 bp, Zea Mays
gttgtgcagcatgtgcagcagcagtgccagccgctaggcggtaagagccccgtggcatagaagatgtcgcttcttcccccatagggaagtctccaaaggacgagtcgtgatgcttgacgatctgtaccatcatgacgagcaaggaaaacaggaaagaaatctaagcctaacgcccccctacctggcacgccaaatgtcagagggaaaatccaccggccgggtggcagagtgcatccgccctgatcatgagatgaggggacctagggactgtctgattagctagaagaacatgagaacaccagggttagattggtttgggccaccggagcgtaataccctacatgcacttggagttgtattgcttgggagtctctatgtgttgtccgttgtatcattgtgtgccctcccttttatagtctaagggggcacatacaaggaagccgagtcacgacaggtgggcccaggaatatagtaataaaagcatactacatggaacaagtaatgtcgtcggtggacagagatcttatcctggtcacc

SEQ ID NO: 131147 - DNA, 440 bp, Zea Mays
gaggtctggaagctgctagacgctggcttcatcgaagaggttcatcacccaatatggctggccaacccagtcatcgtcccccaagggcaaatgggaagcttcagatgtgcatcgactacaccagcctgaataaggcctggcccaaggacccgtatccactgccacgtatagaccaaatcgtggattctacctccggatgcgacctattgtcattcttagacgcctactctgttttccatcaaatccatatgtctagggaagataggaagcataccgcttttgtaatagtggatgggctatactgctatgttgttatgacgtacggtctgaaaaacgccttgcctacatttgtgcgggcgatgagtaagacttttggggacctgattagggacaaagtggaagtctacgtcgatgacatcgtggtcaagactaagagaggg

SEQ ID NO: 131148 - DNA, 326 bp, Zea Mays
agccacctagcatactagtaatagcaaaaaggatttcaacacatcctacacatgctaggtgccaatcttaatggtgaacaattttagattgagcaagtaatagtaaagttcacaattatgaaaatagcttagctcaacaatattgtatcaatatgagaaaaaagagcttaagcatgccataacattatcatgtacacaaagaacatactactaggagcagaatcacattttagcagttatgcaagtgaaactcaatatgacatgcagatataatacaaaagaaagtgaaagtggaaaataagaagaaaagaccaaaagggagccct

SEQ ID NO: 131149 - DNA, 310 bp, Zea Mays
gcagaaaacaactcgaaaaacatgtttagcaagtttctatgcagtagaaaatccaattagatcagagtttacggacgacctataactggcttcaatgcactcagtctacgcgaacatggtggcttgcacgccttccacatgttagaaaacgaccgagcatctagaaaccacagtaaaacgtcagtgcactcgattggttgggtcaggtccctgagagagcgagcaaagcctcaacggtgccatgatagcgtcgagcaacaagtagtacgcggcaacggtcgtccattgccaatgtagcatgcaatgcaga

SEQ ID NO: 131150 - DNA, 837 bp, Zea Mays
atgggattgctcagagtccttggattatctcaatcattatatacagctaacatgcatttgctgcccgtgtcctgtgccataaaactgtttgcctggcacatttcaaaaccttaggccaacttaataacggacggtagtacagtaacaaaaaggctgcttgggttgtgaggcataaaagttgttaccagcgagtacaatagagtttctgctagatttctgaagacgacaagttgccaccagcagattattgagcgtcgttgcatgactcgtgctgaggctcctggataatatctttatgtgttattacttattggctaacgctggagcagaagactgttccaatccaagttccaacacgatgacgaggtcacgctgtagcggatgactattacaacacaatgacaaggtaacgctgttggaatttaatttggtggaatagaatggccatctttagtggatacagaaacagaaataagcatgacaatcaacaacagtgctgaagattaaaaccaacagctcttagtactttgcttgtttggctgctctgcacttgccgccttcatagatatagatgcattgcgaaatatatataacctatctggagtgggttcaattgcatgttcttctttcacgaattacgactgggcatttcagttctcggataccatgatcacgggaacagtgtcgcagaaagcgactcggccatttagacgcattacattacattacagcactgttaggttcgctcatgctttggtggttcatggaactgacgccgacctgaaagtgacgctgcctttgtgcttgaccattcacggtcgcattgcgagatttggt

SEQ ID NO: 131151 - DNA, 314 bp, Zea Mays
tcatgtcaaacacattgatgcgggcgagactgtttggagcaaggaggaggaggaagactcgactctccccaaggacgttcatttgatttccgcccttcgggagaacggtcatcctggacaaagaattaaggtacctgtagtacctatgcatgttagcggtcgtccagaactcccgctcattagagacatgaataaattccgtctcttcccgcatgggcagccgaatgttatgcactcgcatgttgctgccctgaatatctgcatcagagaagcccagaatatgggcaaacgacgataactgactttgtgccagt

SEQ ID NO: 131152 - DNA, 568 bp, Zea Mays
gtaggggtttgaaacaggccttagttatccacacagcaaacaaaacaggcggagtggagcatcgacctagcaagaaaaatacttggatcgatttctctttgtccgtaagaaaaagagcagatgcttagagggtgcgaaatcacaccacacagctccttgccgatgaaaagcacgggtggcttatcactgtcgatcccgcaagtacgcacgggagtaattgctctaccaacaatctcgctaccagtagcaggtccccgacgcagcagaacagactagaccgaatcatggacaagctaaacggatcggagagggaaaaggcgtaaccggaatcgaggtccctcaacgaagtaaagatcccgcaggtgagagcgagtggtttatctaagcgaaggcaggggcatccttacccggaaggatgagagcagatctcgggggaggagacggatcagaggaggtgacgacgcggcgctcggggaggagacgagtgaggcggtgcggcggcgctcaggacgattcaggaatctatttcctcattttagtgtaagaaagttttagaggcttgtgattc

SEQ ID NO: 131153 - DNA, 1254 bp, Zea Mays
agcacggccactgctcgtccgtcgcgtcgcagtagttgctcgccggcctgatctcctccttgtagcacaggcaccacgcgtactggtcgtccggcgccgtcgcccacccgcctgtggtctcgtgagagatttgcgcgagggccgccgtgacctcgcgtttgcgggtgctggggtcaccaggggcaggcctcctccactgcccagggccgccgtacctcgcctctgctacgcggatgacaaggaaagcgaccacggaagcaacagtccacaaggcgcaagaatacgccattgtgtctgacgaccagctttgtgtgtactttcattgttctgcctcacctccgcttagatcttggctagcttcttaggcttctcttcctcctggccgtaaaagagagggactgagggaagagatcttagctagcttcttatgcttctatttcgcttagatccttcctgttcgtcttcgttgtgggctactcgctcggcctcctgtcgttgtccagtagcgcgtgaaaaagcatatatgcgcagggagagaaagatgcggagaaattacacacgtcaaatttcccttgctcgacacaacacgatccttaaatctgtccctgtttattatattctagtccaggatcaaaactcacagcctcttccgtttttctttttttaaatacagcctcttattttctgctgcttttttaaaaaaaatattcatgattttccataataaagctatttgggatcgatcctctgttgcttcagcgtcaagagagaaacaccacacgagtcctcggccaaatgtgttgttcatacgctaaactgcacacatcacactactctcctacatacttttattttttgttagcaagctagctaggatattaatattgacgttgctactgaaacctttagaaataattcatgatcgatctcgttttcatgcctatttataaattccttgtcttcctcttcactcggtataaattttatatacctcttcctcttcttcttcttttttgttaccatgaacttgacttattagcttgttattgatgactatattatggtattatattgtgcactagtactccagtagcgcaacttactatgaattgactatattatggtattacattgctaagaattgctaagatcctcttccaaaaagcagcatgtttaatcattgtttctgctctagctagcagctactgtgtaataatatataggtttgattaagttttgcatatacaatggctc

SEQ ID NO: 131154 - DNA, 536 bp, Zea Mays
ttctgttccaaactgtgtgttcaattttttgaatctttgttgcaatcttttttatatatatagctcaatgagttctgtaaacaaggaccaagggttaatgcccgaccacatgaacaagggtgtttctcaagaacattcaagtgatgaaggatatgaaacgcctatcgacccttgtcctagcatagatcgggccgctcggcgtcaactgcatcgtgacccggattatcatccataagagtgtgaggtaaagtacacatctttagtttcgtatgtgtatacctaattagttgatttcacaatgtctattacacatgaataggaggtcttgtctcaatatcatgcgatacttgatgaagccgtggcacattaccaagacgcaccggggctgaaccaagacgaagatgcacccataccgaccgatacaaccaccaagaggtcaaggaaaaggacacagagcgaccagaaaagaggtgacaggggactgaacaagtttcctgacaaaacatataaaatctcagatgtgagcccgaaaggtc

SEQ ID NO: 131155 - DNA, 442 bp, Zea Mays
tagtaattgtttagttctctcataaagtttccttctgcatattactattagatcagcaaggtaaataatatagccaactggatctttgtagcctacctaagttgatttgtatagtagttagatctatcttcacaaataatacatggttcacttgtctctgtcacaaagtttcttggtttctatgtctaaactagctataagagagtgtttgcaaatcttccatacatctccgcttctaacaagaatcactctcacgtagccaaacggtaaaaagctgaactgctctatatagtggaagcaaaatgaatctactcactgttttgtactagaaagtgggaggcaaagaacatgttccctaatctccaacccctagagaatggaatcactcttttgaaaaatcagctcccgatctaccctcactaccggaatccgaggctttacc

SEQ ID NO: 131156 - DNA, 435 bp, Zea Mays
ttgtggtggcgccgtttaggaccggatggtgtgcgcgatggacacaagggttatactagttagggttgaatgtcactactccaatctttggtggctcgcgctaccagcacctgattgcttgtagtaggggattacaaacgagcgagagggagagttcccaagtctctgtgaggtgtgagtgttcctattgtatcgtgtgtagttgccttttattctctttcgtgaggccaacccttcttttatagcacaaggaggggacctcttatattggattctctcgaaagggagcatgtaaaggtaaaaaagtttcatgttttgttaacttttgttgtgtgtcagtgcccttcctcgcgtgcgtccttaatcttacctggagatcttgcggagatggtgtggtatgtactagtgacatgagcctcgagtggtaattattat

SEQ ID NO: 131157 - DNA, 863 bp, Zea Mays
tgaaaacaccactagtgctatatgtatccatgtaatagatgatgggtggatcatttggctgccaattcagaaatacaaactctttgagttcattcaacgtgagtcttgagagacttgcagacttgttctttcaattcccgagggagttgtagaacaccgaactgcggttcacccagtttgtgccttcacgtctatacgacgtgattgcgtgggctggcttcatcggtacgtggaagggcgattgtctcggttgttcgtcgcgtgtgcaagatctcgtggtgcgcagcctcttcgtcaggtcacgtagcgatatttatcaagtttcgaagatccttcgagaagatcgggccacaacaattgctcccgcgtaatctgtacgcatgcgcccatcatctggtatcaaagcctcggttgactcggtaggatcattcttgcttttggtaggctagatttttatatacttacagtccacaaatagtcgcaaaaaagaatatatatataatgcctttcacttgtgcagctgattcgtagtttgcattatcgagttttcaatcgtctgaaacttgtctttttgctggtctgatttttttagaactccctgatctgaatttcgttttttgcctccatatcattatgatcttaccctttgatctgatcttcattttctctctgaaacataaacataaattcccacccatccctctcttgattgcttcctctttcgcagatcaatttgcacctgatatttctagttgttctgcactatgttaatttgcaattctatgatagtttctcaagtgcacccaaaaaaaggaaatgaattgagtttcagttaaaaaaggtcaaaataaaaaaaaataaaa

SEQ ID NO: 131158 - DNA, 454 bp, Zea Mays
acccctgggcgctctggttttctttttcggatcttcgctctcccggcgcaccgcccatcatcagttcgtcgccgcggtttaaaaccttttcatttcacggcttcccctcccactaggccactactgctactgccccacccttgggtgagctccgcctataaatgacagccccgcctccctccaagttcaaacgcacgctgcacgctcgcaggcggccgaccgtggcccccaccaccgcctgccgccgccactgcccccctctccactcgggatcccgtcctatcgcggccgccgcaagccataatggtgagggggctggggtcgaagcggagggtggcggaggaggagtcctcggaggaggagtacgaggtggaggtggtccgcgaccacatcgcctcctcccgcggcagccgcctcgcgctcttcggctccgagctccgcctcggccgcttcc

SEQ ID NO: 131159 - DNA, 507 bp, Zea Mays
cttcagttgcctcagcaagtcattctccagtcagatgggccttacctcaaccacccacatcagttccaactttgtcatacaatcagcagcctctagagcaatatctccatactgcttcatattactctccatacatcccaagatatgtacgcaaccgacagccaatccagtagccttcagctttagttgcctcagcaagtcattctccggtcagatgggccttacctcaaccacccacattagttccaactttttcatacaatcagcagcctctagggcaatatcaggatcaatagcagtgtgatgcaagggaacagtctgaagctcgaacagtcaacaacactattccagaatctaaccatatctactgaagcacctaagaggctagatcaggaatccgaagttatcttcaaaaatctattgtaatttttgtttcctttgctttacatttgcccaaaaaatccaaagttcagcatttaaagacacaaacatatgcgtctttttagc

SEQ ID NO: 131160 - DNA, 646 bp, Zea Mays
taacgctcccaagggtgccacgccggtcactgcggagcaataagcttcgacgtggcacaaccgggttcaccggcgtttccacggcggctcaggcagaccggccacgtcgcagcgataagctctggtgtgtaatcctatccatggcggggatatttccgggaccctgagcgctatccactcaccccgaacactacatggactggcagtgacacgaatcgtggcgcagggaggtcgtcggcggcgagtacgcggcgctggcaatctaatccatttcggacactgtactatggcactgcttcatcagagcgcctgacagagcagttttagcgctaatttactcccgatttggtgcagtgacggagcaagctttctgtaccaaagttatagccccatgttccagctacaactttgttatgggaatcatacccaaacttgcactggatcttgtttaaatccgggttcaaagattgacccaccccactgtcagaccaagtttcagtcatcagtcagcctgacagtcagattttaagtgggattatctccaaatattctttaacaactatgctcacaaccttaagcaaagttgttatcctttgtttggtctgcaagtttggtgtggtaacctagggcaaattcttattaattt

SEQ ID NO: 131161 - DNA, 449 bp, Zea Mays
ttgtacttaagaagagactgaacaatgctactacgttgttgttcctttttagcagtgcaattatgccgaagcaaatggacagtcccacaactagatttagcactaaagatcctcttacagtatttgcaaagggcactataccttaccctcttaccattgacgagattagtcagctcctcaaagtcattccagactttggatctcttccttgaggcattggcacccatgctaccactagtgccagtaccaatactgcttccatcagcagcagtggggctagttgagcctatccctgtatcggcaccaggagcatcatcgttgccgatgccgataaaggcccttgcatcctgctcctcgttatgtgcctcaagtcggtactcctcctcctcagcggccggatccagttccatggcgacaccggctcctcaacgattgcgcggcaccggaac

SEQ ID NO: 131162 - DNA, 416 bp, Zea Mays
aaataatgacattcgaattcgtttccatgcgtatccgatccgaatccatccctagctgtaacagactcatgcgccaaatacggagcacccagccgccccccgtatccaactgttggttgttacgccagctatgtattccctggtcaatacgtcagagtataattaggagcctcatgcatgctcctgacccatagagccataatcatcctgagaagccaaaaaccaccaccattgcgttgccacgcaccgcacgggtgagattcgccgtcgccgtggaactcaaaagccaattgcgtcggtggggaggcttcttccgggtgaggcgaaggttcccttggcgctattgggggaaagcactcgcgcttttgccttgaatttctcaccggagctggaattcctgccgcgtccgcgcctcg

SEQ ID NO: 131163 - DNA, 389 bp, Zea Mays
ttcgcagtgggagatttagtcctccgccgagtgctgacgggggagggacggcacaaattgtcaccatcatgggaaggaccattcatcgttgcagaaattacacagccagggtcctaccgactcactcaaatggatggcactgaagtggggaattcatggaatattgagcacctcaggaaattctatccataacaatgcctcaaggttcttgaggacaagttgtactttgtaagcagaaggttttattatcaataaagcttccatgttctaaggcagacacttgaaattagcacgacactcttacacaacttagggtgatcactataccctactaatggagcaattggcttaagtcagaaacgccttaagtcggtgcgacatgctcacgc

SEQ ID NO: 131164 - DNA, 566 bp, Zea Mays
atagtgtgatgggaagtgtttctaggacgagtgaggatttaggtaacgatcttcctccaacatccctatactagaccgtccggtcggatacgcggaccgtccagtcagatatgcggactgtccgtgatcatatgcggaccgtccgtctaggtggtttagggtttgtgtaacatgtggtggctcggatgcatatctcggtaactcattaagaataggaccggccattgctagcccagacggtccgcgctcacgtgcggacagtccggacatgtgcagatcggctaatttagtgccgatttatggttgctcagggtacgtgtccattggcatcccataaaggggttgtgactggtcgtgacaacctgtagccgatgaattgcgtgtatttcccctaattcaacctcgtgcgaagaaaaatttgcaacagtggatttatcaaacgcacgtactatccttttataatccttttgtattccccctacaatatgttgcatttgttctcgttgttcatctatgtaagctttaagagattggagctcgttggtgttacttacattggggatatc

SEQ ID NO: 131165 - DNA, 801 bp, Zea Mays
gtttgcagaaataccctcgtacttctatttcttctctagaagcatccctggccacggcgcgctcgccgttcgtcttcaacatggtctgtaccggccatggccggcaatgactgccatggttaactatcagggaggcataaccgatcaaggataatctaggaacatccttcaatttgacataaaccccactgggaactgtctgcccacgatcatggcagaaaccgggttcacgagtacgcgttcccgccaaatcatggccgaattgagtaaacgggtgccacggtgagctttaccagcatgcagagccacggaaacaacacttgaattggataggaacttaccagagcgggctggccacgatcgggctattcttggtggcgcggctgaccgatttgggggaaattggtgattctccggctatggtggctaatcgagggtgggagcaggtgcttcggcttcgcaaagaactctagttttactgcgcacacttaatttgagaggaggggtagaggtagcgcgaattcggcttcgattcaactcactgtgtgtgtgatggtcacacctcgccgtggaccaccatgctatttatagccacggcgacccgacagacgatctccggccacggatagcattgctagcgcatgcataccacgtcggtaggaggcacaatgaggcagatcgtggaatgagtgacaccgcggcgaaagttaccgagtcaaggtggccgccggtgaagaactccggctggactcgggagatggcgccacgtacgagttatccatccccggcgttatccgttcc

SEQ ID NO: 131166 - DNA, 610 bp, Zea Mays
tgacgaccattatagctctgttttcaccgcggaccagcatgggtcgtcaaattgcaatctggatgacggaatggcctagccagtttcccctcaatcccccccaattcttccgggatctcggatcaccaattcagctctaacggtgtaatctgggacaaaccggctgctgctaatcactggtgaagagaactgtagcatcgcaattatgcccccatcatctccccccgtgtcataatttaattccgtggattccgctctaatgacggccattatagctctgttttcaccgcgaaccagcatgggtcgtcaaattgcaacctggatgacggaatggcgtgactagtttccccctcaatcccctccaattttctcgagatcccggatcaccaaatcagctctaacggtgtaagctgggacgaatcagctgctgctaatcactggtggagagaaccgtagcatcacaattatgcccccatcatctccccctgtgtcatagtttaattccgtggattccgctctaatgacgaccattatatctctgttttcaccgcggaccagcatgggtcgtcaaattgcaacctggatgacggaatggcgtggccagtttccc

SEQ ID NO: 131167 - DNA, 570 bp, Zea Mays
gccgccgcccaaaacatccagccgccacgcgccgccaaccgccgtcaccaggcgagcgccctagccggccggccaccaaccgtgcgttgtctcctccccagtcgcgcgccgtcgtctcctccgatccgccaaccgcgcgcgcagtccgccgtgtcacgttcccagccgcgcgcgcagtccgccgtattgcacatcatagcccacaggtctacaacaacctgcagctccaccgcggcgtgttctccgtcgatcagaacctctacagggacggctctacgcgctggatggtcgaccagctggccaaggttctcgttaagctcagcgaggtcaacgtgctcaccagcgtgcagggggagattcgaaaggtacttatgcagcaggtttaactaaccagaacacccgtacctccattgtcggctctcctctactacatttattaatttcctcttgctataattttggtttagtcaaatttgaatttcaattcattcccttttatatatatcatttgaatgaccaagctctttgagtagtaatgaacaaactgttgttttcctcatcattcccgat

SEQ ID NO: 131168 - DNA, 301 bp, Zea Mays
gccgttcattccatggcgaactcatacgtcgcgcccttgcgcccaccctctgctcgttcctgcgccaggctataaaaccagaccctgtcgcgcccctctcatcaaccgactgactgccacatatccccgtcacgggcaccgtgccaccgccgctatgatgggtgagaataggatctacgatgcatgcgaatagttcaattcaacatcgctgtgcaaatgggtctggtcggggaggttcgccggtgagctcctgacgcggttgcgactcgattgggcgtatgggactactgaatcaaggtgg

SEQ ID NO: 131169 - DNA, 501 bp, Zea Mays
caagaagaagctggctaggcgatttctgtctaagcgtcgtcgtgcagacgattctgactataatcctgccacagattctgaagcccaatcctcagctgggggcagtgtttcttaggataccgaagatgctcctcattctcacccagactgcccaattgatattataggatggacctatcctaagatgctcttctcaatggctgagtatttttccagaaggactatagatcaattctctctgcccagtgacaccaacattcagtacttccatactcagtagcagtttgatgtgttttggggcactctgatggatatcaaatttcataaacatcaagttattgactgggactacatgcagggccaaactgttatggaaggcttactagcaaaatttcaggcatgtggcttatatgagttcatggatcaaagaactgactttaatgaattaactatcaagcagtttcttgccactgctgaaatcaacattgatgagcagctcat

SEQ ID NO: 131170 - DNA, 556 bp, Zea Mays
gcgccgaggagatggcgccggtgagcgattctggtggccgcaaggtccttccactacctagcgatgccaccgcaagcacccatgaagacgcggcgaagcccctcgccccaggccaagggacccgacgcaagtgcccacgcgattcggcagcggcgacgacacgtttttctctgttcacggcgatgaagtggctctcggcgcgagagaatgaagaacgggggttcagggaagaccgcaggggcgggtttatatgccccccccacggttgatagaattcgttgccgagaaactcgggcacgcgtgggtcaaatccgcggttcacggcggcggatgcggattttcgttgcggccccgagcggatcgacgaggggtgcgagagttcgttcccaacggaggtgaagttgatgctgggcccgcctcgccagtgagacgtgcaaggacaaagcggcgtccatgggatgcgagacttggggattccgtccagcgcgcgcagcggaagtctattgggaagaagaagaccctgacctgcggtacccacagcacagcgagatacgca

SEQ ID NO: 131171 - DNA, 327 bp, Zea Mays
gaaagttagctagtcgagactgcaggagtcgggggagccagtgagccacggtcatggtgaagaagtcgatgaagacgatgacgcgcgtgtcgtcgggcgggtcggggggcatgggctcgcccatcggcagctccactatgggggcattttaggtttggttcgtttctctcgagttgtatccaaaaactttgtttgtttggttggctggatctcgacagactggtcagcacgaaacttaaagcgcacgatccaggcccgcgggcgcgtttccgcgcgtgcagcgctgagcaacctgtggattagtgggtgtttagtcggggaaaaatt

SEQ ID NO: 131172 - DNA, 1054 bp, Zea Mays
gttataatgcatggtcttcgcacctgagtcttcgcctctgtgttctccccatgcacttcgtaatgtagcaaaatcttcaggccttcgaggtctccaatcttgaatcctctagcatgggcctctcaagcgagggggcattacgcctttgccctaatatttgccctctaagggaccagttcgactaagtcagctgatgccgaagtctatcgtaagatggcaaaaatgttggcctcgctcgaagtggtcccgtgagggtttttgaaatgtgaccattgacgagacatgttactgtgggactgttgagttcccgaggcgctgatcctggctttaaaaagctaggcccgggctaaagcttttcacctgttcaagcgcgcgctgccgaaacctagctctttcatttgctcacttgccctctctgctctcgctctgccgaagatctggcccgcatcaagccgactgctcgtcgccgccgatggtacatgaccatgtcgtcctcttcctcgtcgttgtccactgcgagcgtgtcgccgaccacgccgtcgtctgagtagacgattagcgattctacatcggtggacctgcagcctagtcatacggttaaattcgggacctcgaggatttactcgggtcgagtgctggagatgcagcggctgggttactttggaagcggagttgggcgggctctaggggttgaagatgtccctgagccggaaggggagttggttgtgtttgaggcttttttgctgttgatcttcgtttgccagcacattggttcgtagttgaagtcctacggaggtttgaggttcaaattcatcaattgacactgaatgctatggcggcactggtgaagtatgtgtgggatgtgtcgtcatatggtggggaactatctattgaagtcttcatgaaaaattactatctacactgtcaaaaaaggaagataggtggaatgatttctcagtttgggccctgcacctttacgccgaggactggaaagacctcggctggtattatcgagattgttccgtgtgtgaaaaataagtggggtaactggtgg

SEQ ID NO: 131173 - DNA, 364 bp, Zea Mays
gttgtcgactgtgagctcggacgggacttcgaatcggcaaacaatgttttgccagaagaacttctgggcggtcttcgatgttatcgtggatactgccctagcctcgatccactttgtgaagtattcgacggcgacgaaggtgaacttgaggttcccttgagccgtaggtagtggcccgacaatatccagcccccagcgttgaagtggccatgtgtgggcgatcagcttggtgaattgcgaagggttgcccgagcggggagaaaacttctggcaagcttcgcacgaccgcgtgactcgattcgcggtgcagattatcgcgggccagtaaaatccttgacggatcaccttggcagcgagggcccta

SEQ ID NO: 131174 - DNA, 436 bp, Zea Mays
cgtgagttgtgatcgttacccagagactgttgtggcttcttatcccacaattgccacgaatcactgcgctagtaacctctcccctctccggccaccaccgcaccatctccaattcacaagccaccgcccccagagcctataaatggagtgtgccgtcggctccgcaaggtagtcaagcaaccaatacaccaactcgtgcctcgaaatatccaccagagaacttcaatttaggatttcccccaaatcaaccaagaacaccgtgcagtgtgagctcaccgtggctagctcattgcaggtccgttcatcgcttccctgttctcgttttagcatctctatgtactatagatgcctagcagcctggtcaattgaactaaattaggctagatcaccgggaacaccacggattgtcctcggtttgcgccgtcgccgtggacag

SEQ ID NO: 131175 - DNA, 460 bp, Zea Mays
caccaccttaagtcattgccgacttaagccgattgctccgttagtagggtatagtggtcacctcgagttaagtaatcgtaccggttaacagtgaacaattcgagtacttttgaagtctttttattgatgatatatttcccagtttacagagtacattgtcgtcccaatagcttttgagatctagctaggggtaaaacttcctgagatgttctatgttccatgagttcccaatttccgtgccatccatttgagtaaggcgatacgatccaggccgaacgacttctgctactatgaacggtccttcccatagtggcgacagtttgtgccgtccctcccccgttagaattcggcgaaggacgaggtctcctactgtgaaggatcgatgccgtatggccttgtcatgatagcgcctcagagtttgctgatatcgggctaactgaatcaccgtattcaatcgttc

SEQ ID NO: 131176 - DNA, 625 bp, Zea Mays
gggggatggggcgtcgtggcctcgcgtgtggcgggggcaggcggggcgcatctcacggagctagattcagataagactgaattgggaactcacaacatccaggaaacatccaccagcatgttgttgttcatgataaccatgaagttgtcccttgatccctcagtcctagccgcgacaccaccagcaagggcactgccttgcctgtcgtcggcagaccaggtgaacatccgggtatgttcagcggccaccatgaggggaggggtgaggagagatatgcatcatcggggaagaagatgaggatgttgaagaagccctagtgggtgctcgtcgtcgaggaagggttggccaatgcgtctacctagtgttgagcggatgcaatggtacaaatcatagtcctatgaacctatacatgtagatctaggaggcaaatcgatgtgctcatgtggggattagggaagatcttgcacaacgtatagctctgtgtacagatcgtagttgaggggctcggatccatacctggacgcatcatttgaatcacacagagagaatttggtggctagatctttgccttctctgacgatggaattgctccgctgtgagatggagcgggggtagggtgaggctt

SEQ ID NO: 131177 - DNA, 394 bp, Zea Mays
tctgtgaattcccaccagacctttggttggtctaagtgttgctcctttgccggttttggctttgattgttcctctggccttgctgtccagagcgttgcacttgataattatttccaccctaatttccagagcggaactacgaaccttgagcgttgttcgggcgggtattcctgctggactgaccttgaaattttcttttgtggtcagataattcctttcttttgctttcaaggccaattgccttgttcagcagtgtctggaaactggggaatgtatgactctgaagttgataattcagaggtccaatcagtccttccaagaaacactcttggcgcttctcatctgtatccacttctttcagtgcgtagcgtgaaagctgagtgaagcgatcacg

SEQ ID NO: 131178 - DNA, 496 bp, Zea Mays
gggctgtaaggtgcttgctaccttcaaatgactggccttgactctctggcaggtgtcgcattcagatatatacttcgcaatttccctcttcattctggtccaccagtacaaggatctgaggtcatgatacatcttgttactgcccgggtgcatagagaatttggaaaggtgagtttcatccaatattttcattctgagctcggggttcttgggaaccaccaatcggtctccaaaccatagaatccctttgctgtccttacggaagcatttgtatttatcctccttctgtttgatcatttccttaatgacttggacacccttgtcaccaatctgtgccctgactatttgctcatgtaaggtgggctccactgaaatataacttacagcaccggaggaaacgacttctatgatcagcttgcacaactcatcacatagggtggtgatccttgcatccatattcatacaattgcactatgctttcctgcttaaggcatct

SEQ ID NO: 131179 - DNA, 390 bp, Zea Mays
attggagatgattgggcgtttagagccagatataggatgtgaagatgctggtggtgcaagtactggagagggcaaccatgtgggtgttcttttatataaaattgttgaacattttattcagaacttaattattgctaattgtaaaaattaaacattgcagggcgaagaggatgctgttggaaacgctgaaggtgaacatgtatcgcaatgtgaaaacgaggagcatgtggcagtacattcacgacaacaggtaatattatggcaaaaaacaatgtaatttatgtataatgcaaataaatgggatgatttatacattatttgtaatattgactataatgcactaatgagtaggatggaggcttaaatattgatgcacatcatcaatctgaa

SEQ ID NO: 131180 - DNA, 684 bp, Zea Mays
ggatggcttggcgagggaaatgatcctcttgctaatcgacttgttgtatgattttcgtgttttcagtcgctcatagggacgctggcgggcaggtctcgccttcttctcgaccaaagggaggtgtaggagtgttccaccagcaatctgctggtggtgaaaaatgaggccgctgaagcccgcatccgcgtagtttctattcaaaacacctacgatgtcttggttggggtggtgaggagggatgcagaattgatggcccttcctcgtctcaagatagtaaaggactcctacctccgtaccctagagcgagggaaggaggtcgtcgatggccgagtcacgaccttggaggaagagctaggtgatcagaccaagaaggaggagatactcctggcctctctgtaaggtgatacctctgaatgatttcccctagagctaggagttcgctgcccacccccttttcacggcccatgttttgtctggtcatccattcaggggaaattcgacgccatcgtggggaactttgtcgaggtgcaaagccacctcgaggagtcggagaatgagaagcatctcctattggaggtgttgagagctatgtgtgggcgcttcggagcaccccttcgccccgggtcggagttgctcgtttcccatctttagggccttgctaactggttccaagagatctaccag

SEQ ID NO: 131181 - DNA, 401 bp, Zea Mays
ggcctatctgcaatgtcaaaggatgaccttgcagatagccttgcttattatagcttgaaggtatatacacatttgtaaaattaactatatttgtagcttttcttgctatcattatgttctcacacatttttattattagggcttaattctaagtaaggctttaaaggcccaaaaggaagtagaagacgagagctgccagatagctcttgggaatcttcggtcagaggtcatttcactaaggaatgaaactctcgagaaggataagatattgttttcctaagtgaacaggctgaaaaccagcgaggccaaacttagtgcacaagacgaagctcacaaggccgaagttgaagatttgaagaagaagcttgcggaaatgaatgaaaaatttgaagttgcaaatg

SEQ ID NO: 131182 - DNA, 286 bp, Zea Mays
gtggatggcgatcaggatcataaattggtgggacgcttggtgctgatggtggcggcagtgggggcgatgaacacataagatacttacatgtctcctagttgttgtctcaactgactcccttatcttacctataagtgaccctacaattcaactacctaaacatattctagttggttcaactagcttatttacccttcacacccgtcaatgatgtgaagaccctcacatatttttcactacacgtgatcgcctatgtagcgtgccggaagaagcgacctgatccttg

SEQ ID NO: 131183 - DNA, 661 bp, Zea Mays
gggaagataaggatcagcccctcgccggcgataaggatcccaccgcggctcgggataggtcatcggcggccgcggtaaaggtcctcggcgatgtggcagagagttactgaggtggcaagccccggttaatcggcgaccactgtgccatcaccggaatctgctgcgcggtaagcacaccagcgcaatctgaaatccgcgatcctcatccaattccggtcgacggcctataaattgcacccgggttctacttcttcaccacatcccgcacctcagtgactgagcaatcggctcaatttcaccggagcactcacgcagcccccaaatcccctttctccctgttcttaactccgccgtgaagaactccaccgtggtcagcgctctttgggttagtaacttctcaattgctccctgctctagctcgtttgtagactcctattgctctcagtactgaccaattgaaattcggccgaagcctttcaccggaacacgcacctgctctgtagaacgccgctgtgacacccccactgtcgacccactcttcgattcttattctgcccaaaccaaagcgtgtacgtaaaccctggtgaacccatgaacctttccccaacatcaatttggtcatccatgccgtcgtttggtccgaacgcgttcatccctttgc

SEQ ID NO: 131184 - DNA, 463 bp, Zea Mays
ccctagccgccgttctcgtgtgagtctctatcacgtgggacccccgtgtcatcttcagttccctacgcgccttgcccgcagaggtttctagacgggcccgctggctagtcgcccgcgcgcgccgcacatatcaaactcgtgacaccgtctggtgggaccatccaatcaactctatccctctcctctcaaccacttcctcggatgctcggctgaaaactcgctggaagactcggcaacggaccgcgcggggcccatcacgaccgcacctcccatgcggtataaaacccctcctcgcagtgttccaaccccccctccccgcttcatccttcttgccctcatatcatccctagcggtcgcgccgtgccgtcgaccttgggccaccccattccagtgccttccgtccgccacgacgttgcaccaaccacccctaaacatgtgaatcaccgcctagcctcactccgtc

SEQ ID NO: 131185 - DNA, 894 bp, Zea Mays
actatcacccaaaataaaaagatcccaaatatgtcaaagtaactaagtataagattaagtataaaatggtgtttggaataagtcgtattcacgaaacaaaagaatataaaagataaagtgttcgtgttcatcatatagttatagtgttgaacattatcattaatttagttgttttccgagtggtcgaaatattgaacaagaaagatatttgtgtgacatataagataagaggtaaagcatgtgaagtgttaacgtattatatatatctttactacctattaagcaagtagtgtagaccatatgtcgtgccctcatctctcccaccgcgtacgcgtaaaccatggtttgtctcacacaacaagccccccgcacccgccgcaacaaaccccctgcatccgccgtatttgcttgcagtcagccaccaacgacctccccgacattcgtggaatcgccataacaaaccccccaccctcgccgcatctgccagccgtattctttcactgtgcacttgtctccttactgttcctaccatcatcatcattgccttcctcgctcactagccttgaaccctagtgtgacttcctccttgctttcttggctccccgcgacacccgccgcggcaccctcataccttcgtgctccctccacctctcgctccacgaggccaccgcccgagtcgtgctgggcctgccgtcctccacacactcgtgaccactacctcctctaacgccaccccgccgagacacattcaaaaacaaagcatgcatgatcatcatcgacgctctcatcggaggaaaacacgcaattgtctaagcgacccgatgaggcagattgtggctacaatctccacactagtgcctgcggatttggtgagcactgctactaaaaccaccc

SEQ ID NO: 131186 - DNA, 515 bp, Zea Mays
gactgtctgtgtgtggcgcccctcgccataccccgcagtaaccttccgccagttcgcccatgctgatcccgtagacccacacgcagcagctgcaggagaagacgtggtgtggtgcgttcccctcctagtcaaaatcgccgctgcacggatccacattgtctccacgcctctacactgtcgaggcatgggcgacggacctgttctccggtctgcggcaacagggacagtacctctttcactttatttattattaaatgcctccctctatctctatgctctccctcccctcttcgcattttaggtccctacatctaccgctgtcctcgaggactctttgggtttgttattttttttggagttgccagctgccgtgagagtccctcgctttgctgctgaaccctagaacttgccaaggcatctgttggtgcgcgtgttagctattattttagccagtcatttgctttacaagaaaggaccagatgaatctgtcttacgttcttgctttgtttaaacct

SEQ ID NO: 131187 - DNA, 524 bp, Zea Mays
cgattacggttgaacttaaacaaatataatttaatgttatctgttacagatcacagataatgttatatttatgtgaaccaaatagtaccttagcacgttgacttaggccttgggcggtcttgtccaagccatgggccagtgtttggtagcctgggtatggattctagaccggctacaccagtgcatctagagtgagccggcctggctccatcgatgtgagctaaaatctcgttctcgtagagtctagctttatctgcgttgtgtgcacgccttttttggtgggccatattggcaaacggtggttggtgcccttcgatatatctgaggcggctagggttcttcctccctctccttctcgcaccgccacagtgaaacttcccctattccctcctctcggtccgacgtctaggtccttcttcctcacttgacttcctcctcgcgccaccaccatgatacttaccctggtccatcttcgtcgatctggttttgtgctgagaatgtttgctgatctggtagttgaaggt

SEQ ID NO: 131188 - DNA, 284 bp, Zea Mays
taagtttctttaggcctgatatggtaaaagagaccgaagaaaaggttcaatgaataattcataatttgaagaaagctcaagctcgtcagaagaattatgcagacaagcgacgacaacccttgtactttctagttggacattatgtctacctgaaagtttcactgatgaagggtgtatcacgtttcgggattaaagggaagcttgcaccccggtatattggcccttttcctgttcttgaacaatatggagcagtggcataccgactccagttacccgaaacattg

SEQ ID NO: 131189 - DNA, 444 bp, Zea Mays
cgggcgatgagtaagaccttcggggacctgattagggacaggatagagatatacgtcgatgacatcatggtcaagactaagagagggtcgactctagtggaagacttgaccctggtctttgacaagctgcgggcaacgcgcacgaagctgaactcggacaagtgcgtctttggtgtctctgctgagaagttgttgggattcctggtttcgcactggggcattgaaacaaacccggagaagatcaaggcaattgaggcaatgaggcctccggcccggatcaaggacgtccagaagcttatggggtccctagccgcccttagccgcttaatctcacagttggctgagagggcgctacccatcttcaagctcttacagaagtctggcccattctcttggaccgaggaggcagagcgagccttccaagagttgaagcagcaccttgtg

SEQ ID NO: 131190 - DNA, 494 bp, Zea Mays
acttgcccgagggctaagcttggggtcggacgaggcggagaggtagcgcccgaagactcgtccgctcggcttgtcgtattaggtgtcccatcggagggcgtcaggcggcgtgcgcgcactgtttggcacaggcataatcataccgctgtgttagatgtgatcgctgtcttgtccaccactgtgcttcactaccacgacgcgggttggcacacgcattaaatgcgcatgtccccttcctgttttcgagtgcccttgtcctatctacttgaggtcggctcgggcgagacggactgggctgaggtggcctcgggcgaggcggagtgagtggtgtcgacctcgggtgaggtggagccctgctcgaggtgggagaccctcgggggacgtctcagttttttataggtggctcagctgtcacccttcaggagtttagtccttatttctctgagtgcatttgttagggggtaattcagatgtccctaattattgctcccgat

SEQ ID NO: 131191 - DNA, 412 bp, Zea Mays
tcacaagtatgatggtgtaccttgccatggcagttgacattccaaaatggggtctggatgctattgataaaatacgcaggggttttctttggaggggccgaaaggaggcaagaggaggtcattgtcttgtagcctggggtcgagtttgccgaccactgcagcttggtggacttggcatatctagttttccagaattatgttgggcccttcgaatgtgatggctctggctgcaaaagactgatcccacacgcccttggtccgatctccacataaaagttcctggaaaagctagagctttcttcatggaggtggtcattactgaggtgggagatggcaccaatacaaagttttggaaggataaatggttaaatggtaagcgaattaaataccttgctccaactccaactttgta

SEQ ID NO: 131192 - DNA, 701 bp, Zea Mays
attaatattaatcagggcaaaagttctgcatactcacatgtaataattgataatgtatattgtaagaggaactaatgatgaagtatgccttcgaagatttatttttcagaaatactaatacgccttacaaaaggaggatacggccgggggtgggggagtatttggttcatagcagaaatgttgcaggaaaccattctcgccgcgtcgacgacgtacggtgccccattcgaacgttggagcagaggttctcaaacatggaaaccatgccgcgtaaccaaaatcttcaatcaatcaatcgtcaggggtcctcggtttcctcgcatgcatcacgtcgctcccttatatagccacctcccaacatggcacgtccagacctctctctctctctcgtcctcgcgcacgcacccatccatcgtactaccgcgtgagcagggcaggcggccatggcttcggaggcggagacggccggggagcgcaagaggaagaagacgctggggcgccgcaagatcgagatcaagcccatcaagtgcgtggaggccaagcacgtgtgcttctccaagcgccgcgagggcctgtacaagaaggccaacgagctgtgcgcgctcacgggcgccaaggtcgccgtcatcgtgtcctcccccgcgggcaagccctactcgttcggccacccctccgtgcgcgccgtcctcgaccgctacctg

SEQ ID NO: 131193 - DNA, 293 bp, Zea Mays
ggagatgatgccttgtccttagcctttgggggtcggggcaagaaaagattgaactgggtttttgatgcaattggcttcatatatcctgattactactaccccttgagaagtcaagaaaaaagaggaaaattgccgcttcagccaccactgttgtgccgaagggcaagaaaataaatgttttgacccaccggcctcgatatattgaaacgaccgtagtgtctgaatttggtgaagagacctcctccacttccgaagcaaaacaagctgctcccgccgctcggagcgctgaagga

SEQ ID NO: 131194 - DNA, 909 bp, Zea Mays
acatgtttgataaagatgagaaacgaatcacttccgatagcaaggccgatatgctcatatgaataaattctgtaacccctttcggccagacacgatgcccagcccagcgctgccgaatcatcagagcctctggagtcggcgatcagacgacaacgcacgcgtgccacgcgccgatcgagcttaattaacatacaatatcgcaggtcagccgtttgagctgtatgcgttctgattgagctcgatcgcaacgtgcagcgccgcgaagaacgggatcggacatccattcctgcagctgcaggcagtggcaaccccatgcacgcacgttctggtccatgacaacaggagctagcgctggctgctatataaatcaatctatagcaacattccaagagcataggacgagctagcaagcacacgatccatctgcaaccagcagagcgagtacgttgcactgcacgagcgaaaaaaatggccaaggttgccgccctgacgatcaccttgctcgggctcctggtgtccgtgacatgccagggcagcacttaccctgctcagcagcagcaggaggcttcgtcgtcgtcgtctagccctggttgcattctgcgagggtggatcccgttcttgcctccttgccgcgacgaccaagccccaacgccaaaccctctccctcctccctcaggggcagggctcaccgtgggctactacaagaactgccctggcgctgaaggtatcgtgagggaggccgtggagaaggccatggacaacggaaaccgcggcattggcgcaggactcgttcgtatcttcttccacgactgctttgttcgggtacgtacgtcatctcatttcatcttattatatgggatacacatgctgcaacttattggtgctcgatccccagaacacctgtccgtg

SEQ ID NO: 131195 - DNA, 508 bp, Zea Mays
ctaacatatacctcttcctctatatacccattcaaaaaggcacttttgacatccatttgaaaaagcttaaaaccctttgaagtagcaaaggctaaaaggatcctaatggcctctaaaagggcaacaggggcaaaggtctcctcataatcaattccttctttttggcaatacccttgggcaaccaacctcgccttgtttctcactaccaaaccatcctcactcagtttgtttttgaaaacctattttgtactgatgggatggtagttagaaggaggtggcaccaaaacccaaacctgatttctttcaaaattttcgagctcctcatgcatagcattaacccagttaggatcagataaagcatgtccaacatctcggggctcaaaagtagcaacaaaagctgagtaagaaaaatgagaaatgtgttgtgacctagagcgagtgacttgctcgtgaagctctctgatcatctgctgaggtgggtgacgacgctgaatatgttgtggagcct

SEQ ID NO: 131196 - DNA, 426 bp, Zea Mays
atgatcggtgggcgcggcgaccgaggagaggacagccatggccatgggggatgggaatgaggatgatgatgggatgagcgccgcgcgcgcgtgtcggcacacagaatcatgcccagttggcccaccttacactcgcatggattggatactggtggtatgcattgacgatactgttgctttgttctttaatcggaggagggggagaagaagcagacgcagacagcgtagtagtacggagtagcagtctagcacctttcgctttgtgtcattattcccttccccttcccttgggggaagagaacgaaggacgcacttcaattaattaatataaagaagcttttgtttttcagctcaaaccctcattgcattgccttgtactaatacaagtatctttgctgtttgtttgttttttcttctagcatttgc

SEQ ID NO: 131197 - DNA, 680 bp, Zea Mays
aaaatagttgtcatgtccatctttgcttgattatatgatagctccactactaactcaaactgctactgcttagccactactacctactaactgaagcctctaacacaaatgccttgagaccatgtttagttgggcaggcatttctcacactgggcaggcatttccattgaattttactctatattcagaagtttttttcctgggctcacaaagagcagaagacatttcttaatgagctccaaaagaaaacaccaccagaaagatgatattttattaaacacatccccacacaaaagaacttcatatgtacctcatccctatatggcaacaatgatgtggctaaccctgaaattcatgctgttttttgaccgcatcctagcaaaaaaacatcactatttctgatcggatggcagatgtctcttaggcaggcaaatggttgtcggattgtatgcaatcatccaaattcaatcttattctcttcacgacctagagtctacagagtcacttcattatctgttattgtattgcttaagatacttcaaagagcacaaatacatgtttttttctgatgctacaggcacgttgtttcattactaagagagaggaaacatagcagtagcacacaagtttttcttgattattggtatattcagatcagtgctatattgctaagttttttt

SEQ ID NO: 131198 - DNA, 485 bp, Zea Mays
actggtaaaataaatactgctgggacagttgcaacagtgaatttaaaccaataactagttgtatatgagtacagttgcaaaagacatgaatgatgtctgtgggttgaaagttaaaattatacagttgcaacttatgtgatggaccggttgcaaaaaaaaggtacactgcagttgcaaaaagtggaaacatctgagttgataatctagaacacaaactgcttattcaaatgaaatgtatccgcacaaaatacaacaattactaatggcaatcaacagataatattagttgcaacacttgggaaaaaattttggatggaagcagttacgctcttacctagaaaacgatcaaatgagagagaaacgggagagggggtggatgcgcttgcaccgcgggacgcgggcgcgcgcgcaacggctacgtcgccggggaagtgaagaggttgagccgttcgcggagaaagaggggcgggagcggggaagtgaag

SEQ ID NO: 131199 - DNA, 597 bp, Zea Mays
caaagctctttctgggacagaggcaccctgcgatctcagctgaccagccatctcgtcaaccaatgcctgacattgaaaacaaatgagtgtaagaacagtatttcacctggagtatagtcaggtcagaaaaaaccaaattacctagagattggagaagaacgaaggaacccccaaatcatgagaattcagttggtgacttgatgaaggattaccatccgaagcaatctgcagagcatcagtggggaccaattcagcgtcaccagcagaaatcaaaactctatcatcaggcgcgccgacctctaaggcgacctcctgacccgaagctcgtgctgctgccatgcaaccagaatgtggaggagaagacccgacgtgaacatccatggaagtatgagaaggagaaccctctcggacaccctcgggggctgagtcatagctcgcgctgcccacctgagccagatcatcaccgacaacaccctcgggggctgggtcaacgcaagtgccatccctggggactgagttctctgcagcagccacctctaaggctgaaggattttcagccacttccatgggaacggagcaatacagatcagcctcttg

SEQ ID NO: 131200 - DNA, 404 bp, Zea Mays
ataagagcaactccaataagagccctaaacatacaaacaaattaaaatataacgtctaaacaagaaaggactgctccaacagaagcctcattttaatgaaattcatcaaaacgttttggggcccaactaaatgagtagtatatttgagactcaaagaagtgcggccctataccattcacgctcctttctaacctccacagatatttcagacttcttcatcgccaagtgcaaacatctgctcctgacccggtggcactcgaccacctgttcccatctcgtgcttgcttccatctcgacaccgtggaagcccttgcccttgttcgtcctcttgcctccctagcctctccttgctcccctcctcctgatctacttcgtgcctgagatggatccaacattgaaggtcg

SEQ ID NO: 131201 - DNA, 1112 bp, Zea Mays
gtttttttctagattcgggtgtttaaagtcctatggttattatattctgattcaaacatagatgtatcatcattcaaaattttatatcccgcggtaccaaaacaggaaaatacgtaagtttcatttctatcctttttttcttttttttattagaatccaaatttagttgctatcttaatttttttatatattttatatggtttaaaatctcactcaatatattatttatttgtagatattttgtagttgtttttactattagtagaatacaaattcagatactatcatgttttagttgttaattgcccatgtctctgatcttcactgggtgtagtgttgtgctgctgtgatgtcagtctgaggctctattttttggtatactgttatggatggtggcagataagacataattggtatatgtagtctttttttcctaagttgtttgtattcttattcccagtgtgttgctcacttctactgtcttataaatgctcttgcctgatctgtccgagattttcagcaattttgttggtttgttttcattgccttttccatgtgtagtgtatcgtcatttgtttagcctagtttagaccttagttagagttgctctgcctagtttagttggtcatgcttatgtatcatcattcaaaattttatatcctgcagtaccaaagtaggaaaatacgtaagtttcaactctatcatttctttttattagaatccaaattcagttgctatcttaattttttctacatattttatatggtttaaaaacacccacaacaaattatttcttgtagtaattttgccttctttaattatcataggcatgactgcggtattttcacacttcaatacatggaatattgggatatatctgttgatatgatgctcaagttccgcactgaggacatccctcaaattcgaatcaccttggccaacgatctctattttagtgagaagaacactgaagacaagtctctagttcgcaacatgtttcttcaggttttttgtgattcaatttgtgttgttttttgggcgctcttattattttgttttttctagttttttcctttttcgtgggtggtgtgtgcagtgctgatggtggtatg

SEQ ID NO: 131202 - DNA, 657 bp, Zea Mays
ccagcgtaggcagacacaaatgggtccaaaagtttgatatttctgaagggagaggccactagaagtctttgctgtctagttcattaaatagtagacaaaacagatacacactccacttgtggataggtatttgcagactatggtttgatatttcatttgttgttcacccaaggtttacctcagcttgagcacaccaatgtaggacagcagcagggggaggagatcttttgtgcaacttcaaacctgatccgtattcagataactacatttccctccactatctccagaacagtccaactcctagatttctttctgtagtgggaaaccttcagcacctgagctatgtactttatccccactaacacttatacctatgacaacttaaacgcataggtggagttcagcaggataaggagattcttgttcagactaccaaatcagtatcgaactagactgaaacagccaatactggccattgcacagccccctgtttaagcccttctatctcataaatctcctcaacaacagatctatatttcttaactaacattactctccaactatagccctttctattggtataacactccagggctgaaactactcagaactgaagttgtggtgttccaaagtataacaaaaacaactaaacactca

SEQ ID NO: 131203 - DNA, 2110 bp, Zea Mays
aagaaatacgatcaaatagcttaattcattcttagacgtgtcctcgggggtttgtgggagatatatatcccatgggtcatcacaacacgaatatgttccatgggccacctaaaaagcctctgataagtcgcccaacagtgcatactatcgagaagcattcaggcaaaacaagatcaggcaaaacaagatcaggagaaacaaaatgacgtggccagcggggaacaaactcgaagaatatggcacgagaacgctatccatgcgccattgtcgtaggggaatggtggggattctgagacgcgtcctggacacgactagatagcgacctactcagaggataactcagaggaaaagcaactgaacatcggaagagtaggcacactcgcaatagaagatgatagactcaaatgatctataagataggatatctctctagtcagctatataaggctgcagagattaccctaccaaaaccctctctctctctcttgcccaccattggattgataggaactctttcaatcacttccacagctacctataatctgcaaactcaaagcaatctaatactcaacaccacacatgatgtatggtgttacacgttcacgtggcccgaacctatataaatcttgtgtttcgacatgcatcgcacatagcattgagcagtgatcgacgttgacgtcctcctaaaaagcactacgtgagctaccccatagtgcgcagtcgagactaaacaccaacaacggttaccgcccctggacccttcgcctttgagttgtgcgatagtgggccactcgaccgaggcgatgtcaatggcggcggacgtcgttgaggtccagcttccatatgcaccaggtccctaccctcctgctgcacagagggtggtggtctctttgctacttgctctagaggagggctccgaggatcttcccgccttatccttgaagggactggagtcgaggagatggaggcagaggagagaaggtttgttgagggggctccatccgggcaactaagagcctagagatcatcgagggctctaacacctctgccatggaagtagcggtgattgtgcgtgtgtcgatcacgcaagagttgctccctttcgatgtggtaagtctcatctcctttttgccccttagtgtttctaggattcctcacctgagtatcactcctagttgtagcgtctcctaacccagtcgtcgacccggagtgacgcactgcttgcagcgcagtaggaggtggagcacttgctcactgaagctgccagttcggaggagcgggagctgttcgtgctcactcttaggctgagaagccttgggcggaggtgacgcgcctacgcacatagcgaaatgaggcgcggggtgacgtggatcgccttcggggggagaggtcatgcttttagggagctctgtcggagttgacccgacataccgatgacaccgagttggcactaaactcagctaacgctcacctagaggggttggatgcagatctctcgcgagaacgtgaggcatccagaggtacacccttttgggaacggggttgttcttgattggtctatgtctaaggttacttacatttcttcttttgcagagctctaaaagatgtcctctgtggctcgggacacccaaaatgtggtagacgatgagaagcacaagctctcaattgcttgtgacgccaccgtaatcgcatggctccaagccgaggattcactctcggagtagagcgtggagcttcatgctctatggttggccacgggcatgtcatgtgtgcacctttgtccttcgatgacgacaatggtcttgttgaccgagcaactgggaatgttgtggggccacatggaatttgtcgtcctagaggacgcgttcttcatgagcaatatgccccttggacagatggtccctcacttcgatgagatcgaccctgtcatgagtcgcatcgaagaaaagttgcatcggatcgaagctcaagtcatccctcatgctcagctaatagtgtggtgagtcaacatggggcttctcctgcgatgctcccagccacagctccttaaactttgtctttagcttctgttttgtaaataaactttaatgttgaactaaatgtgaatgag

SEQ ID NO: 131204 - DNA, 695 bp, Zea Mays
catgacaattacatgatggtgcaacattctattaaatctcttcacaagaaacgagtctcaagtttatttttgaagctggacatctcaaaagcttttgactcagtttcttgggcttttcttattgaggtgctttctcaccttggttttggaaatatttggcataatctgatttcgaacctgttggcttcttcttccactcaagtgctgttaaatgggtatcctggtatttctattaggcatcggagagggctttgccagggtgatcccttttctcctatgctatttgttctgattatggatgtcctcagcagtctgttcttgctagccgaagatagagggctgcttcagaacctgcagggagcgaatgttcaaaatagaatttcaatctatgttgacgatgtggtactgtttgtcaaacctattgaggatgagctgaattgtgttaagatgatcttggactgctttggttcaacctctggattggtttgtaatatgcataagggttgtgccatcccaataaggtgtagtgagcaggctgtgcagcagggctgcaaccttctcctttgtagctcagcttcctttccttgcacatatttggggctcccaatctcagataaaaggctcaggaagtcagaccttatggcctgggttgagaagatagcagatcgactccccaattggaaggctcgacttct

SEQ ID NO: 131205 - DNA, 492 bp, Zea Mays
ctgtttgaccattatgatctccactaaagaaccaagattgtgatttgtgtccaacctatagcaaaatttaaccaaaagagtagcaaaatctagaaaacaaaaattttaggcaaaaccgtagtaggattgaagagatagtacacttttatctaggccatagtaaatgtctagacaaagataaaattttcccaaacccaaaacacttaaccataaccctcaaccccaaacactaaacacaggaccccaaaccaaaaaccctaaaccgtaacgcccaaaccctaaaccctatgtaccgaatgcttacacctatggattttttaccattaaatgggctccactaaaaacccaagaatgtgattgtgtccaaacccaaacccaagtattaataaatgtataaagatagaaaaatttgcccaaaccctaaatccttaaacctaagcaataaacgctgaaccccaaacccttaactcgaaactctaaacgctaaaccct

SEQ ID NO: 131206 - DNA, 397 bp, Zea Mays
tacccatacagatgtcagtccttggaatgtcaactgcaagtggtgtcactaagtgcaaagaatacattgtgttggcaactcctctagctaaggatcaaatggaacagttcaagaaggcgcatgcacagtttctggaagcaacttctcaagtggtagctagactccaacaagttgatttagcaaaatttataacacatgagcagactacagataaccatatgacatcaaccacaacatccccctcaatagttgacttagaaaggctgttacatgcacaagctcttgtaatacagaatgtatcgcaactcacctcctcataccagcaagtgttggcaagtcgaaacgtcactagaaatgaaacaactgatgaacaaaaggatgcacaccaacagacaaa

SEQ ID NO: 131207 - DNA, 508 bp, Zea Mays
gcgggtttattttagtaaaacacagggtctctttagcaaattgttgaggccgaaggggtatcttggagtctcagccgctagatctgaactgacggccatgattatatcatcataaatctaaaggggtacgcactcacggtcgttggatcgagatcggatggcccaaatcgtaagctacgaaggggtaggcgatccactaatctccgccgttcagacagaaccagacggtgtagatttgcttggatgaagggctatacctgctctaatctgatctacacactccagatcggatggccgcaggatcttcttctacctccacatccagccgccgttatcctcccatccgctggacacccgccttgaagacgccaccagcaggttcttgtggcaccagtgatcctccatggccacatcacgagtcttcacgacggagctctattttccactgctcccctcgtcgaagggtgctctcggcaatggtttgatgaagcaaggagggtgacgggcg

SEQ ID NO: 131208 - DNA, 345 bp, Zea Mays
ccttatcaatgtgtgatccaagatcaatctgacttgaacacaatttttgccaacttcattgagaaagaagatcgattagatttcaagatgcctgaagatcaaggtaacaacgaggcagaggatgtcactagtgcatccaatgagaataacatcctccaccctaccgctattatcaactcgcagaagatcttcgcactgattttcaagcatagaacactactgatgtggaagcttatctagcacccataaagtatggtggttgagcaacacaagtccattaacttccaaacctgcaccattgaggtcccatctaccaatgcatgcaaggtaaccccacctgtaagt

SEQ ID NO: 131209 - DNA, 442 bp, Zea Mays
aaaagtcacctaagggtgcagccggaatagcacaacaagtgcgttaatcgaagtcttttatttaaaagacactccgcgcaaaagtcacctaagggtgcagccagaatagcacaacaagtgtgttaatggaagtattttatttaaaagacactccgcgcaaaagtcgcctaagggtgcagccggaatagcacaccaagcacgttaatcgaagtctctcattaaaaagacactctgcgcaaattcgcccatgggcgcagccgaaccaacacaggcgttcgaatacggcaaacatgccacattaccatacaaattacaattacatatacacggcaagggcatcacatattacatcggctcaaccttcgggatgatacccatctccctgtaattaaacagcattatcttcaattcctcaccctcaaaaagcttccgaagatccccc

SEQ ID NO: 131210 - DNA, 307 bp, Zea Mays
gtcaaactttgctagaacgatttggaaaagatgagtatgaacttttcattcgtaaactattcaatgttaggcagctcaacacggtatctgattatgtggagcagtttacgtccattgttgataatcttcgtgcatatggtcagcttatggaccccatgtactttgtgcaacgctttgtggacgggttacgtgaggatattcgtgctgctgtttttgtccaacgacccacttccttggatactgctgccgttctcgcattgttgcaggaggaagttgctggcaccacgaggcagatggaggttcgtcg

SEQ ID NO: 131211 - DNA, 392 bp, Zea Mays
ccagattatctctttcccgacatgatcatcagccaaacggacatcatccgggacctctgaacggatgacagatctttcaacctcaggaggctctgataaaaggtcttcaaggataatttcttccaatgcatggtcaatggcagacattgttaacccctggagactaacgagacctgataaagcctgcattgggatgtcactgctcctgttgttgtggctgttcttgcaaatcaaggggacctcttcctcttcttcctcttcatcctcatcaagcacacgaccgccaactctgacatcatcacaaccttcagtgtcgtcttcgaggttggtgctcgccgggccaccgccgaggagtgaggtcgagggatcagcatcctcttccaagcctcatg

SEQ ID NO: 131212 - DNA, 364 bp, Zea Mays
gttttcgtcctcctttgtacgttgtatagcgcctagaccagggacgaatcgtgggcttattgcacggggatttctcaccggagtacaccgcacgacggagtccgctacgagatgggggcagtccgctactcgcggggaaacctggtatgggagcacagagcgtcttccatgttgtctattctacgtaaagccgggcacgggacagagttaggtcgcgggggaacggattgggccattcccggtcatggcgccgccgttggcgggattgctccgctggggcgtgcggttgccgccgagtccatagtactgagggatagcgcgcaccgccgaatagggtgtatgcggctgcaattaaacccggtgc

SEQ ID NO: 131213 - DNA, 781 bp, Zea Mays
tcttcctcgcgtggcgctgctcgggctgaacgccgcaccgaatcccaccgaaatcgggggattctgttacaaccgcacgcataggtagccacctggtgctttggcctatttaagccgcgttacggtgccatctaaaggagtttcgtcgaaccgccattagtgaggggggaatggatccagtccgccgccattaccacccacccacagcaccgattggtgattgaataagcgccttggtagttcacctgtgagtatgggttctcccaaacgagtcaattggaaacaggaaacttctgggcgcgtggaattcgtcgacagatcctcaccattcgctcgggccgcacttgccggggtcctacaccactaccacaaccaaacaaccggtatgaatagcaccaattgtttcgtcttcatctctattgcgtgtagcactattcagggggaattggggctctggggtgctggccacgtgtgcgccggtgagctccaccgccgcgggcagatcggcaccgcggtctggtgccgctaggaaggagaagatcgtgctcgccgttgatatggtaacagacgtctaggattagagctcaaagtaccctttcacggtttgaatcccaaccgttggcgtgtgatcgggcgaatccgggctaatctaggtcaattaaaatccgaaccactgatgatagatcggaggggcgaggtcgtgtaccggttcacagttatgagccaactaatctgtggcgttagtggacgatccaacagccaatatcgcataccggttcgc

SEQ ID NO: 131214 - DNA, 655 bp, Zea Mays
actggatcgtgcgccaaaaacagaaaattccaagggctatcgcaaaagaatcctaagactctagctacacccaaaatagaactgcgggtcgatttcagtataatgcgggggctcttctgcaaaacatagttagtgaaggggtatgagttggtctcagccgaccgattgagcatgaacgaactggattagatcgaccctggatatagttttgccttcactcaccatcattagatctgaaatccacgacacagccctgtccacgcataacgttcaccagggccgatggatcgaatcacgactgtcacggtttaatgtaccgaaacgttaagctatttctaatctcgacccttcatttagcatccgacggttagcacataatccattccctgagtcacccccaaatcctgacggtgcgctcaccgtggcggagcgccatgaccggagtagtgcgcccacactattcccgtcgccatccagcaattaacttgcgctacaccgatataagaccatggcgagaaagtgggatggacactcaccggcagtgatgatgtgaggcagcaacactacggcgaggcgtagactggaggtttatgcctgcgccgacaagcaatctcgggttcccagcttgccgatcctatcaggcgctgaaagtcgc

SEQ ID NO: 131215 - DNA, 287 bp, Zea Mays
ccctgacgctggagatctgtgtgtccttggcgtgctggggaagctttcttgcagaagggacaacgagcacagtccgccgcatggcacaggcgcgctgtttgatgatagattggacaggcgcgccgtctgacaccgtctgccagtggagaggactggacgcattaaatgccgagggggcacatctttcgttggcttggcgtaggcgtcgcgtccctactgcaataaatgcagtggctgcgcgactccagtgacccgacgtcagactccttccgttggctcatgtcatg

SEQ ID NO: 131216 - DNA, 315 bp, Zea Mays
gtcacattaaatattgataaagcttatgttgccttttacaacgtggtgtacatgaaatcaaaacttggatattctgggagggatttcttgttttacaagaaacgatgtggcattgaacgatccaggctagtggcacttgattacatccaccaagaagaggccatgatatctgataatgtggatgagagaaaaataagttttgtgctcacaaaagatccacccagtgatctagaggtaagcataactcccatcaagcgtccaaggcagcggacaaatgttgatgaagaaaatacagaagtgttgattgatgcatat

SEQ ID NO: 131217 - DNA, 406 bp, Zea Mays
ctaaattaaaataattaatcagtatcgactcattgagcattcaaatatttaatgtttcaggctttcagttcactgtttagtgctcacctatcggcagtcaccaattctgcacttcacctcaagtcctcacgactcatggcaccagcaccaccatcaccataggcagaggcacaaagtagggcatcagccagcagagacaacatcactcactgtcgtagaggtgcccagcagccagcgtcgtagaggcacccaacagtccagggacaggcggcgacacaacacgaataataatagaacaacatgtcaaatatggaagcttatgtgtcaatgggacctatacttataagtgttgagtgaccaaataatatagtacttatttcttgatcgacagacacctttctcaaat

SEQ ID NO: 131218 - DNA, 1084 bp, Zea Mays
gggcatagtggtcaccccgagttaagtaagagtgctagtcaatcatgaacaaattgagtatctttgaagtcttctttattgatgacatatctcccattttacagagtacattgtcgtcccgatagcttttgaaattcaactaggggtaaaactttctgaggtgttctatattccaggagttcccaacttctgtgccgtctatctgagttagacgatatgatcccggtcgagtgatttctgctactatgaatggtccttcccataagggcgacaacttatgtcgtccctcccccgttagaattcggcggaggacgagatctcccactgagaaggatcgttgtcgcacggccttatcatgatagcgtctcagagtctgctagtaccgcgctgattgaattactgcattcagtcgttcttcttcgagtacatcgatgtcctccagcctagtagcttcggcttctgctatgctttcgaagaccaaccttggcgccccgaacttgagatcagcgggtaatactgcctctgacccatagaccatgaagaaaggagtatttccatgtagagctcggcttggctgagttcttaggctccaaacgacgtagggcaattcccttatccacttccctgcgaacttctcattcttttcgaagacccttttcctgagtgcctccagtatcatcccgttggctcgctcaacctgcccgttggccctcaggtgcgctaccgaagcatacctgatctgaatgcccttttgctcgcagaaatcgaagaattctgaacttgtgaaattggatcccaagtcagttatgatgttgtttggtattccgaatctgaatattatgtcttgtatgaattccacggccttggctgaggttaaggaagcaatgggtttgaattctatccatttggtgaacttgtcgattgctaccagtacatgagtgtaccctccttgagctttcttgaaaggtccaatcatatccagtccccagcatgcgaagggccaagttactggtatggtctgcaattgctgtgctggtaaatggtgttgctttgacaagtactggcaagcttcgcacctctgaac

SEQ ID NO: 131219 - DNA, 539 bp, Zea Mays
ctaatagaagaggggtatggtccgaaacaccacgatcaagtgcctgaactgttaccaaaggaaacttaaattcccactcggttatcataaggacactgtccaatttttcaagggtccgacatgggagagagttagcccaagtaaagcgtcgtccggttaattcgatctcccttagatcaaagctgtcaattacagcatcaaacaaaaagggtcatcgctcactatacatattgttattcttttctttgatattcctccagatgttaaaatctcccccaataagagtgggccaatagttgtcctgacaagttctaaccaattcaacaaggaaggctgatttgaattcatcttgagccggtccataacctaccattagaatccagttgagatgtccaatttattgctgagatggaactttatataaaattcccctttgacaactagagacaaatcgaacattgtggcattaactcctaaaagaataccccctgatcttccacgtggtggtaaactatgccaaacaaaatctacacctcctg

SEQ ID NO: 131220 - DNA, 845 bp, Zea Mays
gtgatagcctgagttcagtctcaccacaatagaaataatcatgaaatttctgctctaaacatgcccacgtagtaactgaatttggtgctaatgatgtaaaccaattgaaagcggtactagataatgataaatgaaataatttcaccttgtgggcatctgttataccaatttcacttacctgcgctaagtactgtcctacatgctcgtatgtagtttttgaatcgtccccagaaaatttcacaaagttcgaaattctaaaacctcgaggatatggcacggtatcaaaaaattcaggatagggcttcctataggacctagtatgccctttaggctcaaaaccaaattccctgagagtctttgccacttgctctctaacaccctcatatctctcaccctcacatgttgtatgtgtgattcccgatgctgatagcagtgctccctgtccccattcttgtaatcatttggaacaaatccttgtgggctcctgttccctataggcggaataggtggtccatatgccatactctgataatatggttgttgtaggttaaagttcattactgaatccccacccctctcattaacagtttggtttacattattatgcgtagctgctccgttacaactaggcgcatatgaaagattttctacacgcttcccctgcaattctccttgaacctgttgaactatagatcgaatctgtctaggcatattattattcatatcttgtctagattcagatctaaacgtgtcaaaagaattacgcactccctcagaaatcatgcgtgttatctctgtgacgtcagtcccatatttgctagctacagcagtatcgatcatgtgag

SEQ ID NO: 131221 - DNA, 311 bp, Zea Mays
gtatgctctatccttcagtggctgaatatacttaaaaacaaagtctgcaaccacagcttcagcggtcagacctctctccttcaacaagcaaatttcagcaaatataactttggcttctgctatctccaagtctgtgggagactcaatctaacttggagcgcaaacattcggctgtctccctgaccgagcggggagagacttgccatggttttccacaatgaaccactctaagcgccatcctttcatgctatccttgagtgggatgtcaaggtattccattttcctcccacggcgcatctccagactcgcac

SEQ ID NO: 131222 - DNA, 3572 bp, Zea Mays
gattggcgttcgaatccgagggtcgaccaaggggttgtcacgagaggcgacacgcctcgcttcatcatggagtcaatcaagcagtgtcgcggaccacccaagctcttcatgctcgacaagtatggtgtgacctatctctagtgtgtgtgtgtgtggggcaactgagaagatctgaaccatgacggttgcagcatcgttcaatgcgcaggtatgatatcggcggcgagggggcgtgcttgaagagatacaccgacccgtctttcttcaggacggattccgcatgttccaccttgccgcatgaggaaggaattcgagatgaaagaagacctcccaaagccatggtaataaacaccaccaagttctccagtatggagtatattcgctggctgaagtcagctttgtaaactatccttcaggaaatttgatggacccagtgtatgaaactcattttgtcccactcttgcaggagatcaggcctaaccttgagaatgcccagattttccagccccctaacgcagccgacaatgtctccaagtacctgtcctcccacactctttgcctgtaccagtatgctgtcgttctgcttgcttattctaaaagcgttattctgtccatctctgtaggctggagactgatccatctgctgaagctatggatgaagtgcccacaaaccgcagacggctgaagtaccgccaactaaatggatctgtattccaaagcttcagaccacttatgctgaatctgtatgaaaagccttcgtcagaggagaaactcgtcacaggtggccactcaaaagtgcgtatatctgtgaatggttcacctgaatcggatactgaagagagagataccatggtagacacgtccgtcaacatgggcaaaggcaaggtcgctgttcgcaagaacagaccagtttctgaagaagcactgtcacgttcttcagatgctcggtcagctggaagcagcaagggctacaactccgaattggatgtctacgtggacgcattaaccacggtggactctgaagcggagacagactcggaacacaggggccatggacaatgtacctttgatcggatggattcagacaatagattctccaatgctcaaaacgccatgacatcgaggaacagcaacttcgacaagaaagataggccagatgttccctcagcaaatagagatatgagtaaccagcatgaagaagccacggtctccacacaaaacaccaaaccagtggttgttggcgaacatgagaggaccagctcgttagaggaactgcttggccaagaaaaacctgcttcttgggatcatgagaggactagctccttggaggaattgctcaccgaagatttcaatgctccagaatctggagcaagagagcaggctactgaagagcagagctgcaatggcagtgccaccggtgctgtatcaaatggcacacaagatattactaagaagaccaaggaagtcaaggagaactctaacattgcaactatttccttcaagaaaatagcaagcaagaggtccagatatgtcggcagcatggctgcaaaagttggcattctgccaaggaaactctccaagaagcatgaccctttctctgattccctccggtgcatggcgaagcaactccttgaactgaagtacgatggcactaaagatagcgacttatatgactttgaagcaaacagtgtgggatgtgatgtcaagtatcagggaatttctgaccctcctgttgaaattaaggagagtgacgtgcacaaatttctgccagattcatcctatgatgatgtgggttcaagaaaatgcccgcaggaagaaatgaaccatgggcaggagcatgatgctccacctactgacagtccacatgattcagtccctgatgaaggaaacggatttcaggaccccaacatgatctacttggcaagcatcatcacatcttccagttcccaagaggaagaaggatgtgcaagtacttcactgcatgagaattcatctatggcagtgctcaaccatattttggagcatgctcaagagaagtttgaggaacatcttgacaaggatgtgaatgaggacattcatacagaagtcatttctgaaaattcatctggcaagtgtgaagacttgaaagaagtcagcatttactcagagcaggtgaatgtggaagatatggaggaaagcaataaatctgatgtatatgtgttggatgatgaaacagccgagtacatagaagagcaagtagtttcagatggtatgaactcttcaccggtttcatccaagcaatcagatgatccctgccggataactccactcgccctcgcagatgaagatgatacagtggcatgtaaggtcatcgatagccctgaagtggatcatattacattatcagaaacattcacggacattgatctacctaatgtggtaaatgagtcagtaatcagcagcgaacatgccatgccagaaaatgaacagtactatttccatccagaaactacttttggacaagatctgtgtctcgacaacaatgaaattgtaggggaaaatggggaagttccactatgcagctcaaccactgtggctataactcctgaaccaactgtaaacagagagatagaacatgagtttcatcaagctgtgtatcaggaaccatcgaattcattcaatagcagtaaagtttttggagatccactagcttctgactccagagatgttgcaccgtcagtcatctcgagctttgattggatgcttaatggtgcaatgcagcagtcattcaatgtctttccttctcatccaactaatggaaatgaacaagaaaatggttcttctgaagatgcgccaccacttcctcctcttccaccgatgcagtggagaacaaacaagatacagacatgctcatcaccgttatctgcaaagatcgggagaccaccaaggccaaaacctccagcaaaacaacaagaaagtgaagctgctcatattcttcaggagaacaatctccacaaaggcttgagtttgcagaatgaagtagcgcaggcaactatttctagtgatcatgagacaaatcaactccttaacatggattttcatgaaaaccatcaccaggaaggagatgaatatcatgcccaggattccaatccatttccctcgtcagaagctgaatgtttggcagaaattgattcagtaaaaagtgaaaatctgcacccattgcagctacctgagcttatagttgttccggaagaggcatggtcagagtttggtaatataaaattcatgccagaacaagaaggaaaactccaactaaacaacggactttctggtttggcagcacaaaagaccagcgggaagcctgatttgtttgcatattataaggaaaaggaattatcatttgcaggtagtgacaaagttgcaaattcagaagaaaacaaaccaaatggtgctgttaaacatatgcaaaatctggacttgccagcacaacagaaaaacgacaaaaatgattgtgatcgcaaggcagaggagttttcctctgcattagaggatgaatcatcaaaatcaccaactcatacagtgccaaaaccacc

SEQ ID NO: 131223 - DNA, 1016 bp, Zea Mays
acgtgcagcccaaaacagcaatcaatacatttcagcttctatacaattcaagaattgccgcgttctagagacttgaattattataacactttgacatttgttagagttaaaataaccaagtgagaactaacaagtggacttactaatttttatccgtgtcgttatgagcactagaagtaccatatataattaacaacgcattctccatgataatcacccaacgatttgcgttttcaattagacctcacatgagcactactactttttacccgtgtcataaccatacgcatttagacgacaaccagtaattcatcgtgactacgagcttacccaaacccatctattaattcggctaactagcgcaataacataggccgttatacatcctaaacgtcagcttgcctcttattatcgcaatccgagacacaacatatatatacaacaatcacttaaggaaatcgactcctacttaacatgagtttgctaatcacagtataagacctagcgaaccattttagacatcgtaactcaaaaacatggtttggagcagattaatcagcgtttcttacccatggctcaacttaatttagttaacacaccagtcacctaaaacaacacattgttggggtctaacctagaggcatctacatatggtgtaaaacttcataagacttacattggctactaaagaacctaaagcacttatgtgcatatgttatcgaattgttcttcaattttaacaaggacggactcatgaacgctactcgcttccaataattcttgggctacgataacgctcatataagacctctaatcaaccaacaagatatttattttacccaatgggaatggaatgcaatatttgacaaggcaaggcatcgacccgccatataacagaaagcatgacgacaccgacagatgctatcaactaatcattttaaaaatattagacttacttctcgccttgccactacaacaccctttagtcacatgaccctcggaagcacccttcacac

SEQ ID NO: 131224 - DNA, 367 bp, Zea Mays
gtttgattgcacgacaattgagaaactagttgcactgcacaatttaactgttcatggcttcgtgcgctagtagaagtaatcggcttctttgagccctgtttttctcttcttttgtcccctggcaatctagtcatattttctaatacttagatggaagcgcatcatattcccatgaaagtggctatcaactgcttccactttagtttacttaaaatgatatgccttttgccctgtatgattgtgagtgattttcagatactattgcgtgcgagtactacatggtcctgaattcatgtatatttgtgagtattaaatagtgttttggctctcaagcagaacaacatctggggtgtttggttagagggac

SEQ ID NO: 131225 - DNA, 647 bp, Zea Mays
gcagtagaagggattgatgggcctcggggcaggcgaggtgagggggacatttaattatttgtcgtctttacgaaatccccttaatcatgtgtcacagacacatgagtcactgtctcattgacatggcaaaaaatttaccacccaccacaaatagtggcaaatagttaattttttcgaggtgaggcaaacgcgacacgaccgaggttgggaatatggacgtaaacgctcccgaggctgcgccagccagcaagttgatccagcagtagcaagtcgaagagaaggcctgtggcgatgaccaccccgaggcggcgccagccagcaagttgatccagcagcagcaagtcgaagagttaaacgtcgaagactacgatatagacatcatggagatgttaccagacgtgttatcaggcgagccggtgccggagctaggaatgcagcagccaaccgacgccaggacggagcacgacggccggttcaacatcgtcgaagagttaaagatgttgccagacgagccggtggcggagccgggaatacaacagcctaccgacgccgagacggagcacgacgtccggttcaaggtctgctgctcgtcagagcaagggcacggcagtggctccagcttcagcatcagcatcgaagaagagtta

SEQ ID NO: 131226 - DNA, 459 bp, Zea Mays
gcagaacccacgctagctgattatgataaaataagggctatgaatatgatgaagaacaatcaattatttcaacgactaggccttgcacaattgaaattatttatgactgctacaactgcaaacaacatacaagaatgtcctcagcaatcagggagtttatatgatggtgaagacaccgatggttctaatgaagaggtcacccatggtacttattaattcttagcatctcaattatctgtctttaaatttgggttcacaatcaatttgatttgcatatccttattgtattctacatattcaggaatcccaaagtcgtaagtgtgttcgtgccaacatctccaacgatggtgatcagatctcaacaaaagtaacaagaggaaataaaagaattgtggcacctccacaggagcgaataattagagttactaggcaaagaattgctgaaataaaccaagaaac

SEQ ID NO: 131227 - DNA, 328 bp, Zea Mays
gaaaaatctactgtgacggaagatgacatgcctatgatgatgaaattgggctattttggagaggctgagagcaaacttatttgatttactggagcagaggtaatcccagagccgaagaaggatgaagttgtcgttttcaagagcttcttcagagcagggctgcgattccccctgaatgaaatgataggggtagttttaaagaacattgagatatatcttcatcagctgactcccaacgctattgttagactcagcgtctatatctgggccctccaaagccaggggatgagtccagatgccgaagctttctgccgagtgcatgagctgc

SEQ ID NO: 131228 - DNA, 329 bp, Zea Mays
ggcaacgaatgttacagtggttattgtgaaactgggagtgggttcataccggagggaagaatgctctgaagatcccgttcacggcgcagagcggaccgcgacgacaatttccggccaccaattccgggggcccggacgctccccacccgttcgagctccacggtgaagtccccccggcaagcaaagaattgagtccatctacttcgcgcgcgagaaatatccgcacagggcgtttcataatctctctccctcaccgctccgctcgatggaggtgctccatgcccgattctctctctccggcgaggtagccatcagctacatcattggct

SEQ ID NO: 131229 - DNA, 743 bp, Zea Mays
gaactgcttgggccgtactccaaagcggaagataatgcgctatctgcggccttcggaagccggaaaaagaggagactgaacagagtttttgatgctattgggttcatgtaccctgactaccgctacccgtcacgggggcaaaaaagaaaaagtgcaacttctgggaaagatgatgcttcagctgctccaagcgagcccgcgccgaagagaaaaagggtgaaagtccttactcaccgactgcgcttcattgaaccggacatagtgcctgaatttggcggtgaaacctcttcggctactgaagccaaagaacctacggttacgcagaaaattgaagagccggctgtaatgccgaaggcatcaccagccaaatcaggtgagccaaaggccattaatattgaagaggcagaggtcgaaagaacaaaaatattagaagttataagcccttcggcagaggtgacagtgtcgaaggcgcaaaaggatctgacaactacccccaagaggaaaaggatggtcaacgtactagatgtactggagaaaataaagacttcaagctctactccagggaaaatagtcgaagcttcaaaaacgcgaattgaaacaaaacaaactgaagccgaagctgcaaagagtcatgcggagaccgaagccgggccttcagagcccgccaaggaaaaatccctggaaactggagaagaagaaacagaaagagaagctacagaacagattttgtctgaacaaactgc

SEQ ID NO: 131230 - DNA, 771 bp, Zea Mays
ccacactttctcaatattgcatgaacttagatatcaaggttcaaagcatctaaggatttcctaactaaatgagaaggaaaatgaagattacaagctaggaagatgttagagagatagttcaacggttcaactctctcctcctatttatatagggttattcatatttcataaactattcatagatacataaagtctatccactcatacaggatcaaaatggaccaaatcttggatttctttatctgacgaccacacactcttcacgaagttggttcacctcaacgcaacctttcgcgctgacaccacatgcgccttcgatttcctttagaaccgtgttgtcgggttttgaggctcaaattcggtgaaacccgtgaattgttgtgttgtctggttttgaggctcaacgaccaaaatcctcatgggtaccgtacgcaccccacatccttgacatgtgccccaccgcccccaaccacgttgacgatatatgatccacttctccatgtccttgcgtctgtcattgttcctaggtgtcagtcgccatggctactcatctggcttctctaggtcctcgatcaagacccaatgttcgtccttcatcgcttttgatccctcgacatgaacccatatgaacttcgtcattgaccattgtctccagactccacacctgcacatcataaaccaaaagacatgttacacaatcacgtccatgccctagttagtccacacaactcaacccaagacgttacacttgttgacaatcactcatcacaa

SEQ ID NO: 131231 - DNA, 441 bp, Zea Mays
ctacgagtaacaggagacttaagggatgctagaacattaagcagataagcttgaactaacctgtagagggttggccacgacgagatgttcacggcggcgcggaaaagagaattgggggaaaagcaaaattaggacgctatggtggatgatcaaaggcgagggctggtgttcggagttcgaaataagttggcgaagcaggctggggcatcaatttatagtagctcgaagtggttgctccgaatttaggagaacgaggcttatcttcccagcgaggtgattaccgaggcccaccgtggagcgcatgcgttcaccgtgtgacgaccgctatttaggggatgccacgaccacggcaatgcggtgaatcaggcgagtacgtgtcccctactgcgttcacgtcgagcactgacagtgatatttcaccgctcgcgcagcaagggggta

SEQ ID NO: 131232 - DNA, 430 bp, Zea Mays
atactgtggtaaactcatcgaggagcggtgctaaacacaggtgggggaaatgcgaacttcatgaagaacatctcaccaatgataatggcgtagagaaccccgacgacgtgatgcgtggctccacggcagggatgactcggcggcgagcaatcccccccacaacgtggctccccgcgtccgattctcccccgggacacgatccacaccaccgtcgaggtgtccgggagcgcaccacgagtgctaagcggggacggcggcggcagacggctatggtggcgctcccatatctaaaggcatgctcacgaggcgtgtattctagggcgaggacgaagcggacgggactgaggatcgatgcgggttaatatgatggctgagcgcggactcaaggggttgaggttgggaacggattcccgacgcatgcgaggaggcc

SEQ ID NO: 131233 - DNA, 476 bp, Zea Mays
cccggaaggagaagaagctggccaagaaggaggagcacctggaccagagggcggaggtcatcacggagctccaggcgaagctgaatgcttacaacaagatgctggaggagcagcgggaccagtagactgcttctgtggagagcctgcgaaggatgcagcaggggcttgatgacagggccagtagccttgccctgaccgaagagaacctcaaggagaaggatgcctccctgaataagcgggcgatggatctctcctggcgggagaaggacctcgccttcagggaggaaatgcttgagaggcaggataagctgctggccgatcatgagctcgaggtagaggagaaggagcgggtgctagaggagaaggagcagacgctaggggagcaggtccgccatttcgaggcggcgagggcgacacagacaaccccaggccctcaggcggtggaggcgatgaggaagacacatgaggatctccag

SEQ ID NO: 131234 - DNA, 414 bp, Zea Mays
gttgacaacagggatatcgtcacaagggaggagatcaaggaaaagctcgtgcaagcatcagaggaggatcctcttaggcaaacttgatcaaacttttgaatatggtagacgaagaacagtgttccagaatttagactcaggtgaggcgtaaagttttggtgtgatattgtagggtttggttatgtgactaatcgtttgcattgtcagtatctaaatatgtgtaacccataaagcccttctttcataatttagaggtgatcaggcctgtccaataaaatgcattaattttgttcatgttattattcaggaattccacacatgttagacaaaatacaaagtttatattttttctcataatataatacagatttggagactgtttgcattatctaaatatgtgtaacccatacagat

SEQ ID NO: 131235 - DNA, 486 bp, Zea Mays
tgtggaatatcatcttggtgagctgagctgttggatcttgtacgtctgaaaatgtcaattgaaaaaacctcctgactggattcaatggttaatctttttggattactgggcgggcgatcaacagacttcatgattaaatactgaataaatctgtagaaaaagaagttgtttttaaatacattgatttatgcatgaatatatgccaaaaaaaaactaatttttactataactatctgaaatgcatactatataatgctaagtggaattacataacttaaactaccttttgcatttatgcgatagcatttaatgaacaatggttatatacaagcataaagattgatttaatatttcatataattgtaaatggatcaggataaaataagagcctttttgcatcaactaactatacaacatattttaataactggttcatattaataaaaacatttagctcaaataacatgaatatttaaataacattag

SEQ ID NO: 131236 - DNA, 368 bp, Zea Mays
accgtgtgtccttactagcgtgtcctcccaccataggcagtgatgggcaagactgcatgagactccaatgttatctatgtcgtggctcacatcctaagttgttagagcaggtgttggaggtgactactccaactgtcaagcatgctagtgatgtcatggttgcactgcatagcaaaacatgccaaatctaagaagaaaatagagctgccctacctagggtgcaaaatatcatcgcgttatgacattggagtatgaaatgcacccaaaagctgaaaagtgtaactgatagagcgcgcggggggtgtaggctggttgtacgttgaacttggaagtatctggttaccaacacaaggtagcttagagaggct

SEQ ID NO: 131237 - DNA, 274 bp, Zea Mays
cttggtatttttcaaaagtgtgtgctgtgacgttcttctcttcctttattgcagacttggcagcacaacgttcctagtttcctactgattgaagtcaaaacctattacagaccacatccaattagtaaatcaactgaattagacagtgtttacctcatattctactccatttctcctgtttgaatgtgaaactgattcttggtaatcatctttcatgtcatgcaaatgttgccctggtacagtacgtaccctgggaaatgttagcagaaacggc

SEQ ID NO: 131238 - DNA, 771 bp, Zea Mays
cggagctaagatgaattaaatatgaattaaacaagtttgagttgcatttattattaattttaatgccaaaatagatgccagggatttttctgaaaatttggaggaccgatctgcaattccagaatttatttccgaggtcaccgctgtgaaaggtaggacggcgggtttattccctaatactccaggggctcttttgcacttttgctcggcgaaggggtatcctgaaacctgagccactcggattagatccaacggctcggatcagaccccgaatcggtacgggattgtggtccacaggatcgagatctgatggctataatttaataaaacgcgatctgcttcgagccgtaggatatcagatctacggtcacaggttcaacgccctagacggtatgctagaactaatctggaccgcccaaccgtggatccacggttccacgtctattcttcatccatcagcctgaacacggcggcgcaccagtgaacgacggcggagctatcgccggagtgcggcgatccatggctctggtgcactactccccgattcacaacactctacacaaatatcaagccaaagctaaccgcagggaagaggtcttacaagaagcgaagatggggacgaggtcggacacggtgtggtgcggaacgctggcatcgaagtcccacggcggcggcgggcctcacaaattccctctctgcacgcggtggtgttgatggctttgcaaagggtaggcaggagggggaaaaagcaagcccaaccagcgcttaaat

SEQ ID NO: 131239 - DNA, 552 bp, Zea Mays
cggcgacccctccatgagacaacaagcactcggacaccaagcgcgagcctacccaagcatatgccctcacttaattggactggtccaaccctaattgatgcttgttcatggccacaacgacggtagagctccggtaagcgcgttccgaacaaccaaacacggtagtgtttaaattggagctagggcgagtttcactgattcaccagagggcgggtacacgcgtgaatttgaacgaagcgagtatgggaaagtgggtcgacgggagcgcgctctcagacgtgttctgcggcggcgaggtaaggttctcgatgtcctgtcgcggtaatattcaatcggttgggccgacaagctatgttaacattcaaggacgctagaacatggcacagaggggaaggaacgaacctgggaatggttggtcatggctgggtgcctcacgacggcgtaaatgacgacgatgggggaaaactggaatttgtgagctctggtgggtaattggaagcgaggaagggtgcgctaggcgcataaccagaaggcgtatcagggagagccttt

SEQ ID NO: 131240 - DNA, 412 bp, Zea Mays
cttcaacattgcttgatgaaatctattaatgtataggcaagcttgttaaaagtttaggttgagattatcatcacatatataataaccttttagcagtgtgcattttgacttactggaattttctaaattaatgaaactcctaacaacattcatgttacctgcattagagtaaaagcaatcttgtcgatagagttatgaactcctgttcctgtcaacgactttggtatttttatcaaagtatcgagtagaacgcacaattgtattagtcgtaccagagaggcttgtagtcttgtgagatcacatcaaccgcgtttatggtgtggccaccaccatttattagagggaacgaggctttcgacaatcgaaaactcgatagtgaaggcatcgaagagcatccgggagagcccacacc

SEQ ID NO: 131241 - DNA, 514 bp, Zea Mays
ctcgataatcaatctcgatttataaatctcgtctaaagctcatttaatcaaacgctcgacagttgctagtcgagccgtgtccgagtctgattccatgacctttgatctatgtccgactattctatccggatcagtactctcaaacgaaatgctctgttgtgttggtatctaattaattattatccgacttggcctaatatctctatgtccgaaccaaactcaaaacctgcatcgacagtgatttttaaaatgtcacgattcgccttctccaactaaaaatccaaagccgaccgaaatcttgagataaaaatttgtttctaaaatagtgcgcgagagaatttcaaagtgacgccaaaatcaaattctcggtccaaattaagtgctcaatcgtctgtcatcttgacgccggctttcctcatttgtcgcatcagttttagtctcgcgtagattaatcgccgccaaaatctagtagtaatttttggtttgcttctaccctaagcaatcccactaaaac

SEQ ID NO: 131242 - DNA, 1015 bp, Zea Mays
gtctccttgtgtggaggttctagatcctccgctcattctacctctagatgatttagctagagagcctcctttaggctgtcacaccctgtctacattacatgggactcatctaggatacacccttctatgtcataggtgtaagattgctttaggttgcctctgaccatgatcgccccattaggacctagcatttatggattgagcatgtataatggggcattgccatgaacttggtgatctcttgatgattgaatgatgtgatggactaatatttgtcaactcaaagtgtggaaactctatgtgaaagttgttctcagagccaaacataatagaaaacagagttgtagacttgcctaggataatgtcgtagaaaggctcaagagtcagatctaattatttctccaatagccccatcatactaaaggttttagtgaagagagtatttagattgctcctatcatcaacaaggacacgatgaatcatgtgtcgcccactattggattcaagatcagagaatacctacatggccaaggaacatgattagggtgatcaaatctatcaaaagtaattggtaccttagactagcggaggaaccctagcgtgtttggctccacaacataaatgtacatcgtgctctggcttctgttttattttggactcatacgagtcgaggccaccaatgatatacatgatatcttgcattggctctagaaacttgctcctagtgtcgtcgttttgagttgttgttcctagtggtattggagctttctgactttgggtctttgggtttacaccctttcaggagtttctacacaaaatccctgacatgtcagcactcttgtgttgtatgttggctatatggatggtatatgcatctcccctccttgatgctttggaacttgttgaagcccacctccttgatggttgcattacctcggcgttgtcgagttccccacttgaccatgttgacttgacgatcggatctacgcttctgggctttcttctaattgacctt

SEQ ID NO: 131243 - DNA, 542 bp, Zea Mays
ctgatggtgaatctgggagttcgtttccttggacggaggagtcctcagatgaaggtttggattattttgttgcgttggatgtagctgcggcggagacttcgccgcgtgtggagggtgtcggggatcttgctagtgcgagtactgggtatatgcggcgaagggtggtgggaaaacgtagtgtgggtgaatttttgcgaagtggtaggcaccgtcgtatggggatggagcgtggccgtctccgagtagaccgggttggtaaacgagaattgttgtcctcgccgattggggcgagcataggcgagggggatcttcgggatctttttaagggtgaggaattgaggataatgttgttcaattacagggagatgtgtatcatcctgaaggttgagccgatgtaatatgtgatgccctcgccgtgtgtatgtaactgtaatttgtatggaaatgtggcctgtacgccgtattcgtacgcctgtgttgattcggctacgcccgtgggcgactttgcgcggagtgtctttttaatgagagacttcgattaa

SEQ ID NO: 131244 - DNA, 344 bp, Zea Mays
gagatttgtttgtcgccggcgagagctcaccgggtggcaatggtggcgtcgtcgttcgcgatgtcctgggttgggttggggtggcgtaggagaagccacatggtccgttggatcttattcaacggctaggattagaatgcatttacccgtttggttatttgaatctgggtcatcaatagtcgatcgggcggtgctagtgtagctcatgcttcggaccgtggatctagatccaacggatacgattgcgtaccgattcggatattacggtgatctaatcaggaccgtctaatgcggatcggacggttcatggtggccgataccccttcggccatgcgcctttacag

SEQ ID NO: 131245 - DNA, 554 bp, Zea Mays
cccggacagtttcccatgcttcttcgacctttgagggcggcctaatccataaggacaccttggttcctgatgttacatgcaaaggttacctggctcctgtgggtaagattgaggatactttagcccccgagggtgctgttgagggtgacctagcccccgagggtgctcctgagggtgagccagcccccaaggatcccgagctcgactcctcttcggctgcttctatggatgttcatgtcagatcaccaccagttcagtctgaggagccaatgttgacaagccttcctactgctcttgttgtcctggtcactttagaggttagtgacccgggcgctgggaatccgctacacgctttcggagctgaggtcatgctaggtgttgcctcgggtatgagctctaatcctcctctggggctcgagtctgctctccatattgcttctgctagtaccccgtcgttcgatggcacgtcggcaccttcggctttgggatttcctttgttcctttctaaccttcaggtgagctgatccttgtcctgctttatttttgtcgacgaa

SEQ ID NO: 131246 - DNA, 406 bp, Zea Mays
gtgggctgtgggaggcagtcgacaccagcaacgtcgagcgcagcgaggatcggtgggtgatggaggcgagcctacgagtggttcctccggagatgcaccagtccttgggggtgaaggtgacgacaaaggaggcctaggacaacctgaacacgatgcggaccggctcaaggctggtgaagtgggccaagatacaacaactgaggcaggagtatgagctcctagagttcaaggaaggggaaggattgatgaaggcgcaagctggagctgggagacgccagatgcaggggaagatgggcgcgactagagctccttcaccatcaattacactctgtattgaggtgcaggggaaaagttgtgggtgacgaagctgcggacgcaggggaagtagaggagagtggtggcgggt

SEQ ID NO: 131247 - DNA, 1718 bp, Zea Mays
tgcaggtcgagttttaatcacgcactaaggcacggtcaccctcgacgtggaaataggcgtgcagttgttgtagcgtctttaggatgctcttatggcccgcatgcgtgagctgtgacacctagggaagaatggccgagaactagggcaggaacatccttgagccatggagaagtaggtcatcgtgtgtgcaccacaggtcgcccatccgaccacggtcaagcttgttgccattgtcgttgtaggtcgggtgtgttgtggcctcccgagcgatgttgccatggagccaaaaggacggacctatagaaagctaccaagtacacatcaggctgcgcgagtcgatgccagagtcgtcaacaccacagcaggagagtgcgtcgggcaccatgttcaggctaccgggatagtgttcaatagtaaaattgaaaccaaacagcttgtcgacccagtgttgctacagaatggtcgacagtcgttggtaaaggatgaacttcaagctttagtcgtccatgcggacgagggaagcggcaaccacatagatacagtcgctggcaccgcaccatctccaccaagctgattagttaccgctcgtaggccgccagcttcaaatggcgcgtcgcaaagggggatgaagaaggccaagggtcccatgccccggtgaaggatagtgctgaaccccatcccagaagcatcaaagacgacgataaagggggcatcgaaggtgatagctagaggacgggcgccgttgagaaggcgtgtttgagcgtttgggacgcagcctccaactcgaagccccactgaaaggcctccttcttgaggagattggtgagaagcacaacgattgcaacgaagtccttgatgtacttgtgttagcagcatgcagtcctaggaagtcgtgtagtccccaaaccgagcgaggccggggccaggagaccatggcctccaccttttggccatccatggaaatgctatcgacagatatcacatggtcgaggtaggtgatccacaacacgcaaggcacatttagagcagttggcgaagagggagttgacgtgaagggcgttgatgactaccttgatatgctacaggtgtgctaaccacgaggagttgtatatgaggatatcatcaaaaaagacaagcacaaaccgacatatgaagggttgtaggacgtcgttcattaggctttggaatgtggcggaggcattcatccaaataaacgacgtcacaaaaaactcaaagtgggcatggtgggtgtgaaatgtcgttttctccattccatcggcgtgcaaacgggacttggttgtacctagaacggaggtcaaaatggtgaagaaatgcacgacgtggagcttgtctagaaattcatccaccatagggatagggtacttgtccttcactgtgcaatcgttgagggtacaatagtcgatgcagaagtgccacgagtcgtcatatttcttgacgaggaccggggcaaagaagcccaacatgctcagtcggatgatgttgagcgagcatattagccacctagcgctccaactcgtccttctggagctatgggtagtgatagggcgcacggccaccaacgtcgtgtttgacagcaagtggatgcggtgttcgcacttccatgcgagaggaaggatggagggcatagcgaatacgtcatcaaagtcgtcaaggaggcgctccaggagtggtgaggcatggtcaatgtgggcgccaac

SEQ ID NO: 131248 - DNA, 318 bp, Zea Mays
ggggagcgtcagggagatccgctatctccctttctgtttgtcctagcaatggaccctctgcagaggatgattgagatggcggcagacgtcgagcttctagggcgggtcttgccaaaagaggcaaactataatgttctctctatgcagatgatatgacaatgtttgctaaagcagataaggaggacttggaagttctaaaaagaattatggaagtttttgaaaggtgtttaggtcttaagatcaatttcgataaaactgaaatgtttccgattcgttaccctaaaactctttggccacatctgatggaagtgttcccta

SEQ ID NO: 131249 - DNA, 793 bp, Zea Mays
gaagtgtgagagggagaaccaactcggacaccctcgagggctgggtcatagctcgcgctgcccatccgagccggatcatccccggcgacaccctcgggggctgggtaagcgctagcgccatccttgagggccgagctctctgtaacggtcacctctaaggctgaaggaccttcacgcacttccatgggagcagaacaatccagaccagcctcctgacccttaagaccgcgctctaaggtcgatgaggcacgagacgctgcttgagataactccaatccggcatcaggcacatcagcgcaaacgtccatcattccaccatctgccggctctgacaatagatcttctgggaccatgtcttcaagagtctgatcaatgtttgccagagacaattcttgtagaccaatgagggcagacaaagctggagaaggaacaccactactttccctgctagctatgtagcgccggctgttcttccgaattagagggacttcattctcctcttcctcatcttcatcaataatgcggacggtacacccattgggatcagctgtggctagattacacccattgggatcagcatcatcaaggtcacacccattgggatcagcatcagtcgggtcacacccattgggatcagcttcagcaaaaactggcatcggcacttccccagcagcaggagcagaaggaccggcatcctgatccaagcatgacactcagcgaagacgtctctttttctttttcttcccctcagcaggagaagttggttgagtggctcggcgaggacgcttcgggc

SEQ ID NO: 131250 - DNA, 292 bp, Zea Mays
aaaacaagaaatgcaaaccaaaattggtgggctaaaggacaccctaccagcagatgattaatagtctcctctcgttgatcacaaaggggcacttttttggatggtcagcctctaccagcagatgattaatagtctcctcctattgatcacaaaggcacccaagatttccacaccaaatcagcagatgcaaagtgggtggctccaaagaatagagcattgtcggcagacattgcagattaggatcctcaagaggagaacctccaaattgttgatcagagacatttggctgaag

SEQ ID NO: 131251 - DNA, 399 bp, Zea Mays
tattctaatcatggctcccagttgcagacctgcaaccctaaccaaattgttacgtctgcagctacttgtttccgacaagttgttagtatttagtttccaaattgcttgcttgaggtcatcgttcctttattcttctttttgttctggatggacttagggtagtcagcaatgaataattcagattaaggcatttaactcgatggataatattaagattagtttgaccattgacaccatatggcaacctgactgattattgtagaagcagtttctcctcttaaaccatgttgcttccgaataaattttagaattgccgctcaagtccgaaactgcagcaatatggccataatgtgggatcagccatgatatcacttcaattacagagtatttatgtagggc

SEQ ID NO: 131252 - DNA, 480 bp, Zea Mays
ccgattgctccgttggtagggtatagtggtcaccccgagtcaagtaagtgtgagcatgttgcaccggcttaagtcatcgccgacttaaaccgattgctccgttagcagggcatagtggtcaccccgagtcaagtaagcgtgagcatgttgcaccggcttaaatcatcgccgacttaaactgattgctccgttagcagggcatagtggtcaccccgagtcaagtaagcgtgagcatgttgcaccgccttaagttgttgccaacttaagccaattgctccgttggcagggtatagtggtcaccccgagtcaagtaagtgtgagcatgttgcaccggcttaagtcatcgccgacttaaaccaattgctccgttagcagggcatagtggtcaccccgagtcaagtaagcgtgagcatgttgcaccggcttaagtcatcgccgacttaaaccgattgctccgttagctgggcatagtggtcaccc

SEQ ID NO: 131253 - DNA, 417 bp, Zea Mays
atcatttctaaccattcttgacatggccctttgaaccgtttctcgaatttgaacttataaggtagccacacaagttctttcttctcctttattccctttagcttcggcatgttccattcactcagcgtcgggaacaccctaaaggccagatattcttggactagatctctagtcccaatctgctcggctaccacctggaattctgccatagcttgttggcatggtgaccccggctccatatggcacagcggcctagtcagcccgaagcttaagctcagagggctcagtactagcgtcttgagcttctccctcttcttctcatcagccttcacataaaactactcattttttcaaccagttggccactaggtgcgatagctaaccaccagagtcttcatatctttgcggtaggtgaag

SEQ ID NO: 131254 - DNA, 855 bp, Zea Mays
cgaggaaccaattcaacacatatttgtctcctgcatatttgctcgacaagtctgtacattaaccttttaagaagctacattccattgcagctgcaccataaggttcacggattcatttctcaggttggtggtggccaccagaggtggtttcactctaggttggggtcgtggtcctgtggatttcttgtcaggcgcgcgtgtttgtagctcattaggctggtggttaagtgttcgtctctaaggaatttacctctttttcttcttgatataatgatacgtagctctgttgcgtgtttgagaaaaaaaatcattgtgattattagaactttactgtcccctccaattacagattccataggaactgataaggaaaaacagtagttaacaatatacaaatagggtgattgtctcctctcaaaaactcttttagaagatttggtgtgaggattagacttcacagtgaaacaggatcagcagcagagtagatttcaacgggtgaaggaatatagataatgaaacatgcaatccgttttgaggtataccatatccatagcagtgatttaagagataaataaaagtggccacagggacgtgtgatagatcagaaaatgcaagtaaacgcatggaccgctgttcatcgtgctgattagtttcagggccttctagagtagcttgttcaaaacaacccatgcttcaaagcacatctagcttgtagaacaccacatatctggaaacaatcatcaagaatgcaattttgtttccatgaaagatatacttcttgtttggcctttgcctctaatggacattaaaaatttgaagtaatgtgtatttcatcttcatctacttcaaagcaac

SEQ ID NO: 131255 - DNA, 749 bp, Zea Mays
ggggttggcgctcccttttctcgcgtattctctctcatccgcgcaacccaaccgtcactctcatctgaaccaggtttgctttccttccttcgtcggtacaccagatctactttcttcctccaagctgccggcctcgcactgaccaagttttggaggtttgtctcctaggtcgaaggacgtcgcccccatctgcggcgctggagcgtggtcaaaagcgtcggcggcagtcgacatctcccggcagcgcgtgctcgtcctcggcgaaacccatttcaagcacaaggtatgaagccgctaccggatccgtgaacctgtacttcattgcacagattgtacttcgcagtcttgttgattttattgaatagggttcgaatattgcgcagagaggtgcagcttcagtgattcgttggtgtaggtagatctaccccatgcaaaccctaggtgtgtccaaataatttggtaaagcaaaacagatcggctggtagttttatgtgtgcatacttttgatccagtactgtctaccatggatgtcgttgcatctctgttcatgtttgtacagtccatagtggtagttcaacctcttttcacattgttgtatttgaggttgaccaaaaaagtccactcgtaccaacaaaaactgaccacattctgaattggtcattttcagtttcagacaatggacaaagaccccctcgacatggttcagactgcagttcaagtgattgaggcacatgtcgacatcattcgca

SEQ ID NO: 131256 - DNA, 340 bp, Zea Mays
aaatttgaaggtcacttaaaaagctctataacatagtgtgtggctaactataccgctaaaatgagcctacacatcactcgttctagaggaaggttgatttggtgtcgatgaactagtctgtatcaaaggcgtaggagtgggactgtgggagatagatgtaccatgggtcatcgtcgcatggacacgacccatgggccgcttaagcaaacccccaataagtcgaggccaagctatgctattaggccgactcacatgggaagctagtgctgccggaaggataacataactcttccagaaggattccgaagagcacgacatcaagacgttatctatgtgcgtg

SEQ ID NO: 131257 - DNA, 504 bp, Zea Mays
cacccaagagccaacgggcaggtagaaagagccaatggaatgatattggaagcactcagaaagaaagtcttcgataagaatgaaaagctcgtaggaaagtggatcagagagttgtcgtatgtggtctggagcctaagaactcaacctagccgagctttgcatggaaacactcccttctttatggtctttggttcggaagcagtgctacctgctgatctcaagtttggggcaccaagactgatcttcgaaagcgtagctgaagccgaggccactagattggaggatgttgatatactggaagaagaacgattgaatacagtgattcagtcagccaggtaccagcaaactctgaggcgctatcatgataatgtcatacgacatcgatccttcgcagtgggagatcttgtcctccgcccaattctaacgggggaaggacgacacaaattgtcgccactatgggaaggaccattcatagtagcagaagtcactcggcctggatcatat

SEQ ID NO: 131258 - DNA, 993 bp, Zea Mays
gttgatttgtgaaaaaggcagggtctctttagcaaatcgtccaagacgaaggggtacgggtagaattcaaccgttggatcggcatttgagggctcagattagatcaccatcatatgtgaaccggtattcaacctgggccgcaggatcaaagatccacggtggtaaacgcccctgggcgaaacgctatgccctggtttgatccagcccgatcatcagtcgatcaacggcccacggtgactcactcccggatctaatcccatccgccctacgtagatccaacggtcctgcgcataccaccccttcatccaaccgaagccgttgatcccaagatcaacgccccggtgctgtcttcttccctgggcacagcaacacggcggtgacgcacccgcggcgacgtgcccccccgacgcacacacaggcagcgcccggagtccccaatgaagaattctagtcgcaacacagtcaagggtaaagagattggcagatatcttacaggtgatgaagtaatcgagttttccagccgcggcgccgagcgcacaggcggcgaggtcccggtgatgaagacgcagacggcaaggcaggaataggcggggcgcggtcatgggagtggcaacagcgaccagttaggaaggagctttggtgagggaagaaggccgcattgggaaacctggagaggaaagagaacgcgtctggtcttcatggcggtggcgcccgacgacttggtttactggtttcctgccagctcgatggcgctctgctccctcttgtctgtgcccggcggctttctggtgatggacaggggcggcggccgggttttataggcagtcctgcgaggatcaagtccagggggggtcgcgggttccacggcgaggagatcggcaggagacagttgcgccaagctcgcgaattctgttgcgcacccacggaatccacgcggctggtccagtgtccagaggttgaagggagcactgacgcggcggacccacacgtcag

SEQ ID NO: 131259 - DNA, 553 bp, Zea Mays
aggtgttaagcctgcgcaaaaataagagataagtgtacttgttttatgcatgtgatcgatgattgggatagtcgaggcgaatgaggagtatgattaatccggttagagtcactatgatgttgatgccttctgcgtaacctggggcacgtatgtgcgtgtgtgccgtggtgtattatagtggtagttgcgtaagatatttgattgagatgtgcgggtatatgccgtgatatggttatactcgcgacgaggaaggatgtatgccttgggtaacgcgacgcttaggtcgctgttgtataatcgaatgaaggctgtattgttgagcttgaatcaaaatgcgggaactagtggtacgctaggcaggcgttgttccaaataaatagatcggttgatgtggtagttgtcgtgcgtgatttattgttagtgagcgttgaattatgagttatgtgaaaagcatgttagaaactagtgtgcggcgtgaaactgtgttcgtgtggtgaatgcgttaattaaatgtgtatgttagttttcaggcgtgaattgacttgtataaaaa

SEQ ID NO: 131260 - DNA, 299 bp, Zea Mays
tatgtttcagattttcatacagtcatcgggtgctgtttttggctgagttagaagccatgtttaggtcggcagagcctgcttatcttgcacattttcctgcactcacaaggtactatgcaatttcaccatggtttaaccatttgattaacaacctgcttatggattatacatgtgttactctgttaatgcagcattcaactatctttcacatgtccattttagtatatttctcattccattgcaaattctgctaattgtaatagcttcaaccattgagataccttgtgaggttaatccat

SEQ ID NO: 131261 - DNA, 746 bp, Zea Mays
gcacgatgcgaggtcattactaaaagacaaatccacgcaaaagtcgcctaagggtgcagccggacaagcacaataagtgcacgatgcgaagtctttaataaaagacgaatccgtgcaaaagtcgcccaagggtgcagccggacaatcatagcaagcacgaaggccccatctcattcaacaatatcgcatggacaagcgaagggttaccgaccacattacacacaacaatgttgtcgcagattacatacatacagtgaagagtcgccaaccacaacacacgaataagtacaaatcgcatttcatcgcccttccctctttattctgaggagggggagggcagcgtttttactcactaccgcaagacaagagtgagggcagcaaacatactacatcggctcagccttcggaataaggcccacctcccgaaaattaaaaaacatcatttccaactcctcaccctaaaaaagattacgcaaatccccctcaccaatactcgtcccgagcgacgaggacaacaaatctcgttggccacctcgatctacacgaaggcgggttcgctccatccccatctgacgacacctaccacttcgcgacatctcgccaacgctatgtttcgacactacttttcgtcgtcgacgatctgtcctcacgccagccgggggatcaaatgcttcgcacacctccagccgcggcgaggactccaccgcagccacatctaacgcagcaaaataatccaaatcttcatc

SEQ ID NO: 131262 - DNA, 790 bp, Zea Mays
gggtgttgtacaaatctgaacaaattatacattcaattgtattttaatatacaccatgcattttgtatttatgtaataaggttgttatcgtacaaattttgtacaataacttgtgtgtccacctttataactactttgtttgtcttgatacaaatgcagactagcctcaccagtcttaatgcacaaaattgtattttgtagtgtttagagggccaccgccgtgcccggagtctccactgccatgtccggagtctccacaccgctgccactcagtgcctccacccagagccgtcgccaccctgcgtctgcacccggagccgccgccaccccacacctagttcgaggtgattacttatctgatagtttgtttgtctaacttttttattgtcatggtagcatgttagacttgttactgcatttgttaattattgctacctttattggtattgttatattttagtatttctccatttttatactttctttggcatatttacatacgtgtaggaaacacacttagtaaaacgtatgtgtcacctggtcaagaacgacacatctcacatttacttgtgaggcgcgtagtccgaattgtctagcgtattttggatagcctgagaatggaaatagttgcgtgttatttggtctttgactcgtgtaccttctgctcatgatttcgacaacataactccgttgttcttctttattaggagaacaatggggttatgcttccgaaatcacgagcggaaggtacacgagtcagaccaaataacacgcaacaaatgacatttta

SEQ ID NO: 131263 - DNA, 537 bp, Zea Mays
caccaaaagccatcagaccatcatgttcagactaccattcagagagtaaactatactaggctactactgagagaacttgaatctatctagatgggaaaccatggagctgtttctatttagtcgatgaaatattaggtacttcagtacaagagagcgaatgtcctctgaattatcctgcaaaccaatataaggaaaaggtgagttagacaaaactatacatacattatgtcataacaacaaaaatactatctatatattacgtactggaacaatgactgcattcatagctccaaccatgtagtcgtagtgctgcatatatctcataacaaagaatccacaatcattagaccccaatttcattgttgggcagttattcaagagttcaatagggtacttcaaaaaagcagggagcgctgatcttggtcgagcattttgtatggctagattgagcctagtcattattaacctggcccatgaaaccttcctatcacccatatccataggtatacaatggtaatttttccagatagtcccacc

SEQ ID NO: 131264 - DNA, 325 bp, Zea Mays
gtgatacatgtggctcggacgaccaaggtctttgatggtagaatctttagaagacaaagattcgctaagcactacacctcatcccgggatttctacacctcaccctgggatttgttcagctcgtttctcttgcactctagctcctccatggtgaaacgatgactcctttccaaagtggtaagggaactagaggcatcccaatacaacttgtcaagattatctttcgaaacctatttgtggcggtagcatgaaaaaacttagtgcattcatcacccagaaccacccatctctctgtgtatctttgcctccaatagttgttcttgta

SEQ ID NO: 131265 - DNA, 607 bp, Zea Mays
gcagccttgtcttctcctctctcttctctctgttcatgccaccagtaaagcacccctcttccaccccttgtgagtcaattcaaatttcctgtgaaatctagtgaaaccaagtggtcatatgtgttcctctgtgtgccttgagtatccttgcaggttcctagctcctttgggagggttttcccacctcaaatagccatttccccaaaaccctaaaactccgccgtccacgtgttcggtgaaatgcccaaaccagccaaaaatgccccgattgaacccaaatttttcaggcaccttcacaacacctccagtaacatattcgccaaatttcacgcccatccgatattccaggctttaatttcacccaattccccgtttcgagcgatcgtttccgagccgagtgcccaaatctctttttcttctcctaatttcaaaccaagcacacacttcactcataatcacccatataaacctactcgtgaagtatcggctcaattccacgtcatttcgtgcctcaattcgaattccaaacctcctatggcactttttatcgttcaaacgccgttttcacgtcgtttgacctctcaatcgtctcatcccttgttttctg

SEQ ID NO: 131266 - DNA, 471 bp, Zea Mays
ggatccagcaacccactcgacgctgatgactggttgcgcacaataaaaaggaagttagaagccatcagatgccctgagaaccagtgtgttcatcttgctgctcatcaactctccgggatggccctatcctggtgggatacttttagcgctgccgtaagagatgctacctgggcagaatttgaagccgctttccgagagcatcatgtacccctagggatcgtccagctcaaagaagaagaatttcgggaattaactcaaggagggagatctgtcagtgaatacgtccacaatttcacagaataggctcgctatgcgcctgatgatgtcagcatagaaaaaccaagaagatggcccgtttcttgaaggggctgagaccagaactcaagtctatcctcgccagccaagattttctcagcttctcgcacctctcaaacaaggccatacaagtggaaagggctagagaagaagaaa

SEQ ID NO: 131267 - DNA, 413 bp, Zea Mays
ccggtatgtatatatcagaatagttacaggaacccatatggcgaacggacaatatgtgacgccataccaggggtatggttgggcacgacctagcatacgacaccataggggctacgatgtccaaaagaaagaggccaaactccaccccgataaaatacaagttctcattgtaaagtctaaccttgagctataaaagggcaagacaaccccatcttcacagacatccaatctgatccaatccatccacaactgtacacaagcacccaattgtaacacgctccaaacaatacacgatcagcactacactagattagggctccggcctgaaccagtatatctcctgtctcagatccgccttcgagctctctatagctcatcattcagagtaagtctgcgatagcacccctcctgaa

SEQ ID NO: 131268 - DNA, 785 bp, Zea Mays
tgaaaactccccagactcagccatccaccaaaacggagtgcgggttactttcactagaacacagggtcttttacgcaatttgcgtcagtgaaagggtatgcgcgtactacagccatccgatcaacatcttacgcccccgattaaaaccgtgcgcgccttacgacacatcgcgaggatagccctcggatgggagatctagggttcagatttggtgtggtctacaactcgtttccatcccacccttggagcccaatccaacggttctgactctagctgagtgaaagagtgtgcgcgccataatctgagccatccatgagccgatctacggccaggagcacccgcaatctcatcttctaatcctaaccgttcatcgcaagatcgatggctctgcgcacttcatcaaccttaccgattctctctctcttttctttcccagctaactcgccgcagccgagcgccaaggacgcggcagcaactgcccgagctcgctacggcgcaaacctatctcctccccaaacccagcagccggacgcgacagtgctcctgcacgcaccggcgtagctcaccggacacctccacccacgcgcccaatcaccccatttccctggtaacagacacaacgcaacgcagagacccaatcgaacaagcactgagatgtctaaccggtgggagaaaatggcagcagattcgaccatggtgtatggtgaaccatcgacggagctcgattgacggcggggaagaacgcagggctccaccggcgctggagcagggcagtcgctgcgttg

SEQ ID NO: 131269 - DNA, 538 bp, Zea Mays
gatcaaaactctacctaagatccttcagtttatgaccagctactaggctatctattctgtctactaaattattccccttgcaaaactatcttaccatatgtctctaactagatggttaatgccaggaggggaggaggtgttgatctacccgcacgaattcgtcgaagaagggctgtagctaattcggaaccagaaatgaatcctcttccgactcccccgcctgttgatgacgtgactactactcaaatgcgaatactacaacaaatgaccaacacgatgacagaaatgcaagcacagatctgtcaagaatgacaggaaatgaggcaagaacattaagaaatgtgtcaagaacaacaggaacgacagcaactaccacctccaccaccaccagctccgcccagggataagcaccgggagtttatgagtcagaagccacctacattctctaactccttcgacccactacaagctgatgactggctaaaatccatggacaagatgctcaatatagcttagtgcatcgacagggagaaagtgc

SEQ ID NO: 131270 - DNA, 821 bp, Zea Mays
agaacacccaagagtagtgagaaaatggtcaatgaacacaagcacataccacattacccaaaagagcaaacccgagatggaccaacagtatccatatgaagcaattcgtcgggctacgaggtcatcaccttggagaccggggaatgggaagtagcaaccatcttgccatgatgacaagggtgatagacaagatccttctcaaatttcaacttgggcaatacttggatcaggccaagtgagcttagtctacacaaaagatcaaagctcaagtgtcctagtctcctatgccacttccaaatcaaagaagaggatcctgccagcaaacatcgagaagggccataaaatgtgaaaaacaacattgaaaactcaactaaaagtggaaatctgataaacaagatcccctaggcatccaaaacccaagacaagcccttttttaagcgcacttcatagtcatcctcaaggaattgcgaaacagaaagtggattgaaatgcaaattcgaaaccaaagcaacatccttgagaacaaaactcttgttcactcgaacagagccatgagagattaccttccctctcgacttatcctcgtgtgatgtattccttactaatcatggggtcgagactgtagaaccgtttttccttcaggtcatgtggcacgaacagccggaatccatgaaccatatgtctctaggcctccatcctacatcaataaaaaaacatggggtgagcaaatggcacatcactggggttaggatactaagaataatatagtgttgcggcatttgcccataaaaagtgtttggaaaaacaccacccatcctcgg

SEQ ID NO: 131271 - DNA, 355 bp, Zea Mays
tgagcgttgtccgttggatctgtgctatctggctcagattagatcataggtgtaccaccttgtgtgatgaaccctggacgtcggattgggaattgagcggtctagatctgatattagcgtaccggttcgttgggggaaatctggaacgttggcgcggtatcggacgaaggaggatgagtcggggcgggatcgccctcatccgtgaatgttagatctgacggtcgaaaagggtatgcgttatatgctgcgcgatctaatccggtgcgtcgggtttagatcgggcggcccagattctagggtaccccttcgcgctgagcattttacttaagaacccctccgcttctgggaattcaac

SEQ ID NO: 131272 - DNA, 815 bp, Zea Mays
cttttaccaaaccggtatgtgacgctgcccgtcagatctaggatcaatggagaagatttaatgaatctaaacctattcggaaccaccaaatatcaatctgagggctccgatcaattgtccctgagcggtacaccatagcccacttctggccattcgatccacgatcgacgaccaggcgctaccccacctcttttaccctccccccccgacgaccacaggcggtagggtgtgccaccgcggcggccgccacggtgaagcttccccgacgagactagtgcccaccacgcggataacgaacaagcgcaaaacgacacaagggctaatgtgaactcaatgaaagggtcatactgacggttggaggtgacaacagtgctgaccacgccgtgaggcggatccgtgacgatgtgaacatcggtgagaaatctcgccgccacgcaatgctacccacacacagggatcgtgccaccgcaccccgaagacaccgacaaccctactaggctaaattttgtggcccaaccatgggtgaaactcacccccgacgatggcggcactcacgatctctctctgcatgacgacatcccaagacgatggtgcgcgtggccacacttttccacggcgagttcccttcaatcgatagacgagggaggcttggcacagtagttaacccctctaggaaaaatccgtgacgcccccgtgaggttgttacgctctccctagcttcctgttgaggtttttctggctggggcgggggaagaggaacagtgggtcagggtcccacccgctagcgactcaacacgcgctatacgtagaagggg

SEQ ID NO: 131273 - DNA, 572 bp, Zea Mays
agcggccggaggagcgcgagccgggtgacccgcgcagcgcaccacccaccaacagccagccacaacgcaacacggcacgcacggcgcagggagacagacagagagagcggggtggggggaaacccgaagcgaggcacaagaagaggccaccgcagcgggcgggcggccaggcggcgagcgagacacctccacacgtctctcccccttccgtttcctcccgtccctgctcacacctctgtagctgcgcccgaccgaacccctcctaccccggaatcctccccccgatgcggcgccgataagggggcgagaccggcggaagagcggggaatggcggggcgcggcgagaagcggcgccggacaggaggggcccacgaggagcccgaggaggaggaccgcatctcggaccttcccgacgtgctgcgcctgcagattctgagcctgctgccgctcaaatcggccatccgcaccggcgcgctctcctcgcgctggcgccgcctctgggcgtaccgctggccggagccgtcctcggtgagcatccgcctcccgccgggcggcggcgccgccgccgccgc

SEQ ID NO: 131274 - DNA, 369 bp, Zea Mays
ttgcagaccaataagggcagacaaagcaggagaaggaactccactacttccaccgcttccgagttaaaggagcttcatcttccacagtaacaacgcaagcagcacccccattgggatcagcaacagatggagcacacccattgggatcagcagcagtttgggcacacccattggggtcagcgtcggtaaggccagttgcaggcacttcttcagcagcaggagctaaggtactggcgtcctcatcaaaactggatactcgccggaggcgtcttctcttcttcttttgctcgtcagcagaaggctcaggctgactggttcggctagggcgcctcgggcgagtactgacaggtttcgggacatccaaagttg

SEQ ID NO: 131275 - DNA, 556 bp, Zea Mays
tttctatagcacatatctacagaaaacacaatttaattcatcaaacatacaacacaactaaaacagtgcgtgcagtccaaaacagcaatcaataaattttcagcttctatataattcaagaattgtccgcattctagagacttgaattattctaacactttaccatttgttagagttaacataaccatgggagaactaacaagtagacttactaatttttatacaagttaattcacgcgcgagaactaacatacacatttaattaacgcattcaccacacgaacattgtttcacgccgcacactagtttctaacatgcttttcacataactcgtaattcaactattcactaacaataaatcacgcacgacaactaccacaacaaccaatttatttatttggaacaccgcctgcctagcgtaccactagttcccacattttgattcaagctcaataatacaacctttattcgattatacaatagcgacctaagcgtcgcgttacccaaggcatacatccttcctcgtcgcgagtataaccatatcacggcatatacc

SEQ ID NO: 131276 - DNA, 625 bp, Zea Mays
actcattggaaagataagacaaagccctacattattatcatactggttaacactaattacccacgaaaaatgcccagatactgctaatactactgctgttcacccacctgaaaatctgtttttttacagcaacataaccggattcaaacaacgatatctcctaaattataactccgaatcgagcgcataagtatccgttggaaaggtatgacaaagctctacatgattcacccactgatccccactaattacccacgaaaaattcccagaaatccctagaactactgttgttcgcccacccacaaaatttcaggacagcacctctaccgattcggataggtaaacatataatcaattggattacaacacaattaaacaagatacaaatctcaaaatcaccttgaatcctccccctttcctcccttcttcttccctccaccaaaatccaattggagacatgcaccaatgcgacgtagatccgagcgggaaaggaatggcaccttggagagaagggcttgaggagggggcggctagggtttgatgggggaggtggggtggcagctgcaaatgggtggaggagtgagaggggcgtcctccaaacctagagagaggggggcggctgcac

SEQ ID NO: 131277 - DNA, 616 bp, Zea Mays
tgagttctggtcttagtcctttcaaaaagcgggccatcttcttggcttctgtgctgacgtcgtcaggcgcgtagcgagccaattatgtgaatttgtgtacgtactcactgacagatcttccaccttgagttagttcccaaaattcatcttccttgagctgaatgatcccttggggcacatgatgctctgggaaagcagtttcaaattctgtccaggtagcatctctgacggcagcgctgaaggtatcccaccatgatagggccatcccggaaagttgatgagcagccaactgaacacactgattctcagggcatccgatggcttctaacttcctttttatcgtgcatagccagtcatcagcattgaggggattgctggatccagcgaatgtgggaggcttgagcctcagaaaatcccccatcctgtcctgtggtcttccaccattcgggcgctgattctccggacttctagtgaggacttcaatgagtcgggtttggttggctagaacttgggttaaatctaatggcagctccggaggtgcggggaggtgggtctcactcccttctccaccggcttctccttcagctcctagggaaaccctgctccaatcccagag

SEQ ID NO: 131278 - DNA, 423 bp, Zea Mays
gaggacataaaggggatcatccaacgccccatctggtctcgcttcggccttcgaaggccgaccgtggcgattgaaaatgatgccgaagcatgtcaaaaggctttcagcaatgactgtgctttcattggtacaagagacctaatgcaagagcacatagcctacacgatatggccacttatggataactgggagatgtcgaaggagactgctgccgggtccagtgaaggtggattaattcgtttgaaatataccttcagatacagagaccggtttgacgaaccaaatgacgatgggctaaaatgtattgaggctactagcgacgagttacttggggcatataccagagccgaagatgatgctttatcctcagccttcggggtcggggcaagaaaagattgaatagggttttcgatgcaattggtt

SEQ ID NO: 131279 - DNA, 922 bp, Zea Mays
ttgccgaaaactttcttcctgagtgcttctagtatcatcccattagccctctccacctgaccattagctcttgggtgtgctactgatgcatatttaatctggatgctcctttgttcgcaaaaatcaaagaattcagagctagtgaagttggatcccaggtcggttatgatgctattcggtatcccaaacctgaatattatgtcttgtatgaattccactgccttggatgaggttagagaagcaatgggcttgtactctatccatttggtgaatttatcgatggcgaccagcacgtgagtatagcctccctgagctttcttgaagggtccaatcatgtccaatccccagcacacaaatggccatgttataggtatggtctgtagctgctgtgctagcaaatgttgttgctttgacaagaattggcaagcttcacatctttgaactaactcagctgcatcactctttgctgttggccaatagaaaccagacctgaagactttcccaaccagagttctggatgctatgtgtattccacactgtccggtgtgagtctcatctaatagctgtctcccagtaaccgaggaaatgcacttcatgaggactcctgttgcaccccttctatacagtgcaccccctatgagggtgtagtgggccgactgccttgcgatgtgttttgctgcagccttatcatccggttcttcctcattctttatatacatgatgataggctctctccaatcattagagtctgactctggctggctcaaagtgttgcactcttccgcctaatctgagggaatgcttgggcgtgacacttcctggatgaaaactctgggtgaggcctgggcttgactggatcctagcttcgacaacgcgtatgctgctgcgttgcgatctctttccacgtgatggaattccagcc

SEQ ID NO: 131280 - DNA, 523 bp, Zea Mays
gtaagttcagtaatgcttcccttatgaagaatgatttcgccccacttctgtgtgcattattttgccttctggtcagtcgtcgatcgttttaatataccgccaatgatgttttctgtctgcaatgcttgagtagcaacttggagtcatcgggtcatgcttcagactgctttatttgcgacgtcagtgctttggtggcagcgggcgagttattattggcgatgttggcgctttttgaagtaatggctgagtgatagcgggccacgtcggtgttttagaagtaacgactgagcggttactggtgatgttggtgttttagaggtaacaaccgaatcctttggagccacgtcaccgctttaggaataacaaccgagtgactgatggcgacgtcagtgttttagaggtaacagccgagtgatcgatggcgacgtcggcgttttagaggtaacagccgagtgataacgggccacgccggccgctttggaaacaatggccgggtgaagtctggtaacatcagcgtttttag

SEQ ID NO: 131281 - DNA, 444 bp, Zea Mays
gaagaacctagagcgatagtagtctatttttttctagtacacccttaggcacttcaaaaaaagacaacataaacataactaagcttgtgagaacagaattaatcaagactaaccggccacctaccgacataagttttcccttccagctgctcaatttcttttcaaactttatctctatggttttccaatctctattacttaactttctataatgcattgggatccccaagtatctgaaaggaaagccgcctttttagcatctattagctactcttagttggagacattcaaacatccctagctaatagtctaactatctattagctacaccctcaactacctatttatccagctaaaagtagctaatagttagccaactatttgtttgtcaactaattccattagcaacattttaaccagctaattattagctctagcacattc

SEQ ID NO: 131282 - DNA, 635 bp, Zea Mays
caagaggtcggggtctgattctcccgaatattttgcgatgttggaggatgtcctataccgatgcggtacccgtgctcgaaggatgtggtggctaaaggcttgaggcccaaatggtggcaggctcgggcttcggttcctatcggggtcgaagcggcctccacgatgttggttgttccgatgagtttcacctgacccattatgtacctcctcaccaggcccatggtcaggcgtgctctacgtgcttcggcctggccttaggtggtggggaggtgggacccacaccgcgcattctttgagctcgaggttatcacgatgtggcatcgttcatcgttgccgtagaggtggtgcatcggttggtccctggctcattatgttgtaacatggagctctcggcctgctgtcgcacaattaggccgaggaggacctagatctttggatgtgtcttccgctcgctcgattatctgccttggggagcttgtccaagattgtcacagcggccacgatgttctggcttgctcgagggaaatgaggtgtcccgccccaccataggcaagccaatgataagtgtttatcattgtgacacgcccttgccctgcgactcgacgcgggtgccccgtcagccatcatggtacttc

SEQ ID NO: 131283 - DNA, 535 bp, Zea Mays
ctggaactgtgattcagggggtccggacacacggcttggcttcccaggccaaatcctgcaggtcctgttgcatgaatcaaaggatggctgataccagatgatgggtcctgatgggtgtgctactaacacttcctagcagaagctgtgtgcaggtccaggtgccagtcgagactgcctcctaggtgccgggacactaactctttcttaggtatgctggtatctagcctcgacacatcgagcctacatcccaggggggaccaggtatcaggaaaggagttgataaaaccacacacagcaagaacaagcatcatacagataagagctacttaattgatagttcccaaaagtatcttacaaaaacaaagttattacatccgccttcaagcggggccctagccttatgtctacaggtatgacctactcgacatcagtagggtcacgctggaagcgcgcggccaccaactccgcgacatcttgtacgacctcctgggctgcgtcttcagcagccgggccagcggtcaccgttgcaggcggc

SEQ ID NO: 131284 - DNA, 389 bp, Zea Mays
gttactagcgactgattaattgcatcttggaagttagagaccagcaggaaagcgacgccgcgatggcacacaatcaagaaaccaatagtaatcagctgagcagggaattaagaagcaaacagaaccctccaagaaaagaaaacgcacgcacagcacagcacagcacacaggagatatgttgtatgcgagaacagaaggcacagcacagcagcaggtgagcaacaaggggcaggcaggtagcgccctcgcgcattgatggcgggcatcgccttggcacgtcatctaaagcccctcactgctgctctgctctgctcacctcttggcagcgagcgagcgtgtgcggcactgtgcgacatgcagtgcgcgccactgtggcgccgtgctcaaag

SEQ ID NO: 131285 - DNA, 730 bp, Zea Mays
agcgtgttcccggtgaccagagggttcttagcgcaattacgtgggtcggcaagcatcgtggagttatgaggaaactcaaacgagggagaggggaggttgaactgaccggaatggggctggccgcggtgagctgttccttgcggtggcggaaacttgatttggggagagtttgaaatttcagagctcgggtgaatgattacgggtgggagtgggtgctaaggcttcacgatgacatagcgcagctacccgggggctcaatttatagaaggagcgagcggtggccgggaattttacgaaggacgcgcgacggtcggaggtagaagaaggtactagcgcacgtgaatatgtggcatctaccgtggcagttactccgacgagccacgaagaggcacaagggttcacggcgatgcagtggaggggctgagccacgcggcgcaaggccgggaggcagttgtcgccggcgagcatatccaaaaccgtcgtggtgagtgcagtacggcgcccggaattgtttactgcccggagttatccacgacgacgatatttttgtgaccccgcagcgctatccactccatccgagcaccaatcgtggcgacgacggcacgaatcacggcggcaggtcaccggcggtgatgacagctgcgttggcgatctgatcctcctgatagcactgtaccatggagagttacattcagacagcctgacagtcaagtttggagcccaattttct

SEQ ID NO: 131286 - DNA, 303 bp, Zea Mays
gaaagaggcccggtaggcaacggcagtagcggttaacacaatcttggagcaggccttcatcgaggtcagagccagcgcgcggtggtctcctcggtccgcagtgtgtttggcctcgtctatacgaaaggttcgacactgcttccccttgacctttgaatatgaaatgcgtagatctgtgcaatggaatgatctgtgaaatggttgttccttgatcagtgaatatgaaatggctagatctgtcaaatgccttgttctatgaaaaaaatttgttccttgaatatgatgagtactacgatgccagcg

SEQ ID NO: 131287 - DNA, 439 bp, Zea Mays
cgccgcgcattgctccgtgtcgtgccttgtctgcgcgcatggacaagccaacagccgttcctggcgtcttgtggcctagcactccaccacgccctcactctctccctctgctctcgtctcactcttactcgccctcgctctcgtcgcttctttcacccgacgttgaccgccatggccgacgcgagctagctcgcgcccatgcctacactgaccaccgctatccacacaccaagttgcaattacttcgtcgtcaagtgtgcaaatctggagcctttgcttgagctcggagaaggccccgagcacctccgtcgacgccgtcgttccttggtccccgctggcgcgcgtagaccgagcacctccgtccacaaaccaccggacagagaacgccgtcgagttcgccttcgtcgaccgcacctgtccgccacctcgcctagccaac

SEQ ID NO: 131288 - DNA, 430 bp, Zea Mays
tcacttctaaatcttgttacaatgttttattttctggttccatcacctttgagccatggaagcggttatggaaattttgggccccccaaaatgcaaaaccttcctatgctggccataagaaataggtgttggacagctgacagattgcgaaagcgtggtatgccccaccaggttgtttgccccctttgagatcaagagtaggagacagttcaacatctcctaactacatgtgtttttgcacgtcagttctggcatggcattctagccccttttaacctaggacaccttattcctagtcctgtggaggcctcctttgtggagtggtggggaggagtgatcaatcagatccacaaagacaagaagagcttcaatagtgctatcatccttgtggcatggtgcctttggcttcataggaactgagtgatcttcc

SEQ ID NO: 131289 - DNA, 526 bp, Zea Mays
cccgccagacccacgctccgccgcgtccagcttcgattacgctgcgattcatggtgagttttacctcttggcgttcccggtacttagcgcattacaaagtacttagcggctcgatgtttgggtgctgggggaatctggcgtagttcgccggagctagcgtcgccgggtgtgtctctcggctggggaaggagaaccttgtgagccattggatccgggatggagggtggagattagatgggcaacaacggttcgattatggcgtgcgtggatcgctggatcgtgggccgacggccatgatcggatccctagtgtttaaaataggcaccgttggatcttgatccgacgacaggtggcgcgtaccggttcgtcgtagctggcttttaatctgaagcatccggttcctatcctgcggccagggatccaccataccctttcgtcatgggcgctttacacaagagaccctgcgaaatataagaatcaacccgccatcctcatctagggcgctctgtgtcttagggatgttttt

SEQ ID NO: 131290 - DNA, 404 bp, Zea Mays
aagaaggtgacactcccgaatcgagcaggccgggaacgacaccatgagcgtgaggagcaagctaaacggacgcaaaagcatagggaagcacaacgacaaaggaggcttctaagaaaagggcaaatgtttgggcgtaggaatgcagtaagcataaccgaccctgggcatctttctttttcatttacgcagacataagaaagccatacgatgcctataggtgccccccatggacaacacgggaggatccgtcatttcaagcctacggtcgtcttgagcattgagcgaaaaaacttttcatgttgcaggtaccacaccacctcgaacagagtgccagggggcacacgacaggggagtgccagtaacaggcgggatggttagaccaccttgtcacgccacctgcacac

SEQ ID NO: 131291 - DNA, 335 bp, Zea Mays
caaagatcgtagacgtttcttagtttatgtcaatgacaactttggggatcagcgaatctctaaactggaatattgtaccaaatgtgtttgatcgtcatgtgtgtttcttgcatttgattctgccaatttcctgtacaaatttgtgctgtcaacaacctcgaattatgcttgttttgtcccaagtttatgatatactgattgctggtgttatgcatgtttccccatacttttatgataatattatcaccattctatgcacatacattattctagttttgtctcaagtgtatgatacaattatcaccgttatatactggaaacatctcattttttgt

SEQ ID NO: 131292 - DNA, 534 bp, Zea Mays
aagttacatgatagtatttttactcgatattattcctttctcactaaaattgtgtgatcatatttttttacttgacactatagctttggctttggctttggctttggctttggctttggctttggctttggctttggcttcaaggattcgacagcggtctcaatactatttgtttttcttatcagctacagatatgtttagttatggttttatacacttaaacataagtgactggaatctatgaaaaaagttatgttctgtttctttgttagtcgaccatgatctatccacatgctttctgtggacttgattggtaagagtcttcatctttgcataggcctagcctaagacggtaccgtgaaatggtttactttgttagttctatgcatacagcccttggccccattatgaaagagttggttctctcattttcttgtacaatgaaaatgtattgtcaaaagcccttagcctcacgacattcatttatcctaaacaaggcactgaattttggggtgttgttcctgcgtgagttca

SEQ ID NO: 131293 - DNA, 435 bp, Zea Mays
gtgaatgcacacttgttggatggtgtaggcgatgttaggctgggagaaggtcaggtactagagagcgttgttgaggctccggtaggccattgtgtcggcgaccgaggggccatcatcctcagagatctttgcctaagtatcgatagacatggagcagggcctgcaatcatacatgacaggtcactctggatgtcaagagcgtattagctctgatggagaaagagatcctgaggccaccactcggtagtgatcctgaagaaatagtggagaggccctttgtccttcatcgtgaatgcgcgctaaagagtggcgaacgtgtgctaaagaagagtggcattggacattgtgagcacgatgttgtcaacatagagcagggggtagatgatgtcgtcgtcggcgtggagcagatggtagatggtgtcatcgccatgccga

SEQ ID NO: 131294 - DNA, 525 bp, Zea Mays
cgctggattccccatggacggtcccgatcacaaccctgaagcggtaaccggaatcgaatctccaacgtccatctgtgatcaacggcccacgcgcgtcttccccacccctatccgagccgggcggctctgtgcgcacacgacggcggcggcagaccgacaatcaccatctcggtgctccggtgaaccatcccacgtgccaactaacgcaacacaacgaggaactcattgtgaaagctatagggccaactcaccgtggtttagtgtagcatagaaccacgcccacggtgaagagcggcaccgcagcagcgaagagctccggtgagcaattcatgacgccctgatgatcaatctttcccaccgagccagtgaacaacgttactttccactctctatgctcctcggcccgaccatgcgcacagacaggcagtgagggcgagttcccagggcggcggcaatcctactgaccccactcgcggttctctgcgtcgtcggcgaagggggcccggctttctcacggtcccaatt

SEQ ID NO: 131295 - DNA, 400 bp, Zea Mays
gggactccaaaacggcagacaatgttttgccagaagaatttttgggcggtctttgatgttattgtggagactgccctaacctcaatccactttgtgaatattcaacggtgacgatggtgaacttgaggtttccttgatctgtgggtagtggtccaacgatgtccagccccagcgttgaagtggccatgtgtgggcgatgagcttggtgaattgcgaagggttacctgagcgaggagagaacttctggcaggtttcacatgaccttgtgactcgattggcagtgcaaattattgcgggccagtaaaatccctgatgaatcactttggctacgagggctctagttcctgagtgtgagccgcaggttccactgtggactttgaggaggagttctatgccttcg

SEQ ID NO: 131296 - DNA, 720 bp, Zea Mays
attttgcaaaaatgaaggggtacgctgatgataaggcagcagcaggatgtcctctcgaagacgacgaactcgtcgaatacatcattactgggttggaccgtgagtttactttgcttgtttctgcccttgttgcaagggtggagccaatctctgttgaagaattatattctcagatgctaagctatgaaacaagaatggatttaatccaagaaggagagcagtttggatctgctaacattgcaggacgttgggggcgttctcaaggaccaagccgtggacgtgggcgcgctcggccacctactcgcaaccacagcaacgctgcaggtgggagcaactcctctacccgtagccacaatagtgtgccaggcggacatgacagcagcgcaggaacagggagacaacgtggctacagtaaccgacgctccaacccaagcagtgaaccatgccaagtttgcttcaagaaaggacacacggctgtcaactgttggcatcgatgtgatgaaaattacatccctgaagaacgccatgctgctgctgcgacaagctcttacacaatagacacaaactggtatactgacagcggagctactgatcatattaccagtgagctagagaaactgtccatccgagataaatacaacggggaagatcagatccacaccgccaacgacaaaggtatgaaaatcagccacattggtgattcctctgttagcacctcta

SEQ ID NO: 131297 - DNA, 722 bp, Zea Mays
cttaatctaacccataccataagatggcctcgggaccaaactttttgacatatcaaaacaccagatttacctcagtgttggcccttgagacaaaccgaccttggggatgtgacaactccttatccctgccaagaaacgcttgggtctccacacctatgagcatttgaaagggataaaacgggttgtcgccacgtgtttggccagggctagcgtccagagcgtggtcgaacacgcgcccgcgctcgcccccacgcactgtcggcatagccatgcccgctcacaccccgcacctataaagtcgacccggaccctcggtctcactctccgcactctctcgaactgtgcccgagccttgcccgctagtgaccgcctaagcacagtgagctccaccacctaccatttgtcctcgagtagtggccactgtggttcgcccactccagcccctctccacccgatcgagccccaccattggcttccccagaggccagtcaaactcctcgaagctagaacccgaactctacctcgccggaacagcgcaaccaccctcgtcagcgcacgtggccaaaaccatcaagtgaactaatgttcgattaattctgtacatagcatctgtaacacctagtgaagctccatttaattgaatgctaccatcgtgtataggacagagcagacgctgacgacgaccaccaccgcttgcgctcgtggctagagcgattacaaaa

SEQ ID NO: 131298 - DNA, 478 bp, Zea Mays
ccactgcttcaccaagttcttgtacagctgtgatagccattggctcggcttgggtcgagtcagatgattccctagccagtaaactaagcacaacatctatctccgtgtcgtcagtgctagctggcatctcaaaataagtctgtctctcatcctctgggagactccgaagtgggtcaataagatcctcaatgtcctcaggagagggtcgcactctaagacctaggctaccatcgctagcaggagggttggacacaaactcagaaaatggcctgattggtggcaggttccaagcagaataggccacaagagcaccagcatttgaaactctgcccctcaggatcatgtccagtcggctcatcagatcttcagtggggattctcatgttcgtaacccgggtagaatcgttgacgccactgtacaaataagcagggtacgccctgtccttcaagggttggatgttcttgaaaatgaaatcagc

SEQ ID NO: 131299 - DNA, 283 bp, Zea Mays
gctaaccaggcaaaacacctctcgcctgagcaggtggaatgtcgacgcctcaacctctgctacaactgctatgaaccctatgctcggggccacaaccgagtttgtcgccgaatttttacatcgatggcgtcgaactcggtgccgccgcgccaacagatgacggggctgatcacaacgcaccggtgttctccctcagggccgttgctggtatgccgaattgtgacacgatgcaggtgcacgtgactgtgggcgccgcgaccttcacgaccctcttagacatcgg

SEQ ID NO: 131300 - DNA, 406 bp, Zea Mays
cggccggtcccccctcccctcatcacctgtgcttccgcgaaacaacgctccgaattcaacagagcctagattaagtgacacaaccctaaactttcatatgactactatatagcatgtgttacacacgatcccgaggagatgaacgatgatggtggtggcgcaaatgaggagaaggggaagggaagggatgagggatgattcaaataaagtagtttatggggaagggagatgagttatccaactatctggaccgttgattttgatagtgtgttaagtttgagtacaatatgtttggtgaatttagtgggataatgagtatggggtgacttggttgtgtgacttttgcaaagtttaaactgatggattatatagtggtaagagcataactcttttcgattatataaat

SEQ ID NO: 131301 - DNA, 489 bp, Zea Mays
ggggaatgttagcttgtccaatgctacatatgctcatgggccggagcaagtacgcaggggcgcggaaccgaagacaagccgtagagttcggaggcccaactccttatacacaggctcagagtgggttgtgtgacggcagtgggccggtgtaagctgtgtcgttgtgtcgccatatggttggtcgatgtatatgagacagggggaaaacattgcagcaactaagaacacgcaggtttcctccgtatctcctccgcatctcccttcttctctaccaactcttccaatcagcatagctgtggtgctgacaattggtatcagactaccgatcttgggtctggcggagtccgggtacttcacacggcgggcaaaaatggcggacgcagcagatccgggcatcgcaacggctttggcggcgcaatccaaacaaatcgactcccaatcgaagaatatcgctgcacaatccaagatcctgcaacaactctgcgagcg

SEQ ID NO: 131302 - DNA, 437 bp, Zea Mays
tgcccggcgagtccggtctccgtcggctgtgaagttggccacactcaaagacacgaacgggaggtcatcgtaggggttgggaggcggtgacgggaggggggcgatcaccacctgtgcgtcatggacattgcccggcgagtccggtctccgtcggctgtgaagttggccacccccaaagacacgaacgggaggtcatcgtcggggttgggaggcggtgacgggaacatggcggcgaggagactgaagagctgttgcttcttgctgtagccttgcgacgagggagcaccggcggctgcagcaagcgacggcgggaaagacacacgcaaggtgctcgatgtaatgcctctgtacagtaaacgtgaaggagataaatgactggtaaccactttggcatttcctatccttgcaaaactattaattaattcatgatgcaggag

SEQ ID NO: 131303 - DNA, 350 bp, Zea Mays
gggcacgacatccgcaactgcacgccatgggagagaaagaaggtgcgagacgtggagttatcaatctctcgaccattatcgcgctgaatagcctggatggtgcgaccgaactgagtcaacacccacacaaagaagtgagaaagactgttgaaggtatcaggcttacgtcggagaagaaaggtccacaagtagtgagagaagtcatccaggatgaccagatagtacaaaaaccggagttgcttggaataggggatgtccaaaggtgacggtggatgcggttgaaggggcgagtagcgtggaacatggaagaagaaaatggtaagtccgtgtgaggtccatgctggcaggcg

SEQ ID NO: 131304 - DNA, 383 bp, Zea Mays
gatttctgcgcctttgctggtgcacggggggccacgtcgatcttagagaaagctggctgcgaacatgccaaggctgtagttcagccagaatttgttttttcagtggatgacattaaaaaccgtcggccgaagcttctgcgctaggcgggaaattttactccgaggtgtggatgaagggcagccatgcgatagctgatgaagctattagaaagagtgaaaaagaatctcacgatgctcaagaagaagccaaacgagctgaagaagctgccaagcgtgcaaggcttataggtaccctttctaaggtttagcttcggaattcgtttttagcttcagaattaacaaacattttttatgatgtagctaaactttcacccccactggag

SEQ ID NO: 131305 - DNA, 358 bp, Zea Mays
taagagagaataagacatttcaatgtttctctatgcctcccttttaatatcacaaggtacaagagagttatatccctacatggacaacaatccctacctaccataggtccaactagtcctatcttattatagttgttgtaccgtacaaagagggtgcctctcgtgtgccatagtggcgagtgtgacatgtcacagtggaaggtatgattgcccatgccaacaagtatgatatagttagtagcttatgaaggcacatatattgcatagtgcttgcggatacacctacgaccttaggtgtggctacaatgatgactttgatcacaacattgctcttcgtgataaatgtgatggatggact

SEQ ID NO: 131306 - DNA, 455 bp, Zea Mays
ccgaagttgacgatctaaagaaaaaacttgccgaagtgaatgaaaattttgaagttgcgaaggcaaagcaagagataagtgaatggacaagttcaaggctagaaaagaatgttgaagagtttcgtgattccagggaaaggtgttatgaaaaatccttggactacgcgaagaaactaaaagatagctttgcgaaggtaggggcgtattcctcagaacaaaaatttattcgcggcgaccccgaagtggttatccaatggataggtgaagaagacgaagctttcgatgagatccttagcgatcgtggagatttttgtgctttttctggtgcccgagggattgcggcaatcgtagaaaaggctaggtgtgaacatgtcaaggtcgtggcccagccagaatctattctctctgctgacaatactaaggacccttcggttgaggcttctaccctgggcggt

SEQ ID NO: 131307 - DNA, 1029 bp, Zea Mays
ggccgcagtgaccgtggaccatgcggacagatgcacgcgttcccggcgattggtgacggtctagttcaatcgggtgggtcgacgagcatcacgagttcatgagagtactcaaacgagagagcatagaggatcagctgacctgtatcgcgctggccacggcgaggtcgttttcacggtggcggaaacccggtttggggaaaattcgaaattggagctccctagtgaacgattgagggtgattcttggtggctgggtacttgactaccctacggagctcacggtggtatcaatttatactgatcgatcgcgagcacagcgaattcgagcggcggattgtgatcgatatgaactgggtgagtcactggtggccgcgcaacgcagcttttaccgtggcggcacctccggcggtcatcggacatgcgtagcatgattagccgcgatgtggtaaagcgtttggacacacggcggacgacagtgatggctcaacggcggtgagaatctatccgagtgatcgatgagcaaggggggggggtacggcggctagccggaatagtttactagccgggcttatccatggcggcgtgactccgagcgtcatttgatcaacccgagcacgaatcgagacggcgacggcatgaatcgcagcggagatcgtcggaggcgagctaagctggtgaccttatctatttcagaccactgtaccatggcgaagcccattcagtgcacctgacagtcaaagtttagggccaaatttctctcaaatttctatggcaactcgtccaaagttctgcagcaaagttgtagaccaataattcaggtacaatcttgccataacaactatagccaaattcctactaaatcatgtttgaatttgtgcccaaagatcctgcagttgcactgtcagtctgaaattcaaacttcaacagcctgacatcccatttttgagtgcatttttctccaatttcttcataacaaccatgcttacactcttaagcaaagttattctccttccatagagctacaaagttg

SEQ ID NO: 131308 - DNA, 343 bp, Zea Mays
aagacacagagcacagttcttgtggatcgcgggttgtttttcactttctgcgagggctcttaagtaaaatatccaggccgaaggggtatgtttcgaccagagccggacgatcctacatctacggccaggattagatctctgccattatacactagcgtgcgattacaaccgtcggatgcccgatcaacaaactggattaaaatgaccgaggcgcacgaacacccgtccgatccccatccgatggttctgattaactccgtgaagcggtacgcttacgacctaatcgctgcggtcgctgggagatccaacggcccgaggtcacctgtcgtcaactcgaccgagc

SEQ ID NO: 131309 - DNA, 512 bp, Zea Mays
taattttttttcccggtccacgcgcgctcaaagacgcgatttggctgggatcgccttggcagggcatgggcatgcgcaatagacaaagattaactagcgcagcctcttgatccggacgacgacgaattttccttggatttggcaaaggtttgcgggggaaaatattccgatggatttgacactgccctgctcgccattcctcttgggattcgttgcggcgctgtaggtgggtacactactattaggtctttgttctccggaccagctgttgtggtagccactttgtttatccactattcaaaatccatcatgccagcctactagcatgaatgactcgtgtgtgtgtgtgtgttttaaaaaaaaaacagctcgtagctagattcgcatggatttggattcctgcttttaacaacgaaatacgattatgttactgcagctttcaatctgcttaccatactattgcaatctctctctcttttgttcgataattacaaacaaaaaaacaacaacaa

SEQ ID NO: 131310 - DNA, 325 bp, Zea Mays
atagttatggtgaggttgcatggaaagagaacatgaaatagtgatggtcagaagctaaatgaggcctgccttttctatcatcagcatttcaaaatgacaatcacagtaaatcaaaatagaaattatatttcttccattcaactttacaattaaggctctagaaaacagatactaaacaaagagagagattcaactgattatatgtgaatgcaaggaaacacatttggcaaagacttctcacaaagtaaactggaatcaataaaataaacaagtgaaatgattttgaaattagtgatgaaaggagatgatattattataacaaacc

SEQ ID NO: 131311 - DNA, 1186 bp, Zea Mays
tggcgaaccacataaaagtcttcccaagtagcagattctgttggcacatttctccattgtatcaccacctgagtaacaacaactcggctccctttttccactagtcagcagtccaatactactactggtaccactcctttatccaaatcagcaagtctaggcaattctgagaacatcagtgtatgatttggtgtaaatgccttcaactgagagacatggaacactgatgctcgtgagctattgatggcaattccagcttataagccacagcacccactggttcaaaaaatattgaatgccaattttggatagggtcaactgacgggtgacgcaatcctaaggctacatattaagatgcgatgtttggccacatcaataaaaatttgtaaagcacaacaagttggtaacattgagctacaattagccattgtttaggtcatccttctctgcttagaaaaagcgcaagagcggagacaactctctgagattgaacttcacttgctccgctccttgaaggctaaatctttggggctagctgccatgcagaaatcaagagcgaaacaacattcaagattgaaatggatcaaacaaggtgatgcaaatactaaattcttccatctgcatgctaatattcgacgtaatcagcatttcataaaagagctacaatcagaaacaggcattatcatgacacaacaggacaaggaggaagcaatatttaacttctacaattccatcttaggggttcccccagccagaaattcctccttggattggacagttttaggatatgagcaaaccgacctttcagacctcgaagctcctttttcagaaaacgaaattaagaggattattcatctcatgccttcgcaacgcgctccgggcccagacggtttcattgggctggtttataagaaatgctgggacattgtacgaagcgatctgtccgaggtgctttgtgggttttacaatttacgcactaacaagctgcacctagcgaacgaggccaatattgtgctcctcccaaaaaaagagaatgctttgcaccttacggactttcgaccgatcagcttgatcaatagcctagcaaaaataatcacaaaggtactggctgagagattggctccaaaactgggacaactagtatctcgctcacaaaatgcctttatcaagggaaggtgcattcatg

SEQ ID NO: 131312 - DNA, 468 bp, Zea Mays
ggggtctaaatgaccggttgcagcgaaagatggccacatgtatagatctcacgtatggaaaggctgtcagtacagccttatctgttgaagcaaaatacgcaagttctgggaaaaacaagggattcagtggtgagaggcctaatcagggccaggcgaagaggcaacggtttgtcatccggccttctagccaaaatcgcaccttttctcgtccacctgcattccctttcaaacaaccaatcattattcgccccagcaatacccccactcccccaaatcagccgggtgccccaggcactcgattccctgccttgcccagctcttcaactgggtgtttcaattgcggcaagtcgggacatttcatcgaagactgcccatatcccaagcaaactcaatcaaatgctcagcaaggatctgggaagtcaactccgcccaagggaaatactgtggggaggaatacaaggaagacgg

SEQ ID NO: 131313 - DNA, 2600 bp, Zea Mays
atcaacaatgactgcgtttactgttcaaatttattttttaatgtagcttttgcttgtcctgattaacttgaaattgcaattttggactgtgtgcattgtatgtggctggtgcagtggtgagagctgtttcactaagtcatcaggttacgggttcgaaacagtcaatctgcatttgtgggagaaggttcgccccagtttattccttccctagaccttacttatgtggaagcctccgtcattgcatctgccattttttattgtatttggctttatgcattgactgttgcactgttgtaccatgccatcaaatttatctttgagagcattaccttaggaaaaactaaagaagagcaattttgtggaaaataagatgatgcattgatacctggaactccttgatatttcattgttttgtcatttctattttgttgtgggctattttatcttttctgttgggctcattctatctgtggtagagatgctgtcagcagttaagacaaaaaatgtaccaaggattggactgctttgagcaatacaacacagatcctccaaatggaagtagccaaagttgtttgtttatttgccattgctattgatagaacttacagtgcaaaacaaacgacaattgattggagttgtatgaattgattgtgacttttatggcatatttctgcattatcctgacttgttaaagttctaggttggatacttggaatttatgcagccttcgtgcaaaacaatgtatcagtatataggattatgtagttactgatctttggcaagggcttgaagttagatgtcttaatgactagagctaccttgattttttttcctgaaagacctgccttgatgattttttttgcagctttgcttctagatttgctgtattttagctttgtttctagattttctgtatccagaaaaaaatggtgtagtatcaaattatcaaaatttacacttatgttatgtgatgattgattgggacacctttaagaaatttatgagatcaaaataagcaagatattcaaggtcatttttaattagtcaataaatagttatgatgttacaagcctactcttcatatcttcaggtacattctcaaaccatccttgctccctgtcaggaataaaaagatggattgctatttattatttctttaatgttcctctagagaattggttgaaaatgacgtgtacattgggaaactttgtcatgcaccatatagcactttgcacggtccattagctcacgattcaaatacatgaatgggatccaattgcttgttggttagggaatcttgaggggttgtcggaattggtgttagcacttggcaaaataatggtgcagagttgggtttgcgttgcgtgtggtgctggtttacgctgcctagttcaaaataacaaacatgactagtccatttggtgcatgctgagcgagccatgctgaacctggttgatccctggaagctgctggggcgtcgtatgactgacgatcaggggttgctttaaagcacaggtagacttcaagttctgtttcccgcaagttgccattgcggtcctgaaatgaaaaaaccaggtgtgggaatgcggaactgtccatctacaaaatcagtggcagggatcctctcattataaagttatctatagagagcaaggacaagaaagaaaatagatatcttggctattcttttgtccagctgggcaatcgacaaggtgatgaacgcagcagttggacagaatgagtaaggctcgctgtattcattatgctttgatatactgtaagcagatctttggtaacttggtcaagttctatgttatcgtttttcaggtgtagttcaaaatcttcgttgtggagtagcttcacaaataatggagttggaatacggaaggtgtttggcttggagattagctcgagctctaggaatacaattcaagagggttttgtgggaattatctagtgtgctctgcttttgtatgtacgccattttgatgcacctaagcatttatgcatttgtaaatgataagtgctcctttggatagcaggaactttggagtatttgaatcattagaattattttttttcataaggaattcttctgggttgccattcttaaccccaattccatagagagatcaaacatgagcttgaacctcaaatttagagaagtcagctacattttcccctttttattggtctactctcttacaaattacaatgcaccatccctccaaatcttttgtgttgttttcctcagaccattcagtcgcatcatctctacatactgcatgcccctgttctgaaatttcctgtgccatttaacaatatgccgcgtttatttctactctttatttatccttgacaaatagtagaagtaactttatgatgacaaactaggtaacaagaactgaaaaagaccactggcatgcatgtttgattcgttgcctcacttgccactacatctaaggttaagtaagtttgattgagttagatatatgtttagtttgtaactacagttgtgacaatattttttctcatgatgtatagatactactcgtcaatgacaagtgtggcaaggttttttaggcatgccaaaatgtgac

SEQ ID NO: 131314 - DNA, 545 bp, Zea Mays
cgacgacaagaagggtaaatgggccgacctgttacctgaagcagtctgggcgctgaacacgaccgagtgccaggcgactgggttcactcctttccgccagctatatggatcggaggccatgaccccgcaggaaatcaaatatgggtcaccgcggacaagcacttcagccatccccgacgtagacgaaccaacttcgaaggacctcatcgacggagaccgtgtctttgccctgcaggccatcaacaaataccaagctcaaacaaaagcatagcgcgaccacacagctgtcccgagagaattcaatgaaggggacctcgtactcgtccggacaactcggacagagtcacggggcaagctggagccaaagtgggagggtcccttcatcatcaagacgaaggcgtcctccagcgcgtacaggttaacaatgccatccagcgaagacttagagcattcctggaatattgataatctctgtaaattttttgtttgattcctcagggctaacatgcccttgtaacccaccaaacagtattattccggcccgc

SEQ ID NO: 131315 - DNA, 495 bp, Zea Mays
tcgcgcccgaggccaggcatttcttctctgttctctggtttctgtctactctctagcggtttgccacccctctccaatgatcttctcaccgacggctgccctccggcgacctcacctcggtgctcacttcctctcccctctggtgagtaggtctggctccctctcctctctctctctctgttcaaatgaccagtgagcacccctcttcccaccctttgtgccctattcaaattcttgtcaattccagtgaatccaagtggtggaatgtgttcttttgtgtcccctgaatatccatgcaggtttctagctccctttgggagggtttcaatcctcaaatggccatatctccaaaaacctaactcaccgcataccacgtgttcggtgaaatgtccaaaccagccaaaaaatgctccgattgaacccaaatttttcaggcaccttcacaacacctccagtaacatattcgccaaatttcacgcctatccaatataccag

SEQ ID NO: 131316 - DNA, 337 bp, Zea Mays
gagattttgaataagataatgaatgagatatgagagctgtttaggccaaattgcgacaggcatccacgccgctgagagggcagatcgaagcgtccttgatgacttccaaggatccatctagtttagaccaaattgcatcgaaacgaaatcttggtcgaggccaaggtctcccgaaactgttgtgctagcgactcgtcaggagtgacctccaccatgtctttagctttcgggttccacttcttgagtaggacctgcctccggctgtcacgaccgtgcgactttgctgcaagcttgcctgccatgccactccttcctttggacgaagacgcacgctgtc

SEQ ID NO: 131317 - DNA, 721 bp, Zea Mays
ccctacatctctttgctgtgtttggctggctctggctgttaggaaagctgccaaagactggttatatgatatctgcatgtggtaattactgaacttggtgcgaatggtaaaattattaatttattttttgggtggggcgggaggtggagtgggtgagggtatagatattattatgagggggaagggggaatacatcaatttattgctcattgacttgggaaatgcacaaaactatgtgcaaatcactatgatctgaatggttgtttgtggcataggcagctgtgtttcagtttatttgagttgattgaaatgaagtcagttattctccccgagtttattcacttctgatactgtcattttaagacttaatggaaacacccacgtttgtattgttgcattcattctattacattggtggggacgaactagtacttaccagataggctgatacctcacttgggtaagttatgtgttataagttgtcatgatcatttcagatgtagggtgatgcatggtaggtctcaatcagatagaaacattggctttcactttagttatatgtttaagctgcttggtttctgcctcaaattggctttgccattttgtgttatactgactctgatgtgtatgaggccttcgtcagtatggcatcgctatagtatttcactcatatatttacaagaaatcaattgaagaaatttagtccagcaaattggatggc

SEQ ID NO: 131318 - DNA, 718 bp, Zea Mays
tcgtgcatctctgtccatatcagattattaaaaagatttcatgaagttcggaattcactaatctcatatgatggcgagtttgagacgttcggattacgcgtctaagtgaatatgaaaaatcggaaaacgactgattttctgtaaaattgggaccccgcccgttgtccgagaaaaaccatgcaccgattccttaatcgaattgttatctagtcgaatgtttggatggcggcaaaattcatatatgtttgactaaaccaaatgtcgcttaaaatatcaaagccgatgtaatttggttcgatctatttgtttcttgccctgatctgagtgttcggtctgcaaataaaatttatctgatttcaaccggatcaagtgcagtctcaaatatcaaggctgatgtgattttgttcggttcgtttgcatctcgttttgatctaaatcttagaacacggatgtatacagatttttgcataaatagaaaagccaaagagaaataaaaaaagagaggaaatgtggaaaaatatctccttggcattattcccacgatccatcctcttccttatcctttaccagccgccgtcgtttcccatcgcgccccaaccctggtggtcgtgcctcccctggccctcgacgcccagtactccaccttgctgcgcgtcttcctcctgcgcaatctcaagctgatggatcaagtctctagcaagatgcaaccgagtctcaa

SEQ ID NO: 131319 - DNA, 1008 bp, Zea Mays
cccgagactcagagttatacagtgatggactgcgggttgatactctattcttctagggtctcgtttagaaaacgcaaacagcgaaggggtattgcgcgatcagggccgttggatcatcaatcaagcgcccagattagatcaccctgatctgaaacggtacgcatttgtggccccagatcccgagttcatggcccggatttaattaacccaagtctagtccctaccgtggatccgattatcaacgttcgagagccgggcctcccccatcgggtatggccaactaaatctacaccacccatcctttgatctatggacacgaaggtcccggcctaaacgttctccctatttcaaatctgcaccacacatttgaagatccacggtcatctctctttcccccaactccgatacagtgacggcaacgcaaatgccgccgcggcggggcttcgccgacaagccacccacgggacacgcacatgtccccatcctcaaattggatcacagaaacacgaagaggagatggtagcgaacatacgaaagggagaattaccagaaatcatgcacgcagaggttgccgaccccggcacttggcggtcagacggcggcgctggattcacggcgagcgattgccatcgaccgctaaccctcagagaccaattagcagtgcgtgcgcgatcaacacggggtggagatccccccagaccttccacaaacgccgggcgacaatgagctcgaaaggaagccccagaggtctgattcccaatggttagggcggacgacggtccggctggcgtcgcggcggcaagggccgacgagggtagtcccagctttataccccgatgccatccaaccatgtagcgagcgcaccaggtcaacaaaacgcgtggtttgcgtgagaatctattgcgcttaaggccagtcgccgcaatcccggggagagacatatgaccgagcggtcccacaaccagaggaagagcctcacgtgaggttacagcgaccgccaagtggacc

SEQ ID NO: 131320 - DNA, 438 bp, Zea Mays
actcggcataagatagactcttgtcccaactactaccatgctgaagggcacaagctctcaacatgccttccaatacttgattagtcctttcaatctgtccattagtctgagaatggtaggccgaactaaaattcaacttcgtattcatattctcatgaaaacttttccaaaatctaaaggtaactgtgatcctctatccgaaacgatcttcttcggtacaccatgtagagacacaatccgagccatatatcactctaccaattgagatcccttataagtaatcttgaccggaataaaataagccactttggtcaatctatccataataacccatatagaatcatatcctttcgaggtgcgaggcaatccagtaatgaaatccatgccaatctcttcccacttccattcgggtatctttaatgggtacagtagtccaac

SEQ ID NO: 131321 - DNA, 569 bp, Zea Mays
gatagaaatatgcgtctatgtgacgactttgcaaccttggatgctgttacgcacttgttgtgctagtctagctgcacccttaggcaacttttgctcggatagaaatgtgcgtctctaagtcgacttcgcacccttggatgttgttacacacttgttgtgctgatccagctgcacccttaggcgacttttgcttggatagtgtctgtcgcacgcaacgactgttgaaacaggtcgttgcggtgactattttggcgtcgaatgccgaagaccgacttcgcggtctttttgagatccttctatcatggtgtccttttttgtgggggggatttttgtggtgatatattacaagacgccgcctcattaaaaacctcaccccctatgaggaaaaaagtgcgggcccaacaggaataatgtctgtaggtgttacaaaggtgcgaaggccttggaatttgttgtatcatatacaaaactttctcagcttgtctatattccatgaatgctcgaggtcttcgccgaattgtgtggtgagcctgtagctatttggtgatgttttcttcttgatgatgaag

SEQ ID NO: 131322 - DNA, 333 bp, Zea Mays
cgaacatagaggagaaggggaacaactgctcgggtattataggcgctgggtagaggagggttacagaacccagcttgcgtgaaggtcggggaagaagatccacatggctgcggtcgcaggcccaccagtcagcggggaaacggaatagcaggcgcgtgcgagaggcagacccgggggatttgttgaaaccgcatcggccgggagcgagattcacggtgaaggaatcggctgcgctccgttgttcgggatggagctgaccataggggcccacacggaagtggccagcgcaagggagaggcggtatcatgggtcccacattatagtggcgagcgc

SEQ ID NO: 131323 - DNA, 497 bp, Zea Mays
gggaaaagaaggcaccgatcgcataccctcatccttgcagtagaagaaatcgttggcgagaagcgtgatctcctccctacgctcctcgcactcgttacaggcaatcaaactgttcaggtcaatgtacaggaaggtggcctttagttggagatccctcctgaccagatcccacaagtcaccatccacatcagtcaagtgtcgagctcttgatccgacagacacatccattgacccattggtgctcctggcagcctcctctgtagctctgctataacttcttgcggtcgcagatgacaaaggatcagaaccaatgatttgggtgtattttatggaaaggcaaaacgagaaactgaatcttggaggatgtctagaagcaaacagatgtcagcatgtgcattagaggaggtccctgtatagtgcagcaaggggcaaagtggttagtgcagaagattacaagattaattaatgttgctggctgtttttaggttttgcatatg

SEQ ID NO: 131324 - DNA, 313 bp, Zea Mays
ctggcgagccgtcgtaacggctgcccgggtggcggcgaggatggcggcagcgtcatccgaaggagcgcacagggatgaggtgatggcggagggctggctgtaggcggtcatcggtgaagtgcagtcacgcacgggagccccaaccattgtgccgagcgggacatggggaaaacccggcgccaacagctgagagcgaagcaaggcggcatccggcagggagaaggcgatggaagggaagccgagggagaggatggtggcggtcagagcaggggctgcaccgtgagtggcggcgttgccgatgtactggtgggag

SEQ ID NO: 131325 - DNA, 501 bp, Zea Mays
gtggaggtagttcccaatcaccccttcaagcgtaacccctcggtcacggagaatcgaaacgactgtaataggtccagtcgtcctcttctctcattcctttgggacaccccacatccagctctgaggagcctcagggggtgctttgggcaaaaatggtggaaggctgcgaccggtggcaaggacccgtagccgtagatgtataggtagaactactggatgtgtcgacccttattggacgagcacaatcataactggacgtaccccttgggttgagcccctcagagatgatagccgcgcaaccgatctatgccgctttcgttggggtgtccgtcaccagtcgtatacaaaacaatttagccgagaaaaaaatggcaccaggggcaaaagtggggggcatcttgcggtattcctcgcacaaagccacaaaagcggtcatatgttgaactccattagggttgaggtggtgtagtcggatcttgtaatagtgaagaagccccacca

SEQ ID NO: 131326 - DNA, 473 bp, Zea Mays
atccagtggcgggggcaggcagacagcgtgcgatcgagcactgtacttggcttcgctgaagccgggcgatgaatggaacgtgagcaggcgacagggacaggacaggagtagcccggtaaacggcagcgccattatatagccgggcacggtaaatttcctgacgcgcgggcccggccatccgagccagccattggaagatggccacgtggctgtctcgcgggtgtcgtgtctgaggctgagtgaggggcttgagacgagggttaatccgtcgtcactggttaataaggtaggttggtaatgttacagcacaagggcaacccctgtctacgtttcagcgattttggctccttccctctacaaaatattctgacacgttattattaacaaatgctggttaacgctgtgtctgcactgctgtagtcgtaacgttcgccagctttgcccgtgccacgcgagaagcaggataagtgacc

SEQ ID NO: 131327 - DNA, 1391 bp, Zea Mays
atccgttattaatgttagaaggttttgtttttctcgaaagtgcagaagatttatgcataaaagagtctaacaaaactcatcataataggtttcaaatgaaaactagaacttacatttatttttccatttgccgcacttgaatttatttgcatttgtccacctgtcccacttgcaagtgcctctagtactcttatccttgatttatatttctcttcacgtgctctgataaggctattttgctgccatacaagtaagagttacaacaagaataatttgaaaaataagtataaaatagcattccttacatttcttatgtgttctgcttgagtagaaatgcggcgttcaatctccattattacctttctcaacaagcaagcgatattctgtgcaaagaatgctatctttttatccaaggggatgaaagaagtataaaacaaaaatgtaccaaagttctcatgtatgaaaagaaacaactaactgtattgcttttgagtagcctacataaggaatttctccattctcattttcaatgatccgatcaaggatggcattcacaaaactcaaaagtgactgagtaggggcattctgtaaaattggttccacatgatgcaaagaataaaaagatcagaatttgggctgacattatctcacgcacatttcagaaagaatcactatattccacttacatccaagttggtggatttcattatctccaaaactttagaaataggcatgtcagagtaaattccttgtctcagatggaagacttcatgaaaattatgtcgagtgtgccttgaaatagaagatagttcaggcattgatatcggagatgatggctctacaataggaaaagatgttttaactgataagctaacctccttcacatcataaccttcgtaactacagttttcactgataaatatgatttgtttgacatttcatattgcaaaacaaatagaatagctatgctctgctctctctgtttccctctgtgttactgctgaaagcttgacatgtactgtaaaaacttcttctcacctgacgtagctggacttctggagacctttggtatgctcccttcacccttttctctagactgacaattttgagtacagcagccgttcacccttatgggaaactccatgttgtgcatcctactttttgcttcaaggctacaatgcaagccttccccaacattggaaccaaacagacccctcagtgcaagaagacagactatgacagctaacattgggccctggatcaatgccagccaaataagatcaggtagataattttttctattgtagaaagagctgcagacaccaggaatgttccacggtagtattgcataagtgacaattattgtcagaacatcaacacctccatactac

SEQ ID NO: 131328 - DNA, 405 bp, Zea Mays
gcgggaccgtaagaacaaccaggcgccacaaatttcctgttggagtggatcctccgccgtgggaccgctatggcgtgtggacggatacagccatcccaaatcaaggtatggtagtcactatcgtgtttgcctcctgttcagctgcgcgtagaacatatcggcttgggcaaaagtgcactggtgcgcggtcaattgctcgccggggtgttgggcgtcgcctcggagccacctgtaccgtgggcagcctgctctgctgcgtggcgaccggtagggagccacccattgtgttcttcatagcctcctcgtggaattgcactggttcaatgtctcggttggacaccatggtgcccagccccgacgggctcgctggagtaatcgggcggcgccgccttgggtcttagcgtg

SEQ ID NO: 131329 - DNA, 532 bp, Zea Mays
caactagacaccaaatgatttttttgacacaacaagtgcacaaggagacttgggttggtctagcagtcaagttgtggtggtctataagttgtgcaagtgtaaattcaagggtaaaacactcaagggtcagaaaataccaacataagcataaatatattttttttgaggtttcactcgctaaactcaaggttgttaaagtggggggtgtctttttatgaggaaacaaacaacacatttttttttgcaaaaagggttgaacaatttcaataccacctagatagcaaggcaagagaaacacataacacaacctaacaagacttaccaatctaacacgaggtaaggcatttctaacatagcagtacattacattattcacaagttcttattattggaataaaggtgagagaagcatgttggtgcacaagagacaatgatgcgacaatcatgatgcatgctcattctagtcgtcttctcagacctaactattttttcgggtgcttctacagcatccttcctaataatagtagtagcc

SEQ ID NO: 131330 - DNA, 555 bp, Zea Mays
atgggatacagggaggccaccactcatatccagctttggctccttggtgccctggtatcccactctgagtttgatgttgttgactttctgatctgtgagattgaggacactgttctggatgggattcgtgctcgacgacagctgccctatgctcactacttgtgccacatttttgcgcagctgatccagccacctcgttttcagagttcccttgaggcctcacgccttgtgtttggatcttaccgtcctgctcctgagattccagtgccagcttatgctcctgtgtatgacactcaggccgaggatgcagcacttcgacagtttgacacccagggtacagcagctgatgatgatgatgatgatgattttgggattcctcctccgcctccgcctcctatgcctccacgctcccatgatcatgaggctgggagttctcgtgctgctcctgctcctcctccggctatggaccctgctcttgcggcgattctggccaacctggcagccgagcaggcccggttatccgagacgatgctctcaatgtttcagagcatgcag

SEQ ID NO: 131331 - DNA, 630 bp, Zea Mays
attagcacataatccaattgactaattgtgggaaacttacctctttgccatagtttctccaagatttgcaatatggccaaaaccaagtccaaatgcactttttgctacacaaagaattagaggacaaaaggaagtgctagaaacattgaaatggacatatgcaacatgtctaagggtgcaaacctaataaatataccatttctccaagttgcatatttgggcccctatttgagctcttttggacttgatctcttcaaattgccttttatgaacctatgctcacactcacattaagatagttagtccaatgtggtgtgttggatacttaatcaccaaaacaggtagaaaatgctatctagcacatttccctttcaatcactttttgtctcttctttttactaagctcaactcaacacaagtgctctaacagctctttcataatctcaatctattgtaaggtgtctatgctaagcacactatgattttagagcacttggatggcttagatgctaaagagatgatcctctaacatgtatgcaatgtttcttagctcatggatagagttgtgcccgattggaggggtatatataggctccccactccaaaatagccattagaggctcaactcag

SEQ ID NO: 131332 - DNA, 866 bp, Zea Mays
tgtctggcatgcctcaatctcgcccctataggtatcactcggacccccaccgtcgattccaagcgctggcgccctctccccaaacatcgctgcctctgtccgtgctcgctgccgacctgccatagcctgtggccagggggccctggtgtccctccgtccgtgccaaggctgccatcgtgtttccgggagcttgctgctgcttcttcggtcttctccaagctctcccagcactctatcgagcccagccgcgtcacccgaccccgctagagttcctcacactgccactgctcgttgccgaccctctccgctacctcgagcacctcagtgaggttccgatcatgttcgccttcactctagctccctcctgagcgattctcccagcatgttaggccccgaagcgccgttctggccaactctggtgagcccaccggccatgcaccgccacgcgctgtgcgtccccctcgttgcgtcccttcaccatggctcaccgcccacggagcagcgcacgcgtaccaagccacccgatctagtccgttggatcaagatcaaccaattaacgttagtcaagccgagccgctcgcctgttttaaatcgtagcgcttagatcttgatcggacggtcaccactggccaatacccttttgcttgagccacgccattaaatttgtaaaagagcccttgagttattatctttatacccgtcatttctcataattcgaagatctttattgataggtcctgaatcttatggtttagcccctacacttttatataataggacctgtcgtccaccctgtcccttttgcaaccaagccactttattttcaaaataaaagcctgtaggcccttgtatttctctcagcagcc

SEQ ID NO: 131333 - DNA, 497 bp, Zea Mays
tcccctccatcacgtcctccaattattttctagtttccactgcacttgacatctgcgtcctcccccatacccttcggcaccatctaacccatatccatctatggtttgcctccgtgatatgaccttcgcgatcgacatacgctttgtcgccccgctcgtcttggttttgtagcttttgcttccattctctctgagcctacctcctaccgtgacacacttatcctgagtaaaaattatctatggttgagattgttgctcttgagcacactagcacttcaacacttgggatcttgtcccacttccttcctctgcttctcctatcaggtgcaagtgggcctataagattaagactcgctctgatggctccattgagcgctacaaagcgcgacttggtgcatgtggatttcaacaggagtatgggcgcgactatgaggcctttgctcctgttgcccgtcgaaccactgttcacactcttgttgttgttgcctctgttcgcc

SEQ ID NO: 131334 - DNA, 761 bp, Zea Mays
ggccgattcaccaatcatcggcccttcgacatctgtcgttcctattttgatgatgtctacttttatcgtcctattggaggttgtagctatgtgctcccctaccggattaatcggtctttgcatccgagtggtccgacaatcttgttgggcccatgcttagtgaccggattgaggggcacctaatcggtcttgtacgggaggcgccaacctgtcaaaaacagatgattggggtgtcccccaggcagggtactgtggtatcccgaatggatatggtggcgcgccccacatatgattcgagatatatggtggcggtggtatgtatgtataatgacatgatatgggtgtatctggaggtggggtatccacgcaggtgtgttaggtcctaattgaacatctgactcgtcctttccaattggtgaggtggtccaatcggcctaacctgctgtcgctcctgggtgggtaaacgaggtcgctttggtggtcggtcactggggccgaccttctttttcacatatttagacaataattgatcaaaggttgggctagacttgaccaaccgaccagctgccttgaacgtgttagttttccacgtacctatttcttgtcatcgttgtttgccggactgtctactggaatgacctatactgtctggagaggtcccagaccgtccgcgtctgtgtatcggaccgtccgtgatgcgtagaacaggttcctgcattcggccacctgtttgcgattgcccccagcgtttgtgatggtaa

SEQ ID NO: 131335 - DNA, 932 bp, Zea Mays
tgctatcttttcctaatggatcaaattgtatttgagccttggcttcagcaattcacttatcctaaggctacttttcatagtgggcttgctctaaaattttgaccatcctttattatgcatcaaggattttacaactatgtgttagaagtgtcatccagtattccagtgtaaggtacgttttctttcccgagaaatgcttttgaatggaatatatctcagcatattaatcaccagttcggtactggtaggaactgaattcggagctttggactgctacaggagaaaatctgaaactttatgccttcccagctgaacaccaagaccttgtctacacgggagacgtacatacaaagtttcgtttcagagccatactacccgtatcgtatcgcttcatcatttggcgcaaggtactcagatctctttccctgtttgggtaccatctgattcctgtggacgccaagatacttgaacaatggccggcttttgggctttcaaaagtgctgtgcgaggggtagggtcggggggtggcctatcctttcggctacaccgttgccgttccttttgtttcgattcctcttctcccgtaatctgaaccgacactgcgttcagctctgcgacctttgcgattaaatagcttttttttcttcttctgaaacgcttttgaacggaatatatctcggcatatcttgatcgtaattagttttgtgtccaggttgttgaagtgctttgcttgccgcttgcagatagaggccacccatctgactcttgctgggtttcgacgtgggcactcaaggtctgatcccaacaccacctccaaagttgttcgaatgattccttggcacattagtatatttgctcctcgttcgtcttttaccaaaaactagttctgacggatatacagtggttggtccgagctctggaaaacatcgggg

SEQ ID NO: 131336 - DNA, 309 bp, Zea Mays
cataagcaaggaagttgggaagctcctgactatcgggttcatcaaagaggtgtatcacccgtagtggttagccactaaataaagcatgcccgaaagactagttcctgctgccacgcatcaactaggtgttctactccaccttagggtgtgaggtgttgagttttattgatgcctactctggctaccattagatcacgatgagggagtctgattagcccaccacttccttcatcaccccgttcagtttgtattgcttagtgaccatgccctttggcctaaaaaatgttggggtcacttaacagggatgca

SEQ ID NO: 131337 - DNA, 284 bp, Zea Mays
cgcgagtctggggcagcgacatgcagcagagctcctgcgcggcggcggcggctgcagagacgccgagctccagcactgatcgttctaggtagtggtttaatcttgtttggaggcgcctgggggcaacagcgaagccgcatgctgccgagctccatgcttgcagcgatgacgttgtttgtaccctgtgctacccgtctcttttattaggcagagcggctaacactgaacgaatgccggtttagattaggctcagccaaacaacttagctggcatgcagagcatgt

SEQ ID NO: 131338 - DNA, 549 bp, Zea Mays
ggcgacgccacacattcacatggtcacgatctgcagtaactgaaggcgaaggtaactgatggacgaacaggggttgcggtgggaggaagaagggagagagaggtggagccacgggagggtggcacgtgcaaccacaggagagcgacatccacaacaaccaaagcgcacgctgcagtccgaacgaaatcgatgggagacaaatcgattttggatagggaagaggcggagagagcgaggaggatgagaaacaccacgacgtgggtaaagagaggcgaggagggagaaagcgtcggtcagaagcgtcgagagccgaagcatcgagagccgaaaaggagagaaggaggtgaggagacataaacgtgagccgttggttggagatcgagcgaggaggagaatttgcggtgacgtggacatcgcgagaaaggccgttttgaaccgcgtttcatatataggaaacgccctcccatttccgggcttgttgctttttaggtctctcttcgttgccgcttgccaaaataccccggtattcgttgcgctcgtctaattacc

SEQ ID NO: 131339 - DNA, 317 bp, Zea Mays
aagaaaaaactagaaaggaaaagagtacaagcagctcctataggtttaatgtaggtccagtcgagtttaatagttcatcacaagttacaacagagtagtaatagcaatagaattaagaagcaatagcaacaggccagtaggcaacaaccctcaggcctcaactgttcaagatccaccactagttccactagctccacctgttccaccagatcctccacctcatctttctttgcctccaccaatttaatctaggtacattgcttcaaaaagaccttcaagttctttggtgtctttatccaccatgtgctaactatgca

SEQ ID NO: 131340 - DNA, 357 bp, Zea Mays
gtttaagacatttcagttaacatgtccttgaccacccttgtttcttaatgatccatgagcggtcattttattttgcacatccttggtgatctcgttaattccttgtaacttcattcggtaatgaatttttatttcaactcttctgtcggaacctcacttatcttatccttgattgttttctccattttgtgactttgcaagtcttgccttaactctgtccttggactatgcttttcatcattatcacctttatccttatcacctctatatcttaccttgatgtttatcttataccggcctttaaaatctcccccttttccatctcaatctgaacgtcgtactttgcctacttttccc

SEQ ID NO: 131341 - DNA, 297 bp, Zea Mays
aagtcttttcttgatggcaatgaaaatcttgtcgttggcgcgctcgacgacgctgttggattgcgggtggtataccgaggcgaagacaggcttggtgccgatggagaaacagaagtccctgaagtcctggatgtcaaactgtttgccattgtcgactgtgagcttagacgagactccgaattggcaaacaatgttttgccagaagaacttttgggtggtcttcgatgttattgtggacactgccctggcctcgatccacttggtgaagtactcgatggcgacgaaggtgaatttgag

SEQ ID NO: 131342 - DNA, 278 bp, Zea Mays
cggactatagcgaactggcaaaccctacccttccagtgtctctctgctccttcgttctgcatgccctgctcgatatcgctctctgtgtccccgtgctcatcgctctgctcgccgtctcgttgttattcgcagcaaaagatagtgatcaagctcagcatgccatctgagaagagccggtccaaggccatggtgctggtcgccagaacggacggtaagcatatacgcaaaagcatatgttccacacgctttaataacgcggttttgttggctggaattct

SEQ ID NO: 131343 - DNA, 1427 bp, Zea Mays
ctcggaactcgtcctccttaagctgtacaagtccttggggcacatggtgctcccggaaagctgcttcaaattctgcccaggtagcatctctgatggtgacgttgaaggtgtcccaccaggctaaggccatcccagaaagttggtgggcagccagttgaacacgctgattttctaggcaaccaatggcttccagcttccttttgatcgtgtgcatccaatcgtctgcatcgagggggttgcttgatccggcgaacgtgggaggcttgagtctcaggaaatcccccattctgtcttttggtcttccaccattcggccgttgattttccagatttcgagtgaggacctcgatgaatcgggtttgattggctagaacttgggctaggtctaagggtagtggtggaggagcggggaggtgggtttcactttcctctctaacggcttccccttcagctctcaggggaaaccctgctccaatcccggaggcggtaggcgtggttttatccgaagccatctgccagggaagagagtcactattatgcacatgcaaattgttttcaaccaagttattttatttattacaccatcacattacaagcataagactactacaggtggaactacacgagagcgttccccgaggtactaccgaactccttctctaaggtgtccccaaattccttgagaagatcatcaaggcttgctagggatatatcctcgtcgacggaccaatcatctattctggggggaggtggggccagaggggtcttcttctgcttcttctctgtttggcaacctcggttggtggtcttcttctggattttctttttgggggcgagcttcttaagcttcttgtcatagtccatcttcaaggttcgataggcctaatgggtgttggcttcctcgccttctgctatgtcgagactctcctggagggatgccttctcttgcttaagctctttgacttgctgctctaggctttccactcgggagtttaggtgggtgcagtgggaggagagatcatcgtagtggttgtcgagggtgtggaggtatccggccatgtagacgatagtggggtcatcttctgtgggatctcctcctgacagagcctggagtcttttcctccaggtgggggtgtttttgttgctgggtgggaaatatcggaggggggtctcagagatctctcagctatagttttggcacagttgtttaagggcttttcgagcaacgccctggcaagtgtctgggaagcggtgcccgatgaaggtaatttggaagggagggtggtttgggtagttccggctttctcccaagtagaccgccatagagcacttttctattccattttcacggtactccttccagacatattcgggcttctttaggatccccatgcgtagcgcgcaactccgaagaaggtgaggaaagcc

SEQ ID NO: 131344 - DNA, 336 bp, Zea Mays
cattttaaacgggttctggactgggcgtcattttccagagagtgcaggggttctggcgtaagtttaccgagacacaacgaatagtactcagaggaccgcgggttcaaaaccctaaacccaacggtttatatgcaatatgcgcgactgcaaggggttcggatggatctcggccattggatctccacgcgacggctaagattagaaggtcgttttaaacgaaccggtatccattccacgccatcggattcaaatctgacggtggttattttatgaaagcgagatcgaatcgggtccgtcagatcccatccaacggttcacgatcaataaccgaaaggg

SEQ ID NO: 131345 - DNA, 355 bp, Zea Mays
ccactagcatagatagggccgctcgccgtgagttgcaacgtgaccctacttatgatccacaagaccatgaggtaaattacacatccttaatttcgtgtgtgtacctaattaattagctgatttcacaatgtctattacacatgcatgatttcttgtgcattttattacatgaataggaggtcttgtctcaatttggtgcgatgctcgaaaaagctgcggcacgataccaagacgcaccagaaccgacccaagacgcaccggaaccaacccaaggcgtaccggaaccgacccaaggcgcaccggaatcgaccgagacaaccaccgagaggtcaatgacaaaaaagcagagcgattg

SEQ ID NO: 131346 - DNA, 890 bp, Zea Mays
taacaggcaccgcttcgcgtaacacgacaccgtttggaccaaggtcaactgctcaggcaatataattacaccccgcggtcacatcaagttactactccaggacagtgtggtaaatactctgcgtaccaagacacccctttggcacaaccattgggtgtgtcgccaggaattttcaaagattttctgaagaagtcatatccacaaaatatacgtaatgaatgtatcacgacaaaaggaggagatggactgagatgggaggaagtccaaatgtggctactgaagtacaagtctaatcagcagaagcattgaagcacagagcaggatgatgtccagccgagagccatctgtctcaaccagccagacgtccaatctgtcatcgatcgaattaatttcagacctaacaaggcgtggacagatagcgtcgtttgaattcacagagtataagatgaaaacctttgaatgaattatttccaaaatccactcaaagctcgggggctacacccttcggtgcccccaatagattttcagtctcatggagataaaatgctgatttctaaagcataagatgatgacctttgaatgaattatttccaaaatccactcaaagctcgggggctacacccagtgcacccaatagattttcagtcccataaagataaaatgctgatttctaaagcataagatgaagataaaatgttgatttctaaagcataagatgaagataaaatgctggtttctaaagcataagatgatgacaaaatgctgatttctaaagcataagataaagataaaattctgatttctaaagcataagatgagggtctttgaatagattatttccaaaattcactcaaaactcgggggctgcacccaatagattttgagtccca

SEQ ID NO: 131347 - DNA, 518 bp, Zea Mays
gcaccaacgttgatggtatccacatctagatccaccaccaagggtgatggggaaggctctaggtgagggccacaacggtggggagtggcggtgacgtctatgaatggggagcgccacatggaatggatggggagcatcacgagcaatcctagtgcaggtcaatgccatggggagagtgtgatcgcggtggatactagggcacataaccacgccgctgaggagacatgttgttcgcttggctttaatccataacggaatagggacaaacatatgtttcgtttcaaaaaataagagtaacactgcaaagttcaaaaaatagggggtgaaaatagagttagagtcattagcagggggtaaaaatataatttttctctttaaaataagacctaacttaatgccataagctatgacgttaactacgtacatggatcaaaaccaaacctccacttgaagtttaaacctagtcataataagctaaaatacaccaaattcgggtgaagtctagggactgttcagat

SEQ ID NO: 131348 - DNA, 401 bp, Zea Mays
tgaccgggaaagggctggtcgcggtgaggttcgtttcagggtggcggagaactgatttaggggaaacttgaaattggagctcacggttgcaagattgggagcgatactagatggtgtggtgcgtgatgaggttgcggagctaacggtgggctcaatttatagattccaggggcggtggcgcttgaatcgatgatggcgcggtggcggccggaggtgaagaagaacgcaggtgcgatgaatacgtgttcagtgtcgtggcaataagtccggtggtcgacgggaagctagagggagtcacggcgatgcggtgggggtcctcggatacgtggcgcaaggccgggcaacggcagttcactggcgagcttatctgctcagccgtaaaacagaaaggagaaagtgac

SEQ ID NO: 131349 - DNA, 382 bp, Zea Mays
caagaatcgatgtgaaagctaaataaactactgttgtactaccctactggagatgaagatgtgaatccataggtaaaaacaaatcagtacggcaaagacgatagcatatagatcttgcttccatgtttgaaaatgaataaaaatgagataagatttgacaatgtgtctggactgttcgagttcatggattcctgtcatcaagctcaaaccaggccaagcttaagtgtctttttgttactggtcagtaacaattaacaaagtggccggttttggttgtggctcatacgctcacacgatgttgtttctctccgtacgtctcccatgagaacacccgttttcttttaggcccgtgggtcacaaggcaaatcacttccggtttgac

SEQ ID NO: 131350 - DNA, 384 bp, Zea Mays
gccgtggacgagcggtcccctgacatggcctcctgtcctaggcctcggcttccctcccctggctggcgcttgctcgccgggcccgtggcggtgatgagggggcggcagtaaatagttgtggcagactggcagcagtgtggttgaatcgacgcgtctgcctgtgcggctgcggcgtagtagtagcctagtaggagcagcagtgcgaggggatggtgtgggcgtgggcctcccagtcgttccatcggttaggaccgactaatcaacatcgtagaccgacttatcaaggcgagttaccaattaatcagcaaggaacactggtaagccgacaggccgagtaggagctaggttttggggttttttcccttttcgtttgaaatcttttaa

SEQ ID NO: 131351 - DNA, 573 bp, Zea Mays
aagacctcgggtatcagtcccctgagggagtcctcaaggacgtcttcactggagactctgactccggtgacgacaacgaccaccgttagaagctgtacgtgatgtacggtgggagctgggagttcacctcccataggaacgtgaagtccctgcgccgagaggtccttttcggcgaccctaggggtcccgaaggctgctccacatccgccatggcggagcatcactatctcctttggggcatccgactgccccgaaaacatggcaggggccggtatactaccactcatcaccacccctgtcatcgccaacatgaggctgcatcatgtcctgattgatggtggggcggggctcaacgtcatcagtcacgttgcgttctagcagctgcagatcctaggatcctgactcggaccctctcgtccattctccggagtgggccctcagccggtgtatccccttgggagcatcgcactcccggttacattcgggaccgaggagaactttcgcacagagaacgtctagttcaatgttgcggaggttaacctccctttcaatgccatcattggcagactggcc

SEQ ID NO: 131352 - DNA, 908 bp, Zea Mays
atgtgaaaacaaatttgccacaaactgtgaatttaaattagaattaaagtttgaatttggatagaaagaaaagaaagtagagaataaaaagaaaaagaagaaaagaaaagggaaaacctcgcttgggccgcgttctccttggccagcccattccactcacccgcgcggcccaaacttcctccttccaccgtgcgctgacaatagggtcccaccgggcagcctctctctctctcgcttctcctcatccttccactggttcacggggcccgcttgcttgtcggccatctccgcgcgcactcaccgtttcacgctgatgtgtgggctccacccagacagcactgtggatcttccctgccgcgtacaagagaaccggcgccatgccgcgaaatccgtcgtggctctaactagtccgcaaccacctcgcgcacctcgccggggggataagtatcacgtcaacctgccctctcctgggacctaactattcgtgctcacagccactagaaagcaactacccacctgggcgcatctcgccaccacagccgcgccggcgaggggcatccggcacagggcctctcaccactccaacccgattttccctctgtcgattcaccgggtgactcggtgtgagaaacgcgagtactacggacgaagcattgccgagggccagtggaatttctcgccagacctcgtgtctccgccacgggaccacccgcaccatggccggcatcacccacatcacaactgtcggtaagaactaccccactgtgtttgccgctatctcctttccatgtaggatcaacccactgtgaaaccatagtgctggaagcccatctcgggttcaccagagagaactccgctgcggggggctcgccgccgccgccctgcaccgcccgggactctgctcggcc

SEQ ID NO: 131353 - DNA, 328 bp, Zea Mays
gcctacgcaagcaaccactgctgacaatactgattttgtggcagcctcaactgtagtgcctgccgatgatagtttgtttggttctgtgtctgagtattttgagtctgatggtgaatctgggagttcgtttccttggacagaggagtccttggatgaaggcttggattattttgttgcattggatgcggctgcggcagagacttcaccgcgtgtggaaggtgctggggatcttcctagtgcgagtactgggtataggcggtgaagggtgatgggaaaacatagtgtgggtgaattttcgcgaagtggtaggcaccgtcgtatggggatg

SEQ ID NO: 131354 - DNA, 339 bp, Zea Mays
ccccctacctctcacaactctcatctctccccttttggcgttaagcaccaaagggtcgccctaacctagagaccagaacaagaaggaggggcagacacatcagggtgagggcgagcagtcagtgcaaagtccagaacagtatcagagttagtctcgaatctaggatctgttgtagaggctagagctggtgttgacttagatgatggtacactataaggatcagactgcagagcctgagatgctggtgctgtagctggtactgagacttccactgccactgctagagtagacactacagaaactaatggcactggtgactggacactcacaactccaacg

SEQ ID NO: 131355 - DNA, 354 bp, Zea Mays
gcaagatctccatgatgctacaaaagatgtgggaaggcacgacgcacatcttggattatcgtggtcatagacaccatggcagatgaagagggtgatctggaacgtaacagccatagcaagtaccatccatgttaccataagggttgtgggaagatgtggcataggccacgcacgttgccacaactgccacacgggtggcacaccttagattaccagggcctaacagctagcaaatgggcacgatgctattacagttgctctagttccatatcgaataggtgcgccacgtcccctgactctgccaactccctgaccgactagcataggaaactggctacacgacgtgtcgagaac

SEQ ID NO: 131356 - DNA, 512 bp, Zea Mays
tgatcttcaccgctgttagcctcttaacgatcatgctccacgcgtcttggaagcttagcacgttgcagtgatcctgtgtagcaagctcgtccatcgctagaggacttgccacggggagagccacgatatcacctgcgccagtgaccttccctctctttggctgccagcgcttctcttcaaaattcggagccaccgccctcggacactataaattgagcgtgccgctagctcatttgggtcatcatgaagccagagcacccgcccttgcctccgattagccaccataactctctaattcctctcttcccccaaatcgggtttccgtgccaccgtgaacgccgcgccggggctagctctctacaggtccgttcacgccctcctcgctctcgcttcaacacccctatatgctataaatgcttatcagcccagccaattgaactagcccgtgttggatcaccgggaacacctcagattatcctcggtatgcgccatcacagtggacaaagagtttt

SEQ ID NO: 131357 - DNA, 392 bp, Zea Mays
gtgaggatatccttgtgcgaatgctggacgtaggcgtcgaagggcggtggcgaagcgaagggtgagcgggttgtcacgaagtgataggggtcatggtgaggtggagggtggttgtcttcgagtggacgggactgccaaacgggaattgttgtcttcgtcggctggggcgagtgtaggtgagggggagctgcgaaatcttttcgagggtgaggaattgaagataatgttgttcaactacagggagatgggtatcatcccgaaggttgagccgttgtaatgtgtgatgccctcgttgtgcgtgtaactatgatttgtatgatgagatagcgtgccttcattgatccgaccgcgcccgtaggcgtattttgcgcgcacttattgtgctattccgg

SEQ ID NO: 131358 - DNA, 663 bp, Zea Mays
tcctttgtcaagcctttcgtagtctgggtgctcgaagttaagggcgtccatcactccgttcagccttcgttttttgagtgtcgaaggcagctatcatcaattgatcctccttcttcgtataatttcccaaggatctcattgcacattgtctctatcatttccaaccattcggcataagggccacagaaagaatcctaaaacttaaaccgatatggcaaccgaacgagctcaaatttttcccttctttcttcttcggcaccccccacccaacagatattggaaaggttttgttagccaggtattcttgcaccaaatctcaagtactaatgtgctttgacatgactctgaattccaattcggctaactgacagggggagccaagttgcatgttgcacaatggtcgtgtcatgtcgaagctcaatctcatgggactcatcaccagtcataagcttctccattttcttttcatcagctttcacataaaaccattcacttgtccagccagtcggccacttggtacgatatccaatcacaagagccttagtatccttttggtatgcaaaattgtaacacccgaagttagtatgcagtccatcagccctagccttagtttggtaatggagtttgtgtactctgcaaaatccttcgccattagcagttttt

SEQ ID NO: 131359 - DNA, 574 bp, Zea Mays
atttgtacattgggctctagggtgaaattcaaatacatatatagattcaaatttgaaattcagagaaaagaaaacagaaaaaaggagaaaaaccttacatgggccaaatctgtttccctcagcccatccccactcccccaacccgcgcggcccagctcgcgcgcgcttcggccaaccctcctcccactacgcttggtcgctgtcaccgggccccgcgctgtcagcctctcttgaccagccgcacaaccttctcaatgcatctccttgtgtcactgctggtgggacccgcgtgtcggcgcctcaagatggagctgctggtcctcactgctgcatgggcccattagtcggagacacgggatggcgctagcgtgggtgtcgctgcgatgtgggacccggattctggaactgttcccctcgcgccgagcttgcctctgaccgcaacagatcgcggcgagctcgccgccggaaatctctcgcgctcaccgacatatggggaccccgggttagtcttttggcgcctgtctctttcagcgcgtgccaccgtcgcctgggccgagtcgttagggcctcctcc

SEQ ID NO: 131360 - DNA, 417 bp, Zea Mays
atgtcacaatgccatcatcaaccaatggcacggtcgacggtgagtcgaatttcaccagtggtggctactattttcttcttgggtggcggcggcgaacatggggacacgactggtgcgaaatccacggaacaaggggaagcaagagaaggcggcggcaaggcacttatcaacccacgcggtccattgaggcctggcgcaaaaatcgcgtggagctacggcacgatcggcactacggtggacgcggccagatcagttgaggggaagatgacagagcgggtggcacaagcgaaaatctaacgtgcgagaatgacaaacggggtccctgtgtcagtgtgtgtgcacgtgttgggctgcacgggcgcgggggcaaagtgattgggccgcgcggttaattgggtcggccgaggtaaagtgagc

SEQ ID NO: 131361 - DNA, 605 bp, Zea Mays
tgcgccttcagcactgtcatccctgccggagggcttgtaacttctactatctttgttttcgcggtctctatttctttaatattatcagccttcggcaacatagacagctcttcattcttctgagtaagagaaggttctttggcttcagtagcagtagaggtctcaccaccaaattcgggcactgaggccggttcgatgaagcgcggtcggtgagtaaggaccttcacccttttcctttttggcgtggcctcactcagagcaactgaagcatcaccttttcaagaagttgtgctttttctcttttgccctttcagcgggtagcggtaatcagggtacataaacccaatagcattgaaaactctattcagcctcttctttttctgccctccgaaggtcgcagatagcgcgttatcttctatctttgaatatggtccaagcagttcgtcgctcgtagcttcgatgcacttcagccaatcatcatctggctcaataaacttaccctcgtatctaaaggtgtatttcaacctaaccagtccaccttcgtcagacttgctgatagtttcttttggcatttcccattgctctacaagcggccacactctaaa

SEQ ID NO: 131362 - DNA, 622 bp, Zea Mays
ggtgaggtcgcaggagttgaggcaggcgtgagctagggggtttccggggtcaccggagttgggcagagagggagagggcaccacggcgaactcaatggcggggaagaggccatgaatccatgggcagagaagggagaacggcggtgagaaggtctcgggcgtgccggagtaactccgttgagccattccggccacggggaggggtcctaaggcgcgctaaggccttggctaacttcagcagaggcaggggcgacacagggacctactccggtgaactagaccgggctaaatcggccggccaccgcgcgagcacggtggaccgccgcgtccgagcactagcgaaggcgaaattggccgaccacagggcgcaataagggaaattgggcatggggacgggtgtctcacctcggggcagagctcggggaggcttggagcggtcttcggcgagctggatggccgggaacgcgggcgcgggtctccggcagcggctggcggcgtgggcagagcacgagagagggcgaagctgcacgaaatgaggtgaggggtgtgcgcggggcactggcggggctctaagaagggagctgggcgtgtgggcgggcgtcatggccgagaaatccagcga

SEQ ID NO: 131363 - DNA, 421 bp, Zea Mays
tgtcttggattgcgataataataggcaaaccgatgtgtatggtgcatagcggcctaggttgttgcttgggttaaccaacttgttagatgtctttagttaagctcgtggtcacgatgaattgcttgttgtagtctaaatgcgtatgggtatggtcgcggataaaaagtattagtgctcatgtgatgtctaagttgaaatgcaaattattaggtgaaaagcgctttgatatccatatatgccggatttgatgattgtggtgaatgcgttgttaattgcgtatggtggttctagtgctcgaactgacatgtataaaaatttagtaagtctactggttagttctcacttggttattttaactctaacaattgtcaaagtgttagaataagtcaagtctctagagcaagacaattcttgaattata

SEQ ID NO: 131364 - DNA, 670 bp, Zea Mays
tgtcggacaagttccctatcctggtaggtggtagggctggaggggcttcttccttctgctcagtctgacattcttggcttttggtcttcttgcggatttttcttgtgggggcgagcttcttcagcttcttgttgtaatccatcttcagagtgcggtaggcctcacgggtgttggtttcctcgccttctgctatctcgaggctctcttgaagggacgccttttcccttgtaagttccctgacttgatgctccaggctttccacccgggagtttaggtgagtacagtgggaggcaaggtcatcatattggttatcgagagtgtggaggtatccagccatgtagacgatggtggggtcatcctcggtagggtccctccctgacagggcctgaagtcttttcctccaggcgggggtatttttattgctgggtggaaagtagcgaagtggggtttcaaacattactctgttgtagttttggcatagttgccggagggcttttcgggcaacattttggcaagtgtctgggaagcggtatccggtgaaagtgacttggaaagaagggtggttcaggtagtttcggctttctcccaggtagactgccatagagcacttctccattccgttctcgagatattccttccagacatattctggcttcttgcggatccccat

SEQ ID NO: 131365 - DNA, 567 bp, Zea Mays
ctttcaacattccaaatttgtatcttggatcaagaacaacaacaatagccattagatcatgaatgtcagtccaatatttatcaaattttgtaatcatatgacttgacatggacttgattaactcatcatcacactctagccacttgctcatgtatcctctaattgcacatatctttggaaagaagtcattagctgttacatattgtgttccagaaaacaattcggtaatttcatagaacaatttcaacctatcgcaaacttcactagcaaacttccattcatcctcacttggagaaaaatcataagctcttccacattcagccaaacgatcaaaagcctctttgtaacaaatagcaacactgagcatgatataagtagagttccgcctagttttgcaatcaagtgacaatttcttgttgcattcaacattaacttgtgcagctatttcttggaatctctcatgtcttttaggagtagcataccaaaatgcaacactatttctaatcttttcaatcccactacccattacttccaaaccatctttgacaattaaatttaatatgtgcg

SEQ ID NO: 131366 - DNA, 407 bp, Zea Mays
gtcagatctccttgaacagtaaggtcttccattggtaactgttcttcagacactctgagacatttcttcagctgagatacatgaaagacatcatgtacatccgcaagatgatccggtaactccaattggtatgcaacctctcccactcgctttaagattaagaagggtccaataaagcgaggggacaactttcctttgactttgaatcttctcataccccggagtggtgacaccttcaaatagacataatcaccctctttaaactctagctgtcttcttcgggtatcagcataactcttctgccttgactgtgcagttctcaaattctccctgatctgctgaacttgttcttctgcttcttgtataatctcaggcccaaacaactgcctttcaccagtttgatccca

SEQ ID NO: 131367 - DNA, 333 bp, Zea Mays
tgcgactttccggcactttcaggcatttgcgaagctgggatacatgaaacacattgtggatatctgacatggattctggcaattcaaggcggtaggctgcgggtcctaccctgccaatgataggataggggccgacgaaccgcggagctagctttcctttcacttgaaaccttttgactccatgcattggggagaccttgagttagacgaagtctccttcctcaaacctgagttccctctacctgttgtctgcataacttttctaccgactctgagcttcaagaaatcttttgcggatcagggcaactttctcttctgcctctttaacgaagg

SEQ ID NO: 131368 - DNA, 742 bp, Zea Mays
tggccgattgaggcgatgaccggcgctcccgagcgacagacaccaaatcggacctatcctaagcttttcccctaacttaattgcactaatgaccaactaaggagctctggccacggtgaccgagagcatagcggctagatcgtcgtgttcccagcgattggtggtctcttaatttgaattgatggctcggcaagcatcacagagcaaccagagtgctcaaacaaaggagagtgagggatgaactgacctggaaagggctggccgcggtgatgggtggtttacggtggcggagagtcaatttgggggaagttggaaattgggactcactggtggacgatggctaacgattcttcgtagctgggtgggtaatgacctaacgcaaccggcccggccttcaatttataggaggagcgagcggtggtcgcgaatttggacgagacacacggcggctggaggagaggaagctttactggcgcaagggattcgtggcccctaccgtggcggtcattccggcgatcaacggagaggctagaggaagtcatggcgatgcggtggcgcggttgagacacgcggtggacaacagcgatggcacgacgacggtgagcagctttacccgcgggcggtgagccaggggaggagtaccgcggctgaccggggtggcttccagcttgacggcggcgaagatctttctaccccgaagcgttattcggttaccagcgagcgtgaatcctaacggcggcgg

SEQ ID NO: 131369 - DNA, 306 bp, Zea Mays
gtttccatgaacagtggatcaatatcattatgaagtgtatgactactgtttcttatcaaattaatatcaatggtaatttaactgatgccattcagccacaacgtgggctcagacagggggatccactatccccttatctttttctcctctgcgctgaaggtttttcagccttattccatgatgcggaagcgaagggtctgttggggggcatctgtatttgcaataatgcaccgagtgttaaccatttattatttgctgatgattctctacttctgatcaaagctgatgaacacagtgtgcatcacc

SEQ ID NO: 131370 - DNA, 416 bp, Zea Mays
gtcttcgtgtggacagggctagcaagcggtaattgttggcttcgccggctggggtgagcgtaggtgagggggagttgcgaaatctttttgagggtgaagagctaaggataagctgtttaactatagggagatgggtatcatcccgaaagttgaaccaatgtaatgtgtgatgccctcgctgcacgtatgtaactgtaatttgtatgatgagtctgtgtgccttcgctgatccagccatgcccgtgggggacttgtgcatttgatctagcgcgtttattatgccggtccggctgcgcctgtaatcggtctttgcgcggatggtttttcgacgaagattttcgcacggatgtgccttcgattttgcgcacttgttgtgctagtccggctgcacccttaggtgactttttcacggagag

SEQ ID NO: 131371 - DNA, 291 bp, Zea Mays
cttttctcctctttggcagatggcctcagatagaaccacacctacagcctcagggaatggagcaaggatcctcgtaggcatccaagaagaggacgaggggaagggagtgagacccacctccctgcacctctggaaatgccactagatctagcccaagttctagacaaccagaccaaacacagtgaagtcctcaccagaatgcttgagaatcagcgcccaaatggaggaagaccctaggacatgatgggaaaatttctaaggctcaaacctcccacgttcgctggatcaagc

SEQ ID NO: 131372 - DNA, 369 bp, Zea Mays
gtgatcttcgttaaaaaaaccctaaaatcacaagcgcgcttccatctttgttgtaaacggtttgtctttttcccgacgtgtacatgaaagccatttaaaacgtgtctaacgtggacctaaatagtaatagtatgtcttatatgtaatccattgctctccctacgtccttaattgcatttaattgacatcaactttggtttccccctgcatcaatgcttgtaccgaacccaaacggaagctgaagatgctaaacatatttgacacaccaaattgttgaacgttgctccgtgctattaaaattcacacaaattagctttacagaagcttaaatataaagatgcccttcaaacatcatttacaatgtttgtg

SEQ ID NO: 131373 - DNA, 489 bp, Zea Mays
gaaacccgaaggtaatttactctttatggcaataccttcttaatttattttgtttcagtattgtattcctttattttactttgtgttacattaacagaacctatgccaactgattacgagaaaataagggctatgaatatgatgaagaacaatcaattgtttcaacggctaggccttggacaactgaaatcactgatgactgctacagctgcaaacaacaaagacgactctcctcagcaatcagagagtttatatgatggtgaaaacactgacaattctaatgaagaggtcactacagtacttattaattcttagtttctcaattatctatctttagttttgggttcgcaatgaatttgatatgcatatccttattgtattctacatattcaggaatcccaatgtcgtaacaatggtcgtgccaacttatccaatgatggtgatcagatctcaacaaaagtaacaagaggaaataaaagaattgtggca

SEQ ID NO: 131374 - DNA, 375 bp, Zea Mays
acaagatagtctcggcaagtggtctagaccattcaaattttggcatgcatgccgacttgttttaaactctaggacatagtggtgctattttgaggtgagtgtgtggttttaagagggtgtttgattcgagaaactgcctcagcctaaatgagatggtgcatccaatgaaattcgatgaaatattatttatatttgcttacactaaatacaatacattctatcttacaaactaaacaaaagtgtaaggagtggtaactggtaagacaatggatttaccatatttctcaaatcaaacactccaaagtgtaaaaatttcagcacaatttgacgcttaaaccataggagtgcgatccctttgactccctgggcatggcc

SEQ ID NO: 131375 - DNA, 416 bp, Zea Mays
gggggtgttctggtcattcctctgagtattgctcctttggggtgtttgctggttgcgccttgggcagttgttggcatagtggcctagctcaccgcacttgaagcagccattgggttggacaggtgtgttgttcctggcctgcgtgttactggcgccaccttgacggttctgtgaatttccaccagacctctggttggtttgagagttactcctttgttggttctgattttgattatttctctagctttgctgtccagagcgttgcacttgataattgtttccgccttgatttccagagcggaactgcgaaccttgagcgttattagggcgggtgttcctgcttgactgaccttgaaatttccttttgtggtcagatagctcctttcttttactctcaaggccaattgccttgttca

SEQ ID NO: 131376 - DNA, 309 bp, Zea Mays
gagaaattaagcggggtcaaattgtgccgataaattgggaacagtgaaggaaggacattcgagaggcttggactgaagagctgatgacggaagactaaccgtctgtaatactccatgaacaaaataataaccatatttgaataacgatatgtcctatcgatgattgaagattatgaatacatagagcttgtccagacgattccgatcgaccgttgacttgtcctattacgtctctagatgagtttttagggtgccgagtaatctaagttgttggatggtaggattgtaataggcgtttttttccatttt

SEQ ID NO: 131377 - DNA, 372 bp, Zea Mays
gaaataggtgtattttgtgtagtgtggattgattttgggtgcatgtgtcgcaagaaatgaattagtgcgcatataggcaatgaatgagtgtgatgaagtgatgagatgctccttttaatttcattcatagctcttgttaggtgttgtagtgagatggtcgtcggttttgtcgttgtgcatgagtttgtaagtaggtatgtgcacgagtattgttttggcatagattaaaagtacatggggaaaagtggtacatatgtgtatggtagtcatgattgcgttaacttgaacaaagagtctcaagtgcatgccgtgctatggttgtatttgagatagtaaattataagggttgcgcaatatgaggttcgatcgatg

SEQ ID NO: 131378 - DNA, 370 bp, Zea Mays
agccaaattacgtgagtgaactgtccaaacataggttaaggttgtaaggcaccttttttccaccatacaattgcgaaaagttggaatataaagaattcaaaacaatagatcaccttttaaacctcaaatgacgtttctatgatattgagggcattgtattcacacgagacggtattagagtacaactagtggatgaagacgttattgggctagcaaatgaccttttgtgatagcaggattcctataatcccctctatttaacgcatacctagatggtatttgtgtccactcaagtaaaacaccgcacatcattatgccacatcgtttctcaaaataaaataaagaccatggaaaatttagccaaattgcg

SEQ ID NO: 131379 - DNA, 841 bp, Zea Mays
cgtaatttggccgagcagtgctggcggccggagatagagaagaaccttggctcagtggattggtgtcctcagtcgtggcaaactcaccgacgatgattagacgggtataaagagtcacggtgccgtgacggaggtgttcagatacgtggcgcaaggccgtgcaacagcagtcaccggtgttcttatcggtttccaccgcggtgaacatggtacggcggccggaattgtttatcggccggagtttatccccggcgacctacacagggtgttatccactcaccccgagcacaaattggaccgacggcggcacgaatcacggcggaaatcggtcatcggcggtgaagctgttgcgctggcggtctgatccctttggtctactgtaccatcgcgcgctgccatcagtgcacctgacagtgcaacttcagggcaatttttctctcagatttctatagcaactcgtaccaagtcctgcagcaaagttggagagctacaaatcagctacatctttgtcatagcatctatgggcagattctggcttgatcatacctaaattcatgctcaaagtttctgtggttgcactgtttgtctgaaattcagaccttatcagactgacagcccgactttaggcttaattatctcccatttcttctcaacaactatgcttacactcttaagcaaagttgttctcctttgttaggtctacatgtttgatgtggtgacctagggcaaactcttactgatttgaaagctataaagctccaaagttgagccaaatctctgatttcaaacttagcatagaactcaaatgaagtccattttgcaaataagcccaaaatccaag

SEQ ID NO: 131380 - DNA, 588 bp, Zea Mays
actcttatcatctattattatttttctcaactaacaaataatggtgtgcacaaaatacgatgcaagggggccgaccctcgtatgtagcaagagggtaggggagggagtagcgtcaggcgttgcagccatggtatcaccctaaacatgaatatggctaggggaggaggtggccaacgataatcgttgcaaccagtctaagggctagatgagtattgtctgctagggcatgggatggacgggacgacctcgactacatcaagaaattgcgtcctcacgatcgtgagacaagctgctgaggagaccaccctccctaatcccagcccatttctggttctggttctgggtgtggctgtcagccgcctggttgctagcccgctgagatgaccactgtcggcatgtggcccaggcttggagctagaggtaaatctgtcaaaatgcggttaactctcccgaccatccatttcgtcggtatggtgaggggaggacatcaggctcagcgctgaggcagtttgtcgctccatattctccctactgtaatttaccaaatggaagcctattggaacaacatttaaaagcatggtccaatct

SEQ ID NO: 131381 - DNA, 604 bp, Zea Mays
cgacagggcactcagcgagcgcctcaattcctaacaccacaatcgtcgccacactcaggagcacgagcgtgaatgagtggagcgtgatgccaggcactgagttgataactcgccccttccccataacctactgtctgacttcgcctgagacctgaacacaatgagcgaagttggcgggtctcgggctcaaatcgccaacgacctgccccgtaccccggacacggagggctatcgatagatcctcacccacatagtgaaccatcttcttgctcatccggctccggacatgcgctacgtcatcaacagtcgggtacacgcgtggagcaacatcaatgtttcgtgcgatcaccggcatgaaaattagataaggcgacgggaaagagtatgaccgaaatcatggtgcaccagcacgcagtcacgcaactaggacggagttggcagcagcctctacaaatagctcgacactaggccaattggctcgggagaggctgcacgaccctcagcataagttgcctcctggagtcctccaccgcgaccgcactcgataaggccgtcgggaggatcaggggacatgtggagtctcaaccctttccctcggctccgg

SEQ ID NO: 131382 - DNA, 1015 bp, Zea Mays
ctcatgtctgtcttggtgtatcccttcacttgccattcgtcgttgtccttcacttgccatttactgtacaaaggggaaaaaatgcgattctgatagagaattggaagttttgtcgcgagcttatttactttgttggtgctgtcaggtcaggaaatggacgattgcagattaccgaacactactgcctgttggggaaaaaaaatggtgctcttgcatcggacgcaatggcaagttggcagtatcttatgcctttggcaattctcttgtggtccatagcggagtgctcactgcatctaaaatggtaaaagtgaatgggtgctgtggtgtgtggcatccaggcgaccttaatattctcctgtaattcgtccctttaacgaagaagcctgtcttgagagactgcaaagtgcatttggacagttgagttgccatctctcttccattattcggaccacttgtttcttcccgtctcctggaaatctctgaactgcatggatccatccatctcatcaagtggcacacttacttctcttcgcctatctgagaattaataactcttcgacacccttcaaaacctgtttgttgttccttgtacctgagtttctctacctgctgtttatgtccacccaacactcttttcttatgggagatcattagtatcgttaaatatatattttttcccccaagggccccatggtctcccctagatgagacacccttgcacttttatccttattatagtatgtgataacatattgccctctacgcactcatgagaggctgagacaactgaaacatttccatcctaacctactgtacatccatccagacatcttttagccagagccacctacagggctcagtgcctatcccctatggcgccattcacaatcataggcctttagttagttgatggtggttagaacacaatgattgctttgatcaccaagtgctgcaactgaacactctcaagattgtttaagttccatgtaaaggtctcctgtggatgttgcacggg

SEQ ID NO: 131383 - DNA, 331 bp, Zea Mays
gttctgaaaccgaaagactcagagtccaatgaacgccagcctggctgcaagggatgaggctccaaagtcatcctcaccctacagcggggtacctggtgctcctcgaacaactgcaccgcatactggggaggcgtagcgtaaccggctccttgcagtacctcccacaaaatgcggggaaaaccctctcgtgcaagcccgtctgtgtgggaatgtgcgttccctccttccgtggatacgtgagaagtcatctgtgtaagggcaagtgtaagcgaaaaagaaaaagaatcaaaaataaaaggaagctagtgcttggcttttcccatggttaagt

SEQ ID NO: 131384 - DNA, 545 bp, Zea Mays
cttgcgccagatttggcccagccgagagggaaaggttttcccttttttctttttttcctttttcttttctcttttcttttccttaaactctttttccttttaaaaaaaattcttataaatttcctaggtgtccaaaatgaaatattctatgtgaagtgctactagcaatcatggtgtatgcatatgatgagtataatgcttcatgagatggggtcttaagagataattaaggggggggttaggagtttagggtttctaacctttgggatcaaaattgggatgttacagacctaccccacataaaagaatctcgccctcgagatttagactgggtttgagaaaaggtaagggtattccttcctcaatgagtcctcactctcccaggtagccccctcttctccttctctgctccattggactttatagagccttacttctgagtttcgggtctttcgaatggctgaatcgagaatcttcactggcttttctcggtactgcagatccttctgaatctgaactgactcctctgcgatgtgactctctgg

SEQ ID NO: 131385 - DNA, 370 bp, Zea Mays
taactttactgtcctcttgtcacaactgacagtggcttggtttctgtgcagccaattcatccctaggatgacatctaacccttgagtacccattactactaggttagcggggaaatctatcctccttatttcaatccttagatttggacacatcttattagactgaacttcccccccaactgaattaactcttaaaggtagaatcattggttctacggggatgttatgtgcttctacccatgatgtagaaacaaaagaatgtgtgacactagtatcaaatagtacttttgctggatagatttgactggaaacatacctactgccacatccggtgcatcctggattgcttcggcctccaagtggttcacct

SEQ ID NO: 131386 - DNA, 637 bp, Zea Mays
ctatagtaagtttgtagctggatcattaggctacaactttcctgcagaatgttggtctagttgccatatgaaatcgggagaaaatttgccccaaacttggtctgtcaggccgactgaatgaacttcgcaatggtacagtgaccggattggatcgccagctcagagacctcgacaccggtgatcttgcgcccagatccacgccggcgtcgcgattcacgcccgaccgaactcatataagtgctcctcggtaagaaatatcgcgctggagataaactccggccactgttctcatcgccgttgtgtcccgccatgggaagtcgcgttggcatcaccggcgttcgccgttatacagccaggctacgtgcctcaacattttaccatgtcgcagtgagtcaccgtaagccactctctgctactggttcgttgccggtgaggccaccacggtagatgccaccgagctctcgcgacagtactctcttcactctccgaccgccactgcgccaactcaaattcacgagctaccgcccccaggtcctataaattgagcacaccatcaggtccgtagggtagtcacgcatccagccaccaagccgtgccctcaattgatcaccagagctcaataatttctcatttcccc

SEQ ID NO: 131387 - DNA, 691 bp, Zea Mays
gtgaccaatatgtacttggatgatatttggagcgttagaaaaaactccccaatacacatcacagttaaaggataaaacttaatcactatagaatatctgataattttcactcatcccattaagtttttttcaaattgcaatcaactctggcaggcagtttgctgagtaatcatacatgcttattggcaaatcaaaataactgggggataaaattcactttctgtaacaaaaccagtttaataaactgaaacatgacagaaattacacctaagtaaagactttattagctgatagctgctcgacgggaaaccaagaatccaccatgtgtagcagttgatgtttcatcttgaacaaagaaacccaccgaccacttgaaaagttggaatatttgtattttgtgtgacaccttaagagctgcatgctatgacttcgtaagcaattttggttgtccacttggcatgctagacctacaaaagaaacttggttagagtgtaacaaaacaaaagcaaatatctgaagacgatcggaggctgctaacggtttggcaaatcttcagttaggctaaatagacctgtgtttcctgagtataacactacacagctctagtaagactttcttgatcttgattatgcaaaaatgcaccctccaatagttggattcctgttctatgactcctatgagttccaaagaa

SEQ ID NO: 131388 - DNA, 725 bp, Zea Mays
taataagattgtttagcattgcacaagtaacattttctttccaaacatagtatctcttttgttcttgtcaaatcagattagttcactccctgcctctgtgctcgagcgggcgcggacgcggagtcggaagagttcccgttgcctaaccacaagagagaggagtgtgcgtggacaccagagtcagaagacgccttgtcgccaggacgtgccgcggagcaaggcgcacgaggctccacgacctgctgttaggtccggtaagtcctccttgatttgtacaatctggagtggagtggtcctctaatcggtacattttttggcaattccacaaaatttagactctctaccaaacctttgggaatgctaccctgattttgggcaccgctaaccctcatttaattcttatagctgtttttatcatcgctcggtaaccttgggtcaatgcacaacattgccgattcctcacagaaactcagattcagtagagctttggatgtatatcatattctgtgagtccctgacagcttcgtacttacaaaatcaacaaattgttttagatccatgtctccatgtctctgccacttagcatctaggttcttgccaattttgtctgtattttcttttatcaatttaggccacatcatatcttatggtataaccttctcgtactgacttgcatgttgttttacatgcatcaagtttacaccagtagccccttggaggacaag

SEQ ID NO: 131389 - DNA, 802 bp, Zea Mays
ctccgtgatcaccccgatcccgtcggagaagttgtacccgttgcgcgtaacgtcctcgaggtcctcgtccacctcgccgggctgcatcgtcaccgtcgcgtaggaagacgtgaagcacagccccatccgagcggcgtgcttcgcggggttcctgatcgggaactgccccatccactcctttatgcctgccaccgttgtcgctccgtcctccgcgaagaaccaggccgacttctgcttcagctggctggctgagaacgcgaggaacgagtacctcctgccacacatgatgagcccctccgtcagggccgtctggacacgcctgtagacgcttgtcatctgccgggacgtgctgggcgtcgacgtcgagggcaccgcacggagggtcagcgcgttagggttcagcggcagcataccctcgtccgtaaaagtaacccttaagaagcgatctgacagctcgtggtaatgtcggatgacgcggttggagcgctccacttgaggcggtatacagtattccctagttggagtgacgatcagccttcggacctcagcatcgcaatcactagcctttcttcttctgctgctgctgctgctgcgacagacaagatcgagattcttggcagccctgtcctgcgcgttcttcaacctccagcatggattatcacagactccaagctttgcaccgaacagttccgtcagcgcagcaacgttcacatcttcgcgtgtcctcatcagcaaaccgaagaactccggtgtcatctggtgcggattgactaccccgttgtgcatcagcacgttgaccaag

SEQ ID NO: 131390 - DNA, 597 bp, Zea Mays
gtgtaaacttgtgtcactggaggtttcatggaataatcaagaagcaaagaagaaggctctaaagaagacacaaaagaagacagcaatggtctagttgagagatttcttggtcgtgtaaaagttgcaaatactacatcattgacacaaaaaggagtgatccagacctttcttcttaaatggcgaatgccattgtctaagatacatgagcaagggtatgatagagctagtaacataaagggtcgtgctaattgtttgaagaaaataatgatggaagagtcacctttttgcttattatgttcattgctttgcccatcaacttcaactaacccttatagttgttgcaaaggagaatattgattgtgcttagttctttggacaacttgcatatttattgaatgttcttggtatgtcttgtaaaaagatctctatgcttcacgtagctcaagttgaatatatgattgaagcattaaagttgggtgaatttgaaattgaccaaggtttgaatcaagaaatgggctcagcaagatcaggtgatacacattggggatcttacatagaattgtaatgcatgttatggccatgtatccatcaattaag

SEQ ID NO: 131391 - DNA, 319 bp, Zea Mays
atacttagcaatttccctcttcattctggtccaccaatacaaggatttgagatcatgatacatcttgttactgccggggtgcatggaaaatttggaaagatgagcttcatccaatatttcctgcctgagttctggattcttaggaacaaccaatcggtcttcaaaccatagaactcccttgctgtcctgacgaaagcatctgtacttttccaccttttgttcgagcatatccttaatgacttgaacacccttgtcaccaatctgtgccatgattatctgctcatgtagagtgggctccactgagatataattcaaggta

SEQ ID NO: 131392 - DNA, 1895 bp, Zea Mays
tcggcggcggcgttcctcgtgggcagtggagtggagatccacacgggcgttggttggttttctgtccatttttgttggtaagaaatcctaagctcacttggataggaatactcttgtcataagaattgggttgtctcttattcaaaccaagtagtgatttctatccaccccattcttagttgtggatttgtgtgctgcgcaagtggttgggttagcttatttggttaagttcctattcagcgtatgaggtcgtcattggtttactccataggacttcttggtacatggcagttaaatcgcaggtgcgtttatagtttattttccaacaccaacaccttttggggttcagctgaatccccattccccaaccaagtgcccctgcactggaacaaggtagtatacacagtgacatagagagttctcaacaggaacacatctggaacttccattagtttattttatcctctaaatagcttgtctgcagcaactatatgtccataacaatttggttggggttggtaaggggtgcatgaatgggagagaaggtacaatgttaggatagcttaacatacattcgaagtttcctgttctgtagttggctgatacctaaatgttttatgctgttgtcataatgaaaacaaaccctattgagctggcatggctccatccttgcttagcgctgtgatgacatcctagtggaaaaagtgttggccttgtgacaagcaaggccagttgctatagttgtatccacaatccacttatctcccaagtattctttcactaatctgacctctgctagcaattataatattaaattgataaagtgactaactaaccagacatactgcactccgattttcagtaattataatcacatccttacatgtgacagttaaaatgaccaaccagaatactgcattccaattttcagatatgattgtcacacccttacaccttatagttggttattttgaaatcaatctatttttgcagtgcttttgagatagcacctagaaatcctgtgcagtttgcccaccaacacaaaaaaaatcctgagcagttatatcgacatttcttcattcacatgaaatgtcacttcttagtagattcttctacaagaggcctcctgatggactactggagtttcttgacaggatctatggtatgcatggagaattttactatattgattgccttcttagatcaatgtaacttattttatgacagctcaactaatcacatcttttggcattgtacagtttttgattcatgcttcagcactgaagttttgcctcagggaatgtacccagtgtatttaattgggattcttacagagttgcatgaagagcatgtagaatcctcatttctggcaattaacttcagagatggagataagagaagccagcttgctgatatactacgtgaatacaacattccagtcattgattacccccgtcattttgagggttgtcctgtgcttcctttatctcttattcagcatttccttcgtgtatgtgagcactggttatccagtgggaccaatcagaacattatattactccattgtgaaagaggggcgtggcctttgttggcttttcttttatcttgtcttctcatctacaagaaactgaacagtgctgagcataaaactctggacattatttaccgtgaggcacctaaagggttcctacagcttttttctgcccttaatccaatgccatctcaactccgttacatgcagtatgtagccagaagaaatatatctccacagtggcctccaatggaaagatcactctctttggattgcctgattcttcgagctattccaagttttgattctgataacggatgcaggccattagtccgcatttttggtcgaaatcttcttggcaagt

SEQ ID NO: 131393 - DNA, 751 bp, Zea Mays
cggcagaacgaccatcttcctaaacatcatcggactgaggcggcgccgccccgtgccgcagcggcggaacacgccggcgaaagagcataaccatgtctggtgacccaaaatcccctaccgattactccaaattggactagataaaatagctagcatggtggtgcattcacttgaaggtttgaagcgatggaggcggtctgcccacgaggcacagcggccccgcggccatcaaccacaccaacgagaaattctaagggctccggtgatctatcgtctagctcaatcggctctatacttcgggtgagtgaaattaacacagggaacgtggcgcttaccaatgattttgcgatgacgaccccgaccatagtgtgatgcggcgcggccgcgggtgagcccgatccggtgagcaattccatccacgggacacatgattccccggtccaatagtcctgagcacgatccacgcaccctgtcgaatccgccagaccaccaagggatggttgaactacggtgctcgtgcgaagtggatgcggtggcttgagttcccctgatgagaaatcccgaccgatgctgaccgagtcggaaatagtggtggccggagatgggaactgggacgacggagcccaaagcgcggataggaaggcggagtggcgatacggcgccgaactcgccgcagcgcggatcaatacggcggcggcggcaccgtcctccatctactaccgccaatggcgactagccaggcttgcgactt

SEQ ID NO: 131394 - DNA, 338 bp, Zea Mays
acggaaacaaaaatcattcatgtgatctaagaattaattagagactaattaatttttaaaaccgactacaaccaagcaatagcagacaaatttgtacggcatctgacaactgcgtaggagaaaaggtagagagaggaagagtctggactgcgtgtaagagcaggatagcggacgaactagtacactatgtctttagagttcgtcgaggtcatccgctattttacgatttcacttacaggttgctgctggtgccgatgacggacgtctcatcttttaaatttggagtacataatcatttcgcgttcgttgctggagacagccttagaccgcctccaatg

SEQ ID NO: 131395 - DNA, 1775 bp, Zea Mays
tcatgctaggtctaaggtgagtgtcctgggttctgttccaaagggaaacgaactcatgtatctaggctgcagtggtgattcggcctcgcagtgcattgatccagtgattatctcggagctccatgtagcctgatccgtttttcatcctggacatcacaaagagactaggtgctaagtggcgtggcgtggcgtctcaccatcaagccatgtgtcatgccagaaacggcatttatggccatctccaatgacaaccttttgttgaggcgatgaaaagtgctcgatcagtgtcgtctgtcgtggtatccatgccaacccatggtttggtgtcatccacccattcctgccacaaccaactaaggcgtaaagctctgccaaatttatcaaggtccagaatccctaacctgtccaagtccttcggtcttgtgaccgttgtccaattcactaaacagtgagctccgttagtgttttctttccctttccacaagaaggatcttctgattctatccattcgcttacgagccgagaccgcaagtgggaacaccgtcagatgataggttggtatggaagagaggaccgaagagacaatagtgagacggccagctctatttagccactttcctttccaaccaggaagtctctgagcaattcattcaatgagcggttgaacgtgcagattctttaaggggcgtgtatgaagctgcaggccaaggtagcggcaggggaaggattctcgcaccccgttgaagggctcaaggacatggtctagatcaacgtcctcacaacatattgggtgtacggaccttttttctaggtttatgtggaggccagagaattgcccaaaaagcctagagaatcaccacaactggttgcatgtcctgtccgaccaggtttagaaaaatggccccatcattcgcgtatagcgaggttctccatctagttgtccgtctcatggggcaatggggatagtgtgccttggtcggttgccaggtcaagtatgtgttgaagagggtccatagctaggatgaatagcaatggcgagaggggacctccctggcgccccccttgacatggtaaagttttgtttggacctggccgaccgtttatgagcattgtggaggtggtcgtgcggaagaggatgggcacccattcatgccaccgctaaccaaagcccagagcatgtaggacttcgatgaggtagctccagttgattgtgtcaaaagccttatggatgttgagcttcatgaagaatgcaggcgtcttatgcttgtgcatttccctaatggtgggttgcacataaaggaaattattgtggatgtttcttttcttgatgaaggcactctgacagttggaaaccatagcatttaggtgggagcaagtctgttggccagtagcttggtgaggattttagcaatactatgaataaggttgataggcctaaaatctgtgatcttaagagcctcggttttctttgggagtagaacaatattagctgagcttaacaacttgaatccttgggaattaagttggtatagatagttgagtgcggctgtcaaatcattcccgatgatgccccaacatgtcttaaaaaaggcacacgtgtagccatctggacccggtgccttgtcagacggcatggagaagacggtacaccgaatttcgtcatgagtgaatggcaattctagttgttggaggtccctcatttcatatcccagcgcctgccaatcaatggtcaccatagaagtagagggagtagaaatccattggtcataaatccc

SEQ ID NO: 131396 - DNA, 492 bp, Zea Mays
aactagccattggaattgaatagcaaattttgcacattctgtgagtgcatcagacctcctacaatataagtctagtggtgcactggacctctatcaaattgtccgatcagtgaccgttcggactcctgtgttatgtgttaggtggcaccgtattggttcgatcaccgaccagactctatcacgtcagcgccacatcatcttgaccattggatctggaaagtgacaattgggtcctaataggtctggtgcacattggaccacacacagctctcatctagtttgtcgactgctcagcacctgaaaacatctatttgtgcaaccggtccagtgcgacatctggtgcacactggactggtccaatgacgcagccctcgaaagccctaaaacatgcttactgcataacaggtttggtgatcggtccgatgcacactggactggtcagatgtgccgcagagcagcacacatagtccttttggagattttcttctttgt

SEQ ID NO: 131397 - DNA, 598 bp, Zea Mays
cctggaaagggctggccgtggtgaggttgggtttcgggtggcggagaacagatttggggcgaacgtgaaattcccgagctccggcgaacgatcgtggctaattgacggtggctggttagctgatgaccctatggagctggtcacgggcttaatttataggcggcttcgtcggtggtgcttaatttggtcgggccgtgcgggtgatcgaagataaggaagaacgcgggttcggtgaatccgtgtccaccgtcgtggcaacctccccgtcgacgatgggacggctgcatggagtcacgacgaagcgacgacgcggttaggacacgcggtggcaaacggcgatggcacgacgacgatgagcactttacccgcgggcggtgagccaggggagatgaactacggctagccggagtggcttccaggtcactggcagcgacgatcttttgaccccgcgacgttatcaacttacccgagcgtgaatcatgacgctgacgacgcaaatcatggcgaggggggtcactggcggtgggtcagtcgcgctggcgatctgatcttcttcagtcgtgacactgtaccatggtgaacacttcatcagagcaga

SEQ ID NO: 131398 - DNA, 599 bp, Zea Mays
gatgacactaccttttctaaggagccattatacattgtgcttttgtaatcatgatagaccattagggcaccaacatggctggtaggtgctacgctctggttcctcattgtctgtcgtctcctaccgatgtggagtgggagagcttgtcagatcagctcctatcatcatgccatccatggtccgagccgttgtaatactaaggtgtggcatcattattatggtgttcgagtgcacttggggcagtcattgagggtgggttgtcattacatcccctgactctaacaatactagaagaaggggcaatcctagtgctcacggtattggcatttgtcacgtcgatgttgctcctcctttgaatcgcgttgcatttcggtgtggcgatgctccttgtgttcgaccaaagctgctaaggtgagctgaacctacgtgcttaatggtgcttgtgtcgtcgttaccagtaaatttggaaaactctagtaccttcaactttggtggcgaggacatcctgtcgatctccttagggtacgacttggtttaggtggtcatctttcactcggggaagatgcccaagtggttatacatgaagtctactagctatt

SEQ ID NO: 131399 - DNA, 408 bp, Zea Mays
tatcatacttcttcctttgttggtttaacatatatatagcctgccttagaccttaatgtcatgataccaaatgcccagttaggtacatccgcgaggaaactgtttaagtgctaatcgggttattataaacactactaacatgcccatcttttactttggagcacacacactttatatatgcactttgcacaaaggacccttacaaatgttctaatttcaacaacactccccctcaatatgggcaaaagatatcaaccatgcccatcttgttacatattgactcgttctcacttgggcctaaacctttcgtgaggcaatcagctaattgattacaagaattgatgtgctctaatcttaaaaccccactatctatcttctccttgataaagaacttgtcaatctccacat

SEQ ID NO: 131400 - DNA, 1005 bp, Zea Mays
tatatatctaccgattgtgagagctttgttgttgtcgcgtgaggtccaaaagcacaacgacagtgtcccattgcgtctccatgcggcagatctggtccgtcatggctaatctttggtttatcaaagatctgtctaatatccgcttggctagaccttgcatggtagttggacattctggtgacgtgctgggtggctagcatcagtttggggcagaaattgttctgggagtctgctcgtgccaattcttaggcctctaaatctaactggtgtttaggcacccatcatgatcgttaggcctaattgcttgtaggatgttctgatcattcggtgaagctttagccttagtgggtcagatgcagacagagctaggttttgagagccatcggctccgcgtgccatcgaggcatggatccgatgcgagcctggggagacgatcaactctttacaaccgatacaacccgaggagccgaacatggctcaaactgatgtttgcatgtgtctgtgtataaagggaacccttttggaacacgtcgacaccttcctgatcgggtataggtcaggtggcacgccaggcgaaccttgaagcccggtcgtacactaggatcttggccattgaccgagggactagggcccaccagcagtcccgggagcctcccggctcctcgtgttggcctgtcgtctctcgtaggtgggtttcgggtggcaacacattctagcacacttggtgggactatctatgtcaacatctacgacattaggtccctacatggcgaacactcagatgaacatgtctggagtggtgcaagactggcccatcacgtatgaagagctgcctcgagaacaccaagcgaagtatgatcaaatcaaagctcgttttgaagccgacctcatcggctctttcgagaggaccagcaaccatggcataaggtagaaggggttctcgcccgagggctctcttgatgaggtttcctcttgttaccctcgaaagagcgcactagggattta

SEQ ID NO: 131401 - DNA, 870 bp, Zea Mays
catggaaggagatggagtggcgcacggagtagaatcctaatcctcgcggtgtcgacgacgaagtagcgtgaggcggcatggcacacggcgacaacggccgcagagaggagcacaatcccaacgtcgtctaaatcatcgctgagaggaccttgacgcttcacttatggcggcgcatgatgggctggacctgactggcgacgcgatcgagggtagcctgggcggcggccgcgtcgagcttggtcttgagctcatggacctcccacaccttgcgcaggtcacacacctccatcgccccctccgtcgaatcgccaatacacgccaacgcggagtggattcagatgggttggggcctagggcggataggtaagcggacgggaaggtgggctcctgtgggtgggggattggggctgggcgttgcaggagatgtgagagggaccgcggatggaggaacgacggcggcgacgggagaggggtgggcgacggagtgaggaccgcggtgagctaggggccggcgggaggctagacggtggatggaagaccgagtgggagggttgctcgcgtggagcggaaggcacggggcgacacacgcaggcgtgggcggacacggagtcatggacgtacggtgcagattcaacaaaggcgaacaaacggtgcagatctatggaaggcagaaccatggtgcacggtgtggtctacattaggttcttatagagtagtagagatttaccgacttatggacagatggacacgcatagccgaaaaaacgaaccaattcgaaccgaaatatcagtttttccagtttttggtttcggttcccgaatcagcagcccacctctcgctaccccttcccaaacaaagcccaccaaaggc

SEQ ID NO: 131402 - DNA, 298 bp, Zea Mays
actaacttctttaacttaccagtaagcggccctacattccaactacctaaatggtcgactaacttctttaccttttgcacccgtcaatgatgtgaaggcccttgctcatttttcactacattagggcgatgatgtagcgcgccattaagaaagcagcgatccgattcttgctcatttgacaccgtgcccaaatcacgacacaatttgtcaccaagagggtgctgatctggcccttgcccatttagtaccataccctgggttccaatatggtgcatcgctaaaagggttataccccaac

SEQ ID NO: 131403 - DNA, 297 bp, Zea Mays
cgacgtggcactttgccggttagatcatgatcgttggatcgtgatcttgtggctcaggttggttaaacttcataaaatatgaggcgttaagggaagatcctatggtggatgcagggtaccggttcctttaggctaggagctaatggtggccctcaacgttggattggacggtcaggagtaggtttcagatattttgaactagagttgtcgatcacatatcgggtggatggcattgcataccaattcgttttaaaaagaaatcagattctggcgcttgttttctaatcggacgaccga

SEQ ID NO: 131404 - DNA, 556 bp, Zea Mays
cttttttcctcttcctttttcttcggcattccccatccgctagaggttgagaaagttctgtttactaaatattcttgcactaagtccctagtgctaatgtgctcagccaccaccctaaattccacatcggccagttggcaaagtgaccctaactacatattgcacgagggtcaagtcatactgaagttcagctttaagggactcattaccatgctcatgagcttctccctcttcttttcatcagccttcatgtaaaaccattcattcgtccacccagtcggccatttagtgcggtagccaatcacgggggcattggtatcatttcggtatgcaaaattgtagcacctaatgttcttgtgcagaccaacggctctagtcttcgtctgataatgaagttcgtgcactcgatagaacccttcagcattaacactttttccttggcttcggagagcccagatgtaaacgctaagtcttacgataacattcggggttagcttgtggagatatatctcaaatttctttaaaacttcccccaccatatcgtaaagggggaacc

SEQ ID NO: 131405 - DNA, 1244 bp, Zea Mays
atttgatacaaaacttagttgcttttatttttgagttctgcagggcccgttcttgggtaaatctttgaagaacaggaaaaatattgagggcgtggctgcccaaagagaaattacatagcttaaatcctaagtgtctgagcttaaatcattcaaggttctagaaaatgactttgttgagagtcgttccgaagttcagattctaactgaagagagaaacaagctcaaggaaacaataaaaaagaaaacttcagagttcgaagcttcaattgcggaaaaagacaaacacattgaatcacttgaagttgagctgaagttagcgagggaagagttcgaagctgagacaagtaaaataaggcaggagtcttctgaagctgttgttcacttaaaccttgctcaagttaaaataaaagacctcaaagattaagtaaaccacgtaagacagttgataattaatcaaattgctatattatgcaaattagcttgttgtttggttttttattgtctagctataatgtaaaagtgccagaataagactttgctctactggtgcacactttggattgacttgacagtgaccaagacgggaggccaaaaacattcttacctgtcttagtggccaaaacatgggtggcggacgggaggcatgaaatcggtgttcgacgacgaaaacacgtgtcgcgggaggccaaaaatagacttactggcctcctgggaccaaaacctgtactatggtttggacaccagaattctactgtgtgcaaatttactatggtttggagactaaatttttgttgtggcatggtttggacactaaaattctttgctactagtgtttagggttagggcttagggttagaattctgggtttaggtttccataggaaagtgtgcagctcacgggtagccaaaaagacccaacggcctcaggggactaaaacgtaggtggcagattggggacatgaaattggatgtttggcaacgaaaacatgtgctatagatcacgcgaggccaaaaacttctttaccgtgctccggagaccaaaacgcgggtggcggagcgctgacataacattggttgtttggccataaaaacatgtgttgtagctcacgggaggccaaaaagcattatctgtcttagtggccaaaacatgggtggtggacgggaggcatgaaattgttgttcgacgaagaaaacatgtatcgcgggaggccaaaaatagccttaccggcctccggggacaaaaac

SEQ ID NO: 131406 - DNA, 562 bp, Zea Mays
gggggctgggcaagcgtcaacaccatccttgcgggccaaattctctgcagtagccgcctctaaggctgaaggcccctcagttacttccataggatcaagatgatccaagtcagtctcctgaccctcaagaccgcgctctaaggtcgatgaggcgcgggatgacctcaacccagcatcgagcacatcagcacaaacctccatcacaccatcatctgctggctctgataacagatcctctggaaccatatcttcaagagtctgatcaaaattcgccagggacaattcttgcagaccaatgagagcagacaaagcaggagaagaaactccactactttcaccactggcgacatactgccgactgttcttccgagtcagagggacctcatcttcttcctccccgtcgttttcatcagcaacacaaacaatacacccattgggatcagtagcagatggagcacacccattgggatcagcagcagatggagcacccctattggggtcagcgtcagtaaattcaggcacaggcacttcttcagcagcaggaaccgaaggaccaacgtcc

SEQ ID NO: 131407 - DNA, 501 bp, Zea Mays
gaaaaagaaatggaaaagaaaagaataaaacaaaactaacctaattgggccccgactttgttttcggcccatctcctctttccttctctttcgcggcccactagctgactcaatcgcgcgcgcgcctggtgacttccatgcggatcccggtcgccagccacccaggtctttccaccagcgtcgtgtagtctctgttgcgtgggccaacatgtcagctctcaccttcctccccacgcgcggaatccgaggtacggggaggttgttgcgggcgtctcctacctcttggctgcgactcgaactcgtggctggcaacggaatccgcggatctcacgcggcagagaacgctgggctcgcagggtctttgtcctcgttcgtcgctggcggagctcaacaaaccagggagtaaaatccgcgcggggatctcgctgctgctccgctcggacttccttgccccctataaggcccgcctgaactgccatggggctcgaccacggaggtggt

SEQ ID NO: 131408 - DNA, 285 bp, Zea Mays
atgtaggagaagccactgtgtggcattgtcgatgaggcattgccagcaccactgttccctcatggtcgaaagtccttgccccgtggacggccagtccagccggcacggcgctacacagcataattctaccccgcgcccatccccacctacaagccctagctcctagacgggcagtccagtcggtgcgccgctagcctgcctacgccccacctcacctacattagttacggagtagaaaaatctacgctcctactacagttctccatgttctcctcccctattttc

SEQ ID NO: 131409 - DNA, 417 bp, Zea Mays
agaaagtggagaagtataagtgctttcgccaagatagcaaggagtgctatggtttgaagacagattggtggttcctagaaatagggatctcaagaatagaatcttggatgaggctcatctctccaaattctccttgcacccaggaagcaccaagatgtaccatgatctgaagcccctatattggtggaccagaatgaaaagggagatagcccaatatgtatcggaatgtgacacatgtcagaggataaaggcaagccatttaaaattagctggtgccttgcaacccctatcaataccttcatggaaatgggatgacatcaacatggatttcattgtaggtctgcccgacacctctcggcatcatgattcaatctgggtcattgtggaccgattgacgaaagtggcacattttcttcc

SEQ ID NO: 131410 - DNA, 329 bp, Zea Mays
tttgtaatcctgcacggctaaaggggtatcgatcagatctggccgtccagattagatcccacgatcaggattacatcacatcacaccaataaacaaatcggtacgcacctagggtcattggatcccgatcctatggaccaaaatggatcttgagcatcatgagcttgcaaccacccgataaaaaatctacggtcaacgtggatcccggccgatcctaaaccctatcttataatcatagccattcgtcacaaatcctaagacacggatcaaaactcgtgaaacattatgcgttcatctaatccctcgcgttgactgaagatccaacgacc

SEQ ID NO: 131411 - DNA, 475 bp, Zea Mays
tgtcctctcttaacagtggattttccaaatacaacatgacttggcctccacggccgatcttcggcgtcatcattgtcactctccacatcaaaatcctcgctgtcactagaacccccagatagtccagctaacatctcatcagtaattttctcaacattggtcctttccatggcttcatagaaactagctagtgcaaggtccacacttttcttttcttcggccatctcagcgctcattgcaacaaaaagccgaagctccaaaacaaccgcggttacaaaaattggaaagctaaaacgacaaacccaacacaaagcttgatagcacaaaaaatattttcaacacaaaccctcatatatatactcaaagcaccactgaacgatgggccccacaatataaaacgtctcgctattctagcgaaagaaaggtgttttttggacctttggcaaaaggccttcgttcatttcatagtctgaat

SEQ ID NO: 131412 - DNA, 636 bp, Zea Mays
ctacgtgaacatccatggaagtgcaagagggagaacccactcagacaccctcgggggctgggtcacagcttgcgctacccatccgagccggatcatctccggcaacaccctcgggggctgggtcgtagcttgcgctacccatccgagctggatcatccccggcaacaccctcgggggctgggtaagcgccaccaccatcctggagggccgaattctctgcagcagccacctctaaggctgaaggtccctcagtcacttccatgggagcagtgcaatccagaccagcttcctgaccctcaagaccgcgctccaaggtcgatgaggcgcgggaagctgcccgggatgaccccaacccggtgtcgagcacatcaacacaaacatccatcgcgccaccatctgccggttctgacaacagatcttctggaaccatgtcttcaagagctcgatcaaagttcgctagagataattcttgcagaccaatgagggcagacaaggcaggagaaggaacaccactactttccccactagctatgtaacgccggctgttcttccgaatcagagggatttcgtcctcttcttcatcatcctcatcaacaacacggataacacacccattggggtcagtttcagtaaatt

SEQ ID NO: 131413 - DNA, 664 bp, Zea Mays
tgacactagagcagaagcaggtattttttgttgcatataacataatattattgtttgcaagcacccaccatacaagttgcaatttgcctagacacatcaatctgtgtttacaatcattttttaaatttgtatgcaggatcaggaactagtctaattgcaccggaggaccaatctagaggaggtgatggtgaagaaattatacggagtcccgttgcaattgacactagagcaggagcaggtattttttattgcatacagtataatattattgttgcaaccacccaccatacaagttgcaattttgcccatacacatcactctgtgctttcaatcacttttttaaatttgtatggaggatcaggaactacttcaaatgcaccggaagaccaatctggaggaggtgatagtgaagaaatacagttggattgtagtggtggagatcttgatgacagcttagattttatgagaaccccatcgtgtggtcatgacattgatctgcaagagggaaatttgaatagaagtaagcctacctatgtcttccatgcttaaaaaatgttttctctcatcttgattattcccattttttcatttatattttttattcttccccctggcagcacctcctgatttacgtggggcattccgaagtgttgatgatatcttg

SEQ ID NO: 131414 - DNA, 645 bp, Zea Mays
tccaaattcgcccggattcgcgacctatgggcatttgaatttgacaaaacgccatgaactagccattcaaccgcaggtttgagccgcttagcgcgccattgcccgctccacgcgcgctaacaagggcccgagctcctgccgtgcgccgaggccaggaaacacaacgtcgagagcgtgctcgcgcctataaaggtcgctccaccctctgtctttccttcccaactgttgcccagccagccttcaccaaaatttcaccgagatcgagtacactgtcgcccgccattgttgcctaagcccggtcacggtgatccaccacctccggtcacgtgccacctccaccagcgccaccgccaagatcccctgagttccctagggctctccaaggccccaaccgaaactctacctcaccgaaaccgcacaatcaccttcgccggagcatgatttttgccggtgatcgtggacccgcttccacggccaaccccagtccaatttcttcgaggaatcatctccccgacgccccgtgaagcctccccgccggtggaatcgaaccctgccatcgccgactagacggaacaccaccaccgacgaactctgaccgcttggagacgtgagccagacaactctgaccaccatcggccgccatcc

SEQ ID NO: 131415 - DNA, 720 bp, Zea Mays
aatttatagtgattaacagcggtggctccaaattttgggaagaaagctggcggcctaagcaaggtgagtcaccggagtgcagctactgtggcgctcaacggggtaaagaccctggcagtaaacgggttgtccactgcgacgtcttgcaacatggtaacaagtgtaagcacgtggcacgactacgaagggcgacgaactccgacgaggacacattggtcaatcgcacgacaagtggcatggtgaatagtccggtgataaggctccaactcttccctgcgttgagatctttcaccgccagccattatccgcacaccaaagcgcatgaatcgcgacgactggcgtaaatcgcggcgtaagttcatcggcggtgagatacactgaatctgaagatcttttcgctactgtaccatcgggatcttcttcagtcattctaacagagcatcttcagtggtgtttttcttcgatttctatgtgataagctaccgaccagattacagcaaagttattaacatatatcccagctctaattcgaccataggaaccttggtcatttgttcactcgatcaagctcaaatcggtccaaagttcatcaagtttcagtcttcagtggtgactgacagtccaacttcatgtccatttgtctccaatttttgtacagcaccaatgcttagtcacttaatcaaacttgctcccctaacatagctctataagtttgatgta

SEQ ID NO: 131416 - DNA, 470 bp, Zea Mays
aatgtgggaggtttgtggctcataaatttctggtgcttgtccctgggtggagctggtggtggtggaggtggtagttgttgtcgttcctgctgttcttgacggagttcttgacgctcttaacatatttgtgcttgcatttctgtcatcatgttggccatttgttgtagtagtcgcatttgagctgcaaccacgtcaccagtcccagcaggtgggggattcggaggaggatgcatttctggttctagatagctactgccattcttcgacaaattcgtgtgggtagatcaacacctcctcccctcctggtattaaccatctgagttagcggcataggataagatagttttgcaagagacgtaatttagtaggcagaataaatagcctagtagttggttaccagtcgaaggagattagacagaattttgggtgactgtgttgtgtctaggttgggctaactatgtttatatgat

SEQ ID NO: 131417 - DNA, 576 bp, Zea Mays
ctcgtttctggtcgttgttgcgggttggggagacgaattcgaaggagttgtcgctagagtttggtttggttgtctgtacgaggggtgggtatgcacgtgccgttgtgcgtgggttcctgatcggtggagcggcgagtagccggggggttctcgttgggttagttggagcttggacgaagcaatgacctaaccatggcaacgaatcactgtggttgagctgttcatgcaatcgtgcttctccagagctgctacagaaatggaggagctgagatacctcagttgaagttgaaccccggcaattgttccggaaagaagacaaaatagaaaacacagttggggcgcttgaagatgctgtatgtatttataaggcaaatgttgtattctgaaaaacagaaaccattgctgatcatgcagagaataatatttcctgcagagcaatggtcgacattgtgatgagtatactacacagttgcagtctcaaattagagtggttgtcagcagaaaaaatcacaagccggacgcatcatagcgtctagtttcttgataaattccacatttccacttcaactttgttca

SEQ ID NO: 131418 - DNA, 390 bp, Zea Mays
ggcaagatggccgccgtgggcaggggcgctccctagctcggctctgttgggggaagatgaccggtctgccgtaggatggccgctggacggagtagaatagagcgcgcgtaccggttggatcccgacggtagagatctgatcagacggatcagggcgactctatttaaatctgcgctgttgatcgtgatttgagcggtctgcgccacgtaccgtttcgctggtgtcttgatctaattcgtgcggtcgggttaggatccaatggcctaggatcgctgataacccttcagtcaagcattaatgcaaagtagcccctcagattttgttaaatgaacccgcggtccaccctatacagcgactgagtcttcgattctttttgcgcttgagcccctg

SEQ ID NO: 131419 - DNA, 704 bp, Zea Mays
caaacagtaacgaaccctcgacactattccctgtctcactgacaatcacatttaaacccctctcctttctctcctttgcaagaccgagtccccgaccgtcgtccgcgctctccagcgaactcgtaccggccgtaatacccaaccaaccgtactctaattcggtctaggcctaattctaagcttggcgatccactgggagtcactaatttaacctgaacaccaccctagagctcggtccacgcacacccgcgaaggttgagacattctcgacgcgttcttgatgttctagcgctgtatatccaaattggtcgagccgacgagcatcacaagcacacgagagcgctgaaacacggataacgagggcgagggtggaccttagagcggctagccgcggtggggtgacacacggtggcgcagacgatcgatttgggggaagaatgaaattctcctgctatggtggctaatcaagggcgagggttggtgctctggcttcgtaacaatctagcggagctagctgtgcactcaatttatagtatctgtgagcggtggctctgaatttggaagaggaaacctggcggccaaagagagggggtgagtcatcggcgcgaactactgtggcattcactggtttacagtctacggtggtcactgctgagtcttcacgacttgcgacgggtggtaggatgacttaaggcgtgtcaaaa

SEQ ID NO: 131420 - DNA, 323 bp, Zea Mays
aacattttcaacttctggaggatgggggatgccgaagacaaaggaagaagggggaaaatatgaacttgtacggctcccctaccacttcaaattccaaaagagttttggcaagccgtgtgccgagtggttggaatttatagagaagatgtgcaacaaaatccttggaaattatacaaagaaggaagatcaactaaagacagctgcctccggcacacgagagaagcggagactaaatcgggtgatggatgcgctaggcttcgagtaccctgattatgaaagacttgatgacgaagccaggggattaaagagaaaagggttgtaag

SEQ ID NO: 131421 - DNA, 386 bp, Zea Mays
ggtgctcatgctctacattgatgatactctagctcatcttgaatttagctgcaaatgcagctgtgttggttttcccaagggcacggtgatttagaatgtcaccatgttggcagtagactagttaccaatgcgtggccagaccaaatttactatttattcacgagaaaaggtagccagacttttattataaattccaatagtatcttttacttttatgtattctagtatatttgagaagggcagacctagtacagtgtgaaagcattttgcggttgaagaattgcctcagtttattcctttcccagacccatatgagttgggagcctccggcactgggtctacatttttttattctgctatatttgggcatgctaagagcctaaggt

SEQ ID NO: 131422 - DNA, 547 bp, Zea Mays
ggctcctagcgcaattgcatgggtcggcaagcatcatagacatatgagaaagcttaaacgagggagaggggaggacgaactgaccggaatggggctggccgcggtgaggttggtttcggggcggcagaagcttgatttggggaaaaaccgaaattcaagctcactggtgcacgattgctagcgtttcttggtggctgggtggctgatgaccttgtggggctggtggagggctcaatttataggaagcaagagcggcgatcgggaattttaacggcgacacgcggcggtcggaagggcagggagttactggcgcgcatgaattcgtgtccaccgtcgtggcgacctcaccggcgacgattggacagccgtagcgagtcacggcgtcgcggtggaaaggcaaagccacgcgacacaaggccgagaggcggcggttcaccggcgaagctatccgcgccagccgcaaagcagaagggggagatgacggtgagtcaccggagtgacctccagctcaccggcggcagagatccttttcctcgcgacgttatcc

SEQ ID NO: 131423 - DNA, 1348 bp, Zea Mays
ttcgttcatgtgactgtctgtctttgttgccctgtgatgttcaagtgctccaaccaactcccattgctgactggggcacccctagtgtcctccagcccctactcctggcccatgaagggtcaaccccatctttgatggtctgactcgattacaaataggagcaacctatcaactaccggaatcccttcactacattgactacgtcgctgctagataactatcgcagcatgctatctggtcccaactagtgtgctgccatggcagatggtagcagcctctcatcgacaatggcacctggcgactagtgcctcaaccacctgacgccaacattgtgatgagcaagtgtattttcaaacacaaattccattctaatggatcttttgcccgccacagggctcgttgggttgtttgtcttctcccagcaacacaatgtcaactacaactagtcgtaacatcctaatggttgagctggccatttgtgccatgctcgtttttatgccatctacgtcgtgtttctcccagcagcatggtgtcaactacatctagttcattgttaagcattatgggtcaacctaaagcaaatcaaacttgcatccctacctagtaatgctaaattgtcacaagaatattcattaccaacccaacagctggctatcatctagatatagtatcgggagtaccaattcaccataaatttgcagcaatatggataagacatttactaatctgactccatttcgctcctatgtattcatgaaaaaaaacatttgtcctagacctcaagggtttaatatttttcataagtgaaattgaagttgtaaaaattttactgtgttatttcagatgggctttaaatgagataaatggtcaacaaagtgtacggaaatgcagcaagcataagcttttaggttccaaagaggaacacgcacaggcgtcgaccaacatagcaggagcagaggaagtaatgtcacagactcagtttagtttacaacgttggatatgccaaattagttctagtttttctgctctgtgaacctttttttgcattatcaactcccaccggactagtttggaccattgcacatttgcacactttaattagatgtaggtataaatagacttcagaggcaaactggatatagatgaaccatacctcctatgagaagtcgaatggatccatcactcattttcaagagaacatatggatctgcaattgaagcagatgcagctgcaagaggctcagaattcaatgacgattcggaagtatgcatagaaaagtttagctcttgtgtcatgaaggaaccatcaagcacacgagcacccttggcatatacctgtatgacgcgac

SEQ ID NO: 131424 - DNA, 831 bp, Zea Mays
tggctagtactgaagttaggtgaactttgagatcagacttgatcatgatcccgtgattgttagactatgattgctatagcaagattaaagctggagtatagatcaataactttgttacaggaaggttaataagttatcacataaaaatttgagatcaagaccctgaaacctgctctgtcaggcacctgaatcaagctccaatggtacagtgacctgacaaagatcgccaggttcagtgtatcatcgccagtgatcccgcgtcgtgatcgtcaccatcgttgcgattcatgcttagtgaagtgcggataaccatgtagggtgaaaaatctagcgctggggatgagcttgggaaactgttccgccctggccgccgtacccacttgcctcacggccggtccagataacctcgccggagttggctgcctaccgctcgggtgccacatgcctagacgcaataccacgtcaccgtgacttgccttagcatgtccggtcatcgcgggtggtcttggcacggtaaccctgcaccagtaactctttccctctccgatcaccagcgcgccattccaaattcaagagccacagccctcgggccctataaattaagtgtgccatcggctccgttgggtcatcacgaagccaaagcacccactcctgcctccgattagccaccagagagctccaatttctttctctccccaaatcagttttctgcacgccgtgaaccacctcgtcgtggccagcctcctgcaggttagctcaagcatccttgattgatgttctagcctcactcatgtccctcgttgctcacagaaccattcaattgaactagac

SEQ ID NO: 131425 - DNA, 653 bp, Zea Mays
gcccgaacatagtttggtaatgatgtgtccggtcacgaccgtcgtgggccaacaacgccgacctgggttccttccttgcgggtcttcttggcgtgatcttggtcgtacgccccgtctcgtcggattgctcggcggagacttggtcgttcgccccgcctcgcagacttactcgatggttcaccccgcctcgcagacttgctcgatggagacttggtcgtaggccctcattgcaagcttggccgacaaataaactagaaagaggtttatgggtctagccataggtataggtacatttggggggggggggggctgatgggttgtcccgatgtatgaaaaaagcacgatccagacacgaaacgatccgaagtatttttagtgtcggaccgacacgacccgatatattgggccgagtttggaccagggtcgcgactcatgggcgggcacgaacttggctcgtttaaggcacgcacgaaatagccatatataggcacaaaaaggcccttatattcattaaaaccacgcttcattccacatttttatgtacttgataaagaacacaaaactagagatgatgctagttagacattgtttgcagttttgaattagagtatgtgatgtaattttacttttgttataaacattagataataaat

SEQ ID NO: 131426 - DNA, 398 bp, Zea Mays
gtcatcgacaaattctattaccttagtcttagtatgcttgtatccttggagtcttgcatactcttatattttaatgtatacttatattcataccccaatgtctgtttaagacgttttagtttacatgcccttgaccacccttgtttcctaatgatccatgagcggtcattttattttgcacaccctggtgatctcgttaattccttgtaactttcttcggtaatgaatttttacttcaagttttctgtcggaacctcacttatcttatccttgattgtttccccactttgccacttcgtgagtcttgtctcaactctatcctttgttatgcttttcgttattatcgatgtcacctttgacacctccatatcttacattgaggttatcttatacttgcc

SEQ ID NO: 131427 - DNA, 448 bp, Zea Mays
ggtacttgaggtcttgatttatctagatctttgccattttttcattgtcctccttttcttaaccatcttcatctcccccttgatcattgtcttcatcttgaatattgtcataatcttgatcattgttttgagttgggggtgatgctttcgaacacatggtttacttgtcccttatggtttgagttgatgatgagtgattgtcaatatgggtagtactttggtgtagtagtaagcatccatgcttagacggattgttttaccttgggatacacacaaccccacacatatttgagtgccttggtgtgcagttggggcacaccctagctttaggtaggtcctcttggtgatagcgtgagtgtaccctatgtattccacccctatcatccaggttgttgtgtagctgctataaccaattccctataaagcccccttcctcatctggcttact

SEQ ID NO: 131428 - DNA, 501 bp, Zea Mays
gttcaagagtttgatcaaagttcgccagagataattcttgtagaccaatgagggcagacaaggcgggagaaggaacaccactactttccccactagctacgtaacgccggctgttcttccgattcagagagatttcgtcctcttcttcatcatcctcatcaacaacacggacagcacactcattgggatcagcgtcagacgggtcacacccattggggtcagcgtcagacgggtcacacccattgggatcagcttcagtaaattcatgcacgggcacttcctcagcagtaggagcagaaggaccagcatcccgatccaagctagacactcggcaaagacgtctcttcttctttttctacccatcagcaggaggagcaggctgattggctcggcaagggtgcttcgggcgaacactgtcaggcctctaaatatccaaggttttactagcttctgggagaggcatcaccaccaatgttccggcaggagcggcatcaaaagaat

SEQ ID NO: 131429 - DNA, 932 bp, Zea Mays
ccctacccttcctatctgtccatgcatctgtcatgattgtacatcctgtttgctcccatgattccttgtggttcttgaaaccatccaataccttttgtttccttttctgcaagaatggtccactcatctcataaggactaggccctctcaaacctttaccaaattgcccaatggcctcaagcataagtgcaaagctaggaagggtgactgtgttgtgtgcaatactagcttcatagaaaaactgacatatgtactcacaagccttatcccttctctcttctcttttctgagttgacaatgttgtttgaaccttgttgctaaggttaattcctttatgcatcatttgaacaaattcttcaatagtagaaggtttataaaatctgtcaatagtgccaccacgtaccactgttctacagctaaggctactagaaccttttgttggcttttgcttcaccacaaggacttcattcccaagatcaatatccacttgctcacaactttcatcttctcagatgtctaagttaatttcatctctctctttccttttcttttgctttatggtccttttcttctgtattctttgtaagcaaagcaatcatatcttctttcacatcacttggaaccttcaaacactttgtaacattattccctttaataccagcaaggtgccacttaattcttgtaatcccagctttgcatagcttgtcacagtacttgcacttcagccaatgcttcttgtttgcatctgggcaaaaacaatgagcccaagctacatcatctgagttgataatagcttgtggtgctgctgcatttgatacagaggcagaggcgacacttgatggaataactacacaatttgaagacacataatgcataatattaggaaaatgaaaagctttaaacagatgaacatctattgaagaatgtgttgc

SEQ ID NO: 131430 - DNA, 432 bp, Zea Mays
gctaggtagctagcgacgacctagcgtatgtaggtagggagggtcgcggctggagctggattgcgaggcgagcagtggagatagagaagttgcctgcgcgccgagctggtttaggagggtttagtagcattcgagggagtgatacgtacttattatcggcgtcgatcatcttgatggcgcgtttgctatgaacacgccccgaagagggtagaaaggaggacgtggaagaggagaaaggcgattgacgggatcagcgaagacgggaggtggtgggaaaagggaggagcatcgcatcggacgtattcagatggaggttacgcgtatcccaaatccatccgcgtactctctgctgctttgctgagcgtcaagtgtacagctgcatgagctgtgtgttgcggtgtggatgatgttgtaagctgccgactcgtgtca

SEQ ID NO: 131431 - DNA, 609 bp, Zea Mays
cccgcatcgcgtcccctggaggaagcagcatccaagttagatcactccttctccacctggcaaccggagaccgaggcctctgtcaccgacattaggctcgaaatctccaagctcaacaagttcttcgatcgcgacactcgtgaccaatccggttttcaaccgggtgtcctgggttccgagtcggcgcccgcgcacacatctactggattccgcgccgatgggcctcatggccatcgctctgaacctcgttaccaggatggtggtcctgggtttcacaacacccagccccatcacccggtcaagggtatgtatgaacctcccctcttcgctccacatcatgatttcaataggtcgagttaggttctcggtccaaattttcagggtgggttcaatgcccgtggtcatctttctcaaatgcctttccccagatttgagggtgctaatccgcacttatggcgatctcgttgcgaaacttatttcaatatgtattccgtagatcatgatgtctgggttcaggtgtcatccatgtatttggaaggcccatcggcgcgatggttccagtcaattgagcacaaacttgcatatgtgccatgggagggtttctattcc

SEQ ID NO: 131432 - DNA, 433 bp, Zea Mays
gcgccgcagcggagctccgaattcgtcgcgtgcatccatgatcgggtgggggtttccgggtctacggggcctatatctatgcacgtcctccttggattcactactcgccctatcattcacgcataagtcttccacctgtggcgtcgcgcagagtgtggtgaggaaccggagccgccacagagaagctgttgtttgtcgtcgactcaatgccagcagtggtgtccttggactaattctggccttggggtgaagcagtggtggtcgggccgcttggattccaccgtcaacagctccagggttgcccgccatcgactgggagtccattaccgaccgcaagccccgcgattcggcctgccagtgcgtcgttcagtggtgagacaccttcctcgtaccccgtcgtaccctactccatattttgaggccgctagcgcga

SEQ ID NO: 131433 - DNA, 712 bp, Zea Mays
gtctgatctagagtcacactcaaaagtatagcgtttgaccataaactcaaatcatggggcccaatggccagtctaaagccgcctagactgagttactggacccttttgactgacaacaaaataggtttagaggaaggtaatcttttagcctctcacctctatgtcagggcacatgtttggctacgaaccttctcgtattacttaggacctcataggggatactctcatgttatgccaaatttgtgctagcatgaactcctacaaactagagtcatagagaggtcagtggcgatgatgggataaccatgcccccaagtaccagtgatatactttgagcacacaacacaggacattacatgtctaaccctatgacaacattgtacacaacatgaagatgggaaatgcctcgctgaccattgtggtaggctgatagctctattccaccaacttatacatgggcacattcacttgtgaccatctcctcccatgatctcttccatacatgaattagtatggtgacaactatgatgactagctgcaatgacactagcccaagaagccctcatgaaggctatttaacatgtaggacacccaccctctttttgtaatcttgccacctcaactatataagcggtggctttggtccctttcttcttctatgaaatgttcttcataattctatagaagtcctcacaactttcatgatttcttc

SEQ ID NO: 131434 - DNA, 429 bp, Zea Mays
gtctcttttgaaaaatagccctgacgaagggatacggttaactctaggtcgtccgatcaaatatcgaaggccaggattagatctgtattaatccgaacgggtatgccacgcggaccgtccgatcacaatccgagcgcccaaaaaccacataaccgaaagggtatcagccatttcaatcacagccgtccacggctggatcaacggatcggattgggcgatgagactctacgcccaggatctattccacgccgttgatttttccatccacgaccaggagaccttcttctatctcacgctggggaaagctgggcagcaacgcccgtgtaccatggcggcgcagcacatcggaccacgccacccacgcacccgactgcccaaactccatactgtctaatgccgcgcaagggaatggcagggaggaccccgtgg

SEQ ID NO: 131435 - DNA, 431 bp, Zea Mays
acgaagggcacctaattcttataaaaagagaaaaggatcagttctaatacagatacatgttgggagaggcggagatatgagtagggaaaaaaggggaggggaaagaaaagaaagaagattacatgggggtgattacatattgctgaagaaattacaccatatctctatgtttagatgcaagtgagttacaagaaattgaagggattactcaatcatgccacgtaatgttcattgaatgtatttatatacaagttggggacagatggtacttacgatgcactaatctttggatggttttttcgccattgtccgacaggcaacaccttgctgcagtgaaggtgctagaacagtcgtcgacgacttgacctagacacgcgtgtatccagcagatcctgcgtgcgtgcacgtgtatccggccaacagatccttcg

SEQ ID NO: 131436 - DNA, 438 bp, Zea Mays
gggaatgaggaggtgtgggagttgttcacaaaggctcgatccagacgagctaatgtgggaacagagcgcatgttggaccaggtgaagaggcagtcctgtaactggagttcggcaacggcaggggagtcgatggtgctgttgaacatggtgcataggtggttatccaggtggccctggtttttgtcagcagcaccgcgcagcaaccccagctttctctgcctcaacgccgacggttccaggggggcgtcgtgaccgcctgggacagcgctgtgcttgaactcacgtccagcatctctcgctctttctccctcaccaccaccttcagctcgtactttgccaatgcgcccctcaccatcaccaacgcctatgccccatccaaccacagggactccccaaccttccttgatgaactctcagacctcctccccagcatctcag

SEQ ID NO: 131437 - DNA, 378 bp, Zea Mays
catcccatgcactagccgaggtcggatgagggaaggtaggagaaggctggagtactggaagccggttttgacgagagcttcccgacgacgacacacgatggtctgggcgaggctctgatggcgctgatctgtgctctcgatcccatggcatggtgtatcccacagttgtgcgctaggcaaggagcgcaacacctcattatttataccccgggatcagagaaggccggattacgcctggctgtgagtttgttaccgccgttatcgaaaaactcggtgaaatcctaacgaactgctagcgatatgttcgttcgtaacaacccggagaggcccgatgaggaggtcccacatggcagcgactattccaagagcgcgtatttc

SEQ ID NO: 131438 - DNA, 678 bp, Zea Mays
ttttgttgccttctgctttcttgtgctacgtggcctccgaatatgacgttgacatccctatcaatgtgagggaaagctccacctctcccccttcctgttgaggctgcctaggctcgtcaggctctcctcagggcggaggaggtgatagtggctggaacggtcagctgtgctcgacgaagtttttgaaatctatgctattccacaaggtgtgccgcatgtccttgtgatacggacactgggagtccacgatctcgtccagtgttcgtactccttcgcggggtgcgccgcgggcccgagcggtaggtggcccgatggtgtgcacctcctcgcggagtctcttttcccagcgtttgtccagttgctggttcgtgtcccgccacggtgcaggcggcatgggctttgtgcctccaatgagtcctaggctcgctcatccgcggtgatgtagacgtccgcctctgaacagttgttcgaaggtggtaggtgctttttgaagtatggcccaaacaaaggccgggtcgttggatccccaatagaagtcttcaatcacagtcgcctcagcgacttcaggaatacggttcctcatcgtttgagatcttttgaggaacgatctgagagtctcatcattctgtcgcctaatggatttgaggtcccatggctgtgcctgtttaccggagagag

SEQ ID NO: 131439 - DNA, 564 bp, Zea Mays
cgtggatgaccaaattgaagcttggggaagcctcatgggtttaccagaggtgacgcacacaccaggatttggactgggcacaaacagaaacgtgggtcgacgaagagggtgtcaaggcggcgttctatagagcaggtatgtgttccggtgaaaggcatcggccgaacatcaattggtcggtactgagagcaataggaggctacaaacgagctagaatagggagcaattgggaagttactaacccgaagagcgttgaccacggtggagttcctcatggcggagttaagaacagggagaaaggggatttgtggactgtgtgagttctccggtgaaattgaatcgagtgcttagtcgctgaggtgcgggatgtggtgaagaagcggaatccaggctcaatttataggccgtcgaccggaatcaaaggagaagcgcggattacagatcgcgccggcgagcttatcgtgcgggcggagtaacggcgatggtccggcgaccaccatttaaccgggcagcgccacctcagtgattctccgccatgtagccgaggatctttaccgtggtcgc

SEQ ID NO: 131440 - DNA, 1798 bp, Zea Mays
aaacaataatagatttgttatgaagtctaacatcaaactagataacagatggattgttccatataacttgacattgctcaagaaatatcaagcacacatcaatgtagaatggtgtaacaaaagcatattcatcatatatctgttcaagtacgtgacaaaaggtccggaccggagcaaactatacctacaacgagttttagatggtcaagacactcctattgacgaggaaacaaacacaaggaatgaggtcaaagaatacttagatgctagattcatatgcccatatgattcatgttggagaattcttggttacgaaatccatcgacactttcctcctgttactagattgccagttcatttgcctaatgagaattacattacatatcatgccagcgccaacatgtcacaaatcttgtcacaagaattcctacgccgaacaatgctaacagagtggtttgtagctaaccaattacatgaaagtgctaggtccctaacttaccctgattttccatccgagtggaggtgggacgaaaaaaaaagatcatgggaacaaagacatagacaaggtaacataggccgcatacactttgtgcacccatctgcaggggaaagatactatcttagaatgcttctaatggttgcaaaaggagcccagaattttgaatcattgcgaacatacaataatgttttataccccagcttcaaagagacgtgtagagctcatgggctccttgaggatgaccaagagtggtataatgcctttgatgaggccgcttcgtgggcaacgtccagtcaacttcgtgatctatttgtcacaatgcttcttttttgtgaagtaggtgatgaatttactttctttgaaaaagtctggacgttactggctgatgatattcagtacaacgcgagacaaatactaaatcatccaacctatcaaatgagtgatgaggccctaaaaaatcagctgatagaagaactcactacattattcagcaaaagaggaagtcgaatacaggatttcaatttaccaactagatctgactcaccttgtttagtgaattcaaatcgctttattgatgatgaactatcatatgacatttccattatgcaaactgaatccgaaatgttgacatcaagattaaataatgaccagttgcagcaattcaagactattacagaaactgttttggcaaacaaagtaggcttttatttcgtgtcgggttatggtggtacagggaaaacatatttatggaattccatcatgacattcctacgtagtcgcaaacaaatagttctatctgtagcatcatctggtgtggcctctttacttctactaggaggacgaacaacacactctcgtttcaaaattccatgtgaattagaagaaacaacagtatgtgacatcaaatgtggcatgatgctttctgagttagttcaagttgcatcattaataatatgggatgaagcgctaatgacagatagatttgcttttgaagctctagacaggtccttccgtgatatcttggcatcttcatcacctatggctaagaacttaccctttggtggaaaggttgttgttctaggtggtgatctcagacaaacattgcctgtgattgaaggaggcacccgctcacaaattgttaattcagcaataatcaattcttctctttggtctcatgtacacatcctgcatcttacacagaatatgagacttctaatgccatcattgtcacaagaagaacgacaagaactatcacaatttagcaagtggatgctcgatgttggggaaggcaaaatagac

SEQ ID NO: 131441 - DNA, 444 bp, Zea Mays
gccaaactgttaaaaacaggacccaactgtaatacttttagaactataagggacggtgggttagttttaataaaacaaagggtctcttttgaaagaagtgcacgacgaaggggtatggatgaatatctgccgtccgatcagattcaacggcacagattagaagttactcataccgaacctgtatgcaatccgagccacccaacgagcgattgacgtcccagatttaaaacaacccagaaacgatctcgctcgtccgtccacgatcagtggcccagatcagatcaaagtcccgtgaaccggtactcgatttccaccgttggatggagatcaaatggcccgagttttatcgcccagatccaatccgaaccacccattaagatccaacggtctcaaagctcacggtcgaaccggtacgtgtggcttaatctggggcgttcatcgctg

SEQ ID NO: 131442 - DNA, 1662 bp, Zea Mays
caaaaaacactcggcaaagaaccaaattccggtagtgatggctatttaggtatgttggttttttgaaaggatcaatctgtcgctagaacacacaaactgtctctccctctctacgaacacacgctgaacttaatgaggaaaacagtgagtacacgagagtatttggcgcagtgcacacacctactacattttctggtttcattcctacttacgcccaatatttacaggtagggctgagtcactggctgcatgtacccatgctcccgaagcggctgcgccatatcacagccaagaacgtggccacaatgcccagtattctagctccagcgtttgactctgcatgaaaggcaaaagctgttcaacgcacgcccgcaacgattgcgcaggaacgccacgacgtgctgaccacaaacccaacaaactttatcccgaagcggctgcggcatctcatagccaagaacgtggccacaatgcccagtattctagctccaccgtttgactctgcatgaaaggaaaaagatgctcaacgcacgcccgcaacgatcgcgcaggaacgccacgacatgctgaccacaaacccaacaaactttagacgctaaaatcctctagagctagacaccagcgctacagattattcttctacaatctccccctaattgtgttgcgttggttcaatactggtgacaccacttcgtatccgcagttcctgaagacgctcgcgcggaagtggctttgtgagtatatcagccatctgatattcggtgcggacaaagtccgcctgcaacgagccgttgctgacacagtctcgaatgaaatggaagcgaatgtcgatgtgctttcttcgatcgtgcagtactgggttcttggcgagggctagcgcagacttattgtcgatgtagaggagtggcgcgacgacctttgtgttcagcaagtctgcaagcaggcgtgacaactatactccttgacacgccgcggtggcgctggtgatgtattccgcctcacacgacgatatcgcgaccacgcgctgcttctgggaccgccagctgactaggctctagccaaggaagaagattgcaccagaggagctcttcctgtcatcaccgtctccggcgtgatcggcatcactgtacccgatcaactccaatgttcctttcccgtggcgataaacacacccttgggtcatcgttctggcaatgtacctcatcaaatgcttgacgacgcttcagtgctcagtcgtgggctcctccatgaaccgtattacatagccaactgcaaacgcaatgtcaggacacgtgtgaactaagtacctcaaactcctgacgatgttgtggtacaaggtcttgtccactagtggatttgagctcgccttgctcagcttgaggtgtggctccatcggagtgttgcatgagttacatcccgcgagccctgccttctcaatgatcttgcctgcgtaggtactctggcacaacgtaatgccccttgcgctctagctgaccttgatgcccatgtagtagtggagtggtctgagatcgctcatgtttaaaagcttcgccatctcgcccttgaacttgacaactttctgcctggtttgctcccactacaacgaggacatccacatagactccatcgatcagcaaatcatcgctggtgcctcgcacgtac

SEQ ID NO: 131443 - DNA, 347 bp, Zea Mays
ggttgatgctaattataatggtaattcttaactaaaagtatgctttgcctaggtaatagtttgctttgagtacggtgagttgcatacattcacatctatttctcacctgcttcttttcctacttttttggatcgtccattaaataaaaaaacaaactatttactatgcaaatgtaaacactgatggaaccggctatatatgtgttcacttcaaatgatgaatgttcttatatgtatgtcctgaactataatggcctctctaatgtcacacgtacaatccaaaataagtgcaccacccaccaacccatactgctctcatgtcgtgctctatcaatgcctcgggcttag

SEQ ID NO: 131444 - DNA, 775 bp, Zea Mays
caaaaatcacaaagaaatgtgcctgaagatgggctggcaggctctaggcggttttcagactaggaatagtagccaagtctgagtcagtgagttttactcggttatgaagttcttctgcggttaattcgtacaattttgaaccaaggtacctatagtatgtggaaagatccttccaaggagagcaagtgtgttggagaagatgagcttggtactatatagggttatgggcgaattgtactctctggtacactcctaggctgttttgggactgcaactgaaattagtactgaatatctgtatcagtgtttttttgctctactttagagcctgtcaacttgtgatttgtgcgcttttggccctgaaatgttctggcaaaatggaagtccatacaaaggtgagtaagccccttgaagtgattatgtcttgagattgtactgaagttggagtcctaagcccaaaactatcttcggtcaggtgtcgtttttgttaactgaaaccagttttcagtgttatcctcaacattttgttggacctgataactcttgatccctgcacccgtggttttgggcaagtgagtcaatctgatagcgctatggtcggaggacatgtttgtctaactgttttgacttggtgccattaaaattttggaatgagacaaggataaacatgtgggttcagtaaagctaatgtggctgggttcagagaaatagaaaatatcggcaaaagatctcattctgttatcttttcaatgggagattctacgaaaggacttcaa

SEQ ID NO: 131445 - DNA, 543 bp, Zea Mays
gttttgaaaaggtttaacatataccttcatcggttcactccaaacgctatagtgcgtctaggaattttcatttgggttgtatccttgagtcgtttcaacatagccggtcccaagcccggtaaaggaggagggttgtgttaggtccgacaaaccaacgtaaaaaccagccaaatcttatggagatgaaaccacaaagaaaatcgttggggcgtaaccctcttagcgacgcgccatatcggaacccgggtatggtgttaaatgagcaagggtcgggccgtcaccccttaagtgacgcgccgtctcttgatctggagtcggtgataagtgagcaaggatcgggttgtcgcatccttagtggcgcgctacatcggcgcccgggtgtagtggaaaatgagcaagggtctttgcatcttcctcggcgggtgcgaagggtaaggaagctagtcgaggaagaatcaaagaggctaggagatagaatcatcctagtcaaactggtcattggggacttggttctcaatgttatcagcgcatatgctcctcaag

SEQ ID NO: 131446 - DNA, 388 bp, Zea Mays
tcactatctcatttaaccggttgaacatatcggatacactctcatcttctttcataataaattgctcaaactttcctttgcacacatatagcttggcactcttcacaattgtagttccttcatgaatttccattagcttaatccaaatctcatgagcagttgtgagattcttgatatgattgaactcatttatatcaagagcatcataaaatacattcatggcttgatcatttgtaaggatattctcattgtcactaacggatggttcatcttctttcaacacaacaaatccatccttgacaattggccaaaattttccacccattgctctaagatgcattgacattcttattttccaatagtcgtagttattctcatcaaaatgcgg

SEQ ID NO: 131447 - DNA, 356 bp, Zea Mays
ttagaaatgagatacacttacaagacacgcacacgaagacaaagggaggagaaaagaaagaagaaggacaacctcaaccgcctactgagcctaaccacaactccgaaactaccaggcacaaactaacacaagaaagcaccaactagctcttttactaaagaagcgatctgatctgcatttttctgctgattcctgaagatcctgttgtttctctctaaccataagctccaccaaaaatagatcagaagaccatcgaattttcttctagattgcctattacagagacctcttatattcctccaccaaccatacagcgactcggatgcctggtttcctctcagaaaagaacagttccc

SEQ ID NO: 131448 - DNA, 289 bp, Zea Mays
gcacgaaccgggcgccggaactgggtggatacccaggcgaagaagtgagtgagggtggtgaacgtgtcggacttcagccgaagggggaaagtccaaagaaaatgggagtagtcgtccagaatgaccaggtagtatttgtagccggagaggctaaggacaggagacgtccagagatcacagtggacaagatcaaaggcctgaaccgtcctggacgtggaggtggaaaaaggaagacgggagtgacggccaagctaacaagcatgacagagacgctcagaagagccccgag

SEQ ID NO: 131449 - DNA, 480 bp, Zea Mays
aagaataagaagacaactccaaaggagaacaaggaggtaactcttgagatattactttccgattgttctaattatgattcatggtctactagagtgataaatgcttttagaaccgtagatccacaattagaacaaattttagacaagagtattattcatcctagttatgataggaaaaatgcttccgaggaagatcaaagatgtatacgcttaaactatctagcttatgacatcttaagtaattctcttaacaatgaagattatcgtgccttcatatcaaattataatgaatctattcgtgatgcgcatgatatttggactagaattaaagtcaaatttgatgagtccaaacatgatagttcattttgtgcttctacttcctttggtctttgtgatactaacccttgcaaggaagaagtagaaaatgaccaatggagaccaaacgatgaatccacctctccaagaggtttgtcttcccac

SEQ ID NO: 131450 - DNA, 746 bp, Zea Mays
gtccgatgtgagatcgacgcctaccacatttttgccccatcccgagcaccccaggtggcaggtccccaaagccgagcggcggcgccatggccgacgtgacacagccccgcaatcccaaagcccgaactccgattaaacgaaagctacgcaaagtggagatgatgacggactcgaaggaaagctccataccagctattgggtcacaggaacgcctggccacagcgcagcacgagtttatggcgacggcgaggaattccggtgagctcggtggtctatttcgtccaaggatcccccacgcagaatcccgagaccgcgacgaaccaccctgtcagcactaagtctccacgtggtgccaaaaacagggggccgacggcggcggcacacaccttgtgcagtgcggtttctacgtcggtgtacggtcgtcgatagggacgattgagggagcacgagtccgcgaccatatatacacaggcggtggcggcatgcgcggatgtggtttatgcccgcagagtccgagctccagggtgtttgataggcgagatttccgggctgttacaacaacccgatgtttactccatgtgcgagattgagagaggaaaaattgtctagcgggtcccatcaagtggccaaccactcggcaccagagagcacacatggcgaggggagaggtggacgaagcagtgagaattattgagtggatctcgggtgagccactagcttgaagatgaccctgacaagctgagcca

SEQ ID NO: 131451 - DNA, 378 bp, Zea Mays
gtcgtgatttcatgccttcggtattatccacggccttcgccttctgcagcttcgaccatgtgttcttgtggttgagggggtgttctgtcttcgctccaacacgagcccctgaggggttggttcaacttgttgagtcaattctgaagtcatgtgaaggcgattgacgaacggtaccctcgatcacaagttgaaccggttgctttttgtatgtgacccttggttgctgacgtgttcggcgacgtagggtggcacatattttgatgaaattctatatataaggacgaagcagaacaaggtttttcctttttttgcacactgccacactcatcctctttagttttttgctctcgcctcacatttctctttgccttgccggtg

SEQ ID NO: 131452 - DNA, 511 bp, Zea Mays
gtgcaaggcgtgcaggctgacaaactagtcaaacacgcgaccaaaagcaggcaaaaaagtggtatgtgggctcgaagacgcgtgaaccgaccccgcgcatgcagaggacgtgacttccttcccaaagactcgctgacttcgagataagtcggagtcaattttggggatagagagggggttgtaacaatcgtgcggagtgtgtgaataactcgggttctgccgacataaggcagaagaggcacccctatgaaaatcagagatctcctagtaggcatagtcatcttcaataccatcatcagcttcaccataggataggttttccactttggatccttctcctacatcgtggaccggaagggcgccctactccgcttggcggacgcagggaaggaggtctagaggtctcacaccaccacctcgacatagaagaagtcctcgtcgtggctcagggcgacctcggcaacgatcgtggctagaccttaggtggtcacgacgtgagcggcaccgtctg

SEQ ID NO: 131453 - DNA, 592 bp, Zea Mays
aggctcctcactaaggtcccaagtttgggttgagtttattgtatttcctcaagaaaggctcctggtcacatccacaacaattttgtaagttgatggcaagcacaaagtaggcagcatttaagatcacccgaatcccagtaagggcccgcacgaaattgtgctctcaaaggaaaatccttctttttggctcatgataacaatagtttacagcatagtttaatccccacggtgacctcacccatttcaccgctaagaaaaaaaaaacatgtgtacaatattcagcaaccatatctctttgttttctccataagtgccttctgggtcaccacaggataataaagaatagcttgccttaataattgagcatgatgtcttccttcagaacaagtttgaaagctagttaacaaacccaaccgatgtgggcaaggactataaactatattataattactcccagtgacataacctactgcataaaaacaagcacttgagattgggtggatttcacttaaagtcatgtgaagtgattccccagtatacttgactatgcaacaagtgattaaagaaacacctaggccaaaatcaagtctag

SEQ ID NO: 131454 - DNA, 563 bp, Zea Mays
ggaaattcatattcctacagtcaataaatgtttgactatgcggaagttaagtccggcagtgtcgcgcaacccaaactgatcagaatgatctgaaattttggcactatctaactgggtttaggtagaggtgttttgtggagtttgagcactgaagaaccaaagacatagacaaactcatagatttataactatttggtgtcctttctttgccataagctttctcccttttggtgcttttcctatcgcaatgcttagtaaacagattactcccctaattgtatgatcattataacaaaacccacaattagggcttgattgcacttacataaaggggccctgagtctccgctaccgtgattctaggctagagggttgggcatggggccaaacatccaaaaagagggggaaactacgactaaggcaggatggaaagctcatcgccccctcccattctaacacctcgcgcaactatgagagcacctagatgggggtgaataggtgatcctgaaagatcaagactaaacaacacaaacttggtttatgaaatgttagtgaggtcaaaac

SEQ ID NO: 131455 - DNA, 397 bp, Zea Mays
aggttttcggctgagggcgtctgctaccacgttggcctttccggggtggtaatggatctcaaggtcataatctttgatcagttcaagccatcttctttgacggaggttgaggtctggctgagtgaagatatacttcagactcttgtgatcagtgaagatgtggcatttgttcccaattagatagtgcctccatatttttagggcatgcactatggctaccaattccaaatcgtgggtggggtaattctactcatgcggcttgagtaagcaggatgcataagcaataactttctcattttgcatcaggacacaccctaagccttgccttgaagcatcacagaagatgacgagttcctggtgtatatctggtagagtggtagcgtcaaaacgggcgcgg

SEQ ID NO: 131456 - DNA, 920 bp, Zea Mays
atgatattgaatattgcaatttattgaaccccataatcatctgagacagcggcggacgcaggctgagaattcatggaggctagaaagaccacataaccaaatcaagcaagatcgtaaaaaactagtgttgtataaaattcaagtttcatatcaatatacgatatacaagttcaaaggataaactgtatgaacacaagaagcaaacataccgctaagtttttgatgaccaaatcaaagccatgtaccttgtcaaatgtcgatctcctagaagggcaggggtgccagtaaagggatggggtcaagcgacgtctccagctgagaggtagggcttgatggttcgacaagcttgttggccgtggagacgggtcgtatcattgcgacgagcgagacctggctttgtcgggcgggccggtgtcgcgacgacgacgaggcgggggtggaggcgccgggaaggggtggggtcggacaacgtcgcgtcagaaaggaggcggcgattgaaacggggcatcgaggcaaactggtttaggtggcgtcagaaagattagtgttgaactgatagatgtgaggactaggttggagaggatatggcgaggaggctcatgacaacgttgttttaggccatgtcccaatcctctaaagctaattgctaactggttttagctaggttgaggtagctaacaactaatgattatttgaagggtatagctaaaatttagttggtcaattttttgattcattctaaacttctcagctaattttagtcgctagctctttttttagaggtttcgaatatgactatatcatatcaaaactttgattttttcttcacttaacaataaatgatcattatgtataaaaggttataaaattgaggggggcatggcccactttgcccctgtaggaaacgggtgtcgcctaag

SEQ ID NO: 131457 - DNA, 737 bp, Zea Mays
acgtaccgcaactgggaggtgatggagaggggtcgaccacgggcgacagcgatatgcggcggagaaaccgattccggtgaggaattcccccaattccagccgatgttctcgcaccaaattgcccacccgcgcacgaccagagccgcgaccacccgatccgaccgtaaacgcagccggagtggcagtcaccggcgatgttccacgcggcggctcaacacttcccacccgcagatgcctggacgacgcaatggcgctgggtgattctcgggtgtcgtggagcgaaagggaagtggagcccgcggcagggtacggggccaggtcttattagccgcaacgcgaagatcacgggcggaggctcatccacgcggtggatccagtcaacggggcgagttccgcgccttcgtttgcggaacagaggatggggacgcgccagacagacgggtcccaccgagcggtgactaaacgtcgtgcgtgggagggactaagccgagggcccggtcaaccagcgagcgcgcgcgcaggtgaagaggtcgtttgggccgcgcagaaggaaatggtaagtgggccgaatagggcgtttgcggcccagttaggttcttttcccattttcttttgtttttattttctgttttcttttatttacaattcttttgaatccaaattttgaatgaaatctcaagtgcaaatttaaactcatttgaactatgcatattggtcataccaaattatgaggatgt

SEQ ID NO: 131458 - DNA, 920 bp, Zea Mays
ataatctaataagagttcttattgttttttttcgagaacatgtccgctatttcattgagaagaagctgaagttttattgttagctagccatcataaactgtacatggtgtgtattcccttccgtacattccaatatgatttttttactgccctggagtcatcccctttattcactttggttttctttttctccaacaatatacagtatatatgcatctgaacatgttactactaggtttgcagtgaatgcgatttactttggttagttcttgagatgatacacctcagttatgaggtttcatttatcagcactaggttgattaattaggagagcttacagaaatcgagtgttattacgtatgtttttttccagggcatgtaatctctagttgagccctcattccgttaacccttatccttgactattatacatccacagtttggtgcttttgttgagacgcgcgcgcgatacctacatctgaaaacaatccatacattttaattgtaggtacggccaaaaatatctcgaaataaaaacagactcctgctaaattttgcttgactgaagcatgtgataatggcatctattttccttgcgagagttttgcttttgttcttgtcacaccgtgtagtttttcagattgtagcctagtgaattttgcttgacgacgccgatatataccatgaggtgaagaacaagaaccattattactacagcccccaaaaattgcacttgacttgcatgttgattttacttacaagttattataaaaggcacaattatatctattactatctaattacaagtgttaaatgaagacatcacattcgtgcagagttcttagaaatttccacataaccaaaaatagaaggacctacaccgtctgattttataacgatctaataacatatattaaagc

SEQ ID NO: 131459 - DNA, 377 bp, Zea Mays
agcacaacaagtgcgcaaaatcgaagtcttcttcaaaagaccatccatgcaaaagtcgcctaagggtgcagccggactagcacaacaagcgcacaaaatcgaagtcttcttcaaaaagactatccgtgcaaaagtcgcctaagggtgtagccggactagcacaacaagtgcgcaaaatcgaagtcttcctaaaaagactatccgtgcaaaagtcgcctaagggtgcagccggactagctcaacaagcacgccaaaacgcaaagcgttacatccgtgcaaaagtctacaccaagaaactgtccgcgcacagaccaactacaaggcgcagccggaccaacgtatgaaatgtgatagaccaagcgcacaatgcccccatg

SEQ ID NO: 131460 - DNA, 903 bp, Zea Mays
tacaatttcttttctcctatccacaaatttaggtgttactcttcttctcttttccctcttaacccatttcgtttttcctttataaagagagtcattgttttagttggagatgtattaattttctaatagacaaaacccaaatgaagtatgaaatgttgcatcatgctgaaccccaacttttgtctttgtttgatgcatatgcgtgagtttggcatatttgaatttgagtcagccaagctaaccaaccctttccaccctcggtcgttcagcctagagccaaccgatccctcagccatgcttagtgcgcgccttccccttctctctgccccgcgagcccgccctatcgacatgccaccctcagtcacatgctcgctctcgcgtgctctctctcttctctctaactagctgaccccacccgtcagccccatcctcttccctcgcaattgtccactccatagaggccacgctcacctcgtgcgttccatgcggataaccaccgcccacaccccacgaccctcgtcccacgcgcctcgctcaagcttcaaataaggaccctggacccccagcgcccccactcctcgccctgcccattctccccaaccatcatgcagcagcgccgccgccgtcgcgatggtcgtcgcctttgtcacggtgagcttcgcctcggtgccagtcgcttgggacttgcccccaatttccccctttctccctctagttggcctatcctcgcccacagccatttcttggtgcagtattagagccaccactgtcgttcgaagtcgccactttagcgttgccgcctctgtggggatcccgagtctcgcattaaggtaaggaatctcccctgccctctccattcccctcccttactctctatcatgcacaatttcttgtcgaagctcc

SEQ ID NO: 131461 - DNA, 409 bp, Zea Mays
gttgtgttaggactgatatagatggaataatgactgacgaaaaccaacctagcaagtaagatatgttttttttttgtatgcaaaaatgtttcatttttacattgtaatgtgtgattgtaatctctttatgtcttgattcaggagtaaagttcgtaagaggaagaggaatgggtaaagaaacagaggtcaatgaatatgaactacagagggctgccaacataagagaaaatatgaagaggatgagatctcttaatctccctgtacctagtactatggttaatgaagcaaatggatcacatcgagccaacaagaaacacaaggttaatgtattcccctatttaataagttcatgttttgaacctgtatgttgaatgttttcaacttctttgagtgcagacaaggaaattag

SEQ ID NO: 131462 - DNA, 652 bp, Zea Mays
gagtatccctgctgaacggtgggaccagtcaacccttgctgcggggacctcagcatcaaggtctctacagtgacccatacgttagaaggaatagggcaatacgctatactagacgtacgtctatgcatgatggaaggtgacgcagaggggatggcggatgatgaagctatactgaagacgtctctaaacctcaccacgagctgacttaacgagacccacatacaccactacgtttgcatcagaatagctacaggaacccgtatggtgaacggacaagacgcgacgctatatcaggggtacgacaccgcgcgatataggagacgacaccgtaggggctacgtcgcccggaagcaagaggccgaactccaccccgacagaatataagttctcattgtaaagtctacccttgagttataaaagggcaagacaacccacatcttcaaaacacaacgacacacaagcactcaactgtaacatactccaaacaatattatgatcagcactacactagactatggcgcaagcctgaaccagtattacctctgtctcggaaccaccttcgagccctccgtggctcaccattcggaaagagtccatgctagctccctgtcgaacataaatcttattgtccacccggtttccgaaaccatga

SEQ ID NO: 131463 - DNA, 902 bp, Zea Mays
tggcctcgatcttggctccctaatagtatttcagtaggatttcattaggagaagaggcgatggtatgaagatcgtgtaactttgtaaatgaaacttaaataattgttggcttacatggatgtcagacaaaatgaaatgttgtctatcacgataacgtggctcaatcgggaatttaacttctacccgagcgacaatactgtatttccgaggtagcccataaaaatcttcatcacggtagtcgtcgaacaacctgtagctatattaaacatacgactaaataacggtcatttctttgatagacaaattttgtgtaaatagatttatgtaataacttacataggcttccgttttatgcggtccgctgcgtctctttctcggttcaatacgactggttccatcaaaaccttgtagcctttaacaaaatttaaaatttaaatttaaatgaaacacatgtcatactttcgcggttcaaaaatgtgatgttggcatatgcaacttgatcaattatcatgtcgtttactttataaagccatttaatctaatcagtcatcatgttgtcatcgaggttctgatttcaagcgagcttatgcattcagtctccctaggttgttatatacatatgttcatcaatgggtaagaataactggtttcatgtttgttgacgcgagaggtactatgggacggctacagagaactgcaaatgcttgttaagaaattcaaagtgagtggttgtctcacagagcaaccgatgtaattggagaagaacattaagataagcacttaagggtgtttgcctttgtgttgaatggtatattcggaaaagaacatgaagagaagcagatgacaaagagaattgtgaacggatgcaagtgcaccgaactcaaagtatactaccatccaag

SEQ ID NO: 131464 - DNA, 585 bp, Zea Mays
gttcaacataagtttgagctttatgtatatagaaattagaggctatctaaaaaaggacaatttagatcgacaaacctcacatgcatgagatacaagacaagtgttggtccaaaatgagtgatgcatacgttttgttactctactaacccaatattaaaacatttaaataaccctatatggggccaagtcgcacttgtttgtcgttgtcggaggtcttgacacgggatggacgaggtagggctacgcttagcgtgagggccaggtgtgagggcctttcttttcgattgcgggtgaacatggtggataggcatggaagccgacacgtatgggtaataacgagttagcacgacgatggcagcaggaaggcacgagcatggtggcgatagccaggagcgggggtggacacgaggtgcggtgggcgaccgagcgatacacaatggcaggggggcaaggaagtggtagcgtgtagccgcacgcaagagctaggggcacacaaacaatgtcggctagccaaggggcggcgacagtggcatggagagtgggggtagccttaagccagaaaaaatagacttaatttcagtggct

SEQ ID NO: 131465 - DNA, 585 bp, Zea Mays
cacttaatattaccagaaatagtttgaaacatgtttcgagaatagcgtatttgaacaggcacagaccatagtcccatgcatgagctagttcgtcagcaacattcatttttaccttgaaatgttgctctggtgtttagaaacaaaacaaaacaaaaaagaaaaagaacggtagatgcttgagactattgcatggttaaccttttttttagtatttggatgtgcagaaagaatcctctcattttggcgtgtaataaaggcgtattccttgggacaacctagcagctttcgaggaattctttgggaaatttcctttctttgcctaccccgtgtacccgcgcgcatttctggtaaccgtggccttgtctttgcctactgctctgttcatatgtactacaggacagatagagcgtttgtcgtctggtgccatcgaccggcatcgtgaacgggacgcaagaacagaaagaggagtagagagtccgtgccatgccggagagcggagaacgtgccagattttcgcggtcggcgttttttcgtcagagtccgcgcgcagtgctgccggagaaaacgcgtcgacgcgtgtgtcgg

SEQ ID NO: 131466 - DNA, 358 bp, Zea Mays
taggccttcactaccatgccttggggtcttcacttttctatggcttatcccccatgtgtgccttcgttttctccctcggcttactcccctgcataaagcacttcaactataggttagaagtagagagtgatcaagggccggttctgtcttcgctccaacattagcccctcgagggatgtgttcgacatgatgagtcaatcctgaagtcccttcgaagaggtgtgttgggggtcttcttctccgtcgaaggtcctcaagacaaagacatcatcggcaaagtgatactggagacgttctttttctctgccgaagctcctcaagacgaaggtctcgtctgaaagcaacgatgcaagtgtcg

SEQ ID NO: 131467 - DNA, 416 bp, Zea Mays
gatatcgacggtgcagtacgaggcataccacacagtgcttttgacaggacggcgaaatcgatcacagctcgatggttcgttaagaacatggcaaaacacaacggattatatagctttaggccatttggaggcgtaatacccaacgtcctgtgggtttctggtggttgtattgctctgagttcgagaattacaggtgattgctgaaggtagaatatgaaagtggcctatgcatctagcgggatctaatggagtgtctcatccttttggtaggggtacctcttcagtcttatatagccgaccaagagataacctcgtacagattggaattctctacgcgtctacccatatccgctatagatgtgccacgtctttcgaagtttcattagcttcccgcgatgtttgcgcacgactgcatg

SEQ ID NO: 131468 - DNA, 354 bp, Zea Mays
aagggactggagaagctaggtgactagccatggtggctaacatttggggacactgataggcacaaggacatggaggagcagatcgtgttgtcaacatggttgcggaccggtaggacacgagtccaagatgtgggagacacgtatgtaggacgctacccacggaggttttggtggttgagcctcaaagccacctagcgctatggttcactagattcgctaggtttgggcctcaaaactcggcgggatagtcctgactagaatcagaggtgacatgtagcgtcattgcgaagagtacatcaaggtgaagcaacttcgtgaagagtgtgtggctattagatcaaaattctaggagtt

SEQ ID NO: 131469 - DNA, 385 bp, Zea Mays
cgaacagtcttttcccttttgcagcaacatcaatttaaagtcaagctttcgaagtgtacctttgctcaaacaaagttatattaccttggacatgttattagtcaagagggagtggcgacagatccggaaaaagttgctgcagttcagtcttggccgaccccaaccaatgtcaaagagctccgcagttttttgggtttagctggttactacagaaaatttgtaaaaaattttggcatcatatcccgccctcttacgaatttgttgaaaaagggagaactttacatctggcattccgatcatgaccaagcttttcagctgctcaaacaagctctggtgaccgccccagtccttgcccttcccaactttactcaaccatttgagattg

SEQ ID NO: 131470 - DNA, 348 bp, Zea Mays
gtcaatgacatcatggtcaagactaagaaagggtcgacactagtggaagacttaactctggtctttgacaagttgtgggcaacacacacgaagctgaaccctgaaaagtgcgtctttggtgtctctgcagggaagttgctgggattcctggtttcacaccggggcattgaagcaaacccagagaagatcaaagcaattgagacaatgaggcctccggcccgaatcaaggacgtccagaagcttatggggtcactggccgcccttagccgcttcatctcaagactagccgagagggcactaaccttcttcaagctattacggaagtccgacccattctcttggaccgag

SEQ ID NO: 131471 - DNA, 514 bp, Zea Mays
taaggatgaaaatatcttcttcagatattcttggagcacactaaactgctactgcttgactgagttcacaacatcactccttcatttctcccagtttcaaaccacaacagggaatcaaccttaatgaactttgttcaccaactaaccctctaacaattttccgttgggaccttagtcttgtacctcttggatcagacacaaaacagctccaaattccaaggaaaaacactaaaccaaaccaacagtgaactgaatcagcacaacactgatcccttgcagacctccctgttcaaaccttggtttctcacaattccatatgtcaactggtcaatcttccttaaccaaaactattcttcacttatagcccttcctacttggtataacactccatggcttaaaatgctcagaacaagagtggtggtgcactggagttgagcaacaacactggaaatccaatttcaaagtctgaaatagcataccaccaagtctgacagaacatgtttgggaccatttt

SEQ ID NO: 131472 - DNA, 452 bp, Zea Mays
caagaacgctggatatgaggttttcgttggagcccgtaaacttgcagtgccctttacagttcaccgctgcggtgttctgcgagctgtaaatatttgaggtcttcggtttaccgtcgcgggtgcggacagcctaagaaagaggaaggcagcgagctacattcgccgtcggcacgtcactggtcatgaagaatcatgatctggccccaatccgccgaactactccgtatgacgaccaaatcatggtccgaatacccatccctccttctccttatccattaggttgaccagcacaggcatccaagagataacatacataacggcggcccaactcttgcctgcctgcctgctaccagttccaatcccaacctccgtctcccagctgccgccggtcggccgcccgccacctgctgcatccaatccaatccaatccaaatcgatccgctccatctgcc

SEQ ID NO: 131473 - DNA, 486 bp, Zea Mays
gtttgggccttagagtgcgaccctctgccgaagaggttagtgctttggttgctttgcttggagaagttcctgaagatgaacggcaggttcattttgaggtgcctttggatcccagtgatgcagagataagtgctatgcttgatatgctggccgaggactcttctgatgctgctcctactgggacattggcagtggcgcctctcccagaagctagtaaaactttggacgttcagaggcctgctagtgctcgcttgaaacgcccttgccgagccagtcaacctgcttctcctattgatgggcagaaaaagaagaaaagacgccttcgccgtgtgtctagcttggatcgggatgctggcccttcggctcctgctgctgaggaagtgcccatgcctgaatttactgatgctgatcccaatgggtgtgcccaatctagtgctgaccccaatgggtgtactgcccgtgttgttgatgaagatgaggaggagg

SEQ ID NO: 131474 - DNA, 578 bp, Zea Mays
cccgcacataacctgcacgtcgccgtggactttgcaccaacgacgcacgccgtggccgcactcgtccccaccctggcctttttctagctgcccagcacccgctcgccctcctcttccctcactcgcgcactcgcagccctcagcactcgcctcgcaccacgcgcacaccctaggagttcttccgtcgttcgcggtgtccgcacgcccattccgccgctgtcgttggctgctcgccgcgcctgttgcctcggtaagcttcgccttgtcacccgcaactcgggacgcccttcggttcgccccctccccctttggttcgcctagtccacgctcatcggttcactgccacagctccgtcgccgtcgacccgtgtcctcaccgtgccccggacatcgttcgtgtgttcctgagacttccctcaaggtaaccgtcctaaccccgccctgattttcccatgtcttgcatttactcgcccgtgattgctcgccggagagttccccgatccgtcgaggactcccctccgccgtctggtcgcctcagtcccctttacacaaacccaaccccgccatagtgctcaccat

SEQ ID NO: 131475 - DNA, 532 bp, Zea Mays
gtggcccagagaatagggtccttcctatgtcatcgacccccggtaaccttcagcatgagcgaagatgtttctcggtgctcgggcgaagtcataacctccctaggcccagcacatgtccccgtcaactcctcaagaaaagcctagaggccttcgcccccaccaaaaatcccactagttgccccacttattcttagcacaaggaacaatctgaactacttcggccaagtcttcctagtcctcgacgtggatgtgcaggacccaaattgtgcaatcagtccatctatatttttcttctgccaatgtaagaaaaaattcttagtgaagacctcaacatatgactcttcgccataggaagtcaccgcccaaacatacttcgccaacgccaccatagcaatcgacgtcaactgatgaatctgaatttcgaattttcgtagaacttccactatgaatcgatgcgccgacaagcggagtccagcagcgaaaaattccttgaacacaaccaactcgccctccagctcggggacatcttcag

SEQ ID NO: 131476 - DNA, 641 bp, Zea Mays
gtccttctgccctcaaacaaaatcatggcttttcatttggtcaacaatgaagacccgttagctttctggattgctcaaggtagaaggggaaactgtagtgaagtatgtgatggatatttgaccctctctttgtcaaacaaatgggttcttattcggtgacacatgtttttatgttcttgtttgtttgctcaatgataattatggtttccacctggacagcaggtatgcacttgcatgcttgtaggttgaactaattcagttgtttcagttcacaggtgaaatgatcaattgaatgcattactatattttatctatgccctagcatggttgattgaggtggatagatggttgtatctaataatgtataaacatgaaactaaaacactgacctacccatcgagactatgtcgcaaggctgcctaaactaacataagcagaatacatagctacaagatgcattcagggcaaatcaaagaggtaaaaataatgtggatcgaagaaaacaatattagcatgttaccgttctagttcatgcagctgattcctcaaacttcgaagaggctggccatggccaccgtccatcgtctgagatgtgtgatgcatgcgcgcgtggccctcataccagaactgctgcacgacgg

SEQ ID NO: 131477 - DNA, 1277 bp, Zea Mays
agaattctgacttgggagcatttgagctggcatagaaggtctgaccccggggttcgggtgaccaaagggatttctaggggtgtagaggggatgtcatgcttttccacaaaactaatggctataaatgaatgggatgctcctgaatcaaaaagtacagtagcgggagtaaattcgacaaggaactcaccgagcactactctcggagcttgctgggcctcttgagcatcgacgtggttaactcatgctctgccctgatactgggtcctgctctggtgactgttggaggggagtgccttggaggcaggtgccgaggtattcttggggccattcactgagttggagtaggtaggtcctggtgccttcaactaggggcagttattcttgaagtgactggggtctccgcagtgccaacaggcatttgctggcagttggttgcttgcgaccgagggggcctaaaagaagctctgactctgctggctgaaatgtgacggagtgggtccagctggtctattgaagcttggtcccttgggtggaagcccaaaggatcgagctctctcgtgtcggtcttgctgctgagctcggagaacttggaatttcctcttgaggtgacctttttcttcttcttttgccctttccacttgtatggctttgttggagaggtgcgagaagctgaggaaatcttggctagcgaggatggtcttgagttctggtcttagccctttcagaaaacgggccatcttcttagtttctgtgctgacatcgtcaggcgcgtaacgagccaattctgtgaatttgtgcacgtactcactgacagatcttccaccttgagttagttcccggaattcatcttccttgagctaaacgatcccctggggtacatggtgctcatggaaagcagtttcaaattctacccaggtagcgtccctgacgaccgcgctgaaggtatcccaccatgctagggccatcccagaaagttgatgagcagccaattgaacacacacatttttggggcatccgatggcttccaatttcctcttgatcgagcgcagccagtcgtcgacatcgaggggattgctagatccagcgaacgtgggaggcttgagtctcagaaattctcccatcctgtcctgtggtcttccaccaattgggcgctgattctccagacttctagtgaggacttcaatgagtcgggtttgattggctagaacttgggccaaatctagtggtagttccggaggtgcggggaggtgggtctcactcccttctctgccagcttc

SEQ ID NO: 131478 - DNA, 566 bp, Zea Mays
taaagtcagctctaattggtctctagctttcggcatctaacgaaccttctcaactgcagactcttgatatcagttactgtaagaacctagaatccttgttggcactcgaatatctttgttctattggaagcttatatattgcccattgtcataaatgtattgttctgtgttaagaaaaacttttgtttaggcctcaaaatatattaattgatcactgccctggtctgatcaaatggtgtgatgagcaagagctcttctgtcaggtgaggtcttatgttcttctaaattttttattttaacattagtccattgtcttgtgttctcgcaatagtttttcagtaccatactgcataaaaggtatagtccattgtctgccaagggtttcttaaaatttgaaatgtttaaatattttattcttggtattgtgctacataggttagcaatatttaaagaataattgtttgttgggacaggaatatctttgttctctcggaagcttgtatattgcattggttagcaagttttaaaaggtatagtccattcgtctcttcgatagcaggataagt

SEQ ID NO: 131479 - DNA, 1092 bp, Zea Mays
gtgggtttggtgagatatctggatgtttgcagaaaatgaatagcacacatcagcaggtaattttgatggcaccctatttatatgttgcctagctctgcagtagccagtaatctttgtttaacttgacccattggggaagactggacaaggcatttcttcagctttaaacctcaagggattcgattaattttctatgcccacttttttcagattggaagacctactgaagaagacttaggaagttggggacatcactgtgacccatcaactgtacctgatactatactgcagtgttctgctggcgaagaggtgacagcctaagaccctctgtgcatctgcatctcattggtttggttcataaatctaactctctccattccaaactacaagttttggcatttatatgtagcattacatatatttcactatgtatctggacatgatgtatatccaggtgcatagacaaagttatgcacttagaaaagccaaatcgacttataatttgaaacatagggggtacttattttaggattgtaagtctcagacccagtatctttttctctggatccacttgtttgtttctacatttatattgatacgcagctctcctgctttttcgaaaaaaaagtctgcatttgagaacaaacttttgcattacaaacaacatctatggcatctgtgctgcagattttagtttaaacttagttgttaggagataaccacgagtccacgactggtaacaatgcacatgtgcattttgcaggtttcttttgttttcaccaatcaggttgatggaaaacttgttccagttgaatctatggtgcgatcagcagctcatcaacaaaacggaatagcagccaccggagaaaaaggagtgcagatacccaattctcctagcaaacctggaaagcaatccttaaatggcaagaatttgaagatgggatttcatttaaagaattcgtctttgaaatgttcaaccaaatccagaccatcaccaaattgcttgcaagggttgatgaaaaccagcccctttttggatcaacctcaaattaaaaagcttcatgttgcttctgatatatctgacgatgattt

SEQ ID NO: 131480 - DNA, 801 bp, Zea Mays
ttatttgatctcttttagaaagatggtaacttgagtacgtatgtttggaaccaagagctgcttgtttcagtattcctatagttaaggtcaataagtctacaacaaaattggtacgcgttcttttatttttatctgcaaattttaatatggatcagtatgccatgcacaagagtttcctaagctgtaattgttggtattttattttttcttgtcagtatctgtactaccagtaagagtgggtacagatataaattctaaagtttgtgagtaactacacagctaatttgttgagtctctatgcttcaataatgcctggctacattacagatgagttctctccagtttctactacaacatgtttaatgttggatacttgtaatcccataccaaatcatgcattagattgtactttattctactataaggaaataattattgagcacagtagcacagtaaacattgttatttctttgtttcattttgttacgaatcccttagttaatcttttgtgtgtgtaagcttcctttcttttcttttactagattccaaaattcatggcatgctaatgtctgtttttagtgtcacatacttgataagttgtttgtgttgcatacctgaatgactcatgctcagaaatgtttgttgatactattatgcttatcatttctcttccctcaattcagttgcagatagaaaaagacaacacttacgatcaaatggaaccatcgattttggcacttgatcgcaacaacacatgtgtaagccctactttattatggactctcaattcagtctaaaggc

SEQ ID NO: 131481 - DNA, 1009 bp, Zea Mays
agtatgcttatcagacttgatattccttgaactctacaccaaccaattaagatctcaaaactgtaacaacttgcagtttctggagatattgcgagagtttggaagagaggagcagcgggctttcacacaattcagcactggagcccctcatctcccacttggcggcctagcttcgcttgatcccaagctcactgtcgtacgcaaggtttgttagcatagcaaattatacataccactagggcacagacctattcatttgttgaatacttatctgccatgcatcttgcccgacaggaatgcaatggcaatgtagacgacgaattgccaagcgtcgctacctgctggcactgtatcaggctccctccttactcctcgaaggtaccacatacctgtttgttaatctgtttttatttttgtgaagatgtaaaactgacacctatttacctttgctatctgttttgattgcaggagataatgagaaagaagctcaaatatgccattacagagggtctaggcgctttccacttattatgataacaagactgaggtccacaagatgatggaagagtagtgtacattattgtaggaggaggtagataacaactgtgtaataccaaaattataagagagaaccacttattatgataacaagactgtggtccacaagatgatggaagagtagtgtacattattgtaggaggagatagatagcaactgtgtaatacccaaattgtaagagagaaccacttattatgataacaagactgaggtccacaagatggtggaagagtagtgtacattattgtaggaggaggtagatagcaactgtgtaatacccaaattgtaagagagaaccacttattatgataacaagactgaggtccacaagatggtggaaaagtagtatacattattgtaggaggaggtagatagcaactgtgtaatacccaaattgtaagagagaaccacttattatgataacaagactgaggtccacaaaatggtggaa

SEQ ID NO: 131482 - DNA, 304 bp, Zea Mays
ccggatggcctagggtcaccaggaatgggtcccggacctgggtaaggaggcggagggtgggaggaagattgacccggatccccatggtagggaggcggggcaaactcctcgcgatcatcaacataggcttcttcttcgtcatcgtctacagacataaaaggcaccccataggcctgctggtgccactcattgatctccgggggaggaggatggagaggcacatcaggcgaacgagggacaaaaggcatgcccatggtggaagcttgacgacgaagattgtcgtcagtctcccgctgacgccgtg

SEQ ID NO: 131483 - DNA, 382 bp, Zea Mays
tgaatattgaagaagcatcttgcatctggttccaccccttggctcttcatggcccaaataaagattcccatcttgatgataacttcggcggtaagctgatgaaggtaaatttcaaaagtcttcagaacttcaaccaacaacttatccagggggaatcgaagcccttccttcataaatatcatataaaccacaacctcattggcttcgggcagagggatattgtttccccccagctctcacaatcgagatatcacgaaaatacctccccctcatcgcatcaatctacccttgcttaatggttgatttcccgaagacgacatgacttggtctccaggtccgatcttaggcatcttcatttccgcttttcgcatcaaaactttca

SEQ ID NO: 131484 - DNA, 381 bp, Zea Mays
ggtagttcatacctgtagagtagagatggagctagggctccgcttgaaaagcagatgtaatacttttgctttttgcaaggtacttttgagtactatttatcaagcagtattagcaattatctgtgtaccgcctggtcttgctgtgtattgtgatgttatggtgttgacacctctctggtacccggccccctgcctggactgcaggcttgatgtgtcgaggttggataccagcgtatctgaaaagattgtcaacaactctcgggaggcaacccgccgggatctggatctgtacacagcttcagctagggagcgttagtagtacacccatagggtcccctgtctgatattagccatcctttgatacatgctcgggactcgcag

SEQ ID NO: 131485 - DNA, 317 bp, Zea Mays
ctatttatgagcttcagcactagttatcattgtaggtgggtggtctgtcactatgactcctttcgtaaagttcttgatgtctagtcggaatgcatggtcgggagggagaaattgttgatgtttatcgaacgatgaatatttgccacccttcttcaaccaaatgaacctaagagcttccttgcaaactgggcatgggaacttatcatgaacacagcaggtgcagaatagcccatacgctgataagtcatgcatggagtactgctaccaaatatgcattttgaagtttttcttcgtagctcagttatacgtccataccc

SEQ ID NO: 131486 - DNA, 320 bp, Zea Mays
attaatcttaccattcttttgattgttcttccaagattcgccatcttccaagtctccaagatagagcactcgccatcttccaggattaaccgtcaagttttcttcccttgctgctgatagagacaacctcatattcagtttgaaatctgtccagccaaggggaaccagtgtctgcacaagttgacaggttagtgactaatatagtacatgtttcagatttcacattagtttacaggttacacataaaaacttaacatgtttcacagacagaacaatagttcaaaggtttcagatttcacataggtctcacatattcacgc

SEQ ID NO: 131487 - DNA, 629 bp, Zea Mays
ccgagttcgcatgcccacttggttgttctcccaacgacttccttgttgtgaagtatatcgcctattggaaatcttgtgactactatgactttgtggtcgtcaaagtagtgccgaagcttgcgagcagttagaagtactacgtataatagcttgtaaacttgagaataccttatctttgggtaccgaggacttcactgataaagtaaatcagatgctgcactgggtatgtgtgcccttcttctacccactcgactaccaacgtggtgcttaccatgtgagtcgtggagcaaatatatagcagcagatcctcgaccggctgatcggttgtaacttggtgtggtggcttgagcactggtggtgtggtcagaaacttctttagtgcatccaaggcttcctgcgcttccatggtccactgaaatttgtccaccttcttgagcaacttatggaacgacattcctttctttcctagccttgatatgaatctgcttagcgctgccatgcatctagtgaacctttataccttcttctgtgatcgtggtggctccatcctcataatggcttcaatattctctggatttgcttctattccccgatggctgacgataaacccaagcagctttctagccggc

SEQ ID NO: 131488 - DNA, 459 bp, Zea Mays
agtcatgtatggtgacgatgagcaggtgctcgacccaagcccttgccccttccacaaggtggacatgaaggaattggatgaccaagtggtcgtccttgttccagccatgcgacatgcgagccggtagtcttctagccacacggcgggattcgtggagccatcatacttagtgacgtggccaacacgcgtacctttatgggaaattgcgcctttcggatctcgcgccgaaaggtgcatggtcccaccataggtgggctagggctaagcgcgtcttctttcgcatagttgttcgacctcttcttattcctgatgcctgttgttgaggatgcatcaggcatcgcagatgcctccaatgcgatgctttatgtggacacatgtcagagtagactgggaggcctacgccccttgctctaagatgaggccatgtgtgtgacacggctctccgtgccggtatgctgc

SEQ ID NO: 131489 - DNA, 436 bp, Zea Mays
tttgtaattctctatggccatgcttcgtgcgaccctcggtgtggctaacccgtagccaatagatttgtgccacattgtcctcaatccacggtttattaactatctattatcatttgtgttagaaatatgttttaactcgtgtgttagctccgtaaaaaaaaggtgggtacgtgttaattaaaattgtttcatcatgacaaacgatttcattaactatttaattaaatgtttattcgatgattagtaaagaagtaatctagttcagactagtttatagttttaatttacgcttttataaatacacgttaatgtgatgaatacaaacacaaatatttagattccatacccgtctagtgtaaacgcgatgtctattagcgattgtctcgtggcgtgcatgctgctcgagcacgtcgtctcgcgtcatttattagccgtg

SEQ ID NO: 131490 - DNA, 597 bp, Zea Mays
cgccgagggtagcacataagcttcggaaatacccgcagaagaggaagctcccggagtgaagttaacagaagaaccccactgagccgtcgggtgaggcagacgcggagctccaaattgagacatcataggagtagtcggtgtaggagtaggcgcagccagatactgagcaaaaccttgcatcgccacgatctgagaagtcccaggcacatagaactgctacggaggaagtggaactgcaaattgctgctcagtgcttgacatcatgttgatagtgccctgagaagaggaggaagtcactggctcccatctgagcttcccactgggattcctcctacacaccacatccttgtggtcctgactgtagatagagcacctgtcactccactaacactcagcacggcgatgcacatccccacaacgaaaacacagccccagcccgggcttaggaacagcccgatacctctgagtacttcctcctaaagtacctgattcagaggatttgccacggtaggggtggtgacgctggtgctgagacttgcccctcttgtgggctggacccccagtgttgcccctcctcgcgtcctgaccacgaggctg

SEQ ID NO: 131491 - DNA, 355 bp, Zea Mays
tagctggatcatcaggcaacaactttgttactggtggattagcaagtcatcacatgaaaaatcgagatccgagccctacaaaatggtctgtcagacactctgatggtaaccaccatggtacagtaactgaaacagatcacaagttcagcccccctcgccaacggtgacctttacgtcgtgatttgcgccgtcgccgctattcatgctctctggtgaggggataatcatggcggagtaagaatcttggcaccagataggctcgggctcggtcgaggatgagtttcaccgtacccacttgctcgtcgatcagccgggatagacctcgccgccgttggccgcttaccgctgtgcgcca

SEQ ID NO: 131492 - DNA, 768 bp, Zea Mays
aggcaacaagtgatgaactacttgcagcgtactcgagggctgaagacgaagctatgacagttgcctttggcgctcgcgggaaaaagaggttgaatagggtattcgatgttattatgttcatttacccagattattgttatcctgtccaaaggcaagggagaaaacaaaaagtcgctactttgacatcttctggtgcgccgaagacgaagaaaatcaagggcttgacatgtagatcgaggcgtattgagacggccgatgtgccaaagttaattgagagggcagaaactaaccccagccacagagacagctcctgcaatgccagctgaatctattgcagacccgaccaaagaaccggaattggagaaggtagcagagcagccaaagatgctgacgacagcattgtcgaagctatcaactactacaatagcaactcaggaagaggaggatggctagtgttttggaagctgttttagaatctgtgaaaactccacctcctactcctgccgaagcatctagcaggaaaattgaagatgccgaagagatggtcactgcaagcacttctgctcatgtcaaagtgggaccttcagaagctgtgccagaaaaatttgcgaaagaaagccttccggagaaacccacaacatctgctcccaaagcaccttcccaggacaatttgaattttatagttcgacatgctttgggaaaatagctatcggcagaacaaattgccgaaactgcacattatgctaaggagctgaagtaacccctggg

SEQ ID NO: 131493 - DNA, 603 bp, Zea Mays
ttgtttaaaattcccaaaaaggccatgtaagtgagagctctctagggaaatctaaaaattcagatttctgaatttcagccctcacctagaactcgagcacgttcaccttgatccctagctcaaatccttaaaccccattgacaaagttgtgctaaattaacccctctgcaatgtgtgagaagatggcattgagattcgtgccctagacacgtcaagtcagggatttcatctcggatttcagcagtgagacaaacccaatttgatcaccccatatctttggctccagtcaacaaaacccataagacgccacacataatcgacaaaggaaggtttggtaaagagatctctcaacgggatcttggccataatcgcgaagatttggagccaatccgcgcttgaacttgaccattctctgtgctgcctcgtgcttgacgtcgtgcccacacgccagagcgcgcactggcgctcccccgcgcacaccctgagcgtgtgttagagccaccctcagccgagctcgcccgcgaccttaaggaccacccctagacatgtgacactccactccacgctcacccccgctgtcttgacctcgtccttaactccggc

SEQ ID NO: 131494 - DNA, 590 bp, Zea Mays
catatatcaaatctgactctgcagtccttcagcataagaaaatatgtaaagataatcttcatagcactaaacaattgaccatcttcaccgatagcttctcagataaagaggaaagtggaaataaatggattacccaactaaatattcgactttattaataactacaccaagttgcaggggatacccaccccttggtgacaatcattacaaagatccatcttcagtacatgtccatcataacaaccatccaacataaaataagcaaactaactctaactaagactgactagaccaagacactgaactaagcattattaaagactccgactctgtcgatccagggatccaaatctatccgtgtcctatagtctggggtaccatagtcgaagcgaccacggggcggtgaacggtaagggtgctgaatcccgacaggggcgggagaaccaccatccagatagtggcgtgctgcgctctcatcacgcaattccgcaacctccgcctgaaccttgcccaactcgtcaaggacgtggtccaactctgtgttgagcacgacagccaagttgaccatgttgttcagcctgggattgccc

SEQ ID NO: 131495 - DNA, 328 bp, Zea Mays
gggaaccctttttcgataatttttagtcgagctatggggtactagtgtagccagaactttaactagcacatcttcgtctttttgcccttcatggtcagtaataagttggtaaggtctgatcctagtggacttcgaacattgaagggtaaaggttgggtcattatctccaacatttgtgtcgctccaagagatgaggttgatgcacttccgatgtcccttttggccatttttgaaaggtctctcttctgttttactaatatatgtatctgccatcttcctttttaaaggcggggtttttgactctgaatgagaagacccctcaatgtcg

SEQ ID NO: 131496 - DNA, 930 bp, Zea Mays
aattattggccaacaggcttgcaccccacctagacggtcttgtctcaaagtgtcaaagtgccttcattcaaaagagatgcatccaggataacttcttatacgtgcaaaatattgtcaggcaattccaaaagaccaaaacaccgacattattcctaaagttggacatccagaaagcgttcgacacgataaattggagctaccttttagaatatctacaagctcgcggatttggacaccgttggcgtgaatggattaccatcctttttagcacggcgagttctagggccctgataaatggtgttcaaggagaaagcttcgaccacatgcgtggggtgagacaaggagaccccctctctcccatgttgttcatccttgcctttgacccactgcaaaggattttagaccttgcttcagagcatggcgtcctgacacctctccctcttgctgcagctaagctcagaacctcactctatgctgacgacgcggctatcttcatcaatccaacccgtaatgacctgcaagcggtcaaacagatcctcaatgcgttcggagctgccacgggtctaacaacaaattttgagaaaagctccatccaccccatccgttgtgaaaatgtggatttgtccaacatcctccagccgttcccgggatgctgcaaaaccttcccttgccaatacctcggccttcaactccacacccgcccactccaaaaaattcatgtccaaccactagtggagaagatcggacaacgacttgccggatggaaaggtccactgcttaaccgcgcaggacgcctcaccctagtatcttcagtgctctcctccatgccgatctaccacctaaccatattcccccttgtgaaatggactaaaaagcaaattgataagattcgacactctttcctatggaaaggcgaggataacgtgcacg

SEQ ID NO: 131497 - DNA, 551 bp, Zea Mays
caaaggacccctagaacaccctggaaaagatagaaaacaaacccaatccggttgacatgactgggcatggattttgtcttgggacgaagcagccggacagacccacgttgctgacacgaccactcctcacatagacccagaaacaactcggcctccacacgaaaacgcttgagtggagtctagggaagaaatctcacagaaggatcctacccaaattcgctgagatttggagtcaatggacgattgaaaacgacctcactaagtatcgccacgtgttcgatcccatgctccagtgctcggtcgtgcactggccactctctgtgcgcgcctcgcatgctgtcggctccaccccgcacatgcgcccagccgtgcccgagagcgcctataaatctctccccaagtgcgcggcagttcactccacaccccgcctcacttccccgagcaaaaccccaactccgacgagctccacatgtgcgccattgccacccgaaactcgccaccgtggccaacccgccccgatcaccccatcgcctaaccaagcgcaccagctc

SEQ ID NO: 131498 - DNA, 588 bp, Zea Mays
tgtgaatactgctttttaaaacttcatctataactccttatagtttgagacagattttgaatgcttggatttttatatttcagtatgaaggagtacttgttattttagcatcacacatatggaattaagagaattttagtatcttgtttttctttttgccccatatactccctctgtgtctttaaaatacaaagcattctaaaatctcagaacatattatgaggtaaagcaaatgcccacatgtaacattaagagaatttttgattatcatagttgtgttggtgatagacgacatcgatggtagttatgcatgtgagtgatatcttttgaagctaagaccatgtttcaaacctctaaaactaataatagttagcagctagaatttgctaaaaggtttagaacgggtcagctaataggccaatttattgctatctatacctctaaatagtcattagttgttagttgcctcaacccaactaaaacaactaatgggtggttggtaataaagttgctttggcctttcccgcttgttagcttattagaaaaagagatcggggtagtaaggacttcagtttatcgggtttagat

SEQ ID NO: 131499 - DNA, 466 bp, Zea Mays
ggaaactgaatggttctagaagaccagattctagtgttatggtactaacctttcttctgtttctctccaactgtatagttgtgttcataaaagttggtgttacttacctctctattttgttttgtaggttaccatcctagtgaatgagcataaatgcgcttcaagcagccggataagttatgggaatgccaatcaagcatgggtagcacagaaggccttgcatttactaagaaatgagccttgacttggtgctaaggctttgcaaaagaggttacaaggcacctacaactgtagggtcagttatgatgtgacatggaaaggaatgcaagaagctctaaaagagatgtatggcaattgggatgatagttttagtatgttgtataggtggaaggaagaagttttgataaaatcccccatagtgtggtggagacagacacccaagttgtagatgaaaaggtctacttcc

SEQ ID NO: 131500 - DNA, 344 bp, Zea Mays
tgccctggtactgagtcctgctctgctggctgttggaaggaggtgctttggaggtaggtgccgagggaatcttggggccattcaccgagttggagtaagtcggtccgggtgcctttaactgagggcagttattcttaaagtgactggggtccccgcagtgccaacaggcatttgctggcggttggttgcttgcaacggagggtgcctgaagggagctctgactctgctgactgtagcgcgacagagtgggtccagatggtttattgaagcttggaccccttggtggaagtccaaagggtcgagctctctggtgacgttcttgctgttgagctcggaggacttgg

SEQ ID NO: 131501 - DNA, 397 bp, Zea Mays
gcgcgatatgctttgagttatcccatattttggtggtcgagctcaacgttgtaaaggcagaccgacggtcgttggtgttcccttcttcatggttgctgtcgtttagtagagccaaaaggaagtgagatttcaaggagcattttatggtgaataggagggaggaacacgcaccgattgatttcatgccatgaagcacaccaccagacaagcaatcgacaaggcgatgtgtgcaatggggcaagctttcattccaactaggggaataatccaaagacgtctctccaataggaggaggtgcgattcaagctaggggaagaggccagagacgtctcttcgtgaagcagtggctgcaaagtaattttctatttactctcagtgcttcctctatagacgtcgt

SEQ ID NO: 131502 - DNA, 666 bp, Zea Mays
tcctgttaagaggcctcataacaaaaggacaggaactctggcttctcaaaccccaagtactcggagacgttcgaagaaaagagggcaagaggacttgccatagccaaccacagaaatgccccaaagcaagaaggggagccagatgagacctagcaccgggaaggaacatatgaagataagcattctgaacttgaacctttccgtagaagatatcaccaacccaaacatgtgcacacacaaaggcgatgaaaaactaaaggaacttgctcccgcaacaagaagtagcagggaaacacaagaagaaatgcaatcagcatcccatgatgaaatgaccataaactatgtattaactggagaatgcatgaacagagcaacaaccaacatagacatatatttcgcaaagaaagttgcctcaatcattgatcatgacctagaaccagcatctatcgcagagtgcaagaaaagaccagattgggataaatggaaaaagacaattaccgtggaattaatttctctagacaaaagagaggtgtttggccccgtaagccgcacaccatcccacatacaccctgtaggttataagtgggtatttgtccgcaagagaaatgaaaataatgaaatattaaggtacaaagcaaggctagtcgctcaaggtttcactcagcg

SEQ ID NO: 131503 - DNA, 396 bp, Zea Mays
ggtaagagtagtctgccttttttgttctgccccactcgtgttctgccttcctccggttctgcctcctctctaaccgtactactctgacaagtgacaaccatgaaccgctccctcctccacccactcacgcacgcacccaagccaccgttctgctcacgatttcgaggcagccgacgagtgacgctcgcgatttcgcaccatctgcccctgcctgcaacggattgagatccccgaagtgtaggccgctcacaccgtcttcctcgctaagttctacgcccgggcgagcctgtgctcgccgccgcgctcgacggtcttccgctccctactctgcatggctccatcggccagctccctccaccgctgccgcatcaccgcacctctgttggcgagcgccac

SEQ ID NO: 131504 - DNA, 519 bp, Zea Mays
cttaactccaaggcagaagaaggcccttcagcaagcttcgacacttcggccgtttcaatgtgtctgggatgatgtgtcaaaactttaaccctttttgtcttcagcgcagtagaaatcgccaaagcagcagctcttctttgcttcccctgctttcgtgaagggtagcagtagtctgggtatacaaaaccaataacatcaaaaaccctatttagcattttcttgccccagcctctgaaggctgcagtcatagcatcatcttcgacccttgagtaggcgccaagcaactcatcgttggttgcgtcaatggcatctagccagtcgtcgtttggctcatcaaattggcttctatatttgaatgtgtacttcaagtaaatcaagccaccttggttagacccagcaacagtctccttcggcatctcccacccactcccgagtggccataccttgaaggcaatgtgttcctagactaagtccctggtgcctatgtaagtgcacactgtgttataagcagcttggcac

SEQ ID NO: 131505 - DNA, 669 bp, Zea Mays
cgcatagtagcgagccacggcgtggcataaccgaggtcaccggagtttccacggcaacaccggcggtccggccacgtcgcacggctataggcgcggtgataagcttccgccgtgaccaaatccgcgcccctgcgagatctttttacctccccgtggatatccactgcgtgccaagcatgaatcacggcgaccggcatgaatcagagcacgcgggtcaccggcagcgagggggactaaaccctaagatcttttcgttactgtaccatcaggggcagcttcagttgttctgacagagcattttgcagcgcaatttgcttcaaatttcatgtagtaacttggccacctctctgtatcaaagttgtaagccttcattccaactacaatcttgctatagtaaccatactcaaacactcactgtattatcttcaaaagagctcccaaagttcactccatgtcactatcagtaaaagttcagactctcagctgactaatagccagactttgagtccatttaactccaaattttgtacaacacttatgtctgatgtcttaaacaaagttatactcctttagtagctttacacatttgatgtattgaccctaggcaaattccttatggattaagagatacaaggctccaaatatgcctcaagctcactgaatttcaga

SEQ ID NO: 131506 - DNA, 823 bp, Zea Mays
gggagttgctggacaagatcgatcttatgagaaaatgttggaagtggaatactcgatgatataatctcttcttcttcttcttatctttggttaataacagctgtgaagccgattacttctgctataaggtagaatcaacctgctgaatttcttgcctaagcttttgctgaaattctcgaccaacgcttacctaacggctaagcctacgcgtgatcattgcctctctcacaagccacctcgcgcccgacggtttcgaatgaaaaatctttgacgtgcaacgtcgcgtcccggctatcttctagaacaggacacggctacttggctacgactggcaccaccatgcatatagacgaactgttgtactccgtggtcgctctcattcttcttcgctccatggaagatttggtgtataaggggcggaccctcgtattacatggagggccacttttcgtgatttttcttgatcgaggtttcgactaagtctctttttaatataataccgtgacaacggtctttttctcctaccatgagtttatttctctttctttgctccatgcgttcaaatctgtcactaggcaatcaacatggccacaacaggccacgtactgcaggtccacagcgtgcgcggcaaaggttgaaggcatccgattcttcgtccccgcgcccatccacgaattctgatgccggcctcttctcgtttcaagcaacgaatcttaagcggccaagtggtgtccgaggatcaccaccctgattctcctctctgcctaacaatgcacacgaattccacgcctcctcatatacacgtcgtcgtccatgaccggcg

SEQ ID NO: 131507 - DNA, 303 bp, Zea Mays
ttaatcatgatggtttctctatgatattcagtttatcttgagacgaacaaatgctctgttatccaatcacttgcctccaaaggtatgcttatctgtttgatcaaaaatttttagttgttctgtattgtgaaagtttaacaaatatgcccaccatgcttttgattgaaaacaaaactgtatcatgtcctatttattttgtcaaaaatgattttccttataatctctgaagaatatttacagattattgaagtcgtttgctgcaagctgactcctttgcaaacaacactgtacaaccacttcatc

SEQ ID NO: 131508 - DNA, 441 bp, Zea Mays
aggtcgggtttacggggacagaccccaacggtttgtcgtgcacgtatgcgttacctagttacaaaaggtagattctacccctcagacttgctttatggatagaacttacagagatgtttcggcatcggggtaaggtactctttcggtcatagctagatggctgcccctgggtcggtgtattcctattaccttgaagggtccttcccagctgggggagaattacggagcccttcttggtttggtacttgttgtagggctaggtcccgaccctgggtccccacttgcatttgacatgggagcccttatctttggtcgtggccacttccgtgtgtacctgttggctgcctgggcccgtgggggaatccaaaagggtttccagaggaaggcatgcttcagctccgtagactggggagctcgggatccctctggggtccatctagt

SEQ ID NO: 131509 - DNA, 472 bp, Zea Mays
tcaggtggtatctgagccataagactggccgtagatcgcagtcctgaccttaaaagttgccttaacaagaaaacacctcttacccctaagaaaaaccttctctcctttccccgatattaatagacccttcttttctcctaccagatggaaggctcttgggtcattagaacatcctactgctcagaggaggaaggattccctcatctcttacagagttgcgcgctacgcatggggatccgcaagaagccggaatatgtctggaaagaataccgagaaaatggagttgagaagtgctctatggcgatctacctaggagaaagccgaagttacccaaaccacccacccttccaagtcaccttcatcgggcaccgcttcccagacacttgccaaaatgttgcccgaaaagcccttaaacagctatgccaaaactacaacagagaggtctttgaaaccccccttcgttactttccac

SEQ ID NO: 131510 - DNA, 279 bp, Zea Mays
gaacaagtcacctgtggcgattcgccgattccaaacggctctcgacttcccgtcaagatgagggcgcgcggcgcgctcgtggcgttaaacgacgggggtagatgctcgggagctgttcgacggaatgcccaaccggcaccaaatactacggcttactaacggaccggcccgcacttcaggctgctagctatcggaggagaagagcaaaatgcaatcgaagaacgaaggagaagatgcggctgttcaggactccaccagaggtattgcacctatcattgt

SEQ ID NO: 131511 - DNA, 634 bp, Zea Mays
cccacctccgttcttggacggtaaagtatccaattcacatagactacttatgcacatatgcacacataaaatccagatcccccatctagaatccaacggcacttgactcttgcaaaaagaacctcccgcaacagctgccaacggttgttgctaatttacagaaaccccccacacccacttggactcacaggagaaggcatttacgtgctcctgtacccagctgctgcccaacgtgagtacagagggttgtcgagctcgtatgttgggagacatcagcgtggggtgcgtgtcccattgccgcacgagcaagtgattgtcgaggcgcgttataatactcccggcatcaaggcacgaccgtgtctgtacattggggcacggtggcgagctatggtccattgtggttgaggcgtcgagacgcagacctgtagacaaggtgtcgggacgtggagctgtagtcgaggtgtcggagtgcggagctggagtcttggcgttgagccacggcggcgccgacagctggtcgtcgagatgcatcgcaggagcatccaccatcgggagaatacgaacagctcgtggcttggaagccttgttctctattggaagacaaggtaaagaaacaaagatcgtggagtgcagg

SEQ ID NO: 131512 - DNA, 355 bp, Zea Mays
tttaagagcttcttccgggcaggccttcggctaccgatgcgcaagatgattgctgatgtgttgaaaaattatgaaatctacatggaccaactaaaaccgaatgcaatagtgagacttggcatctttatatgggttgtatgaaggcaaggtgcacgagccgatgctcagtgtttttgtcatgaactacactaccagacaaatactctgagtgaccgcatatatatgctgcacaccctggctctgcattagccctatgtagctgtattgtaagtctgtatcttgtagttcacccatatagttatctaaaatactgttttgtattgttttatattgtataccgtattgttcgttgagt

SEQ ID NO: 131513 - DNA, 360 bp, Zea Mays
ggccaacttagaaacattctctaggctcagattaacccacagatggacggcgagttggttaactaattttaggagggctcttatgcaaagtcgccaagccaaaagggtatcagacaatggacaccgctggatgcaggatcaacggcacagataacacgtgcttcattatgaacaggtacacgatatggaccgccagatccaaaatcaatggccacgattcaaaacctccctgatctaatcctacgcattcaccagacatcccatggtctggatcgactcacgcgaaggggtatgcctcgcttaatcctggccgttaaacagaagatcgacgatcaggggcatcccttcactctctcctct

SEQ ID NO: 131514 - DNA, 389 bp, Zea Mays
atcggacaaaccattaattaattaattaactgaaacatgcgctacgacaaaattatatttttaacgtgtacacgactttattagaaaactaacacgactggaacgaaataaattggacgtgaaaagataacgcatatttaataagtcgtggattaaaaataatgtggcacggtttgattggtcgataggttgccacactgagggtcaaagagatcatggccgcagaaaatccgtgggatggtaaaatcgtgtcgcatgcaacaactttggtcctggcatgcagtgcttgcagtggggcccagttggtctttttttccaaacgcaccgcaaggagaaaacgaggggcagtggaaatcacatgcaaggtgggccccaagggtcgtttcctt

SEQ ID NO: 131515 - DNA, 430 bp, Zea Mays
ccggagacttttgcatagtacatcatcaataatgcacaaaggcattctttagaagtgaagatatttgatatgggttgcctagcactggtaaacagaagggagatgcgtgatgtgtcatcaggtctgatctggagatggacggctggagacgcttgcccatttggtgtggttgggatctgctcaatcgcttgataaggactcagccccatagcttttgcctcctagctcctaactctagacctctcgttgtttatattataagccatctctgataataacatcctccatagctcgatcatccctcaaaaacagcaacgatataacctttttgacggtgtggccacgtgtacgtagtatacgtacctatccatgcaatgtcttgctgctgactaataataggcgtccctttcttacctggcgaatataggag

SEQ ID NO: 131516 - DNA, 442 bp, Zea Mays
ttagggttttacgggcagttgatggaggagagaaggcgagagagatggaggcgtggggaggagatcggaggactatggaggactacgaggttggttgaataaaaatcaagggactttttttgtaaagttgtaacgcaggacgaccgtcgaaacttgtattttataatagtaaagaaaaaagaacatggcaggcactatgtacttaaccactaagggcatatccgactaaagtttagttcctccttagaaactaaaagtgactaaaaatacattttcattattttagtcaattttaactcttcatgtttagatctttagcttctaaagtgactaaactttagacacttttgttttagttcctgattcaaacatgccctaaatatatcctgtaggaaggaggtcgttagtgggagaaaagttgagagcatgtctgaaattggtt

SEQ ID NO: 131517 - DNA, 627 bp, Zea Mays
tcagatgtaaatctgtcgcgaccgagagtatggatggattctagccattggatctcattctgagggccatgattagatgtcgcattaagtgaactggtacgcatatttggccctaggatcttagttcaaccgtccggatcttacgttgcccacggtgaatcacatgcgctcgatcagagatggacggtccggattgacaccgccgaacgggtacgcgccggataatcccagccattcgcttgctcatcaacggcatacgccatttttcctcacccgtttcgttttgaatggcggcgccaccgtccccatatggcggaacatcaccggcgacagccctgacattgatacggttcttgattctctacgcaggacccatctaaacaaagcgaggatcaattctaaactatgaaaggggttcgtaccgaaaatcgtgatgacgtgcgcgcagaaccgggcgtggggcggacggaggctctcgttgaactccggcgagcaatccactcttctacccctaccgtcagagcccaccacctccacgggtacgcttggtgtgatcttgcgatgctcctagggtatgcgtcctcgccgatgtgaagacgctacaccacaatccgtggtgccccccta

SEQ ID NO: 131518 - DNA, 330 bp, Zea Mays
catatgtgagttcaaatcatggtttcaagtcaccttactaatgcatcaatatgttataactcttcataactgattagttcatcgacttagtgcaaatactctcttcttcaccttagccatagtacctcggtccacaagccgtcacttggccttaaccttcgcttagttcctcgaagccatttccttgctatcttcaccctatcaagccattcttgagtcacatcatattgagcatccattgagagaatcatttctttaatattgtgaaccttgcttgaatgtcttctagatataactgctcagatcaatcaaactctagtttgattctca

SEQ ID NO: 131519 - DNA, 492 bp, Zea Mays
gaaatcaaagaactctgaactagtgaaattggatcccaggtcagttatgatgctatttggtattccgaacctgaatattatgtcttgtatgaattccacttccttagctgaagttagagaagcaatgggcttgcactctatccacttagtgaatttgtcaatagcaaccagtacatgagtgtatcctccttgagctttcttgaagggtccaatcatgtctagtccccagcacgcgaatggccatgttacgggtatggtttgcacttgctgtgctggtaaaatgttgttgttttgataagtattgacaagcttcacatctctggaccaactcggctgtgtcactttttgtcgttggacagtagaaaccagacctgaagaccttcctaaccagagtcctggatgctgcgtgtatcccgcattgcccagcgtggatctcatctagcagttgcttcctagtagccgaaagaatgcacttcatgaggactcctgtcg

SEQ ID NO: 131520 - DNA, 548 bp, Zea Mays
ctgagggagtacaggatgcagagtcaactagtccctgaggcaaccagcttgagctattctgccttcttggaagctcgccaatgggagtctgttcagagacaggagcggctccgcaggaggatcgcatacggtcgttcccagtgaaggatcgtctccctgaggccgaacttggtcttcccagatacgaccacaatgtgttttgtgtatatacaggtacggcccttttgtgtggcaaacactgccacagcagcgaaaggaacgctgatccaagttgctgcgtggagatgtattcctagacagctaacctgcttttgctgtatggagctgccttgaggagacaggagtacattagctgtagcatgtagtaacctcaccttttgggaacagtactttgtgtggggttactgtcaaataccgtaaactggaggtgccagtatactagctactccattgttgaggaacgagtaccaggtactactagcaattgctgagaaaagtggttacagttaacaatggctacaatactttgccctagacgctactatgag

SEQ ID NO: 131521 - DNA, 604 bp, Zea Mays
ctcaaatacatgtgtcattcttttaaaatcattttgcataacctcaactatttgttgaaattgctctcgttgttcatctacgtaaaccataagagcatgaacatcgttggatttacttacaatgggtgtgagtgcagtggatcgaagatttgtcaggtaacactccctcagtcagacgagcttttggtgtcagacgacattgaaatcagtcaagaacttcgcgttgatttctgccagcagctttttcctaacgtcctccagcttctaaaatttcttagctgataggccctccatagttcagctcaatgatgttgctaggggagatatcggagttatcatttgaaccgaccatatggtgtcgatctatggtcagtcagacctagttatggatctgctctgataaatccaatcttagttatctccaacgaagtcgccaaaaagtgtgttggcatcgatctgtcgctaatcactaacgaggtgtaccgatggtggtgctctctgtggcggcgcagacggtctgcgacctagggtcggacgggtcgtgaacctatggcaggagcagagtgtcgagccaaattgtccatgcgtggagcccggacaatcc

SEQ ID NO: 131522 - DNA, 445 bp, Zea Mays
cattaacaagcagccaagaagacactaaactacgaggaattatggccttagtcctggtactgatcacctatgtcttggtaacaagcagatatcctggatatagaagcagccaaaaatagtgtcaaattctggttcccacacccgtgtcctggtaccactattcgtgcctatgttgggctcctatatccatctgagcgagcatgaagatgctcaccaacatggcaactagagtatgcttcccactgatgtttcacccagtataactgcatttacctcaccaacatggcaactagagtatgcttcccactgatgtttcaccgagtataactgcatttactttataatagtaatctggcatatttgatttgggtctcttgttgtcatatttgttgatgctatatttgagcctatgttcaatgcagaaaacctattcatattgtgcata

SEQ ID NO: 131523 - DNA, 570 bp, Zea Mays
ggggtacgaagcgttcaatctgagccgtccaccaaaaatcaacgcttctgccatcgccctcaccacccgactggcgtgggcggcgccgcccgtcttcctggcggcggagcacaccggagttgtgaggattctcccacagatgtactattctcccaaccgtaaggtgctacgcgcggaggagatgatagcaaacacaacagaggggttcttaccggtagggcgaaagctacggggctcccagcgacgttgggcgggtccacggttgtgttcgacccctggcgagacattccgaccacccagacctccgggtgagcatggcgagagtaccgagagttgagcggaggttaatctatccaggtgaagtcgtgggttcgtggcgaagcacgggttcagtgctccacacctccatcccttctccggccgcgggtggaccacgtgcttccttcttgctgcgaccacggagaactcctaggcggacggtgggttttataggggcgagccgcaggacgttcctcgagatggcgcggttcggccgactccggaatccatggcgcgttttgctcaacggag

SEQ ID NO: 131524 - DNA, 1241 bp, Zea Mays
tggaaatgttgttactgttaccgatcaacaacaaatgtgaatgcgaggagcataagtgaatgggttgttgctgatacgtaagtatgtatgactacttgtaccctctgttttcttctaatatgcggtggatgtggtataattctttactttgttttatctgtacgttattttggttggacctaacaggtaggttcatacctaaactattataagcccagcatcccggtcgctaagttgattgttggttggtcccctgcctcattattttgtctttctgtctgtctgtcaagcctgtttgaaatagctcatctaatctgatctaccaggatgcctttcatgcaggttctgatggcggatttcttcatggctgaccagctaaccagccaggtaaactgtgctcagccgtacactaggcatgcatggagagctagccattgtacttattacgttgcggctcaaaatgtcttgttttgcagatcccactgctaagacacctcaagttcacggggtgctacttcatggctgaaactttcagaactcacgcgtatggaagttgtaccagcagctcccaatacaagaacctggcatatgtgctctctttcctgccatactactggcgagcaatgcaggtagattgatattgaacgaatctagcagatctatctgctcatcagactaactaaaatggtctactgctgcatgctagtgtctgagaaggtacttggaagaaggccacgacatgaaccagcttgctaacaccggcaagtacgtatcagcgatggtgtttaaaccagaaagcgtcccgtggcacggaaaaccatgggagctctgacttttggttggggtgaaagagtgggtagagatgttgtgttgtttatttcgagcatgggattttttttcttctgcaaaaatctagggggcctcaacttttttgaacagagaagcatcaacaaaatgagatggggggcaaagatgagtataccttttcaatttctttgcctcttctatcttcctctgtcatcatcatgtactttgtatcctcatagacattgagcgttctgtttttttcctggagagggggggagggttttgtgttggccgctggcggctggggtggagggctggcggctggggttctgtggttttgtgttgggggctgctggtggctggctggagggctggcggctggggggttgtgtactgcactgggcttgttttgttgccttttttatgtgtactac

SEQ ID NO: 131525 - DNA, 609 bp, Zea Mays
ttggaccctaattgctctggtgttgctattggtggcagaccctctaaccgttctaaatttcaaaatttgaacttcggccggtctcgtccctgcaacctgcaatggcgtcccgtgcgtgctcgcgggcctgctgggctgccgggctctaagactccatgctgtcaattctgtaagggccggggacacgtggatttcttttgtcccagcaagtttacttcctttggttctcctctgacttcgttccctgcctttgggagtcgggcccttttggtgggaaaccaaaattctcctgatcgcaactcctggtttcgcactccggatgcatctctgtccggtggaccgcccattttcagttgcttcgaggagttcgcccgagaagtattaaaaaatctgaatcggcacctcctcagtccctgacgctttctctgggcgtcacttcaacaaaaccccaacttgctccgtcttcgtctgctggttgccgatcctcgcttcctgctcagatggcgtttaggcgtgttgatcccgaacccttcctccctccgggcttcagcgcttcggtggtccttcaccgggatattatggccaggtcagtctctcggcgtctcccgc

SEQ ID NO: 131526 - DNA, 475 bp, Zea Mays
gggagggagaacccactcggacaccctcgggggttgggtcacagcttgcgctacccatccgagtcggatcatctccggcaacaccctcgggggctgggtaagcgccagcaccatccttgagggccgagttctctgcaacagccacctctaaggctgaaggaccttcacctacttccatgggagcagaacaatccagaccagcctcctggcccttaagaccgcgctccaaggtcgatgaggcgcgggacgccgcccgggataactccagcccagcatcaggcacatcagtgcaaacatccatcatgccaccgtatgctggctccgacaacagatcttctgggaccatgtcttcaagagtttgatcaaagttcgctagagataattcttgcagaccaatgagggcagataaagctggagaaggaacaccactgctttccccgctggctaggtaacgccggttgttgttccgaattag

SEQ ID NO: 131527 - DNA, 354 bp, Zea Mays
cggtgcgccagatgagtagtgggccaagcaaaatgaagtaagtagatcttttttttgtagactaacaatagtattggccatctaaaactaggaactaccatgttggtgcaggcaatgccaggttgtattatgttcaaaacagcccccctagagaatgaggacgagctaaaggttatgtttggacccattgtctgcacaaatgaaagaacccttgttcctggcgtcgaggatgttaattcatcatctgatgatcattttgaaaccagtttaggtgggggtgaaaatagcacacctgacccatgcacaaatgcgactgggaagcgtaagatgaggcatgattctcctaaaccaaag

SEQ ID NO: 131528 - DNA, 462 bp, Zea Mays
atattccacgccgccgtgatcgccttcgtctcaaattgatgaagcatatagccggcttctttaaattgaacactgtcctcgctctgcatttctattacatgctcataccacccctagttagcctctctcgtgcaccgtagcccccagtcaccggatttcccccaaatcggtcacttgcgccgcagtgaggcatcctatcgtgattagccattcccaggtctgttcatccccctctatgcaatgttttagcatccttgaatgttaacgtagctcgtcagctcaaccgattgaacactaccgcgatagggcatcgagaacatcacctcgccgctgtggaacatctccgagcgcgcactcacgtcgacccactcttccacccccattctatccaaattcacgtgtgtaccctacctatggtgaatcagtgaaactcaccctagcttcaatttaggcgctacctcg

SEQ ID NO: 131529 - DNA, 387 bp, Zea Mays
ctggtatccgcggtctgtgtagccttggcgtgcagcagaagcatccctagcaacgtacgagtgatgatgagcatagtgcatgcggcaacaaggggcgtaccgcctaccagaggaatagacaggcatgctgcctgccttcggaatggacatgtctcattaaatgctgaggcggcacactgcctgccagtggaatggacaggttgtcgcctgacagcagagtagataggcctcattaaatgccgagtcggcacatcgcatgtcaggcggcgtgccttatccgcaataaatgtaggggtcgcacaacccggaggccttacatcaggctccactcgctggcttacgtcacgcgctataggccacgtggcagcatcgggtctccgcctaggc

SEQ ID NO: 131530 - DNA, 388 bp, Zea Mays
agaagatgaggtccctttgactcggaagaacagtcgacaatatgtcgccagtggggaaagtagtggagttccttctcctgctctgtctgccctcattggtctataagaactgtccctggcgaactttgatcagactcttgaagatatggttccagaggatttgttatcagagccagcggatgatggtgcgacggatgtttgtgttgatgtgcccgacgccgggttggggtcatcccgggcagcgtcccgcgcctcatcgaccttggagcgtggtcttgagggtcaggaaactgacttggatcgtcttgttcccatggaagtaactgagggaccctcagccttagaggcggctgttgcagagaacttggtcctcaaggatggtgttggc

SEQ ID NO: 131531 - DNA, 788 bp, Zea Mays
cagacttacacatttgccacgtgacacgcgacacacgaaactggtgctttaaaggagtagagatgtgtcagggatcggaactccggaccctggggcccacaagtcagaagggagactgaggacacctcagaagaactcgccccggatggccctaatgcgccaagctcggggactgggcgagacggaactaggaggaggggtcagacaaatagtcaggagtgggttccgcgtctgaccaacggactgccccgccattaatgaccaactgcatcgatggcacctagcgtcgagtcgtggcatgtgaaggagtcgatcgtccttccacacatggcatgtacgccctaggacacaaccccacttatgagctaagagccccaggcctacgactcatttatggcctctacttgagtcccccaacgccctatgaaactcacgacacgatgagggacacccagagtcaggctacaaggatcaagagttggcgtggagcagagggagtaatgttgacacccgaatactctgtcgtccttgcacgttgtctcaacggacttcaaagaagcatgaccagggagcccaaacgacaagggcgaataccgtcggacgaacctttactgagggtaaagcacctcgttttaccacagaacagctatcccttccaagggaagccacttgtaactgccccctccttggtctataaaaggaggagggtcagcccaaaccaaggacacggagataacaacactcgacgacttagcctggtaggaaacacctggcacatagatgtccag

SEQ ID NO: 131532 - DNA, 489 bp, Zea Mays
atgcgtcctcgaacaacaacatcgccctaattctaatgcacttagaaccataatttccacagatggcatttagagacaacatattatcaccgtcttcctgcacttctttttccacctgctctagttcttccggggacaacaccctagccatgtcttctgctgtcaacaaatttaaatgagctgcagctcccttcccacactttgcctagtgccctggttcatatttctcccacaggtgcaacacaaaccatcagctcttctatactccttcaactgcctctccttactccaagttccactctctattcctccctttcattcacttcttcctactcctccagacttggaaatcaacagtcttgccgaacatgcttctggtcttgtccataatttcttgttgtacttgtgccaataacacagctctgtccacagtggcaggtaattgagccataaccataccttgcatttcttacttcaaccccataatga

SEQ ID NO: 131533 - DNA, 276 bp, Zea Mays
gcggatcaaagaattgatgcaccaggtgagatgcaaagtgttcttccccagactgagctaggggaggatagcttcctgaaggatcctggggcggaggatgagaagaggattgacccggatccccctggtggggaagcggggcaaactgctcacgatcatcaaagtattcttcattttcttcttcatcttctggagacatgaaaggcaccccatatgcctgctagtgccactcattgatttctagaggaggcggatggagaggcacatcaggcgaac

SEQ ID NO: 131534 - DNA, 360 bp, Zea Mays
gacatttggtttgtagaatgcttgtgccactttagagggctatgaatttaatctttcacgagttgttaagaaacattgtggaggtctatattgatcatatagtagacaaatcggccgcatttgagtcccatcttgctgatttgcacaaagcctttgataagatgtgtcagtatggtctaaaaatgaacccgcgcaaatgcgcctttggtgtgtcagctagaaaattcttaggatttattattcatgagcatggcatagaagtagatcccgactgaattagggctattcggaatgtgagggctccaacgtgtaaacttgaaatgccaagttttctcggtaaggtgaattatttgcggagat

SEQ ID NO: 131535 - DNA, 927 bp, Zea Mays
ggtgaatggtgcaaggcgttttatgagcttctctcaagatatccatcttcacctctgatttctgaggcacacaaagacggcccctgaaatgaaccaaatcattctcatcaatggtgaactcccgggatttaccatcaccaaccctctttcgcgcttcctgcaatagacgatcttgctgttgagccacacgcactctctccatgagggaggattgaataagcatccgagtctcctcactagtggtgccgacatagcacaaagcgatccccaaatggtccagatcagcgatcaaaggcaaggccacttttggaaccccggacctgctaagggcatcagccaccacatttgccttcccagggtgataatggatggacaaatcataatatttaatcaagccgagccatcaacgctgcctcaaattcagctccttctgagtgaaaatgtacttgagacttttatgatcggtgtaaatgtcacaagactcgccatagagataatgcctccacgattttagggcaaagaccaccgcggccaattcaagatcatgagttggataattcccttcatgcttcctcaactgccttgagccataagcgatcactctgccttcctgcatcaacacacagccaagaccaattcgagaagcatctttataaactgtgaaacgcttaccactcttaggcaaagctaggataggggcgctcaccaacttgttcttcaatgtcttatatctgacctcgcaatcgctggaccagacgaacagaacacccttctccaaaagtctagtcaaaggcttagcaatgctggaaaaatttggtacgaagcgttgataatatccggcgagccaatagaaacttcggatttcagagacactagagggtctcttccactccaccacagccgcgacatccttgggatcaaccgcaa

SEQ ID NO: 131536 - DNA, 583 bp, Zea Mays
tcaagatggaagcggctacccagctgggcgcggtgaggtctgccgtgggggaggagagacgaacccaagggcgacccgtcggcgatcctcggcaatctggccgcgacccagacttcggctacgaccacggagcttctactacatcggcttcttctctaggatctgaagatgaagatgttcttcaatcagccatccttgccggattcaccacggacgcagcatcccattacatcaacgatcgaaatctggtgactcaggtatgttcacaggaagatctcagtgagaatgattgatccaggttggttagcggaagaaaaataagtggttggattcagaccactcgttgttgcagacttcaaaaagtaatgcctccggtcctccactgacggacgatcgaaagtagcaagttatcgcaatggtcaggagtttttaagggattcagttgtttcttccacaccgtctgacgtgaatgccaggaaacaaattacatccaagaaaaaaccaatcatgcaccacagcagggaagtcacgattcgtccatggcgtgccccaattccttgcaggaggccttgtcctttgacac

SEQ ID NO: 131537 - DNA, 520 bp, Zea Mays
gtcggctaaacaaatatctgtatggactgaagcaggctcctcgtgcatggcatcacaggttcgcctcatatctctcctccattgggtttattgaaaccaagtcagatagttctttgtttatttgttgtcgagggttcgacactgcttatttgttgctctacgtggatgacatcgtcctcaccgcctcccctgtcgagtttcttcgtcaagttattggggctctctagcatgagtttgcaatgacagacatgggtcagcttcaccatttcttgggcatctctgtcacacgctcaacacatggcctgtttctttctcagcggtagtacactcaggatattttggagcgcaccgggatgagtgtgtgcaaaccttgtagcacgcctgttgatctcaactccaaactatctgcagatggacctcctgttggtgatgctactcagtaccgcagtctggtaggagctcttcagtacctgacctttacacgtcctcacattgcttttgcagttcagcagatttgcct

SEQ ID NO: 131538 - DNA, 812 bp, Zea Mays
gcgatgatcaccgtcgatgtggctgggcacgcgagatatatcagcacgcagcgcatcaacagccgactgggccgcgaccactgagtgctcgacaaaaggcctcaaagactcaagcacagcgacacgcttggaaagtgacccatctacttcttcgatccgttcccaggttctcgactggaactcggccaccttcgactcgaactgcgtcgacaacgccttggccacctccgcgagcgagacagcgacgcccttctcctgaacctgcttggtcaaggtgttgatggaggcagcgttgcgagcaacggtgtgctcgagcgcttcccaatggcgatcctgggcgtccaaccgatcgcagatttgctgcaacaactgagcttgcgttgccatggtcttcgcctgtgcttccaaggcatccgccacgcctgaaactgccgcaccagccatcagtaactgcgccgcagagaactccacccaagatcaacaaagtctgataccaattgttacacgccttcggctgctacagctaggactacgtagaagaggaaggaacacgaggtagaagagaagactggaatacgattctattatcctttttctcctgtttctgaaacattctattgcctttatcctgctactgttacaacgaccacatgggccgtctagctggaccacatctccttaggataacgaacattgggccgtcccacacgttggcccagaactacttcctttgccttctgaatatcagtcttcttggcgttcgtcagtctgaatactgacagcggacgggcagaaaaaagaaagcaccccgg

SEQ ID NO: 131539 - DNA, 925 bp, Zea Mays
gaaaggtaccaactttggttcagccttcgagtaagcttgcagatgagaagaacacactattggaacagataaagaacaaggtaatccttgtagggtgctttaagccacatcaccatcattatcatgtttgtttccctaatgaaagcaaatgcagtcaaattaagctaaaagtgcctggaaccaatttgaattgtttcagtctttcaacttgaagcctgttcttgcaaagagaccaaatgtaatgggtggtccaaaaactaacttacaagtggtggccattctagagagagcccatgcgattcgccaggttacaagtcattccattgcttcctagctacaatttcagtcaatcgtagctgtatcatctatgattaaatgatgattatttcttttaaaacaggctgttgctgatgacgatgacgacgatagctggagtgagtagctggctcttccccaaagcgatttcggctcctgatgtttcagaagtgattgcatcgatcagacctttgtgtccctgttcttgcatggagcaaaagatgaaatagagccaagttaccacaggttttcatgccaagacaattggcatggaccaggtgatgcccatggatgggcaggaacggtagaagcaacgttgcaactgcaaacgtagtgtgtctctacttgtactatctgtgaagtttcgaagtgcgtcaatgtttattacctttcgatgcgcctcttgaaagtttcatgtgcttggtgaggattgttaggttgtatatgcctcctaggactagtgtcatttttgtaacttggtgagtgtacagaaagaagcatgatttttgagttgttctggacatctgaagcagatagagcaagcaactgaattgtatatgcctcctaggttgtatatgactgtacagatctctgaatccgacagttggcc

SEQ ID NO: 131540 - DNA, 417 bp, Zea Mays
tgctacggcttcacaatttagagacgaagagttgtgctcagttgatttgaacggagagggtgaggaggcgatgaatttataggcgcagtaagccactgccatggccatggtgataaccattgccggtctttgctggcgatcaacggcggcgtcaagcgatagccattcttacgggcttgccacgtccccgccgcgacagtaacgcagtcacatcagtgcggcgtggatgaacggaggggagcggcgccgatgaccggacacgaccgggaggagggatggccgcgtggcagccggagttagtgccctccaccacgacgatcttacccggagcaaaaagatctttgcccagagatgctcgccgtccgatcatcacaaccccaacgcaaatcgcggcgcggacaggtcgtcggcggtgag

SEQ ID NO: 131541 - DNA, 375 bp, Zea Mays
tgtcctcctatgtgtaggagccgaaggtatgctcgtacattcatttatcaagagggatggaacaaaatgccaaggcatacgagatgagacacatatgaaattatacttcatcactctcatgttatttcattatatttctcactgaaaaccttcgtcccatgctttaacgcttaaaagaagtgttaaatcaggaggacaaagatccttatatctaacaatgttgcttgaattttgatacctttaggggaattgaaatcaagtaccaacaaccagcattagtggggtggcttggtgcagtagtttgggtgtgttcctcacacacatgcggctagggctgcaacaaggagagcctattttcttgagtgcatggtacat

SEQ ID NO: 131542 - DNA, 746 bp, Zea Mays
gtcgtcttaaagtatatcgtaaaacatcaaacacacatgtaaaacatcaaacacacatatataagccgacgttatttgtcacctaaggtgaagctacctggaccacctgcgcgcgtaataccatcctggcatgcccgtataatcggcaccagacctatcacacacaattaaaaacacattttgttgttctcagcgcccaacctaataataaaataacgtcagctaaggtgaagctacctagaccacctgcgcgcgcgtaataccatcctgacatgcccgcataatcgacaccagacttatcacacagaatcaaaaacacattttgttgttctcagcgcccaacctaataataaaataacgtcagctaatgtgaagctacctggaccacctgcgcgcgcgtaataccatcctgacatgcccgcataatcggcaccagacctatcacacagaatcaaaaacacattttgttgttctcagcgcccaacctaataataaaataacgtcacctaaggtgaagctacctggaccatctgcgcgcgcgtaataccatcctgacatgtccgcataatcggcaccagacctatcatacagaatcaaaaacacattttgttgttctcagcgcccaacctaataataaaaccgacagcccgattccccaaaacctaactttctcgatcctactaggtgccaccattttcgtctctccgcgtcgccttcactgagaagcacctaacctgcctcggcca

SEQ ID NO: 131543 - DNA, 409 bp, Zea Mays
agggggatagagtttcccgctaacctcatagtaatgagtactcagggaatagatgttatcctagggataaactggctagataagtatcgggcagtcatgagttgtgttaagaggacgattaagttgatgtccccaataggagaggaagtggtgaccgagttagtcccgcctgagccaaggaaagggagttgttatcagatggctattgatagcagtgaagcagatccactcaagattatcaaagtggtgtcagaatttccggacgtgttcccaaaagatttaccaggcatgccacctgaacagaaagttgagtttgccatagagcttcttcctagaaccgcccccatctttaagagagcctacagagtatctggaccggagttggttgaactcaagaagcatatcgatg

SEQ ID NO: 131544 - DNA, 538 bp, Zea Mays
ccagtttcgggcaaagacgagtatcttaggatgttgttgctctagtggatatagcaagtacactttctagctaagtagagatgtcaacaacagaaacagtatctatcagaagaacgcagaaggttccatgtgtgcagtttccttttttctgacaacttgagtctattaagcgagtagtggacaggtggatagcaattgaccaatccgagtttgttgcaacctcttgggtaaaacacatagaaagaggtttgttgataaaccagcattagaaatccatggcacacaggacaagtgtggatgtcaaacaacatcaaggttacccgtggttatccagggatttcaagctcaagaaacatcatagagattcaaagaatacattagtgaacgtgatcaacaaatgttgacttcacaatggaccagcttcatcaagcactagcatgactcgacttgatcacacacgttggaaaatcacatgtgaggtcatcgaggcacgactagagcgatggtcatgttgttaccaatcgacttaacttaattc

SEQ ID NO: 131545 - DNA, 698 bp, Zea Mays
tttttttgacaattttatcaaaaccaaacaggccgtaggcgagtttggctggcctcagaatggtgtcaacaagctcctgtaaaaatttcagattttttggacacccgagcgaaaagttatgcccggtttaaggaaggtacctcaagttatgtttttggaggcacgactagaaagcggtggttagggcaaaaaattccctatctgcaatcacaacggttagagcaagtcgattaatggggtggatcgacttgtgatctgggtaatggtggatgggatagcggcgtatctgcaatctatctagggctggcacggcggcggctagcgagggcaagtcgattaatgggtggatcgacgtgtgatctgggtagtggtggatgggatagtggctagcgagggcagttgatctacgacgaagatacaccctaaaccagcaactcgactcgaccacggacacgaactgaacaaagccaaactgaaaacgaaattgcaaaggctaaacaagggttataggacagcgaatttttttttgtatggcaattatctagagttataggattaaaaaaacataaactaaactagggtaagcctgacggtaatacctgagtctttgaataccacttgataggaacaggggtgcccgatcttccgtcaggtgaaggtaactatcgatttggtggagatgtcacacaaacgatccg

SEQ ID NO: 131546 - DNA, 432 bp, Zea Mays
gtgcattcgcattccacataaaacagggtcaaagtcgtccgtaaggacccaaatccgcccagttgttgataaaaggaggatctactctagtttaacaacagtgaacagatgagcattccaatcattgtgcataagagattatgcattaatctcattctgctggagtttatgtttatccttcccttggtgaacaaacaatttccttgtcccgatcgaggccgtccaaactcttccacgaacgacaacaccacacgtccacaccaataccattggaccagctagccaaaaccagtctgcaaaagaattcccatgagcatgaattagacacgtccacgccagagaaaagtcgtctatgaatcgtgatgtataaagttggtctccattcatcaagaatcgacataataagaatgcttggcatcatgattgacaact

SEQ ID NO: 131547 - DNA, 541 bp, Zea Mays
taccaactggccggctgcagctactggcgagcaggtgcggcatgcagccattggccggcgtagccggtggccgggtgttggctgctagccagagcaagacatagcgtacgggagaaaataggacagctgctggtgaaatatttaaggagaaaaaggctgattgctcacgagctaagtaactttattttattttttctgagaaaatagctcccgcctgagttgtctattaggacggcgacaatttattgattggggaggagtggtcatccgttagccgatttgtgtagcgctcactcgttggttgagaccgacgcaaggaacggagcgaactggcgtacagatgaacgagaggaaataaaatgaaccgagacattttatttgggtgtcgcttcaaattaaattctcgtgcacaagtacaataaaatgaatcgagatcgatcggcttcggattcgttatcgaaataaaacgagtcggattaataaaaatcattgctgatgttgatttttggattcggttcggacatagagatatttggccgag

SEQ ID NO: 131548 - DNA, 345 bp, Zea Mays
ggtttcttgatctgcgtcatttggaatatatgtgatgttctagtgattgggaaaaccggaaaagtacactgcatgaatgccaagttttaaggttagggtgactggccaccggacttgaaaagtaggagtcaaaagaaatggtacttcttcagcttttcagagttcggaggtactcttcgacgtcttaaaaaatgcaactcatgctatctatgatgggagttgataatatttcagttttgctgtgattgagaggattcccaatcgctcatgaagaatctctacactgcctagttttctgaaaatggaagacctctaacggtttttctgatcttgtgatgtccaggg

SEQ ID NO: 131549 - DNA, 674 bp, Zea Mays
agccaatttaaattcaataaagaatctatttcttcacaaagatataattatagtaaacaatcattgatgggaactacattaggttaaggagatgagttcccatacctttgctttttacctttcttcctatgggtgaagatcaactctttgaggcttgtggtattaaacttgcacttactctcttgtcgattttcataagtaagctcaagtgaaaagttaatggcaacacaagcactagtttccctttttgtaatcattttgataaggaatgaaaaactagattactaaaagcatggaaacttcatagcatgaactagattatccatagaagatgttatgctcaattttaactcataaaacaagcataaccaatcctttaagattatggaaatctaatccataacatggagagcgataaatgtagaagaatcatatccaatttaagcaataggacatacaacataaattattggattgatttgtctcgtcatgataaattacgcatctccgacaagaaatttatttctataagtgagactacttaaattacttagataaaatattagtctcacttttctagctatagagagaattttccttttataagtgactaagtgtttgaattccttacaccttattcttttaagaacatgaaatatctctctatatctaga

SEQ ID NO: 131550 - DNA, 580 bp, Zea Mays
gccgaagctctccgcattgtacttttgaacaagcatttcatcacttaagaacaacttcgtctgagagaggctgaacaacaaaatggccagagcaagatccactgcaagggtgtcccacgagggagatgaaactgaaatgactgagatagcaccaatctcaaaaataatgaggcggtcgaggctggttgtgcaggaaggagttattgccgaaggtacctctattgccgaagttgaaaaagccgtgattgaggttgagagtgataatgaaagtgaagatgacgatagcattctgtgtccaactaagcttagtcatgttgaatttgggaggtctacaattaaggctgaagatctgattgtgatgaagaaactagaaaattttggggaaaatgatgatgaactggttcgctttgctagagaggaaataattctagagccgaaggaagatgaagttgtggtattcaagagattcttcaaggcagggcttcggttccccctttacgaaatgatatgtgaagttttaatgaagtttgagatctatctccatcagctaactcgaacgctattgtcaggctcagcgttt

SEQ ID NO: 131551 - DNA, 328 bp, Zea Mays
gcctgggggcccggggctgactgcctcgtctgcgctgcctggaactggcggacctgcccctccagcgtccgcactttcccttccagatgcttcactttctcctctgcctcgagctcaagctcatccagcagcttgttccgccttgcccacatctcctccctgaaggcgaggtcctcctcctgccaagtgaggtcagttattcattttgccagggaagcttcccttgccttaaggtttccctcaacgcgagcaatatcagtggccttgtcggagagttcctgctgcagcttctgtagcttcgcctcagccacagcttgcttgtcccgct

SEQ ID NO: 131552 - DNA, 691 bp, Zea Mays
aatgccgacaacacgattaaagaagaatataattggattgctccaacggtccaaccaccaccacctacgtgcagaccatctatgtatcgtcaatcaaaatggatgctgtgttgctcctcacgtctttgtaagctaggagtacgtgtctgcatgtacggggaggtaaccgcggtgcaccagtagtacattgtacatataaacaaggagtatcctggcgcaatggaagcccagatcagtgccatcctccatcacgaggtagaagaagcctgaggactaccctcggccggcgatcgacagagcaagatgaggacgccgcggggtgtctcgtcgtcgttccttgccctctacgggttccttctcctcgtcgccgtctcggtggccgcgaccggctacgccgcttcgccgggggagagttccaacggttacggcgctgcagccggttcgaacggcggcggccaggagggaagctacacggtgccgccgtaccagaagtccgtggacggcctcgacgagcggtactacgagaggtcgtgcccgaaaatggaggagatcgtcgggacggccgtgatgaaggccgtgaaagccgacgagaccctcgccgccagcatcatccgcctcttcttccacgacttcgccgtcggggtacgtacgtacgtgtgtatctttcgttggtggtcggcgaatataattg

SEQ ID NO: 131553 - DNA, 804 bp, Zea Mays
gtcaacagctaaaccaacgcgttcccgacgatctaaggtaacttagcttaattgaataggtcgaggagtactaggggcacacgagaacactaaaacgagagggcagagggtatgagcggacctaagatgagcagaccacgacgaggcctctttctcggtggcggaaagcaggtttgggggaaatgagaaattagcgagctctagtggatgattcgaggcacgatttgcttcactggttgcacacctacctagcggagcaggcggggtcggcaatttataggctcccacaacgatggccggtgaatttgagagagacgcgcggcggccggagaaagaagaaggttactggcgctcgaggttagtggctttcaccgtggcagccctccagcgatcaccgggcatgcacgatgtgattcacagcgacatggtcaagtgctttagtacgtggcgcacgacggtaagtggccaatagcggcgaggtctatccgaccgatcgacgagcaagtggatacgacgagcttagctgtgaccgagctcgtgttgattaggtgccaagatctttactcgcccacagttatccgcaagtcacagcgcacgaatcacagcggccggcgtgaaacgtggcgcgacggtcaccggcggcgaagtctctgagctggcgatccaatccggtcactataccatcgcgaagttcattcagtcggcctgatagaccaagtttggggcgaattttctcccaattttccatggcaactaaactaatgctctgcaacaaagttgtagcctaatgattcagctacaaac

SEQ ID NO: 131554 - DNA, 276 bp, Zea Mays
ttattaagcttcattattcctgagggaatgtgatgagcacagaagttatcctaaaattcttgccaggtgatagtgttagcatctgcatggccctggtgtaggcatcccaccagtcagatgcagctccttctagtcttccggaagcatacaagactttttctctatcggtgcactgaatgatatccatcttcttgcctttcaccttaagccagtcatcggcgtccaagggatcaactgagtgagagaaagcagttggatgatggttcatgaaatccc

SEQ ID NO: 131555 - DNA, 422 bp, Zea Mays
tgacactgttgcaacatctgctgaaggttcacgcacagcagctgtcgtccgagagaaagcgccgacgttggagtccgtcgcagcctcgtcgttgtagcccgcagcaaccgtgctgcagggagagcctaacatcacatggtcctccgtagactgcaccaaaggcagtagctgcatagcagggcatgttggaagagaatcgagaatacttttaaacgctcgctgcactgggatgagacttacgctatatgcgaagttcatcctgctgccatcccagacagcaaggttgatgtcgctaccagcagcccctgggaccagaccgacatggtccttaatcaccaagcgtggacgccttcggtacacgcagccaacacgataacgacccttagggagagctgcaaccttcacagcagggcgcggagaac

SEQ ID NO: 131556 - DNA, 360 bp, Zea Mays
caaattgtagaacttaatcccctggcctcacaagcatcacttgtatgcatacatttagggggagaatggtccataatttgaatctttgagactaacttcattttcaagtctgttatgtgtgtagtctcaaattagaaaggaatcttcaagcaaagacaatcgcttccactgcaaattttgatgggtatcaaaaaaattctttgctccaataaatgtatcttttatacatttcataagagaatgagtttctcttgtatatgctgctccaaaatcatctaaaactggtaaacatgtatcatattcttttggattgcaaatgtctaaagtagcatagcttataaattctcatgtctagaactt

SEQ ID NO: 131557 - DNA, 356 bp, Zea Mays
gctgtctgaagattcggaagatggtgaggattttgatgttgatagcggcgcagatgatgtcgaagaccgaccatggaggccaactcacgtggttttcgggaaatcaactgtgaagaaagggcatgttgaggcaatgaagggcaagtattttcacgatgtatctatagtgaggatcagaggtgaaaacaccgttcctctccctgagagaactgaagtggtggtattccaaagcttcgtgaaagttgggttgtgattccctttgcataggatgctggttgaaatcttgaaaaagtttgaaatctttcttcatcaacttatgcctgaagcttttataaaaattggaattttcatctggg

SEQ ID NO: 131558 - DNA, 873 bp, Zea Mays
tgggaacacataagcaattgcacatgccatggctgcatcttgatcagtgaaaattgtacttggatgtttccctgacattgctgtcaaaaaggtttgaaagagccaaacaaatgattcaatagtttcattaaataacagtgcagccccaaagactattgtctgcttatgatggttggttccaagtagtggagcaaaaggcatttcaaacttatttgtttgaaatgtggtgtcaaatgaaacatcatctccaaagcatgcataatctaatatagattgaccatcagcccaaaagaaattagctatccgaccatattgctcaccttcttccaaatctatttcaatggcataaaaaaatgcatgatcctctatttgcttattcttcaagtattccaatagtgtttgtgcatcattggattctaaatatttctttcgttcgcgaccgatctcattattacaatccatcctcgagaatggaactttatcagcacctccataaaattgcttcataaattcatacacttgcgttggtctcattccagcttcccgtatttggctaatgagttgtctgtccgcttcaataacatgtcgttgggaccttaacttgtgtgccttgttcggactagcgagggtatgattgtgttcaagttcaactttttgcactgtccaaaccccttccctgctaatgctaaactggacacgagctttgcaacctgtccttgtagttgattgtgatggctcattttttctattaccttggttgctgcaaactatatgtttctgaaatatagttttatctggtcgacgtcttgtatcactctttctaatactaaacccaaccatacatgcataagcattgtacatctcataagcttc

SEQ ID NO: 131559 - DNA, 610 bp, Zea Mays
gggagccatacctgccgtcgcgttcatcgagtttaatatcgtctcctcctcgcgacgacggtgaagtggcctccgtcttctttttcccaccgccaatcggtgtcgtcatgtggcgtctagaatgctcaagcagccgatagatctctgtatctcgatgaggacgttgggggggggggggtcgccgacatcgtcggcatcgacgtcgtgggtgacggagggaagggcatctgttgcttcttctattggtgcttggcgtcgaagaagcgcgaggcaggagtaggcggcgggactggtcatggaggagtagggtgcggtggaaggtccacggagtggtgggtggcgttgaagaagcgcgagggaggaggggacgcagtgccggcattggaggcggaggagggcgaagtctgggaatggccgggagcacaaggggcggtctcggcggactgaggtgtggtgtgagccacgtggagggttctggaacctgcttgtctctgcctcggggagaatggaagccgttgattgacgatcgagcgacgtgaagaaattaagctgatgtggatagatccgtcttcgccgatttgaaccggctttaataatatagaacaagaac

SEQ ID NO: 131560 - DNA, 1228 bp, Zea Mays
ggttgatcgacaagtatctaggcatctagcctaatcaacatctgtgtagacgactagctcaggtgtaggaacactgaagatggagcccatagtcgatagtaccctggaggtaatgaaggatctgcttgactgctcttaggtgtgactttcggggatcatgcatgtagagatagacctaccggacaacatacacgatgtcaggtagttgaaggtgagatactgaatagcactggcaaggctgcagtaggcagtgagatcgttgacaggggaaccgttgccatagaccttgacctgcgtgtccacctgtgttgtgcaaggcttgcactccagcatcccagcacgctccaggatatctagggtgtactgatgttgctgaagaatcaagccattcggcgatgctcaacaacaatccctagaaaatgaagaggacccaaatccttcatggcgaacttgtgctaaagggttctaatgatccggtgcagtaggcccgaggaagagacaatgatcacaatgtcatcaatgtatagaagaaggcatatagtgttactaccgtgctgatagatgaacagagaggtgtccaacttagcctcagtaaaacccagggagagcagatatgtggcaaacctactataccaagtatggggagctcgcttcagactatagagggacttgagtttgcagaccatattagggtgtgcagtcaacaaaaccgacaggctgactgcaatagacggtctcaatgagagtcccatagaggaaggtattctagacgtcgatctgatgaactggccaagaacgagagagttagtgagagaacttggacagtagcaggcttcacctggattgaacgtcttagtgtagtcaaaccatgacgttaaatgaagccatggagaaaccaaacgggccttgtactgatccatagagccatcagccttccacatatgtgtctagactcacttgctagtcatcacattgtgccgcctaggggacgggcaccgaatcccaagtgtgattggcaaggagggcctagtactcttcctccctagcgtgatgcaagtgagaattggcgagggcactatggacagaagacgacaaataggagaccgacgtggacgtggtgagggttgcagtgaagaggcggtgatacactgctggcttggtctgagattggggcggtgcacccacccgcacatgtagttgataggcatgcacatggttggcatagcga

SEQ ID NO: 131561 - DNA, 480 bp, Zea Mays
agcccttttcttttaacctttgtattgtggaagaaccattgatttcttgagttgtggttgttgttggggattgttgggtagtgagatatactctttggatcactgcatacgcccagttggtacaatttttgttcatgatctgagttaatctcgttttgagttcgtttgagaaaacccccaacaaaaccccacccttcttgggaattctgtatgtgcatagagttttgaattgttcatgttcatacttcgtgaaacatgtcctttacgtctatgcttgcttcctatgaagtttgaagaaattatgtgcaggttttgtggcgtggcactaccatggcccgacactattgactagaagcgtgacactgccgcttttgctgttttgtgcttttgtctctagttttctacaaacagctaggcaatttcttctctagcattttggtgtgatcaatcgacactagattgatttgaacaatgctctac

SEQ ID NO: 131562 - DNA, 402 bp, Zea Mays
cgacggaaactctcctttattaccgtttgctttcggccctagaatgaccaggaaatatttccggttgacgctggctttcatcttagcatcgaatccctaaggtacaggggcggagctacatagaaattagggggtgcacatgcacccacaaaaaattagaaatctagtgatttggaccaaattttcaccatatatgcaccacctacaaattgttaccatgcaccctcaaggcatatgcaccctcccctaatttactctagcttcgccactgctaaggtaccctgatgtgcagaggaaatgtttccagttgaccgtgtggatgcaaccagtctgtgactttgcccagttccggaggaccgactgactcctcctttgcttcctgcctcgcgtcaacttggcggg

SEQ ID NO: 131563 - DNA, 331 bp, Zea Mays
gcaggtcggtcgagcacgtcgacgtcctaacatttaggtttgccacgttagtgttgcaggatgcacgaacgcgtgtgtgcggtggtgtggataaggagtagcggtaaatgagtcagactgaggatgtggtgtcgaacaagtcaacatggaaatcaagtgacgaagtgagcgtgcgccgtccccactccccagcccctcctgactcccggcccatcccgaggacggacacggtcgaaaaggacgtgtggaggagtcacggtggccatccgcagagccgagcgtacgtagggatataagggcctcacgaagatttgagtccgcattgtttcgt

SEQ ID NO: 131564 - DNA, 520 bp, Zea Mays
gccaccacacctacaagggtgttgaggcgatcttttccagcttcacctagaacaacagtggtctggctttctccacgaagacatataggaagatgtatgtacctcgtgtcatgcaactgttgtcgataaatgtggctgagagaccatagagctttcctagcagcattgctgaccgaagcagcgtaggtagatagtggcgtcagggactcatgggacgatagagtcctaaaacctctatctcctgcatccatcacccagatatgcacacgactgatgtagtagcaagcctggggaggctcagacactcgtcttgtgtcatacagaggtcgggcgtaggttcctaacgcatgcagaacatcctgcagcaggtttgggaagtgtcccgtctcgaacattgaagtgtaatgctccatgataggccatatcccgacgaagttctcctcctgctcatcgttggcttcttcattgttgatttcctcttcttcttcctcttcctcatcatcatcttctccaccatcac

SEQ ID NO: 131565 - DNA, 664 bp, Zea Mays
gcgggtcatagcaaaaactattccagattacctgttggcggcttccgcatgagtggagtctgaggaaggaataatcaaggcaagccttatccttgcatttttgtggcaaaacaaacagaagatatatttttatttatagtttgtggcccttagatgtgcgaagatttttggcctctgctttctccagaagcaatttttttctcgaagatgtaggaggactgcgtctcattatattaagaaggaagaaaggttatggggccagaaaaacagcccagttacaagagcctccttacggaggacgaaacataaaaacataaaaggactcataaggaacctatggacatcatcctcacaacaagaaaagcggggagagaaactagactgcaaggtgcctggcaataaaaaaggaaatgcctttggccccagccatcacccatctcaatctttcctgcccagctgaactcagaaccagagataaattaggagtgcagccgtcaaaaaaacaacggtttctatgattctaaagagtccaagctcccagggcaatcagatagttgaggcccttcaaagcaaggccgttcacggcttcagttttgtcctcccaccagctcataaaggatatgcgtccaggctgtcgcgccaaattctggaagctaaattgccg

SEQ ID NO: 131566 - DNA, 2676 bp, Zea Mays
aaatttagcattgcacatccatggttcctagccaccacaattctccaccacctccaaacaccacgaccttcccccatcctcccctccaccactcccgcctagcccttcgctccaccaccttcgagactcccccttcgccggtcggcgtcgttggtggttggagagatggggcagcagcgtacgttggtgtatagcttcgtggcgcgaggcaccattgtgctagcggaccacgccgaggtctccggcaactttgcatctgttgccgctcagtgcctgcagaaacttcctgccaacaacaatcgtttcaactacaactgcgatgggcacacattcaactaccacattcatgatggatttagtaatgcacattgttcttgcatcgctttattctctctctctctcctcgcatgcttataagccaatcgatcctgctatttgtgcaacttttatttgatggcgagatttgttatgcattggtgaattaaagtcggccttctttactttttttgcttgataaagataatgaagaaaccaggtccagtgatgatttttaagagggtgtgaattttagattatatcaacaaccgtggctttaattctggtgcaaaactttacctgtagcgtttgatttgatcaatgttgttaccattataacattctattatttctctacgaatgaggttagacgtcacggtatgagtgacgtgtaagctgtgtggcaagttttagatatttttaaagttattgataaaaaacttacggctttcataacaataatgttaaggttcctttgccttgtgtaatagattaagacgtgtgttctagagcatataccattttccagcattttgggtaaacataactttgacacaagtagttaactttgcctttttacaataaacttctatgtcagaacactaataaacaaattttatggaacatacgaggattatcacaaaatacatatctgggtgtgtgtgggggggttgtttggcctagccgtctagtgcttttgtatttgctagttgctttaagctccttgccttagtgcacttcttataaatataataggcatatctcctgcgagttttttcaaaaaaatatcaatatagaataatcatgtacacaaaaattatatttcagttttgagtttgcaccatgagtttatcctttcatatgggcatgagttactatcaacttctacttccaacatacttctataatattgtttcagtagtaacaagatagcaacatcactctcctaaacaacaaattcttgaagagttgtgcatgtcattcatgtgacggtgtctttgattgtctacagcatactgcgttgttgctactgaatcagctggtcgacagcttccagttggatttattgaaagagtcaaggatgatttttccaagaagtatagcggagggaaagccaaaactgctaatgctaatggcctcaagcgagaatatgggtacttaatggccttataacacttttcagtaaccactccacacctttttcatgtatattttgggtgactctttggcactaattggaagtattttctcctaggcctaaacttaaagagcacatgaagtattgtgaccagcaccccgaggagatcgacaagcttgcaaaagtgaaggctcaagtcacagaggtcaagggagtgatgatgcaaaacatcgagaaggtgggtaatgtccttttactatagtggttatcagttactaatcctatgggatcaattagtatttaggaaccaactattttcttttactttaacttactaataatctgatgctcaaatggctctacattggtcatcaggtactagatcgtggtgaaaaaatcgaacttcttgtggataaaacggaggatctccgagcacaggttcatcatgtggaatcccattagtcccgtctatctgactatcaccaaactcagttgttttaattccacatctaggcacaagatttcaggcaacagggaacgaagatacgaagaaagatgtggtgggagaatatgaagatgaagctcatcgttttcggcatcgtggttgcactgatcctcctcattgtcttgacagtttgcaaggacttcgattgctggtgatgtgaaattacagagcccatgcatccgacctgttgcttttgtagccttgcattccttcactttgatgttgttgttcttgcagataagatgcaggaacatgaaaggaaagaacatgagaaaaaatgtagggggagtgtagtgccatgacaccgcgggaccaaaatccatcatttgtgtgatgttgttggcattggccacaatgttcttagctacgcctagaacgatgggctcaaattaagttataacagggctctctaatattttaaataattgtaatagtagcaaatatcgttgtgaatcatgatttgataaggtgattactctacaatttagtgaagagcttcttattgatgtaccccacttctagctgtgctggtgacactttgagtttccttaatgtctttgtaagccttttagggcttgatgcatggggattggaggggatttggattatatggacctcaatcccctccaatcccatgcatcaaacaagcccttactcttggggacttcaccttgttcccaagtatttaccccttttctcatctttgccaacgtccctg

SEQ ID NO: 131567 - DNA, 305 bp, Zea Mays
cagggaagaaaggagtaggtgcatcggtatgcttcttctcatcctcctttgagggcggaggtgtcggggtgattgtccattatgcttttctgctccggtccagaatatacatttcccttcgccaggtgatccacatccactccttagtaggtgaggtggacaacggagttcgctgggttagggaggtcgtggttgactagccttctaccctctggggacttctgagcccaaacttgcgcgggaccatgccctgtcgcgctgctagcgggggcatggctcatgctttcactgtagctccctttggc

SEQ ID NO: 131568 - DNA, 852 bp, Zea Mays
gccagccgtccgcatcccagagggcctacaaataaccaacgacaccgaaggccaccgcatagtcaatctcatcatgaccgaagactggcaagcaccaatcaccctgttcctgcagggatattatcatccaagcgacatcaacgaggccaagcgcctcaagcaccaaagtcgagacttcgcactctttaagggccagctttacaaaaagggggtcagccaacccatgcttaaatgcatcaccgagaccgaaggcgtccaaatcctgcgcgaagtccatagcggaacttgcggctctcacgcggggcccagggccctcactgccaaggtgatccgtcaaagcttctactggcccactatgatttgcgccgcgaatcgagtcacgaggtcgtgcgaagcctgccagaagttttccccctgttcgggcaacccttcgcaattcacaaagctgatcgcccacacgtggccccttcagcgctggggcctggacattgtcgggccattacccacggcccaagggaacctcaagctcaccttcatcgccgtcaagtattttaccaagtggatcgaggcaagggtagtatccacaataacattgaagactgcccagaaattcttctggcaaaacattgtttgccgattcggagtcccatccgagctcacagttgacaacgacaaacaatttgacagccaagacttcaaggacttctgcttctccattggcaccaagcttgccttcgcctcagtatatcacccacaatctaacggcgtcgtggagcgcgccaacggcaaaattttcacggccatcaagaaaatgcttctcgacgacaagaagggtaaatgggccgacctgct

SEQ ID NO: 131569 - DNA, 696 bp, Zea Mays
ttgattttgagtaggatcctgtgactatttcattgtggatactataacaaagttagagagggattataggacaacaatttctctataggccgaagatcatgttgtcacacaagaagtggagaataaggcatttcattcaactctgtcaggcgctctgaatgggatcctaatggtacagtgcctgacaaagatcacagattcagctcccctcgccgccggtgacccgcgcgctcgtattcgtgccgacgccgcgattcgtgccctctatggcatggattatgatcgaccatggaaaaatcttcatcttggatgggctcagaatcctgtagccgctctatcacctatccactcgcgccgacgacgtggccgagcggccgccgtcgtgatgtacgtcgttcgccgtgatcatgccacaccgtgaccatttcaccacctcgctgctagccgtaacaactcaccagtgaccgtcgtagctcctcaaccagtgattgccatggtagatcgccgctgtgactcctcccctctctccggccgccagtgcacctttgtgaaatcggacaccaccgctcaaaaactctataaattgagcatgccgtgagctccgctaggtaatcacgaagccagcgcacccgctcctgcctccgattaaccacaatagctctctaattcctctttctccctaaatcgattttccgc

SEQ ID NO: 131570 - DNA, 340 bp, Zea Mays
aattagcccataataatacggtggcttgttgtttgcgaaacaggtctaaaaaagatactagataagaggtacatgacctgttagcgtatgaggctccgaccacttaatctatgaaaggcattcttgtctaaaaaaagtctatctctgtgtaaacaagttgtgctaaatttctatggcgcgtgtggatggggaccgtgaggcccctcttctttttttgccctgtcctagcccctagccgtaaatggcatcgaacaagcttacagagcacaatgcacaatacaaagcgttgcaagcatcggaggatgtagagatggatcctaaatatctgaattatatgaca

SEQ ID NO: 131571 - DNA, 467 bp, Zea Mays
gatgagccaaacgatgactagctgaagtgcatcgaagctactagtgatgagctacttggagcatactccaaggccgaagataatgctctatctgcagcctttggaagtcggggcaagaaaagattaaatagggtatttgatgctattggcttcgtataccctaattaccattatccgataaaagggcaagagaaaacgaggaagaccgccgcttcggccactgtagctaagccgaagggcaaaaagattaaggttctaacccattggccgcgctatattgaaccggccgtagtgcccgaatttggcgcagggtccacttcagcagccgaagcaacacaaactgcttcgattacacagagcgctgaagagccgaccgtaatgccgaagatgcatacagtcgagccagtcgaagataaggttgataaggctgaagagccaaaggttgaagaaataataaggatgccaaa

SEQ ID NO: 131572 - DNA, 344 bp, Zea Mays
tggaggagggtgccttggaggcgagtgttggggcattcttggggccattcaccgagttggagtaagtaggcacggatgccttcaactggggacaattattcttgtagtgactggggtctccgtagtgccaacaggcattggctggaggttggtttcttgcaacggagggggcctgaaaggagctttgaccctgctgactgaaacatgatggagcagaccctgctggtttgttgaagcttggtcccttgggtggaaacccaaagaatcgaattctctggtgcctgtcctgctgctgagctcggaggacttggaatttcctcttgaggtgacccttttcttcttcc

SEQ ID NO: 131573 - DNA, 517 bp, Zea Mays
aaaaatacaaagaataaacttcaggtttctagcattttcaagatcatcttgcagcaaaaaaatagtgtcatcagcatattgtaagcagcaacaaccaccagaaatgatatgtgggatgagacctttgataataccttcatctttagctttttgaatcaagcaagcaagaccatcagcagccacattaaagaggagagggaaaaaaggatcaccttggcgaacacccttatgtgttttaaaataaggaccaaccacatcattagttctgatggcaactttaccacctttcacagtcttcagcacccaatcactccacttatcaccaaagcctttcttaatcatcatattatgaagaaaattccaattaaccttgtcataagctttttcaaaatcaactttgaaaatcactccattctgtttcttccgttttacttcatggataatctcatgaagagaaaggacaccgtccatgatatatcttcctttgataaatccatattggaggtcactaatcaca

SEQ ID NO: 131574 - DNA, 534 bp, Zea Mays
ttgggaacggttaacagatggatctgtaattgttttggaaattgattctacagtagcaagtatgtgcatataaatgtgaccatgcaagtaatttctataaggtaactgaaatccttttaattcttgtttacaatgttattttccgtcttcaaactgaaactatttagtttgtgtgattagtgttatttccaccattttttgtgaaaatggaaattatttagttgtgatcagtgctattttcagtctgcagttagtggaactatttcatcttgtgaccagtgttatttccaccatttttgtgaaactaaaacattttttcgcatgcaagcataaactctttccactattttttgtgaagtgttatctgtcgctgcctctatattcttcttgcaatgctactactggcctttttattgttcagctagctataatcactcatgggaatgaaaagtgatggaggagttactacaaccagatttggtcagacacatctggcaaaagtttgggcatcaaagtaattaggcactaactaat

SEQ ID NO: 131575 - DNA, 395 bp, Zea Mays
acttgtcgattgctaccagtacatgagtgtaccctccttgagctttcttgaaaggtccaatcatatccagtccccagcacgtgaagggccaagttactggtatggtctgcaatttctgtgctggtaaatgttgttgctttgacaagtactggcaagcttcgcacctttgaactaactcggcgacatcgtttttcgctgttggccaataaaatcctgaccagaagaccttcccgactagtgtcttggacgccgcgtgtattccacattgcccagcatggacctcatctagaagttgcttcccggtggatgagagaatgcacttcatgaagacgcccgatgcaccccttctgtataatgtttctccaatgagtgtgtagtgggctgactgtctggcg

SEQ ID NO: 131576 - DNA, 475 bp, Zea Mays
aagatatatgcatgatatgatatgtacttttagaaattacaacttttaaaggtgtatgatctttttgagttcaaacaagttaactttacttatgtaaaacccttttagtggtatacttggtaagttgggttagacttagctaaggtaagtggtaggtttatttttggggttccactgaattccttttaagtcttagggagaattggtaagttctcaagttaggtttattgggatgaggtttattccttctttccttttcttttattctcttaagggttttggagtgggtttgaactacaagttgcttttataaaattccaaaaattcctcaaaaattacagtggcttgttactggtgggtgtttctctgtctcaaaatttggggatcagaaagtgaatagttttctctggacaaaattattaaactctagggcagaaggggtgctttgaactacaactactatttaacagtgagt

SEQ ID NO: 131577 - DNA, 277 bp, Zea Mays
gaagaacaagacgtgtgggatagggacacaagcaccataaaggatggagttaaagcaagcattgtgagcgacctagaaaaggtcacaaccaaggcataaggggtagaacatcactctcgggttgagatagaaaaggggagatttccaaaagcagaccttagataggtatcaagttaagatctagtgattacaagggtaaggggtatatcaaacaaacgctatgactggcaacgcggtaaaggaaaagggaatgaccaagagcgggtaggtaagacaa

SEQ ID NO: 131578 - DNA, 357 bp, Zea Mays
ggcggtgatggtcgtagcaatgtgacgtgtcaaagagccagagaggatgacgactgtagcagaagtgagacacaccacaacgttgaggggtcaacatcacgaaaactctactatagaaggatcaacaagtctacttacaccataccacgcacctaccagaatctacttacgacttacgagttacgtgatcgggagcggtgccataatccgcccgccggcagtccaggaggggaagtgtcgactatccattactccattagcggcaaagagggacgactggagcatgagcgagacatgtcacaacattgaggggtcaacgtcacaaaaactctaatgtagaaggatcattagttctat

SEQ ID NO: 131579 - DNA, 634 bp, Zea Mays
gattgtttttgcaatattcatgagttgtcttatcacaagaagggcactgagaaagagcagtatcataacaactttggatgttataccttcgtgtaccggtctgatgcaaggcgtcccgtgccaacctttcgaaaaaaatggtcgggtacatggatgaagcaatggttttatgtgaagaatgatttgagacaaagaagtgatattaaggatgtaatccagtggcctatccaatcttgcttcgaactgaggaggcctgctattgtgaatacagagaaatcgcaaggttgtctgtcgacatttgctgttgtgtgtaactacatcagtactagggacttagtgcaagagcatatagctttcaaggtgtggcccttgactgctgagtgggaaatgtcgaagactgttgatgctgatattaatataggaaaaagcagtctggtgcgtctgaagtatacgtatcgattcaggaatcaatttggtgagccagacgatgattggctcgatgccattgaggcaacaagtgatgaatttctagggagctacacgaaggctgaggatgaggctatgtatactgccttcggtgctcgagggaaacgaaggttgaacagggtctttgatgctattggatttgtttatc

SEQ ID NO: 131580 - DNA, 323 bp, Zea Mays
agagatgcatggtctgcgtattttctttcacacatcatcaggcggcggccaagattattagataaaagggtaggctagctactagataggttagatttatacactaacactactagctagcagctggggttatgtgtgtgtgtcactgatagatgacaaatgcaaggatatgatgttaagtgccgcactttgagtggaataataatagacacacgcgcgcgcgcattcttagctgtggccaatgaaatggatcctcaagagcactagctgtagttttatgcccatatgattggcttccaaagtgatcgagagatttgtgtgag

SEQ ID NO: 131581 - DNA, 328 bp, Zea Mays
gtcgaggttgctcagggaggtgaggaaggcgcgctccatgatctttgtgttctggaggtacttattcttgagcgcctccttttcgatcctccccttagaattgtgcttgccagaggtgtactcgtgtttgccgttgcactgataagagtagtggtcgcatgggccagcctcctgcttgctgttcttgggacagctggcaatgaagaggttagggtcaccacagttgtagcatcaatccttgatccgccacaccatcaattcaggctattgttgtggaaccgcgtgaaacgactggccatgagcgctagctcctcattctaaggctctc

SEQ ID NO: 131582 - DNA, 321 bp, Zea Mays
tgctggttctgaatttatcaatagacatctctgtttttctgtgtggggtttcatggtatccataatttcatatctaagcatttacaattagcaagccttctgttaatctttgctaccgtaagcatttacctaatattgttggccatactgcctaattattcagtaaaagcgtgcatgtacattatgtcttcaatttgctgctccatacatctgtgtcgacacctatattcagcctgattggaattgctagttgatgcagcgttgttgttgctgctgctgtagccaacctgcctgtaagtactatgctttgtagtacaaaat

SEQ ID NO: 131583 - DNA, 630 bp, Zea Mays
cgggagaaaatccaagcgacgttcaccactcgtcgtgaattttgcctcactcgcccttcctctgttgatgccggcgggtggcaactggtggaatcaagaaggtccaggaggaggcgcttatttttgaagcaggagcctcggtcccgccgtgtgccggttgaccttgtaggccgctgcttcaactgcctctcgcctcatcacttcgccaaggattgttgggagagatcaagatgcttctgctgtggtggcctgggacatctctcctataagtgctctgctcccaggcgtacagagccaagaagaccagtttggcggagacttgggcctacggttgcaccggtgtccaagaagtcggtctgggatcggctgggctcgatgatggcgcatcgtgatcggttagaccttctgtcttcgtcttctgcgggtgcggcgcctgagagaatcccagtctggaggagaatcacccctgtcagtgatgcttcgcagcgtgcggcacctgctgtgctgactgggtcttctgaaggtggcccgactattggtggagaggctcgtccggctaagaggcgtcgtcgtcgacaacggaaacgatcattggcacccattattcatgtggatgcccagttggcgccg

SEQ ID NO: 131584 - DNA, 683 bp, Zea Mays
ccagccagcctcccaatcctggctctactccgatataaagcccgaattccccctccctttcgctccctaggccagctaagtctcgtgccgctgtaagcttgcgctggggggtgccgtgtgtgggcgaagctgacgccgccgcaataccgccctgcgacgtgggcggagccctctgcaccgcccatgcttggtgagacccctccccttcatttctccttcgtgcccttgttgtaaagcacctctcggatcagattttgggggcatcatggcatgatgtaatgcagctctagcggtcgccgccgcgaccccagggtgacggccatgtcactcactaggaggaagatgaccctctgaccgtcagatcattgtggtgcggtctggattaaatctgggaggatgtaaacatcttgcggtgttgatgccctaatcgacgactgtgattaaatgagaatcacccttcgcgacatcagatcttggccatttgattgaaatcgggtggccccggttggatctaccagttatttataaagcagaatctaatctaggccatcggctggtgatccagtggccctggaatcttgataccccttcagcgtggcaattttgtagaagagccctcggcttattcaagaataaacccgccgtctggggctgtaggaagagtcttgcggtttagtcccgaa

SEQ ID NO: 131585 - DNA, 399 bp, Zea Mays
gttctgtacaaggattttaccaacgtttaagcacaaaaggaaggagagaaagacatacataggatggatagggtctatgagagaaagataaggaacttcaattaagttaagtgcattaaggatgaaacatagcaactcttgatgaaggagaatgtgattcgacgtagatggcgggagtattttgaaaaaaatgttcagtgggaagaatgaggacacaacctttcagttggatgactcttttgatggcaccagtaggcgctttgtgtataggatccaagaatctaaggttagatggacattgaaaaggataaaagggggtaagacgatgggccgtgatggtatcccaattgaggcatggagatgccttagggacatagctatggcatggctaactaagtt

SEQ ID NO: 131586 - DNA, 618 bp, Zea Mays
gtgcatgggctgaaaccctaaagaaccagctcactatcactacctcactcccgctcggcccacaaacgaaatccgcgcgcgccatccttgatgtctccctaataggcgggtcccctacgtcagtcacgtgcacgctcctttctttcctttttgtcgacgtgtggggcccactaggcaacgcccacgatctcgcgcgtgttcgagttagcgtcactagttggcggtcccgcatgtcagccattcacgcgctatcacagtctctggcgggtgggcccagtgccacggtgggcttccaaccagctcagtcacgggtggcgtaccggcctcgccgtgatccttgccgggacaagcgggccacaacaccgcaccacctcacccataaatagcgaacccctcgacctcgcccactcctacattccatttctcgccgtcgttcccccacatcatccaatgcgcagctgcaacccgtgcaaaagtacatcaccaccgtcatcccactgcgcctctaggcatcgatctgccccgattctgcgctttggtgtgcggccgggaacccatgttcgtgcgcgttgtgaatcggtttggttggacgctctagaactcagtaattgctcgtcg

SEQ ID NO: 131587 - DNA, 691 bp, Zea Mays
agaagaagggagagatgggaagagcaaggccgcgaatgaggaaagggacatagatgacggattcatgggtgtcttctgttggaactgtgaccccgcgacaaattcacctagagcagatctctttcggcagtaaaaccccaacatcgacaaggtgaagaagatcgaactctgagataatggacatatggttacccacgaaaggcaactactgttggggtcaatggggggaatgatggccacggcggaactttgcctcttccgcttcagtgccatcgcaatcttgacgacggaacggataggagcaatatcctagggaagtagatgagtggttcgaggcgaaaatatgaaattagggcacagaaatcaaaatgcacatcagcgcgagtataaatggggctttcccgggtcaggtgctatttctaaaagtgccaagtcatcactcgggaaagtaaaacttcaggcatggctcgacagttacctctaaaactccagcaacatctaactcggctcggcgttacctctaaaacaccggcagtatcaagcaccactcgacgttacctctaaaacgctggtagtgtcaagtgtcacttggtggttacctctaaaacaccagtatcatgagctatcgcccaatggttacctctaaaacaccggcagatttaaatatgactcgacggctacctctaaaaac

SEQ ID NO: 131588 - DNA, 462 bp, Zea Mays
gtgaaacttcactctgtggagcgccatcttgagtcgggagccatcatccttaaggagatccaagtcaccacgagctctatagcactccgcgtgcaaggaagatgccttgccttgaaggcaacagatctcgaagcagaggtcgtaaagctcgcgctcttcctctctggcgtgggcgacactcgtgcagagttgcctcgcctccacctgagtcgttcgcagggccaccaccttagccttcgcttgagcaagaaggcgctgtataaagagaccatacaaacaatatggataaacaaaagatcatggaaagagcgaccacaaaggaaatacttacccaccctaaggggtcaaagtcccccgtcaccgatgctcaagcagtcgagatcacatccccgaaaccactaagcatgcgcttcacagtttctagggccatgttaactcggactgaggccgacttgagtcgcc

SEQ ID NO: 131589 - DNA, 516 bp, Zea Mays
ggaagttccggtggatctccctcacatctgagtggagaatgtagtcatcctagaggacaactcagaggaacagctgccgacgcccaccccgttggcagagtccctggccttcgcagctagctcatcgacatcggccccgcctgcaccagccgtccaagcacctgcactcggaggcgacgaccccgatgactctggggacgacgatgacgaggatgacgacgatgacgaaggaggagacgaacatgtcaacgaggaagccgactacgcccagcaggactacttcattgggtttggtcctgttgtcgaacattacacatcaatgttcgagacggggcacttccccaacctgctgcaagacgtgctgcatgcgctaggcacctacgtccgccccctgtacgaaacaaggcgagtgagcaagcctccccgagcttgctagtacatcactcgcatccacgtcagggtgatggatgcaggggataggggattcaggactctgtctgctcatgagtccctaac

SEQ ID NO: 131590 - DNA, 806 bp, Zea Mays
ggtgtgttggccaatcattaagaaggacatcatggcagctgttgcagcagtttggaggaaggactttcggaattttcgggctcttaattcagcctttgttatcctccttcccaaggttgagaacccgtctaatgccaaggagtttaggcctataagcctcattcatagttttgctaaactgattacgaagatccttgcaaaccggttgggaggacaacttgatagtatggtgtccaagaaccaaagtgctttcatcaagggaagatttgttcaagacaacttcatgttggtccagcaaacaacctgcttccttcattcttagaatcaaccaagaattatactgaaactggacatatcaaaggcttttgactcggtatcttggcccttcttgttggaagtcttgcagagtctggggtttgggactggatggtgtgagattgtgagtgggctgcttgccacatcctcctctcagattctccttaatggtactccaggggacttcattccgcacagaagagggctaaggcagcgagaccccctctcccctatgttattcattctggtgatggacgttctaaacctcatggtggggcgggctgttgaagctgggctgctgcaacccctatcaactcgttccattcagcatagagtctctctttacgcggatgatgttgcacttttcatcaaacctacaacagttgaccttgttctagtgagaaatatactcaggctgtttggtgaagcttccggtctccaaacaaatattcagaaaagtagtattatccctattaggtgctcatagtcgg

SEQ ID NO: 131591 - DNA, 606 bp, Zea Mays
agtcgaaattatgtctcaataataaatctttccagtatggtagttgaaaccaaatagatctccttttgaatatgactaatggttcccctttcttgcatctcttgtttgctggtttctttctagatggatccttgccaaaattttgattaagatctttagtgcactccaaaatttgttctccagaaagcggagtaggagctggtataaactcagttttaccaaatttatcaatgtcaaacctaaatggatggtcatcaagaaagaatctacgattttccatatagcaatttttgctgccattactaagtctaagtgaacaagtgtggtagtggaaatcaggacatgctgcttcaccagctgtgatagatccagatgtgtatcctagacctgggaaatcagtaatagtccacaatagtgcagcccgtaacttgaaaaattcaccctttgaagcatcataagttctaactccattgacaaacatatctagcagatcatcaacaaggagttgataatacacatccatgtcactaccaggtccatttcgaccaggaatcaacaaagaaaggaagaaatttgattgcttcatgcacattgaaggtggaaagt

SEQ ID NO: 131592 - DNA, 303 bp, Zea Mays
aatgggtgtaaccgcaccgaaattgatcccaatgggtgtaatcatgctgaagttgaacccaatgggtgtaactgtgttgaaactgaacccaatgggtgtgaccgtgcaccgactgttgtctgtatttttgatgaggacgaggaagaggaagaagaagtcctgctaattcgtaagaatagccggcgttacagaggtagtaggggggataatgatattccttctccagctctgtctgctcttgttagcctttgagaactgtccataacggattttgatcaggcccttgaggatgttgttcctaag

SEQ ID NO: 131593 - DNA, 336 bp, Zea Mays
cgaagactatccgcgtagaagtcgtctaagggtgcagccggactaagcacaacaagtgcgaaaaaatccgatgtctatcgcgaagactatccgcgcagaagtcgcctaagggtgcagccggaccagcacaacaagtgcgaaaaaaacacggagtctatcgcaaagactccgcgcagaagccgcctaagggcacagccgaactagtacaacaaaagcagaaacgacagcatcaaaccatccgcactaagaccgactataatcacaccagcacagcataaccaaccataccagaaaaaagtacacagcgccctcgcaggcacaggcacgcgagggcac

SEQ ID NO: 131594 - DNA, 393 bp, Zea Mays
aagggcataggcctcctgttgtccacacggtgggattatcagctacctggtcatggaccatcgtgccaagcgaagcagccgagcgagagggatgtgcggccgtcgcggacgagatcgctgtgtcagcgttggagccttggaacgcgaactaggtggtcatcggtgctccctgcacgagttcgtgacttcatcaagcggtgtgggcgatcggagttcaagagcgtgctcgccggagtctaggaaccatggcggagatgcgctatcgcgtggaccggagccttgcgctgccatcctcgggtgagaatccctctgagcctccacctccgtcccctcgtagttcagcatcgagtattgtattcattagagcacccgtggatcgagaatttgtcgccg

SEQ ID NO: 131595 - DNA, 490 bp, Zea Mays
cgccgccgagctcatcctctgctctccctgctcaccggcgtaagcccccagccgtgttccagccgtcggtcttatcccgtcgcaggatatttcctgctctctctcctcggccgctcggttccttcccgtggacgcgcgctccattcctgcttatctctctccctcagattggtttgcgtcgctggtgcttcgtcttctcccagcgccgcggctcccccgagctctctctcccatgctgcgcgcgcgccctcgccttctccccctgttcgctcgcgtgcaggcgtgctccgctggctcggccgacgcgcgcgctctgtctctccctcagccgtcgcaccctgcttctcgcgcgcacgcgcctggctagccccaacgctcggcctcctacgcgcgggtctctggcgctccgtcgtcctccctgcgcacgcgtcgcggcctccaactcctcccagccgttcttccctgtgcgcgtgagtctctctgcgcgcag

SEQ ID NO: 131596 - DNA, 772 bp, Zea Mays
ggtcagcacgcacgaaataaccaggttatacattaattggatgtcgcatatgagcagatttttttattgatccatttagtctcacacgtttatgcaatttacaatactgtgttatgctgctttgttgacagaattatgcaatttacaatttagtagtgatgctgcatgatttgttgggatctaatggaatgcatggtcatgaactgaactgaattgacttgcgcttatctttttattgatcctttacgtattttatgtatatgtgttgtttcatttggcaggaacatcagacatgaagaacgtagaccgacctccttctaatccaaaacggattataatccagtctactcaagagtgcttcagcgttgacataccccgtgttccagcggagactgttagacacgaaacaaggcaggctgctgatgaggatgatgactttatgccattatccaagaagcgtaacttggacgacagtcctgggaaagtcttgaagaaggtagtcacaaagcggaggaaagtagtgcccccctcgacaggttagagatttatggtctatggcaatatatcattttatgcgtgaaatcatgttgtgttgaggtttgagttaaacattgagttgcgattatgcagatgtaaatgtttacgatattcattgtatactttttttcagcagaggcttaacgtgagatgcaacccccaagatgtattagtaagcatccagatattaaatgacagacagcgccaagcaattgcacggaggggattttccagt

SEQ ID NO: 131597 - DNA, 679 bp, Zea Mays
aacaatcccaatattttttaaatatgaattgcaggtacgggctctctcctccatccggaccctctcattcaccgccgccgcctcggacgttcgttgaccctttactgtcgctagggttaccgcacccacaccggcgccgctgcttcgtcgtgaaggttccactgctcccccacgtcgcgtcgtcatcttcccaggtacggtgtacctcgcctcgatcccgaccctcgccgccccctcctctcgtgttgctagggttcgtcctgccccgtttgctatttgtttaggcttgaaccacttccgactgatctccagtttattcagtacatcattactgttatggatcgacgtactaaactaattttttgtgcattgtcgccttcagatatccgtatcaactcggaggtcttcgtcttcggttccaagatccagtgcaaccaaggtaatgtgatactcaatttgttgcgcactttactgtcaacaggtgctgagccaatttttgtttatggtttaattgggataccattcatctgttgtgtcactattatttgttgacggattagttcatactttgttagttactacctgtagtttgtatggtttactcggggtctttattactttgtttgtcacaaccttttgtatgttcagggttgagttcatactgtgttagttactacct

SEQ ID NO: 131598 - DNA, 788 bp, Zea Mays
tcatgtacttcgaccatggctaatatagcatcatctgggcccaagcacttaagcaggacgtcattgattgttcggcagtagagttcatcacttatcaaaacatacttgaaagttgtacgccaaatgtttttatctgtcctaatattgggatttggtaaataattagttatgggcgtcctccaatcacttgcatcggcttcattatcagccgaatcaattaggagaactttcctggtaaccccggacggtccggcgtcttcacgcggacggtccgcgacctagggaattggccctgcaccggttatcagattttcagtgttgtgaaatctccttcactttatccgataacctgatgcatcttgtgccaaattgttagctctatgattctcaactctagagatatgccgaatactgaatccgtcaaaagaatggattatgctccaacatttttcaaggtaactatttagagtaccatcaaaacattgatattcttctaacacctattggacgaccagctgagaatcaccaaatgccttcacatgttttactctcatacaatttaaaagttccaagccgaataaaagggcctcatattcggcttgattattagtgcaataagttttcaatcggctagagaagtcgaaggagacattacttggtgaaacaagtacgatgtcaattccttgcccttcattgcaaaccgatccatcaaaatataaagtccaaggagtaatagtgaggtatgacatgtctagtttatgagtatcattaatctgatgttctacaat

SEQ ID NO: 131599 - DNA, 368 bp, Zea Mays
tccacatatccgcaaatgtctctcttaaggatcgtcgtgcttccttctacctgacagtcgtctatggaccatcttgcagaggccgcaagcctgattttctaagagagatgagtgcacagaggcctcctccaccttccccctggttggtccttggggatttcaactgcacatacaaagcaagcgataaaaacaattctaggatcaaccctcgcctaatgcttctgttcaggcaagctctcgacatttgcgacttgaaagaaattcctttgcaaaacaggaagttcacttggagcaatgagagacgacaccccactctcgtaagactagacagattcttctgcaactctgagtgggaggagatgttcagt

SEQ ID NO: 131600 - DNA, 377 bp, Zea Mays
tgtggagcctgatataggtactggtgagagttgtggcacaagtgctggcgatgacatccaggtacgcacatcgtgttattatgaatacaccattattaaatgtcgataatgatccatgtatgtaatttaaatgatataggtcgaagcgtatgaaatagaagacttagttatagataatttacgcaatttagatgatgggaacgaggtatgcaacagaattttataatgtattatttatgctgctctacaacatttgtgtcttcactggagtttgtgttatttcacaggaaattgtaatagggtctaatacaaatgaatgcaatgctaacgatgatcaatgtaatatgccgatattaacattggaacataacactgat

SEQ ID NO: 131601 - DNA, 558 bp, Zea Mays
ctcaaaagctacttcatctttggagctgattgatgagtaccacaaattccttcatgcacttcggccacaactaatatagcatcaacagggcccaagcacttaagcaagacatcaataggagtccgacgataaagttcattgtcgattaaaacatacttgaaagctatccgttgaatgttcctatttgtcctaacacttagattacgcatgtatgtaacaaaaggcgtcctccaatcaactgcatcggctgcatcgttagccaaattaaccaaggctacatttctgttagtgtcagacggtctgcgacccatggtcggactagagatgtcaatggggaattccccatcggggattaactccctagacccatatccatgaacctaaacacgtccacatacccgaactagacattgggtacaaacatcttcccatacccatcccagatcgggtaccaaatacccatggggatccatacccggacccagcacgcagcaagcaatctactactactcgcagctatcagccaacagcccaacacacagctatgtgctagcagcc

SEQ ID NO: 131602 - DNA, 409 bp, Zea Mays
ctttgctgcattaaatcttttgttgcccatcggttgtctggcctgccaaccttcatacttcatagccagctgagcagccatcgacacagtttgagggaactgaacctccacatttacccttaactcatgtttgagacccaacacaaattgggttaccaggaatgtttcactgatagccttctcaaacagtctaatgtggtacaccagcatatcgaaatgacttttatattctaagatagatccattctgtcgaagggtcaacacttccagcatcttatcataatgagtatttgcctcaaactcctctagaacagcccccttaaattggttccagtgtagtacacccaatgtatcgcgcgaggcttgaaaccatagggttgccttcccttttaggtgcatagacgatgtt

SEQ ID NO: 131603 - DNA, 485 bp, Zea Mays
gtgccagagaagattatgagtcctccttcaccctctactgctgaagtgtcggatattctgaaggtaatgactgaatctataccatttgccctgctaagtccactaaggttacaatcaaaggaaactgcttcggctgcggaggagaaggtcgaggggcaaaagaaacggcggattgtgaatgtgatgcaagcaattgagtagacgtcgccctcagcttcggcggcaaaagcagtgatgcctgtcgataccaaagatgtcgccggagctgaagctgaagaactcacaaccacaatgtcggatatcgacaaactcatatcagatgtggttgctgaggaaaacatggctgcagcgcttgataaggaaaaaagaatcgaagatgcctcttcgaaagacaaagattttgacctccgacacctgggtggccaagaactttcagaagaggataaatcagagttaaaagattttgctatatcatgcgattacca

SEQ ID NO: 131604 - DNA, 1059 bp, Zea Mays
tgcacatcggtatattttgcgatgcctgagcaaccatggaaccgtctcacattgtactgtactaacagctatttcagaggtgcttaatccctgcaagagtatgatgtgtgtagtctagattgcttttgaattgcctgaattctgccataaaatttatgtcttatcatacatatttccctatagtatatttggatgaatttacgaattttttgcttacttctcttttgaaaagcagaaatattcttgtcagattcaaatagattctgtaggcggcacttcttgtatctgaactgtttgatcattttatcttctcagttatagtcttgcagcaacttgcatagttgcatgttcctagcggatttgccacactttctgtttgcctaagattaggtatagtaaggttaggcaccaccaaccaaacaggccatgtatgacaataccttattcattgtttactatatgcttgagggatatggtttctttgtaatccacgataacttcagcatcactgagaaaaatgctacataactgtttatcatactatcgctattcatcttgtttttgaaagtgtgcttgaaactatatcgatatactgccttcttttttttgcaaggaccttgaatcatttgggaaatttaatgcagattggacactcagcatatgttgattctccactcgggccagatgcgtttcgggaatatgaaaccttacttattcaggaccatgatgagcttcttaagaagtctgagaatttagacagacataaagaaagcattcataaagaggcgagtgattttacctctgacgttgataattattctaagtggggttctggggtgcattatggctctaattctgaattcagcccaacgaaaagggatttttttgatgacgaaatgggccaggtagaagcaagagggagaagactgtttgtagctgtgcgtcactttccgatgattttctctcctatttcctcaagggtttttgttttgccctctgaaggcataattgctgactcaagcctgtcgaatcatcatgaggattcccttggctctggtt

SEQ ID NO: 131605 - DNA, 607 bp, Zea Mays
cttttggcgcatggcggcatggcatctaggctgctgcgcgatgttgcctgctgaaggcgaacgtagcaggcggcggcgttgcgaaatcagggccagggcgtcggctgcgggatcggagctacggttgctgggggatcgtggctagaggttgcatccttgcaggggatggaggcgttggtttggacgcgcaagatcgttctgatggtgggcgaatctgacgacttagattgcataatggcacaacgaatggctgagattgcagaacggcaggctacccttagagccttaatatgtagtagatatttgatgtcataagaagaaagtagaagtcactctacatgacatgagatttgaacactgagtataaggagctagaaacaccgaatcatttttaagctaagttgcatggcatgaacaaatgttaaagccattgatttaaatacttggactgatagtaaaatatttactagcaccaccaaggccatacactaactcgatacacgtccattggtagatatgtaggccaatagctgtaaagcaaatatattttatcagaactacacaaacatgaccaacaacatcaaaaagtcaacttgtcatgctagga

SEQ ID NO: 131606 - DNA, 495 bp, Zea Mays
gtgatagactggagaatcgaagcaagagcagggtccatagccggaggggcagcaggggcagcactagaactcccagcctcatgatcatgtgagcgtggaggcataggaggcggaggcggaggaggaaccccaaaatcatcatcatcatcatcatcatcagctgttgtatcctgagtgtcgaactgacgaagagtagcgtcctcggcctgagagtcaaaaacaggagcagaagctggcacaggagcctcaggcgcaggacggtaggatccaaaaacgaggcatgaggcctcaagtgtgccctgaaaccgaggaggctgaatcagctgcgcaaagatgtggcataagtagtgagcataaggcaactgtctacgagcacgaatcccatccaaaacggtgtcctcgatctcacaaataaggaaatccacgacgtcaaactcagagtgggagaccagggcaccaaggagccagagctgaatatgtgtggtagcctccctg

SEQ ID NO: 131607 - DNA, 497 bp, Zea Mays
ttctccccaaaactgtttccgccaccgtagaactcaaccccgccgtggtcagcccaattcgggtcagctcctctcctctgcctccttgtttaagcatttgcatacgtctgtgagactcgccaacccatccaattgaactgtgtgaccaccaatcgccgggaacacgactgccaagtcgcgatgctcacggccaccgtggccagagctccgtagttgatcataagcgcaattgagtgaggggaaatactccttaggggtataatctggtgtaaacttaagattagcgccgatcatcgcctcaatcggccggtgcagtggctcgccggagcttctccgtgcgctgccgtcgtcggggacctagccgtgcgaagagatagaaaccgggggggggggctttttgtgaagtgtcagcgactcctcaaaatagtgaaagggctcgttcgctgttagacaaagacgcgagggtctctgcgcaaaacagccagggcgcggatgcg

SEQ ID NO: 131608 - DNA, 315 bp, Zea Mays
atacacagagagatatggcacgagacgggacgatcaagaagtcaaacgacgtgaaaacgacgtttgacagacaaatagtgacataggatgattggaattcgaattgaggcacgaaatgatatgggattgagccgatacttcacgaataggtttatataggtcaatatgagtgaagtgtgtgcttggtttgaatttaggcgaagaaatagggatttgggcactcggctcggaaacgatcgcgcaaaacgggaattttggtaaaatttaagcctgggatctcggattggcgtgaaatttggcaaggaggttactgga

SEQ ID NO: 131609 - DNA, 543 bp, Zea Mays
ggagactgctttggctagtggggggagtgtcgagggcccgaaaaagcggcgaatgatgaacataatgcaggccatcgaaaagaccccgccctcgacttcggcggaaaaagttattatgcctgccgatgccgaaggtactgccgaagccgaagctatgtaagctaggccttccgaagctactgaagccgaaaacctcggcacgatgtcagagattaacaagcttatatctgatatgactcctgagataggtgaaacatccactgataaagcttcagaggacacaaatttggacctatgacacctgggtggtcaggaactgtctgacgaagacatttccgagttgaaagaattcacccttgctggcggatacaaacctggttctgtactatttggtggtgtagacgaagaaattttgggatgtatccctgaccgggctggggcaaagattgttagagaaaactattggatttccgaagcttgggcgggaccttagtaattataggagacaacacattattggaagtttattctactcaaatttta

SEQ ID NO: 131610 - DNA, 390 bp, Zea Mays
gcgggcgtgagtgctgcggctaggcgggtgcacccgggcggggtgcgggagaagctggtcggagctcaggttaggcgacggcgaggatggtcccgatcttgaagaacgtcaaactgcacacgagaattggtcgcttcatctgccatccatcgggttagtgtttggcccccaccgttctctgattttgtctatcagtaatgttgtccctaagaatttcactacaaacctagacgtagcagtgtttgaattttatgactgaaattacatgaggatatgcagcacatgtgttaaattaaaacatgctatatataggaaaatctgatttcagtgtacacacattttgctgcatatttctattttcaaattgttcatataccatgttcaattagc

SEQ ID NO: 131611 - DNA, 287 bp, Zea Mays
caaggatttagagtggttcggtccaccatagcgtaataacctattccacttgtgagttgttttgctgagagcttgagaaagcttgggactagttggagatgcctccttggagattcaagtgagtctgtccccttgtaccgcttgtgccatcccttttatagtccaagggaggcatgctacaggggagctagaccctaacaggtgggcccagtgttctagtattaaatatatacagcatggagctataagtgcaatggcgaccgagatctccttcccctcgtccgtcg

SEQ ID NO: 131612 - DNA, 808 bp, Zea Mays
gaaactaacaagaggggtcgagaagtgagaaagcgaatcaaaaactcaactccatcagattttgcactcaaatcaagctaccgtggataagtgtggttacgaccacacttcctaaaaatcacaaggacatagatgccaaagttcaaaagtacctatggatctccaggctagagtgtttacaaactaagggattggaaaactaagagtgctcaaagtaaatgtcccaaagagataacaaaaggagttgcctaaacaaccagccatctcctcaatttatagagggttattatatgtgcctaaactacccctagatacttagagtttatccactcagctaggggcaaaatgggccaactcttggaatatcaatatgacagtcacatattcttcacgaagttgcttcacctcaatgcacccttcatgatgatgccacgtgtcaccaccgattcttgccagaactgtaaagccggattttgaggaccaaatctggcgaaaccaacaaactatagtgcaacgtggttttgaggctcaaccaccaaaacctctgtgggtagcatacttcatatgcgtcccccatatcctggacacgtgtcccacatgtccacaactgtgtcggtgacacgatcctttcctccatgttctcgcacccatcagtgtccccagggttagccaccacggctagtcacctagtttctccaatcccttggtcaagacttagatctcgtctttcaccacacccggtccatcggcatgaacctgcatgaccatcaccttcattgtctaccaccgtctccaaactacacacctg

SEQ ID NO: 131613 - DNA, 586 bp, Zea Mays
atatgtttctagtatgatgagtgaccactgtttggggtagttcaccaggtttaccttgacttgcacttggttaatttcctgcttactatatgcctagtgttgtctttagtggtgaacgtcgcttttaaattgcttaaagctgaatcaaaatccttacacttcacatatcttgtgcatatgaccagtttgagtatttgctagctcgtgtgtttattattgcacacttagcacaacaccacttagagcatttttacagtctgcctagtatactcttgaagctcctgcattttctccattttccatttcttttgtatttctgcatttttagggggaattctcttgttaagggggagaatctgtttctaccctcttttgtgctgagttcacttgtcaacaaggggagagattttgagatttttggtctcctatcaaggggagaaattttgtgcaattttgggcttctgctattcccatcatcaaaggggaaatttatgctttgagagagcattttcacatggggagagattctcagggggagagattatggattttggtgttttttttgctaattgtgttgagccatttg

SEQ ID NO: 131614 - DNA, 602 bp, Zea Mays
taaaaaccaacagtcagattatttaaacatgtcactgataaaatgtaattctattgtcatctcactattgtccaacacttagctgtcatccctctgcagccatatatacgcccaacattcctgcactggaccaagaagccatggctcgctgccgcttggtgcttggagctcgctctaaattcgtcaccaaacaccagccgcccccacaacacatcacccccaccaccgtcgcatgtgaacgtatgacgacacatagccagagcccaacctagaggcagaatggtgtgagcgaagtgcaatgcttggtgtttctcagtcggccctctacaaggcaaatctgaccgttatcattgctgccgctcggatgtccaggaaaaggactttctaggcattatgagcgatagaacacagcgcagtcggcgaaagaatcgcgtcacctgtggttctgctgtgtgaacacatgtatttgttttccccaaactttccccctttattattgaaagtcgcctagagggggggtggataggcgaaacctgaaaatcaaaactttatccccaactagatcctttgattagtggttagaacaagatatagaattagga

SEQ ID NO: 131615 - DNA, 585 bp, Zea Mays
agtgcctgccgccagcctccaagctccgtcgaccgtgccccaagctctaaccctctgcatctggatccggccagagctccgccatgcctccacccagcagcctaggccacatgcatgcatcgggctcctccccatcaccggtagccgcgcgcctgcaccgagcttctccctagtagccgtgccgaactcctcccttccctagcagccgcgtgcttgcaccgagctcctccccatccccgatagatcttccccggcagatgtgccgacgccgagctcctccccggtcatcgcgtcgagctaccgcctctacttaggccgagcttcaaccagccgcgagcatcgagctctaccgagacgtcgaggcctagctccgctgagatgccagattaagaaatttggtgggtgtcactgtcactctatatttaaatacatattaatggttatggctatgaacaagctctatgattttgtagctccgtcgccaagcaaaccaaacaatcagtagccaagcaaaccaaacaatcagtaggcatggatggaaacaaaaacaaggatattcttatttcacttgtgtaatttttttta

SEQ ID NO: 131616 - DNA, 361 bp, Zea Mays
gagccaacggaatgatattggaggcactcaggaaaatgatcttcgataagaatgaaaaatacgcaggaaaatggataagagaactgccttacgtcgtttggagcttaagaacccaacctagccgagccctgcatggaaacactcctttcttcatggtctatggatcggaggcagtactacctgctgacctcaagtttggggcgccaagattgatctttgaaagcatagcagaagccgaggccaccaggctggaggacgttgatgtacttgaggaggagcgactgaatgcagtaatccaatcagcacggtaccagcagactctaaggcgctatcacgacaaagctgtgcggcagcggttctt

SEQ ID NO: 131617 - DNA, 718 bp, Zea Mays
gtgcgagtctggaaatgcggcgcggaaggaaaacaaaatatcttgatattccgtttaaggacaacattaaggagtggcgtcctgagtggtttattagggaaaaccacggcaagtccctcccccctcggtcgggaagacagccagatgtgcgcactccaagttggattgagtctcctacagccctggaagtaacagaggctaaggttctacttgctgaagtctgtctgctgaaggaaagaggtctgaccgccgaagctgtggttgctgattttgtttttaagaacatccagcccctgaaggacagagcatacccggcttacttgtacagtcgtgttaccgactccactcgagttactaataggagaattcctgctaaggattttgtgagccggctagacatgatcttgagaggcaaagtatcaaatgttggtgctcatgttgcctactctgcttggaatctgccacctcctaagtcctttttcaatttcgtgtctaatcctcctgctggtgatagtggtctgggtcttagagtgcgaccctctcccgaagatattgaggccttggttgcttctctttgtgatcttcccaatgatgagaggcaagttcattttgagatgccagcgagtccggatgatgcagagatgaatgttgtgctcgatatgttggctagagaatcttctaactcggcccctgctgaaacaatggttgttgcagttat

SEQ ID NO: 131618 - DNA, 583 bp, Zea Mays
acaaaagctaaagtgtgggtcttagctcatcgatggtttccttctactccacaaatagaagttacatcatcaagtgtggaaataagattacttcacccaacacatctaggtacaaatgagtggtatgttagagagatgcaaaatagtgggatatcgagcaaacgtggaggaggagaaggtaaacaaggtgaaaagttcaaatgtagatcattggaatctctttgttgtattgcatagtgtgtaattggaccaagtagttgttctgttaccctatttttattttaatgtacatagtttattatatttcttctttgagagaaagaatgacatgtgaacatgccactaagatagcacatgccagttttgaaagaaggaaggtgaaggagtagaaaaataaagtttttcaccatgtcatgttttagattgtggaggcccattagggtggcaaggatgggaaggaaaattctagactttgtgagctcatcaattcagttgaagcagagtactacacatacaaaagcaacgacaaaccaaggagaatgcttggatatgtgatgccattgatcaattggagatcaaattc

SEQ ID NO: 131619 - DNA, 717 bp, Zea Mays
ttcgaattgaggcacgaaatgacatggaattgagccgatacttcacgaataggtttatatgggtgaatatgagtgaagtgtgtgcttggtttgaatttaggcgaagaaattgagatttgggcactcggctcggaaacgatcgctcgaaacggggaatttggtgaaattaaagcctagaatatcggatgggcgtgaaattttgcgaatatgttactggaggtgttgtgaaggtgcctgaaaaatttgggttcaattggagcatttttggctggtttgggcatttcaccgaacacgtgacgtgcggagttctagggttttggagaaatggctattagaggctgtgaaaccctccctaaggagctgagaacctacaaggatgttcaaggcacacaggggaatatatttcaccacttggttttactggaattcacaggaatttgaaatgggcacaaaggggtggaagaggggagctcactgcccagagaaatggagagagagagatagggaattcaggggagtctcaccagagaggagggcagggctaagcactggttcgccgaaggatcgccgccggtgagagaggggtcgccggagagcaggaggagtcaccagagaccgagagaggggcagtggccagagagaatcagagcctggcctcgggctcgggcagggaagagatttttaaaaaccggtaatgggcgcaccggacagtctaca

SEQ ID NO: 131620 - DNA, 304 bp, Zea Mays
gttggatctatgggggatggataggattagatcgaactcatggtggatttctgcagcacgtgtgcaaatcatcggccacgattaaatgtgaggataccctttcggttaggtgaatcggtaccttcagatctcgatcgaacagttccgcgtctgagttggggcatagtgaatctagtgcgttgatcgacgatcgaacggttgcctgcgcgcatcgttttgatgtgtggagggatttaatcacagcccttcagtgctgatcggacggccgatatctacctgtaggaaacgggtgacacctaagagg

SEQ ID NO: 131621 - DNA, 767 bp, Zea Mays
aaaacgggaaccagaggggcatgaactgacctcggaagggctggccacggcgaggtgtctcatggtggcattggtgcccgttttcgggaaaattcagtaagctcgggctatggtggatgaactggggcattgagcggggtactaggtgcgtaacagataggcggagcaggggacactcaatttatagtgatcaatcgcgtgcttcatgaatttgggatgagaacattcacgacggcggcagtataattccaccgagacccgcccgtcgtggcacgcagtgaaacaatggccttggacaataactatctacccgccacaaccccttgcatcgctgtgaatcaatctatggcaaggcgcaaccgagaacaagggtggccaccacggtgacggccgctcggccaagtctccattcactccccctctgatctttccaccccccgcggtaatatctcactcaaaccgagcacgaatcctctcagcaggctcaaatcgcaacgcaagatgacaggtggcgatcaatggtgatgctaatcttgttcagtgcactgtttcagtttgaatccctccttgccttgcctgacagcccgactttaggggctttttactccatttctgaataacactaggcctaactccttgtgagaaacttgttcactaatagaagggctaaaactttgtcatgaacttcatggtcattcgctcacttgatcaggcaccaaacagctccaaagttaaggaaatgtcactgaatccctgatttcagtgaa

SEQ ID NO: 131622 - DNA, 326 bp, Zea Mays
ggaaatttgactctcgatggaggccattgggttggtgatggatctctttgttgagatcatacattttagagaatgttgctgatggttcaaatttaaagttttatttcttgtcaacaaactgagaacacatcacatgtcaaactatcatgctagcgaacagaggttgagctattgagatgaattcacctttttaccaactactatgaatgttcatttaactgttcatataaataaggcatggacatatttgtgctttgtgggcttatattctattgtgcactccacttgtcatttctggatttttctgcttgtttgatataccattg

SEQ ID NO: 131623 - DNA, 393 bp, Zea Mays
agccctaatctggccatcactactggcgatccgcccctcgacgtgaccgccaggtcctcctggacctcacccggccctccaccggacctctctcgctgccggtaagccgtgccaccctttttcctctccgcggtcactgttccggcatggaaggagctcggggtgagagagaaaagccaggggggtttcgcaatgttagtgactcagtggaacagttccgcaggggcacaatttaaatggtttagttaaagaaaaacccaggggccctggtgcaaacctgttttccttaaacctttaagatttactcatataaatgagtacagaacttgaaaaattcataacttgagttttatccaaccaaatttggtcaaaccaattttgctaggccctaaa

SEQ ID NO: 131624 - DNA, 383 bp, Zea Mays
gaaaaagatcataagctcataattcaactaagcatcataagctcctaactccctgttacggcttgaacctagactaacttttggcctatgggtccctaaatcacgtttatgcctgtccttagatgtcatgtgtgtcttcaaaccaatccaaatgccctatgagagtataaaaaagatcttgttaatcgttaccatgccccctttatagagcaataggagagagtttatatgtcagtgtatgatggttcgagctagaaaatacccgacaaccctgatcttatccttgtcatggagtcatgtgcagatcaatgcccttggtcatgacacaatatcgagaatgtccttctttagtggttgtcgtgccgcttgtatggacgtcgagg

SEQ ID NO: 131625 - DNA, 363 bp, Zea Mays
gtagtaatgtaatgtagtaaaaaaaggaaaaaggctgactcataatgggtcagtctttgggtttgtgaaaatcccttccactatttaatgaagaaactccagttgctccgagcgaactattgcttttttgttgctctttctttataatcgcttgatagttcgtctttgcgcctaatgctactgcgtttttataaataatcgccgagcgatagctgatgacacctgcgttttagaggtaaccgccgagcgatagctgatgacaccggcgttttagaggtaaccgtcgagtcgtgttcaattctgccagtgttttagaggtaaccttcgagcgatagatgatgacaccgacattttagaggtaaa

SEQ ID NO: 131626 - DNA, 692 bp, Zea Mays
ataaaaccaaaatagataaactggtgccacttaaatcaatgtcacgccatgaaaaccactaactaaaactgctcagaggtttatttgtctagttttgtaaagataggatagttaaacaaccggttttgatcgaaggtgagaagatgaaataaactacaccctaaagattagggttatgtagactttttctaataaatgtgggtgtgggtgagcgcgaggaattagataatgcatttaatttgggccatgccgcatcactggaggggcttctgagacccctgggaagtccatttgggcccgttgaaaccctggattacactctcttcgtcagagagttttttgcttgtccattcccagtggctcccgcttcttccctaaacttccctagccatcgtttcctgctcacaaaacatacgccgaagctctcatgtcgggtgttccttctggcgatatggctaacgatcgagggcaatttggctgagggttggagagttgtggatcgacggcgtcagcatttccctgtcgctcatcgtggacgttcttcgggtggtggcagatggatgccccgtggtcgggcgagctgggatggccgtggtcgcagttcatggcatggtcgcagcgggcgttcccaagggcccgacgcgaccttcggctacgaggacagagcggctgtgcaacctagcagaggtggg

SEQ ID NO: 131627 - DNA, 394 bp, Zea Mays
ttcaagacttgcacaatcgagggggaaggagaaaaaatttacttgggtagggtgggcacgcctgtgatctactcctacaccgatataggtaaggagattgtaggcataatatctgatggtcaggacgtccaaactgtcgagaggtaccactcctatgtccattacatcctctcctttgtttgtatattattgtgtgattaaaggtgttgttgattatgtatactgatgaaaggtgttgttgggttgcattctttttttatagggggtactactgcgccactttcaagtgttacgggcctgggatgtctcccatgttaacctcaactctgacctatgtgcaggcaatacgctttaccaggatacactacatctcaggggagtcgtggatcccgtc

SEQ ID NO: 131628 - DNA, 280 bp, Zea Mays
gtgtttgcatagtgttccttagtgcatagtgtttgatgacaatgcaacataagtggagggagacagagggccagcttctacggctcgcatccagcttctgtggtttgcatgcttgcatcagtggcctaggtgcatgtgaagacgcggcttgcatgcttgcatgcagtggcccaggtgcatgtgacgtttctgtggcttgcatgcagtggcccaggtgcatgcgcttgcatgcttgcatgcggggtaggtgcatactatgcgtgataaggggaggcggggg

SEQ ID NO: 131629 - DNA, 325 bp, Zea Mays
gcatgatctcgagggtcgggatgctgacttggattgtcctgatcccatggaagtagctgaaggtccatcaaccttagaggtggtcacggcagagagcttggaccccttgaatagtgctaacacgtgcccagcccccgaggatgtcgccggggaggactcagctcgggtgaggagtataagccactgcccagcccccgagggtgttgccggtgatgatccggctcaagtgggcagtgccaactttgacccagcccccgagggtgtccgagcgggctctccttcctgcacttccatggatgttcatgcaggttcacctccacactct

SEQ ID NO: 131630 - DNA, 429 bp, Zea Mays
agggccgctttgaggtaaggaacctcccccgcccctattggcccttgtcttgcactctatcgcgcttgatttctcgccggagtcgattagctccgccgccgagccattccaccgtgaaccaccctcctccggtgcccttaccccgacccagaccccaccaataggtttcccgtgccctccctaacctccccggccactcaggtcgccccgagaacccgcagggcccccgctcccctcgtctccggcgagctcctccgccccgggggcgagcgccgccgccccagctagccgaagaagacgggagccagccaccccatccccgccgtctatcttagatcggatggcacggattcaaataacccgaactcaatctcaaccgtccgtccaagatccatcggcccagagccgtttccccgcgccctgtctctc

SEQ ID NO: 131631 - DNA, 566 bp, Zea Mays
gttttagctttcttttgatgtccaaatctctaatgtaaggtgggctaaaggttaaagccaactttagaccacctgatgcatataaggaagaagggtccacatgcactattctctgtggcatagcaaaatcgagcttgatgtccttgaagattgatcgagataatattagtcagtactgaatttaattttaatgacaagtttgtaatgggtaggataataagggatatgttacaggttgtttgtttcttggatgaatatgctgctgcatagggttaggcctgaaaggagaaacagaataggattggtttttgtagctctcctcccctcatctctccatgggattagaatatatataactttgtgagtttatatggaaagcaatagatattgtttatttcctctcttctcttctctcctctcctctcctctctatgccatattactgcttttaaactaaggcgacactgctagaggcactattatacgtcaagttcatatattaagaatttgaactctagcctattgatgatgataattgttcattgtctgaaattcctctatttgac

SEQ ID NO: 131632 - DNA, 567 bp, Zea Mays
ggcggtcgggagtgggaggaggagcaggcggggggcgatgcagtgcatggcgggaggtgtggtgcttcggggtggaagagctggggagggggatcgcggggagatgagcacgagatctgggagttgattgcgggggatgccgcagcgacgccatcgatggaaaggagtgctgtgggcgggcgggcgctcagggcagaaccgtgcaccacagccaatgtggacgtctacaatagagacttatgtagtagtagagactagccagctgtccgtattttgctacggtttttatatatcatatctcttctctatctctaatatctattaagtcaatagtgtagaccacggcactaccatgactccaccctccccatcccgcgcactcgcccctcgcccaagcattgagccaacagccccttccgcgcaaggcacacacatgctgcatatcacgcataggcgcatagcgggcctgcaccccctcctcacattcctcttcgtcttcacctgcgtgttcgcacacatgaccgtcggtacgtacaaccagtccagtgcaaacaacgacagctttgc

SEQ ID NO: 131633 - DNA, 347 bp, Zea Mays
gcaacgtctcttttcaaaccgtatcaccaatacttttccttaagatcctggtacatctttgtacttccagggtgaatagagtaagctgaatcatgagcttctctcaaaataagttggcgcaggtgttcaatttcgggtacgcagattctcttcttaaaccatattgtgccttgttcatcttccgtgaaatctggggctttacccaaaccaatcaaagctttaatttccttaattttctcatcagattcttgtcctttacgaatctcttcttccaaagtagattcaacttccatcatcgttgcttctacattattgagaaatccaaggttaagtcgttccatttccca

SEQ ID NO: 131634 - DNA, 467 bp, Zea Mays
gagaacatttttttcatgatctcttggagttgctctaaggaccggaccagagataggagtagttgtcatggggaaatgttcatgcatgcgtaggcagagcggggacgagtgcgtgtgcgtctacgtacgctgctgcattgcacatgcctagtgccgggccggtgttgctgagcaatggtcaatctgtatacggcgttgcgcttgcgcatgcagatcaagacacgcctagtgcatgcagaatctctcgtacacacgagatgcggtactctcgtacgagccatgcagagaggttgactagctagaaacaaaaatactgacaagaggtatagctgtttggtaacccaaacttgtggaaattttgattattgattttagtcgtcatatgttgcgtggcgggagcaaaggaaaaagagatgaaacattatttttatgtaaggcatagaaatggtggttgggtaattttcctg

SEQ ID NO: 131635 - DNA, 414 bp, Zea Mays
tacaagtatccatcaccaccatcgccttctcatggtgaggcacaaccaccacgtggccacaggaaacttccaccaccatctagatcgatgtattcaaccatagcaccctcaccggcaaattacaatgttgtctcaccatctgagcaaggtcccaagatcaaagatcatggcgccccggggaatgcacctatgtcgtcgggtcaagaaggagcatcgccgccatggtatttttgatgcgaagatcaagataaatgcttgccaattgcagttctactctccacaagagatcaaaagcccaaaagctactttagagggagttccttttttcttatcacacttatcacgtcgaagcataatattattgaataatttatgtaatccatttggaccaagcatgttgtcaatgaaatctta

SEQ ID NO: 131636 - DNA, 560 bp, Zea Mays
ctcggccggatgatgatgagaggagaagctagctagcttggctacggtgcaaagtgcagtgtggattcgcgggtgatcacggagctcttataaatagttgctaggcgccagcgccaccggggtagcgacggagagtggctgttcatgcatggaaatgccagaataagctgccgccatgcgaaactctatctagtggccattactgatcgatctgccatagtgaaatgctgtgctagtaatggacaggttgagaggacaggacgcagccagtgggtgatcactgacgactcattcgtcatcacacgtgtatattcatgctccagccgatagaattttgggtccggtatagatatagagtgacagataagattcttagatagatagatttttgtttatatagctcgtcggcaaaggtgaggcgacgtactatcgggaattctgatttctgagcatcgatcgggggggggggggattgactgcaaaattcacgtacatggaaattgcattggcagttggacagcacctgaaaggacgtccaagtagtgtacgaaaggctacac

SEQ ID NO: 131637 - DNA, 747 bp, Zea Mays
aaggatagagcgtacccggcttatttgtacagtggtgtcactgattctacctgggttaccaacaaggggattcctgctgtggatttggtgagccgactggagatgattcttagaggcaaagtgtcgaatattggtgctcctgttgcatattctgcctggaatctgctaccttccaagaattttttcagttttgtgtccaatcctcctgctagcgatagtggcctaggtcttagagtgcgaccctctcccgaagaagtcgaggctctggttgcttcacttggtgatctccccaatgatgaaaggcaagttcactttgagatgcctataaacccgagtgatgcagagataagtgctatgctggacatgttggctgaggattcatctgattccgtccctgctgaaaccatagctattgcaactatccccgagcctgaaaagaccttgactgctcaaaaatctgatggtgctcgcccaaagcgccttcgcccggccagtcatccaactgctcctgccgaggggaagaagaagaaaaagaggaggcttcggcgagtgtcatgtttgaatcaggatgccggcccttctgctcctgctgctgaagaagtaccagtggaactttttactagagctgatcccaatgggtgtgaccctgctgacgctgaccccaatgggtgtgaccttgatgatgttgatcccaatgggtgcaatccggccgacgctgaccccaatgggtgtgttgttcgtattgtt

SEQ ID NO: 131638 - DNA, 691 bp, Zea Mays
cgtgaggaggttcggaaactgttgcacgctggcttcattgaagaggttcaccaccccgtgtggctggccaacccagtcatcatgccaaaagcaaacaggaaactccggatgtgcatcgactacaccagcctaaataaggcatgccccaaggacccgtacccacttctacatatagatcagatcgtggactctacctcagggtgcgactttttgtctttcctagatgcctactccggttttcatcaaatccggatgtctagggaagataggaagcacactgcttttgtaacggtagatgggttgtactgttatgttgtgatgccttatggtctgaaaaacgccctgccaacatttgttcgggcgatgagtaaaacctttggggacctgatccgggacaaggtggaagtttacgtcgatgacatcgtggtcaagactagaagggggtcgactgtagtagaagatctaaccctagtttttgacaagctgcgggcaacccgcaccaaactgaacccggagaaatgcatcttcggcgtttccgcaggaaagctgttgggtttcctggtttcatactggggcattgaagctaacccagaaaaaatcaaggctatcgagataatgaggcctcccgcccgtgtcaaggacatccagaagcttacgggatctttggctgctctgagccgcttcatttcaa

SEQ ID NO: 131639 - DNA, 441 bp, Zea Mays
ctgcaggagtagcggaagaagatggtcgacttgcgacatcaggcgcggcaagaacatcagcgacaatgtcttcaggcaccatgacgctaggcctctgcattaggatccgcccagtgcgaacaatcttatccatggccttgtcgcacatcgccttcataatgacgcggtcatcgtccaaggccttgatgttgaggcgggcggcctccagctcctaagtaacaagcttcttggaagcgcgtagctccttaatgacagaatctttggtagacagcaacttaccaagtcgggacatttcagcctgggacgccctcagttcatcacggtgatggtccatgtccgacatggtgaagtggtgactcctctccagaatggtcaaggtagtgctagcatcatgatatagtctatccagattgtcacgagaagcaatgagcactcgctttt

SEQ ID NO: 131640 - DNA, 416 bp, Zea Mays
gcgacacttgccagagagtcaaggccagtcatttgaaggtagcaggcaccttacagccccttcccataccatcttggaaatgggaggatatttgcatggattttatcgtgggattgcccaatacctcccgacaccgtgattctatttgggtcatcgtggatagattgaccaagacagctcatttcttgccagtgcataccacccacaagatagagaaatatgcagaaatctatgttgatcaaatagtgcgtttacatggaattccgaagactattgtatctgaccgaggagcactgtttgtggcacgcttttgggagcagctccaaaattcacttgggacccatgtaataagaagctcagcataccatcctcagacggatggtcagacagaaagggtgaatcagattttggaagac

SEQ ID NO: 131641 - DNA, 567 bp, Zea Mays
ttgtgttacactgtccacattatttatcaagggttttgtctacatatataaattgtatatcgtctttgactttttcatgtgcatagttttttaccgtgcacgtaaatatagtgtatgcctccctctctttggtgcgcgtgtgccggaggagagccagagcagaggtcgtagcatgcagtgttgatagataggccgaccataggtggcataggcagcggccgccgcaatgtcaatggccggagcggtgcaggccagctcgcccatccgacgatccagtgctcgaccgagatgcagcagcaagacatggttgggtatagctagagcgtagttggccggccagaacaatgctaggcgagagagggaagtggtggtgacaggaatgtgagaggagagggattgttatctgtttggtcttatgaatatggaggaccggccgtcagcaaacaaaaaagtgaacactcatcatagctgctgttgggcagggattcttttccatctcgcgtcctctggttgagagatatatatgtctgctactctcgctatatagagggctggcctaccctgcta

SEQ ID NO: 131642 - DNA, 1125 bp, Zea Mays
ttccatccggccacacggttccggattttctcgatcagaggttggacatgaattctctagagcgcccgggtgtaaagttggaggcccaggtaacgacacgggaaggtcccccgggtcccttggaacgactggagcacgtggtctaggtcaatgttatcacatcttatcgggtggatagagctcttctcaaggttggtgaccaagcccgaggcgcaaccaaaagcgtgcaggatgtctttgaccgccaggaggtgttctctagaggggttgataaagataacagcatcattggcatacagagaagtcctcagttttgctgtagttagcggaatgggggaaaggatcccatttctggctgcaaggttcaggatacgctgcagcggatcaatggcaaggatgaacaacataggggaaaggggtctccctgcctaacccctctcctgtgctggatgtttgctccttgtcggccattgaggagggctcgagacgaggtggacccaaaaaggatggaaatccactcacgccaacgagggccaaaacccatggtctagaggacttctaggagataaccccaattaactgtgtcgaaagccttctagatgtcaagcttcaggaagagcgccgatttttttgcttgtgtagtcttctaactacgttatgcacataaaggaagttgtcttgtatacatcttttctggatgaaggcactttgggacttggagattagagtgttgaggagagggccagccggttagcaagcagtttggagaagatttttgcgatgttgtgtatcaaactgatggggcggtagtcacccactgtcaaagcatccggcttctttgggataagcacgatgttggcagagttgagtaaacgaaaatccgccccattcatgctatgaagttggtgaaaagcctcaagaacgtcctccttgatgatatcccaggatactttgaagaataaacctgtaaagccatccgggcctggtgctttgtcgctcggcattgagaagattgtttcctttatttcttcgagggagaacgacacttatagcgatgagaggtcatgctgcgctaaagctagagtcggccagttgagggtgatccctctctccggggttgtccct

SEQ ID NO: 131643 - DNA, 469 bp, Zea Mays
gcagaatgggaaccatgaaatcccaaaaatctagagctcgattcccctaaattatacgcaaaagaacaaccattttccctgcagctgccaagaatcgctgccaataacatgacacccaagctgcagtcagtattggccaaaatcatagatcaagcaacgaaaaaagtatatagttcatcaaactggcggaacaaacaaaaaacatgtcagtgtcaacattattatgaacaaaacctcttggcactactaatttcaagaactcaattcaatacaaaatcacaaccttatgaagttataattgccaatcacgagattgagagactctaatatcatcccaccaaaacatggaatactaatccatagtgtactcatgggcttaactgttcatatgtgatatgggacgtgatctaatcgcgacatgggatgtctaccccacataatcaaaatgtaaaatagaccacactgcaag

SEQ ID NO: 131644 - DNA, 356 bp, Zea Mays
gtttggccaacgattaatggaagacgaggtgaaggcggctccaacaagagacgaggggttgggacagatctagaggtcgtattatacggtgctcctccagtgggtgccatcaactacaggcgacggcggcgctgcgagtagcagccagcggtgcgcaggtgagcagggagtccaacggcgggcggcgggcaacaagtattattctagggtttcgtttgcatgatgttgcggccagccaacaagtattattctaagtactaatgcgagcagcgagcaggcatgggccatgtgcgtatgtacgtgactaaggccaatggtgatgccgtgatgggccatgagccaagcgcccaagccat

SEQ ID NO: 131645 - DNA, 602 bp, Zea Mays
cgcccgaattatactgcgccacgtgtgtgcggccggcatggcatatgcatatgcatatgcagtgattagcaagctacgtagtccttccagatcgtcattatagcaaagcttccttggaagaatcgtcgtactatatacacagtcgtagtctctctccaaaacttgacaattccttaaagctttcttctttctagtgcaaagacccatcttgtgctcaacacaagctagcagctgcaaccacatagccggccagttcccttgcaaggatcactaaacccagttcttctctctcctataactaaactacgccacacggccacaccagtagttcccggcttgacacctggtgcagtgcaagtagaatagaagtagtgcaaccttgagtaatcccatgcgaaaagaaagctcaatccttccaagccacatacactgcaaccatagctgtgttgcttgatggagaatttccttacctgctgaccaaacctctcgaaaatactcgtcaattcatttaaaagatgttttgttttttaaaatttacagtatatatttagatatacacaatatataaatacataataaaaaaatcgccaatcatataccag

SEQ ID NO: 131646 - DNA, 821 bp, Zea Mays
gcatgggcgcatggctcataagccgcctgcccctcccgagtcccggcctccccaaccccataacccataaccctaagtccctaacgcgcccgcgcctctctagtgctctccgagtttccgaccttcgacgacggtttactggcgctccgacgcctacgtggacctgtccacctcctccctctcggtctcggtacgccacatggtaaccccaactcggacgctacgatgctggatctcggtgctcgtgctccggttcctcctttcctccactcctccccctctctaccctgacctcaaaggcgccggcgacgtgaaccggtgctttggatctgctgctcatcagtgaaggtaaggtcatgaccttaagttgtaaccctaacttattccggttgtccggatctggtatgatttggtcatgaactcctaatctgcttattcccatgcaagtctgcgccgtgtgttgccttgatccgtgaggaaccagtgcgcgtcggctcgatctccacgacgagtcggcgacggagctgggtctccagatctactgctaacggtgacctcatctccgcgtccggcaaagaggtaagtgacctgatctgctcgacatagtggtgaactggtgttcaattgaaaccctaacttattctgaatgtttggatctagtctgttttgctcataatctgcttattcccttcatccttttcctttgcaagtcttccccgtgagtttttcttgaccgtgaggaaccagtgcttttggaaccggtgcttcgaacctactactaacggaggcgagttcttcgtgtccggcacataggtaatcag

SEQ ID NO: 131647 - DNA, 437 bp, Zea Mays
acgagagagataccaagaagtaagagaagtcggctcttatgtaaaagcaaaacagaaggacgaaagagagagataagacatggggttgggccactcatccatggggttgggccagaccctaaactgatccgtccactaagacaagtcaaaatcttgggtgatgaaggggacgcacttgagtccggtgaaaacaatctcgatgaccagggaccaaggctaagggaacgaggtcatgaaaggaggatatcatcagcatgttcgagcctgagcaattatcgataagcgattgttaagatcactgcagatatgagctaatgccgaagggtttaccttcaggacgaggacgtgaattagggtcgttgaatccttcctcggccatcagtttagaagcaccaagaaaaaggaaactgagatttgcaagaaaagtgtgcttgggt

SEQ ID NO: 131648 - DNA, 1150 bp, Zea Mays
aaatatttgagaatgaaggtagtatgttataatggaaaatacaattagttgttaaacgttgtgactacaaaatttatttaacaattgtcggtgttttgtacctcgctccgacaagtaaatttattgtagcgtttcgagctccggagcgtgtgcgtggagagcatgaggtttataatggttcgggtagaacatccctactttcagtcatcgatggcttctaccagcaccattgatgatcaaactcgtagtagggattaaagcggtcgagtgagggaggagacgctcctaagtctctttatcgaggtcaaagtggagcttagaagctgaagggtggagttctagctaagtcttggcttggctgggctctggcctcctggtctctcctttggactgatcgatccccttgtctggaggctagcctctcccttttataggatgagaggggggtcgaccagcggtggcttccctaggaagaagtcgtaaagcaagggtaaaaccaacattttacctcgtgtggagccacacgtactcgtggggcctagggcgatagggttgcctagttgtctcatgtttcctgtggcgaatgatgtgggggcggcgatggcctcaggcatcatcattttgactataccaatccctagccttcgtagcctggggctcgatgtagcccgtcgtatagtgccctgtgggaggtctacgtactcaggcctagttcaataggccataagtgtgtcgtagggcgaggggtgcatgggccatcaatgtgccgcggttcgagaggctcgtaggtcatgagtgctatgcgacccgaagtgctcgaaggtcatgagcgggaagtggaccggcgccgcgttgtggctcggtgccatgcgtggttgaatgcgatcgactatttatggcgagtaagtcttgggccgggcgcgggatccattcgagtagttcccttccgacacacccggtctctcctgtcaggttccgccacgctcgaccctaggctcggtgccgcgagattcgacctgagtgggtcctttcaaggttgacgtatctatctctcccaactcaccggcatgtcgtagcgaccagagatcctttcccccagtgtgcttgctgatcggtgggtcacagagaccgaggatcatttccccgacaa

SEQ ID NO: 131649 - DNA, 365 bp, Zea Mays
ctcagcagcaaagtcaacgcggaaaaatactactacacgattgtgtgaagtgaaatccactcctgtctggagctcttttgagttggttgagagttgagaccgtggttgggttgcagtaggtcgctgatgcggactagtccaaacagtttcagaaatggtcggtcatccacgatggctgacagattttgtttcatattatgtacagaagacgcgaactgtatgcaaactatgaatgtgaccaacggtcagcttactgggtgtctgaaattcagctgcttggctctggcttagcattttttttttgttggtatggtatgcatgaagttggtcatctcgcctgatgggtatccgcagctcctcaagga

SEQ ID NO: 131650 - DNA, 952 bp, Zea Mays
cttcccttcgaccttcgggaatttgagcgcgaacaactccgtgtttgatgtcacggcaaatgatttcaagcttgtttcaaaattcaatgcgtcagaggagattgcttggagagcctctgtgagcaattcggtcaccagcgcagttgtcaaggagtactttcttgtagtcggtgctcgtggcctgagtattgagtttgatccaagacctgggtcgtttgcctttgtgaatgcgattgaggtcatgctgaccccagataatttgttcaatgatacagtgagcaaagttggcagtccagtcacgcagcttcctcttggtttgaggggcagaggtgttgagacaatgtaccggctgaacattggaggtcctgcacttaaatcgcccagtgatcagtatctccacaggccatggtacactgacgaagcgttcatgttttctacaaatgctgctcagactgtgtctaatgcttcaagcatagtgtatgtatcaagcaacgagtcgacaattgcgccgattgatgtttacgagaccgcaagaatcatgggcaataacatggttgtggacaagcggttcaacgtgtcgtggcggttctatgtccacccaaactttgattacttagtacgccttcatttctgtgagcttgtctatgacaagcccagccagaggatcttcaagatctacatcaataacaagactgctgctgagagctacgatgtgtatgctagggctgggggaattaacaaagcatatcatgaggacttctttgacaactcgacgcagcaggcagacacactttggcttcagctaggccctgactccatggccagcgcttcaggtgctgatgcacttctgaatggtgtggagatattcaagctcagcaaggattccgacctttcttatgtgcttggtcatattgacacgggcaaccagatggattcttcaaaaggggggaag

SEQ ID NO: 131651 - DNA, 522 bp, Zea Mays
ggagctcgacctctccgtcgtcccgttctcggcatgcggtccaggagtccggcaaagctcgcgggtgctgcgccggtgagtctcctgctaggccgcgtagtgcaccgctgtgtggatcgcgcgggcctctacggctgggagcgggggtggaagaaggtcctacggccgtccgatcccgagtgtgtggatcagattagaacgggtatagcctcttcatccaactaaatttgcatcgtccggttctgtctaaacggtagacattcgatctccatattcctattcgaccattatatgggggccgttgatcaaaggatggatggctatgattggatcctgcgtaccctttcgcgcagttgaatctgaaccgttgaattaggatcgggcgagagaaattaggtcgtggctattttaaatctgggtcgtagattccagatcggtcggctccatgatcataccggttcggtgatcgtcagattaaatcggggtcgttcgtttttaatccgacggcccatgatccacgat

SEQ ID NO: 131652 - DNA, 363 bp, Zea Mays
gcagcatccaggactctggttgggaaggtcttcaggtctggtttctactggccgacaacaaagagtgatgcagccgagttagtccagaggtgtgaagcttgccaattcttatcaaagcagcaacatttaccagcatagcaactgtagaccatacccataacatggccatttgcatgctggggactggacatgattggacccttcaagaaagctcagggaggatacactcacatgctggtcgccattgacaaatttaccaaatggatagaatacaaacccattgcttctctgacttcagccaaggcagtggagttcatacaagatataatattcaggtttgggataccgaataacatcataacc

SEQ ID NO: 131653 - DNA, 463 bp, Zea Mays
ctcctgctaccgccacctttgttactcgatgctcgtagtatgggttacaagcgagtgagagagggaaggagagatcccaagtttcttatgcgtgggtggaccttaaagactacaggactagagtcctacgctaagccttggctccagcctccaggtattcaagtctcgtgtgtcgttgcctttcgtctagtatccttggttctatgttctctttcgagtgttcttagttcatctcttgtgaccgacctcatccttttatagcccaaggtgggggtcgttcgtcggtgacttccttgagatcgggtgttttaccctgatgaggcaacgttatctgtatgcgtcatcttcaggtcatctctgctcgtgctcactttgacgaacggcgcgggcagcgcggggacctagcaccatcgttactacatctgcgcgatgctgaccccttgcctccgtagcctaggtcttg

SEQ ID NO: 131654 - DNA, 687 bp, Zea Mays
accaagtcatctactttgatggatggaatggacttggtgcatctgctgtccttaactcgatcgctgaacaccctcctccgtctgttagaaacaaatttcagaatattatacacattgattgctcaagatggagaaaccggagaacagtccagagaatgatggcacagaaactaaggcttcctcaacatgtaatggctatctttgataaacatgatgaagatgatgatttagctggtatagatgaatgctctagggttgagataaaagtggtcaggaaagagatctcccgagctctacaaggacagaactccttagtagtcttccacaatgggagccatagcatggttaacttcaatgaccttggcattactctagatgctgcagatccttcatcaaatattcttcggaaggtactgtggacattccaaggaaggcttcgtgccatcaatgcacgtaaggaaatacagggaactgaggcagtggacacttcatatctgtaccttggttcaattttttctaaggaaaactctgatttatcccacagggttgaaatactgcgtgaagaagctacaaaaatagcacaatacacgaataagcttatggtcactagggaaatagctgaagtgtgttgtaagtacttgttatcattgcattccaacactaccacctctctggacttcaactggg

SEQ ID NO: 131655 - DNA, 663 bp, Zea Mays
ccaagtcctccttctaaagattttggcgactcagagtactcagagaaggcctcctccgagtatgatcgatcgcccaatggggccgccctgtcagcgccgttcgcccccttgctgactcgcgggccttgctcgtcagacctgtctcctccccgcaaccgccgcgcctgcgcccatgacgtgagctccatgcagtcaaactacgcccacaccccacgactcgcccacacacgtcacccgagcgcctaggtaaagaccccatgcccccctcagctcacccctacatctcattcgctctctccctgccctcgctctcacccagctcgcatcgccgccccttccattgccctatcattccgcagtcgtcgtcgggcctctgccatcgcctcgaccacggtgagctttgcctgagctctgcgcaccgaaaatctacggtggttcccctttcaccaacccccctaccccgtctgcgcttaacatctcccctgcacaggatggagttcaccgccgccacaattcctcttcgtttggccaactgaagtccccccgcgccatgccaagctgcccgagcgtcgcctctgggtaaggaacattccctcgcctttcctctgcactaattttgtctcaccatgaggaatttgggcttgccgacgccactcctcatcg

SEQ ID NO: 131656 - DNA, 585 bp, Zea Mays
atacgttgaatacctcacattgttcgagcttctagtgtttttttgaagtgtagtagtcagacccgtcaaaggtcagcagacactcgtttcatcatggaatgcggggcccctactctcctgttcgccatccttctgggggttagaccctttttcggacgatgcctctttgcttaagaacttcctaagaaaacgacaatccttgtaggcatgtcgaactaggtaccaatatttcgggtatggggcttcgagtagatctttgaaatgattgatggtctcctcaataggatgcttacttcccttctggcccattatggctactagtaattcgtcgtgcccccacatgtccttctttctcttatcaggctattcgtcgaagcccccgttggactctttgtcgagtttggccttctgcttatgatggtcaaagatcgccccaccacatcttccctggacgcgtggctagttgctatgtcgaagagctccttcgtagttcgcatactcatttgccccaacttatgcactagagtatctgttatggtccctgagatgaaagcgctcataacgtcgacgtcgatgaggttagta

SEQ ID NO: 131657 - DNA, 408 bp, Zea Mays
atctggagcaaatcagtgccaaatctgctctgacaggcagactgaatgagcttcacgatggtacagtgaccagattggatcaccagctcagagacctcgccgcaggcgaccacacgcgtggattcatgctatcgccgtgattcacgctgaattaaacacggataacgatcacggggtgaaagatctcgccgtggatgggctggaatgtactgtgtgcgtgatggttcatcagtgcacaccaactacgtggccaagcggcaatcaccggcgtgttcgccgttcaccgggtggatgccacgccttaggaggtttatcgtgtcaatatgagccgaggtgactatccaatgaccgccgtagttcagtcgctctgcggttgccacggtagatcgccgccgtgactcattcccc

SEQ ID NO: 131658 - DNA, 414 bp, Zea Mays
tcagcatttatttatattgactgtcttttttgctcattatatgtggcggttggcatccatctatttcggcttcccgggtcctatatctgttaaacatatctttaggcgctggttggcggggtggatttaaatacttaaaatcttattgttacaggtgtctcagcactgtgctgagctatttggataagtagaaatgacttagtgtttaataaagcacaaatattgacttatttgcaagttctattcagaggaactcattggctcagactctggacgcagctgcaaagaagtgaagatgcaacagatcttttaagaaaatcttgtcgacatctggagacagtggccatgcagttttgtttttcttaccagggttggaggttttcaaacaggattgtgttgtaatgaaacatttct

SEQ ID NO: 131659 - DNA, 775 bp, Zea Mays
cgagattttcaacttcctttttttgtgtctagccatcaaatgaaaatacttggaattcacatcaccctctaataagaatttatccctagctttggcttctttgcaaaggacaattgcacgtctgaggtcacgtattcaatttttaaaagaaggtgatgccaatactcaattcttccaccgacatgcttgttaccgtaagaagcggaagtttatttcaaaactagaggatgatggaagggtgattacaaatcatgatgacatacaagaagttctggatggtttcttttccaaccttctgggcgctgattttcagaggcgtgttactattgatctatcaagctgtcatagggatgcggtggatcttagtgcgctagataatcctttcctggagaaagaggtaagagatactgttgcaggcctcccttctgataaagctcttggggttgatgggtttacggggaggttttacaagacatgttggaacattattaaggaggatctgctggctgccctgaattctttgcatcaaggaaatgctcataaacttgggttgctgaattcggactatcttatccttctccctaagaggttggatgttatgtcggcaagcgattataggcctattagtcttatccacagttttgctaagttggtcaccaagcttcttgccaacaggttgggccctcgtcttcatgagttggaaggaagaatgtaaacgatggaagctgtcttgttccatgggagatagttacaaggcctctaaaatttggcgggc

SEQ ID NO: 131660 - DNA, 507 bp, Zea Mays
cgttgtgaatatgtactccctagcgcgtatgtgtatttacactgtgtccgtccgccgtcccgcgtgtgttgtttatgtgcctccatgttcctgagtttggcgccagcctacagctgcatgtagtcgtagtccactagttttgtacttctgtatggtatatggggtggggcccctagatctgggggcccaggtcggttgccccgctcgccctgccccaggcacgggcctgcctgagggcgtcatcgagtggatcagtaatgaagccaaagcttttgaggagattttgagtgacagtggggatgtctatgcattctctggtgtgaggggggttgcagccattttggagaaggcaggttgtgaacatgttaaaaccttggctcaggccgaagctgtgttctccgtcgacgatacgaaggacccctcggccgaagcgagttcaataggtggaattttttttattgatatatgggataatggcggccgagagatggctcatgaaataatgaa

SEQ ID NO: 131661 - DNA, 310 bp, Zea Mays
ctccggtggggagtatgcctcccaaccgcaggcttaacagaggtagaaaggtgagagacaactgattattgcttgctttcaaaggtccggttacaatcaatttataaggccagcggccagcgcaaatggagaagctctccttgattatagaacctgcccaaaacttagattccttcctaggcctttccttcctagccgccaatcactcctaggcctttcctttctagccgccaatcactggcgccctttcctgttctgcgccaatcactggcgccctttcccgttctacgcgatccccctgatctgcgcg

SEQ ID NO: 131662 - DNA, 286 bp, Zea Mays
cggcaggtgattttgttgtttcctctatagggattctacttgtcccgccttcggcattcttgtccttcatcaatatgctagtaagatctgatcccagcggacttaacatacgaaaaggtaagggtcgaatcattacctctaggattcctgtcaccccaatagatgacgccaaaggagtttcggtaaccttctttgatagatccgaaggacctttgtcaactcgatcaaccttcaacgtgtttcgcttcttgggggcaggggatcatggtcctgagtgaaaagattc

SEQ ID NO: 131663 - DNA, 463 bp, Zea Mays
ccctttttggctttttgatcaaaggtttagcgaagtgagacagataaaaccctaaaccatcagcagccaaaccaacaatgggcatggtgggtttgttttgcttaggaagaacacaacgagaagtgacatgtgtctccttgcggcaaatatcacaccacaaagcgttaaaacaatttctagcatgatgtccttcaacaccacatttttgacagaacgcagggcgaacgagatcgagatctttcttcaaaggaacaggggagacagaagggttacctggttgatttccctcaacaggatgaggagacaagacacccttctgctgctcagacttgccgatattaggcttaagcttccagctaaggtttcttggtctgttccaaggatgagaaccttgcggcttctccgacggaccccaacgatcccattgggagttctgggggttctctcctttcggatccatagc

SEQ ID NO: 131664 - DNA, 399 bp, Zea Mays
gcacggctgcggacggtccggcgacgatcggcagcgagtacgtggcgttgttgcgtgtgccggggtgctgcgtggacgagctctggcacggtgggcacgagttctggcgaggcactgtgggcgagctctggcggcgaggttttggcaaggaagaagggcgcgagaagagagcgagcttcgggtaaggagagaaaagaggtcggctggggttttatagagggggagggagaaggaaaggcatcgagggagatgaaaagcaacgaccaacattgatggagaaaccgtctactttgctaatggagggaggcgaagaaacgacgctggccgttaatggcgcttaatggaggaggcgactgttatggggaagggcaagaaactgtcgacgcgggcaggttgcag

SEQ ID NO: 131665 - DNA, 494 bp, Zea Mays
ttttggtggtggatgtttggttgatgctgggcggggccatggttgtatggttgtgggtgccgagatcttcctagtgcgggtggagggcgtaggtggcgaagggtggtggggaaacatagtgtgggtgagttttcgtggagtggcaggcgccgtcgtatggggatggagcgtggtcgtctccgtgtaaaccgggttgataaacgagaattgttgtccttgccggatggggcgagcataggcgagggggatcttcggaagctttttgagggtgaggaattgaggataatgttgtttaatcacagggagatgggtatcattccgaaggttgagccgatgtaataggcgatgccctcactgtgtgtatgtaataggcgatgccctcgccgtgtgtatgtaattgtaatttgtatggtgatgtggcttgttggccgtattcgtatgcttgtattggtccagctacgtacgtgggtgactttgtgcggagtgtccttgta

SEQ ID NO: 131666 - DNA, 498 bp, Zea Mays
gggagatgggagaggatgagaggactcggcgacgaagattccaacctgtctgtctcttctgtggcacgaggaacagaatttatatggccaaaggagcggcgtgcgcgcccccgctggggtcttcggcaggatctgttgagccacccacgaagcactgatgacggagggttgttgggggaagaagttgttacatgcccagattccagaagcacgaggcgagcagacgcaaagccaccaatcgagattccgttgagatctccatggaaataatctggagaagggagccatgagcgttgggcaagcgaatgagtctgacaggcataccccgaggtcacgggagaatccaaacggactcccaggcggccagtgagctaatcccgggcttcccggaacagtccgcgcggaggtgcgctccggcgatctcgaccggtttgtttgcaaccaccacgcgcagcggaggggataggcttgacatgcagggcccaccggcagcgagag

SEQ ID NO: 131667 - DNA, 404 bp, Zea Mays
caggccctaaacaaataccaagctcaaacaaaagcatggcgcgaccacacagtcatcccgagggaattcagcgaaggagacctcgtactcgtccggacagctcgggcaagctagagccaaaatgggagggccccttcatcgttaagacgaaggcgtcccccagcgcgtacaggctaacaacgccatccggcgaagacttagaacattgacaatctccgcaaattttttgtttgactcctcagggccagctcgcccttgtaattcacaaaacagctttattccggcccgcactcttttcctcccggggggtgaggtttttaatgaggcggagccatgtaatatacacgcaaaaaatcccccacaaaaaattacaacgtaaaaaaaagaccgcatcgacggtcttc

SEQ ID NO: 131668 - DNA, 334 bp, Zea Mays
caagtgaggcaaccaaggcactaacttcttcagcagagggtcgcactcttaggcccaaactgccatcagtgacaagtggattcgacacaaaaagggtgaaggctttgggaggaggcaggttccaggccgagtatgccactggagcaccaacatttgacactttgcccctaaggatcatctcaagtcagctcaccaagtctgcagagggaattcttctgttggtaacccgagttgagtcggctagccctcgatacagataagctgggtatgccctgtctttcaatggctgaatattcttgaaaacaaaatcagtaaccacggcttcagcagtcag

SEQ ID NO: 131669 - DNA, 289 bp, Zea Mays
ggagattttgggaggaagagaagcagatggaaggaagatgaaacaaagttgagtgacggacgagcgagcggagatctagcgaggacggcgacgtgacaggttggatgatattgggttgacaggtcattctccacgtcctcttcgctggcactggtgttgacgtggtccgcgcccaggcactgatgttgacatgaaaaattatctagactgtgcttgcaattcagatgttaatgtgggagagagtcaggcatcacacacacaatgcaagattgattgatctaggtggaag

SEQ ID NO: 131670 - DNA, 315 bp, Zea Mays
gacctgatccaagagcacatagcctacagggtatggccacttgtggataactgggagatgccgaaggagactgctgtcgggtccagtcaagatggattaattcgtttgaaatatatcttcagatacagagaccggtttgacaaaccaaatgacgactggctgaaatgtattgaggctactagcgacgagttacttggggcatataccagagccgaagatgatgctttgtcctcagccttcgggggtcggggcaagaaaagattgaacacggttttcgatgcaattggttttatatatcctgattattgctacccc

SEQ ID NO: 131671 - DNA, 477 bp, Zea Mays
ggcttcttgaactctttctcaaacttgaaccggtatgggagccaaacaagttcgtgtttttgctcccatcctttttcttgggcattccccagccactagaggtcaaaaataccctatttgccaagaattcttgcactagatctctagtgctgacttcggcgctaccactctaaactccacttcggctagttggtatggggagccaagctgcatatggcacaagggccttgtcattccgaagctcaaagtcagtggactcataaccatagtcattagcttctctctctttttctcgaatgctttcatataaaaccattcactcttccaacaagttggccacttggtaaggtagctaagaaccggtgccttcatatcctttcgatacgcaaaattgtagcaaccaaaactctcatgcaggccatttgtcctagccttcgtctggtaatgcagctcgtgcaccccgtagaaagcttcggc

SEQ ID NO: 131672 - DNA, 622 bp, Zea Mays
atcaaatttgattttgtgtttattttgctcatgatggaaaagattatgaagattactgatgtgctatgtcaaacactccaaaagaagtcaattgatattttaaatgcgctagattcagtttccaatactaaagtattacttggtaacttgcgaaacgatggttgggatcctcttcttcaggaggtcaattacttttgtgaaaagaatgacatcgatattttggatctgaatcacaagtatgtttcctttggctaaattattgcacaattattattcatatcatataaattgattttatttgcattttatcacatttgtaggtttgttgatgtgaccaaatctcgaaataagaatgataacaccggttttcatcattataaatttgatgtgtttaatgttgcaattgatcaacaactgaatgagatagaagatcgatttggtggccaagcgacagaccttttatcactttgtgcttccttgaatccaatacttggctcttttgacatagaaaaggtatgctctctagtggaaaagtattatcttgcagatttctcaaatcaagaaagaatgcaattagagtgccaattgccacattttcaacttgatgtttgcaaccatccag

SEQ ID NO: 131673 - DNA, 352 bp, Zea Mays
gagctttcatgttgctagagccttgtgtggctgtgaggccaaatatgtcgtcttgtgtcattagttcttgctgtgggtagttttgcatggtacatgttgttgatctttgtttgctatttttcccgtgactgaatatgaatagtcatgaagcataataggtctttactgtatgaaacgattcatagtcttctgaactggaagatcacttattgggaaaacggaagcacactactgaggcgaaaaaatgatcctagcgaggaaccaaacatctacattgatcatattttagtaagcatgaaacgcgtacagaaaacaaatagcagctaatattacaaaagtaaccttaccaagg

SEQ ID NO: 131674 - DNA, 275 bp, Zea Mays
gcggaaaatgattcgggtgattctgtgtctaagttttttgagtctgatgattctgggagttcggtggtgtggacggaagagtattcggatgatgatttggattattttgcggcattggatgtggctgcggcggaggcttctccgcatgtggtgggtgctgaagttctcggtccaagtgttggtcgtaggcgtcgaagggcggtggcgaagcgtagagtgagtgaggtggagggtggtcgtcttcgtgtggacaggactggcaagcgggaattgtt

SEQ ID NO: 131675 - DNA, 571 bp, Zea Mays
tgtggaacaaagtggaccatcttgttaaagcccacttcatactcagtaaccgtctttttctcctgcttgaatgattgcaagtctatcttcatcttctccaggaaagtgactgggtaaaatctcctttcaaattgcctgacaaaaatatcccaggtcaggtaacccggtgaagatgaatgagctgcccgcatgcctctccaccaaatctgagcctcccccttcaacagttgtgtgccaaagagaacacgatccccaaacgctatctcaaagacatccatcttatcttccacataagtcagccaatctgccacctcaaccggagtaccactgccatcaaaagtgtccaacttcatgtccatccactgcatcagagaaggaccattgactggaagaggcacctccgcccaccacctggagcagcacctgcagggatagcgcccccgcgaacacctccaataccggcaccctgagcaccagtaggagcaattggaatggcttgcctcagaatggccaactcctgctgcatggctcgcatcacggctaacattgccgccggactcatagaatcccc

SEQ ID NO: 131676 - DNA, 497 bp, Zea Mays
ggggaaggggtatcaactcgtgtgagccacacgatctaatctgggcggtctagattagatcccggtcaccccgaaccggtatgcgacatgcgccgttggatcagagataaacagcacatatttaaagcgtccgagatcgaatctggatcacgggatccagatcggacgactcgggatggtcctaccgaaggggtatgcgcgcgcctaatcgcaaccaccggtatttgatcagacggccaggatccagggcattgaagaggtatcgccaaaccgatctaaacggttcatcagcagatcgaaggtcaacctgccgtcttccccacaccggccggtaccaagcggcggcgcaccaaaatctcacggcgaagctccgcctgagcacaccgcgcatgcgcagtccaggccccatggccaaattccctggtgctatgcctagagaagcgtaaagcgaacacgatggaggggtacttaccagctgcgacccgacacagtgctct

SEQ ID NO: 131677 - DNA, 384 bp, Zea Mays
caacaaagaagtttttgaaacccccttcgttacttcccacctagcaacaaaaatacccctacctggaggaaaagacttcaggccctattaggaagagatcctaccgaggatgaccccaccatcgtctacatggctggatatctccatactctcgataaccactatgatgacctttcctccgactgcacccacctaaagtcccgggtggaaagcttagagcagcaggtcaaggaacttaaaaaggagaaggcatccctccaagagagtctcgatatagcagaaggcgaagaggccaacactcgtgaagcctaccgaaccctgaagatggattacgataagaagctaaagaagctcgcccccaccaagaaaatccaaaagaagacc

SEQ ID NO: 131678 - DNA, 557 bp, Zea Mays
gacctgccgagtcattgtgcgcacctgcatgactatctgaggtcctcaggacaaggacatctgtaggtgggcctaataccttgggaggctccgtgataagaaggaccttcaggctgagcaaatgagtgctcgaattcatgagcttgaagaacaggtggaggacaggaaccacaccatcgaggttctagagaactagctccggaatacccagcaatagcttgaagaggcaaaggagcacctggacatgcatcaccaggatatgcaataggacatggacgcagacgaggatgtggatatttagggggaggatcctgagccagcttctagcttggacactgctagcacaactcgctctggagggccaccttctccagattctagctttgcctcgcatgcccactagatgccaggatggggaatacatgtgatagggagtagagctccttaggatagcttagcttttgggatttcatggtatactaggctaggagttggattttgggttggcaattgtaacaatggaaaactttattttggatgatgggaaaaccaatgag

SEQ ID NO: 131679 - DNA, 472 bp, Zea Mays
gatggcctccgccgtgaccctgtacagcgccgccgcttggggatagtgcggtgtgggtgaggtgaggggagagcgatagccgttgatcactgatccagtggacaggatccgatcgcgctttagctcttcgctcgtctgatcctggccatcgagccccgatcggatggagtacaacagataagctctttcgttaaaaattaaccgttgatccctgatcggtcggcccggattggataccggttcgatttagataacttctaatctgggccactggttttggatcggacggatcacagtgcctcgtaccccttcagcgcgactgttttacagaagagaccctacacttgggtataatcaacccgcagtacacatgccgtataaagtatatacgcagtgacccagaattcttatagaataccccctgcactcctctgatttaatgcgcgcagtccaagggaatagaaaatccagt

SEQ ID NO: 131680 - DNA, 733 bp, Zea Mays
ggctcggttgaggctgagggtctctggaaatggctggccacggtggccggcgctcgggtggctcgggcaggtggcgtagagctcgccggagctaagggtggtgtctggccagcgagggtgagtgcggagtgaggtgaggcgcgtctgggggtggtcttaaaggtgtgggcgagcacggtctagcggtggctctgacacgtgctcaaggtgtgcgcgggcgagcgccactgcgcactcttgcgctttggcacggtgtcttgcacgaaacagcgcagagagaggtcatgttcaagcgcggattggctccaaatctttgcgattatggtcatgatcccattgagagatctcttcccctgacattcctttgtcgtttgtgtgtggaggcttatgggtttcgctgactggatcaagagatatggagggatgaagttgggtttgtctcactgaggaactccaagaggaaatcccagatttgacgtgtctagggcacgaatctcgatgccatattcacacacattgcagaggggtttgtttagaacaaatttgtcaatggggacttaaggatttgagctcgggattaaggtgaacgtgctcatgttctaggtgaaggctgaaattcagcaatctgaatttcagattttccctagggagcttcaacttggatggccttttggggtttttaataaactattttggccaagcttttataataattattgtagcttagttagtg

SEQ ID NO: 131681 - DNA, 744 bp, Zea Mays
tagggaagtatcaactcataatgagttgatttgtaagtgctattacttccctttattgaagaatgacgttgctttctctgtgccgattgttttgcttcgtaatcagtaaatttctgccgtgatattcattgcccatgatgttctctatccgttatgtttgcagcataacttagagttcttgaatcattcctccgcccaccttatttgtgaagttgattctcttggaatagtaagtaaataacttgggcatcatatcgatgcttttagaggtagctgccgagtgacttgaagacgacgtcggagttttagagataactgccgagcgactgaagacgacgtcggcgtgttagaggtaactgtcaagcgacttgaagacgacgttggagttttagagataactgccgagcgactgaagacgacgtcggcgtgttagaggtaactgccgagcgactgaacacgacgtcggagttttagaggtaactgccgagcgactgaggacgacgtcagagttttagaggtaacgccgagaggctgaacacgacgtcggagttttagaggtaactgccgagcgactgaggacgacgtcagagttttagaggtaacgccgagtgacttgaagacgacgtcggagttttagaggtaacgccgagtgacttggagacgacgtcggcgtgttagaggtaactgccgagcgactgaaggtaacatcggtgttttagagataacggacgagttagaacgggc

SEQ ID NO: 131682 - DNA, 528 bp, Zea Mays
ggttgccattgataaatttacaaaatggatagagtacaatcccattgcctctttgacctcagccaaggtagtggaattcatacaagacataatattcaggtttgggataccaaatagcatcattaccaacctgggatccaacttcaccagctctgaattcttcgacttctgcgagcagcggagcatccagattaagtatgcatcagtagtgcacccaagagccaatggccaagtagaaagagccaatggaatgatactagaagcactcatgaagaaagtatttgacaagagtgaaaagcttgcatgaaaatggatcagagagctgccatatgtggtctggagcctgagaactcaacccagtcgagctctgcatggaagtaccctgttcttcatggtctatgggttagaggtagtgctgcccaccgacctaatatttggagcgctgaggttgactttcgaaagcatagccgaagcagaagctaccaggctagaagatatcgatgtgctggaggaagaacgattgaacat

SEQ ID NO: 131683 - DNA, 311 bp, Zea Mays
gaggggagcaattaaggcctcaatgtcctctgaggagggtcgcactctatggcccgggctaccatctcgaacaggaagattggagacaaagccagagaagggactatgcagaggcaggttccatgcagagtaagataagggaggaccagcattcgaaatcctgcccctcaatatcatgtcaagtcgccctagcaagtcctcattggggatttgcatgttagtgacccgggtagaatcgttgacgctagtgtacaagtaagctaggtagactatgtccattaaagtttgaatgttcttgaagacaaagtcag

SEQ ID NO: 131684 - DNA, 431 bp, Zea Mays
gcgacatgtgcagagatggtatcaagcctaaaggccacggatttgagtcacctaagatttatggaggggaagctttaagccacatgagcaccaagcatcaacacaaccatcgtccgatggccaatccactaacggaggggcccaacaacatcccttgttcccatgacgggcgaccacaagggggcaccgacactgtgccctcctcaggacccaacattgtggaaggagccaacatctttgtctataacgcgttcacctatgatccttaagttcgatgttgatcaaacatcgcaacaacaacttctcaatgttggtgtgctaacaccacacacgcagcaagagaaacagcgacagtgtcttggacgcctgcaaccctagagagagataacaacaacgactcatacgataacctctagcaaaccatccccttc

SEQ ID NO: 131685 - DNA, 331 bp, Zea Mays
cttcaagttactcggcagttatctctaaaactccgacatcgtgttcagtcgctcggcagttacctctaagacgccgacgttgtcttcaagttacccggcagttatctctaaaactctgacatcatctacaagtcgcttggcagctacttctaaaagcatcgatatgatgcccgagttattcacttactattccaaaggaatcaacttcacgaaaaaggcgggaagaggaatgattcaagaactttgagttatgaatatcaacgagcaatcatcatagagaaaccaacatcatttcttcattaaagggaagataacatacttacaaatcaac

SEQ ID NO: 131686 - DNA, 516 bp, Zea Mays
gcacgtaaagctcaccgtagcatccgtttgaccaattcgggcgtaagtgattgggaacacgggaccaacatcatggtttccgccatgcacgtgggcagaccattctcaaagtgttcaagccaaagtgaagctcgttcctaggtcgccttgggtaggttatgctccccctgtcgctcgactgagcattcgccgccggccagggccagtccgtgcggcgtcggtgatgaacggcgaacgcgtcgtggtcggggacttatttggagaagaaacgaagtttcagggacctcggtgtaagatgtcagtgactcttagaaaattctgtagaacgttttgcaaattagttaaaacctcgggggcgttttcgtaaagtctacaggtgcgcgcgcgtgggcagtttccttcgggcctgcactgtactgggccagtttaagcccaatgttgttgaaactttccctttttctttttctattcaactttagaaatctgtagaaaattgtagaaaaatgataaaaatgt

SEQ ID NO: 131687 - DNA, 634 bp, Zea Mays
atttcctcaacaatggtgctagagttgtgttcattgccccttggaatgtagctggcgccccagaaagaccaaatgccattaccaaaaactcaaactggtcgtggtgagtttgaagtgcagttttaaattcctcgtctgctctcaaacgaacttggtgatatcctgagagtaagtccaatgtagagaaccaactagctccagctaactcgtccatgagttgttcgaagacaggaatagggaatttgctcttaatagtgagggcattcaagtaacgataatcaccacagaattggaacgagccatactttttgcgaaccaacagaaccggggatgagaaagctgacaaactaggccgaatgatacctaatttcagcaacctaattctcaattccatctttgagaggagggtacctataagggcgtatattcactggcctagcacccggcaccaatggaatcacatgatcacaagctcttacaggtggcagaaaagtcggcttagaaaataccagagcaaaatcatctaacagcttggacacctcaggttgtaatgtttgttctgacgtgtctgtaagctgaaatgtgaagcaggatagtagctggctcctcctgactggtgccttgtaacaatacc

SEQ ID NO: 131688 - DNA, 822 bp, Zea Mays
cttggtttggctttttaagagaaaccctaggtgacactggggtgtcacagtcactattccgacagaggacacccacgaatccgtcatttacgttcctttactcatccacggccttgctcttccaatttcctctttcttccgcggtctccttgacttctatcacttgaatctgacccacctgaatcccaattccattctgcaagtttccgtttttgttcacttgtgcgaagctttccttggtattttgcctcacttcagtctatggaagtacttgtaccactgttggcctgggatggctggagggcagcaccagcttgtgggggtgaaagtttggagatgcgccgtgggaggaagaccgactacctcgacatcccactcaaggacagcatcaaaggatggcgcctggagtggtttatcgtggagaaccacgggaattccctccccccacggtcagggagataaccagatgttcgtactctgagctggaccgagtcccccatagacctggaggtggccgaggcaggggctctacttgatgaggttggattgttgaaagagaggggtctgactgcagaagctgtggtcgtcgatttcatttttaagaacattcagcctttgaaggacagagcatacatggcttatctgtatcgaggcctcgctgattcgacccgggttaccaacaggagaattcctgctgtggacttggtcagctggctcgagatgatactcaggggcaaggtgtcgaacatcggtgctcctgttgcataatcatcctggaatctgcctcctcccaaggtttttaccagttttgtgtcgaatcct

SEQ ID NO: 131689 - DNA, 707 bp, Zea Mays
aaggggtttgactgcagaagttgtggtcgctaactttgttttcaagaacattcagccgctaaaagacagagcatatctggcctatctgtaccgaggcctggctgattcaacctgggtaaccaacagaagaattcctgctgtggacttggtgagccggctcgaaatgatactcagaggcaaggtgtcaaacattggcgctcctgttgcgtactcagcctggaatctgcctccttccaaggcctttaccagttttgtgtcgaatcctcctgccggtgatagcggtttgggccttagagtgcgaccctctcccaaagaggttaatgctttggttgcctgactggaagaaattcctgacgatgagaggcaggttcattttgagatgcctttgaatcccactgatgcagagataagtgtcatgctggatatgttagctgaggattcttctgatgccgctcctgctgaaacactggtggtggcgcccatccctgaggccggcaaagctttggatgctcagaggtctgacagtgttcgcccgaagtgttttcgccgagccgatcagcccacttctcctgctgaggggcagaaaaagaagaagagatgtcttcgtcgagtgtctagcttggatcaagatgccggcccttctgttcctgctactgaggaagtgcttgtgcctgaatttgctgaagctgaccccaatgggtgtgacc

SEQ ID NO: 131690 - DNA, 386 bp, Zea Mays
atcgctgcctaggatgacataacgagcggccaacaacacacctgcatgttggtcgtaagcttcctaatttgcacagtggatatgtgcatggttaggtgataaaatcccccataaaaaggtgcatacgatgcatagcaaaaagataacctagacacacaagacaaatccacagaatatgtatgcgcatatgtcactataagcagcacatgataggaaagatctcaaacagaaccccccacaaccaaaatcaaccagtaacttctttgatggacgggccttttttattaagatggaagggcattatttggaggtactattgcttgcacttgcagttccctccaatttccattatgttccctcactccactatcatcttacacactgtg

SEQ ID NO: 131691 - DNA, 501 bp, Zea Mays
gagcaccatatatggcacctagggatggctagacggtgcagccatgtgaccaagacggtccacaggtgtagctcctacgattcgtgattagattacgatcgggcgagagtccttatctcacatgcgcttatccaactaatcatgcgagaatctattggaaagcgcctaggaacggacccaaaccttaacccctatatatatatgagggggtattgatcgattgaggcatcatccaatcaatcaaatcaatctattatcattacatttacatcattgccctatcagtagcagtaacttagcctagattattcttcttcatctgcaatcttcacctctctttggctcaatgttgtctagaggtgtcttggctggcctatcgactccaagacaaccctaggatctttcctccctaagggcatctccaagagctcccaaaaaataactcccaaaaacttgttttaagtagcatcccataatttatgagtagattttaacctattc

SEQ ID NO: 131692 - DNA, 368 bp, Zea Mays
gggaggccatgccacgaccacccacgacccaaaaggattaatctgcagggcaagatcggatttaacaatatcgcgtgctaccacaacaacacaacaggaggagagcactaggaactcttttcactcaaggacgaaggtcaccaacaaaacaataggtcaaagccttgctccgtccaggtgggcgtgtaacatgatcccctcctccttgggatataaaaggagaagggaactttcaaagaagggggcgatcacgatagcgcctgcttgtaactccacgaaacacttcacttccgacactagaggcccgagcctcgagctccccctcgaccaagctttgtattcccccttatacaaacattggtgcaggg

SEQ ID NO: 131693 - DNA, 497 bp, Zea Mays
cggacatgtgtcgggttggacattgtcttattcctttttgtcgcttgtcgttgtcgaatgtaaccagcaaagtccactgttggcttcagttggacgctataaataggggctcgctccgtgcttacccccaacagacttcagtcgttgctttgtgttttctaaaagcggtatttagttgggatggttttgttgcctccaacctctcggggtctcatcggctggtcatggatcacggtaagcgcctagcttcggagtgctcttactagggccggtctaagcaccgcacatcgtaggaaaggtgggtagtgaccaagcactcactcaactcccgcccctccatcgtatcggtgactaaccttcctcacagggcgatgggctcaagcgtcagaggagagatcatatcgctttcgttttctagctcgccgaacggggagtcgaaggttggcccttatggtggcgaacttgcatcgctggttccgtcggccggtgttatcgac

SEQ ID NO: 131694 - DNA, 568 bp, Zea Mays
gggttataatccaggatttcccggttgtcgtccgattctatttttgtggcccagattaaatcgacgaaaggggatccttggatcgaatcctgaccgtggatcagccgatcgagggctgcctacgttcaccccaacccaagccgtgttgtcaccggagggggcagcgcctgcgcttatatcacggcgacgccatggccaacatactaaattgctgataccctgcctaaaacttctaccgaacatcgtttcgcgtagaggagacgataatagataagtggaacgggctctcaccaaatttctagatgcggagtgcgcagcccacggagagacacgtttccgcggtgcactacgagctttagcgagcaatttgcggcacaacgatgactctcgtgcccgattgcctgctcgcgcattatccacactggatggagatccttcctgtcccttcccctatcaccaggcgacactgaatgtgagatgaacgcgcggtggcttcgatccctcacggtcaacagtaatagcatttggtgtggcgcaaaggcatttgacgtgatggcgagacgagttc

SEQ ID NO: 131695 - DNA, 322 bp, Zea Mays
ccgtcctcgctatgttccaccccagggtacaccagcttgtcctagaggagggcaggagtcttactaatgaccttctcagtatacaccgcaggtgactccgcagactccacatactcgtgaggctgcccccactagcatcccggtgagacctgctgtgcagagtacattcactacttgcttcaagtgtggtgaggttgggcactatgccaatgcttgtcaaaagaggatccccaacacacccgctcgaagcaatgtttagggcaagcaacagactccggcttccagcaagggtttcagcatagccagagtcaaccaagtcaat

SEQ ID NO: 131696 - DNA, 372 bp, Zea Mays
agggtgcagccggaccagcacaacaagtgcgaaaaaaaatcgaagtctatcgcgaagactatccgcgcagaagtcgcctatgggtgcagccggaccagcacaacaagtgcgaaaaaatcgaagtctatcgcgaagactgtccgcgcagaagacacctaagggtgcaaccggactagcacaacaaaggcagaaacgacaacatcaaaccgtccgtgccaagaccaactataatcacaccagcacagcacaacaaaacaacccagacaaagtacataacgccttcgcacacatatacaagcgagggcactcaacttcatcatacaagcctctacacatacaggcgagggcaccacactctacatcggctcaacc

SEQ ID NO: 131697 - DNA, 309 bp, Zea Mays
aaatatgatagaactgcctaatcaacaatccatgttgatctcttccgaaacggttaatcaggttagagcaaaactcctcccaactcatatgcctcaggtgatgctccacagactgtaaccaaaatattgccgatccttcaaaatgcatcacggccattctgatccacatctccctggcaaccagatagaactcaaaataggtctcacatcgagtcttccacagcttcggattactcccatcaaaaactggaaaatccatgttgggcaccaatgatcctgacccttgtgaccaccctccaggcgaatttc

SEQ ID NO: 131698 - DNA, 582 bp, Zea Mays
aaaccatttatttttccagccagtcggccactttgtatagtagctgaggactggtgccttcgtatccttgcgatatgcaaaattgtaacaaccaaaattttcgtgaagaccatctgccctggcctttgtctgatagtgcaactcatgcacgcggtagaaagcttcggcatccgggctcatcccttggcttcgaagggcccaaataaagacgctgagcctaacaatggcgttaggggtcagctgatgaagatatatttcaaatttctttaggtttcccctatcatctcgttcagaggaaatcgcagtcctgctctgaagaagctcttaaaaaccactacttcatccttcttcgacactggggtagtttcttctccagcaaatcgaacaagtttgctttcagcttctccaaaatagtccagtttaatcatcatgggcatgtcgtcttcggacacagtagatttctcaaaatctaaatgactgggctttgttgggatcaaaatactgtaatcttcactttcatcaacattttcttcttcagcaacagtctgctcagctttagcatcacgagcaccttcatcaata

SEQ ID NO: 131699 - DNA, 410 bp, Zea Mays
cgaacgagaagcgaaagcagctagaactgccgctgcaacagcttgctagaatatgatggagctatcatcacttgtcatgtcactatgcctggagtcttctgcactactcatcttggagttgcctacatttaacagaaatgcaatactcatctccaatttgattataaatcattcaaaacagaaatgcaatacttaacttgtatgttataaaactaaagtgcacaagcacataaataaaactgaactgcaatatgtccgcaaacatcaaagcgacccagagttattacaacacacacattcaaaactagactggaaaacttaacagtgtacgtcaaagcattattacaagaccacacagacaagctacttcaaaatatgattccattggaatctaatccaatggaggcgcc

SEQ ID NO: 131700 - DNA, 300 bp, Zea Mays
gtcgaacctggaaaccacacttgaggttattgacaatatactcctgaaaatggctgaagaagaagctactgtggctgcagtgaatacgacaactgaaaaggggaaagagcagattgatgaaatttcagaagaaggggattttacctttcaagatttgcttggacaagaattaacagacgccgaaaaagaggagctgaaaaaatatgcaatatcttgcggatataaatcaggggctatgctatttggtggggtcaacgaagggaaactaaggtgtctttggaaccgcaccgaggccaaaat

SEQ ID NO: 131701 - DNA, 470 bp, Zea Mays
gcggtgacggccctgcccacgcgttgaggcggctcggcggtaccccgcagactccggtgagcaattccccacacaccacgacctccttctctttcctgggggcacgagcgtcttcccaatgtctcggcgatgcactcaggaagcaaaccagggacgcagcgtgggcgaggtaaggattccgtcgccggcggccgcgaggggcaatctcccacactctctgtttcgctcccgactctatctctactacggtggcggtcgcgagagtaggaagacaagagggagaggcaagcccggtcctgctacctataagggcgcggacatgtccgggatgccacaacggactgcgcgaagtccgcgcgcccgccatgctcggacgtgcgttgacggagatggagctgacacaggggtcccacaaggcagcgtaacacgatcgcgagcacccacgaccactgacgacccgaccccgcatc

SEQ ID NO: 131702 - DNA, 404 bp, Zea Mays
ggtctccccgatgcgtggtgtcagaaggttccaagtgaaaggaaagctagcaccgcgattcatcggcccctatcccatcattggcagagtgggacccacagcgtaccgtcttgaattaccagaatccatgtctgatatccacaatgtgtttcatgtgtcccagctccgcaaatgcctgcaagtcccagaaagtcacatcaaagaagaggcaatccagatttagaaagatcttcagtaccgagaaaagccaataaagattcttgactcagcagtccggaagacccgcaacttagaagtgagactctgtaaagttcagtggagcagagaaggagaagaggaagctacctgggaaagtgaggactctttgaggagggaatacccttaccttttctcgagccccgtct

SEQ ID NO: 131703 - DNA, 302 bp, Zea Mays
cttttctatagactttaaccagtcgtcaacctgtagtgggtcggaggagttcgagaatgtaggtggcttgtgactcataaactcccagtgcttatccctgggcggagctggtggtggtggaggtggtagttgatgtcgttcctatcgttcttggcgcatttcttggcgttcttgctacatttcctatcatttttgacggatctgggcttgcatttctatcatcatgttagccatttgttgtagtaatcgcatttgagcagcagtcacgtcatcaacgggcgggggattcggaggaggattca

SEQ ID NO: 131704 - DNA, 375 bp, Zea Mays
ccgttgtcaccacgtcgtcctggctgtcgatgtcatgtgcgtagtctcccaaacctacgggacggagaaacgacaccctctcatcctctcacaagaaaccatatacgtataatatagtagcatgatttcaatgcttaacgctatatgcagtacgcaggtaggtcatcgagagtaaaccatacaattccatcaccatgtactcctacggtgaagacgattctggccttatgagaaggcgaggcccgacagcccaatacacatgagaggagctgttccgagagagacttccacgttcccagctgtcttgactcatacgagaggtcgagagagacttggatcgtctccacgcaccgacagccgacaggtcctgcacag

SEQ ID NO: 131705 - DNA, 723 bp, Zea Mays
cgcgggtcacgcgacactatgagcgcagtcttcttcgccatcgcgactggtgagtacccctgcgctgagttcaatagcttcctgtgatcgcgtagcaccctatagcgttgaggttagtgcgctaggtcgcgaaatccgggggaccggcgatggcgtccaccgcggctgggatggcgcgggtgcgctcggttttggaggaagacgatggtcacttagccgtttgatcaggcactaacggctgggatcggaacatatagccaattggttagatcaaatctgcaccatagatgtagatgcgcacgactctgattagatcaagtagaggtcgggttggggacgtgtgtgggtcgtcgattccttgatggacacccctgatatgttgtcgcgtgtcacttagcatggtcaatccaagcccttggatcatgatcgggcagatccgacagagtctcagtcacttaaaatcgttaccctcgagttggggatgctcgggtcgatctaagctggatgctcggttggggatccatcagccgagatcgctgcgtacctcttcgtgggtcaaaattgtagttgaacccctctgttttcatagaataaacccgccatccacacccgttgtgtgctgagtctaggatatcttccgcagagacccctgtgctactcaattattgatgcgcagtccagaaactggtgaattggttaaataattatggaaatggattttta

SEQ ID NO: 131706 - DNA, 494 bp, Zea Mays
cactaatctcgtgcgccagtgactcctttcttctccgaccgccaccacgccaaaccaaattcactggccattgcttagcgccgctataaattgacagcacggtctgctgtgttaggtcatcaccaagcctgagcacccgctcctgcctccgattagccaccacagctctccaatttcccatttcccccaattctgttttccgccaccgtggtagagccctcaccgtggtcagcgaattcgaggtctgttcgtgctccttgctctcttgtttcatcatccttaggttctcctgatgctcctcgaccaattcgattgagttaagctgccttagatcgcctagaacatgttgtgttgtctgttgtgcccgctgtgaccgtggacagagcgagttagagctccgctagtaaaattagttgaggggaaactctcgttagggcttgaatttggtctctgccgaagtagaacaccggtcatcgagtgatccggccggtata

SEQ ID NO: 131707 - DNA, 284 bp, Zea Mays
ggatgtcgctagcgacgctgtcgaggatttggaggatgactttagcgtggatgctgaggtggtggttaatcttgtcccattggaggaggctatcaatggttctcctctgcttccttagtcagggtgcaatcttaggccccttccttttgcggttgtagggctgtcatggtttgtttggctcttaacaagcattgtaatgactgaatgccccttatcgtttgtttaacttatgtcgtctggtagatattagcttttagtaactcttgagtctttgcacaagttcg

SEQ ID NO: 131708 - DNA, 454 bp, Zea Mays
ataatattgttcaacactcaatatatcaaagtattaaatatttgatacagtcaagtgactagttattttgcaaacatgcagatgttgacagagattacaaaaataatggacaaatataaggatagaggaaatgagcatcaccgtcgttgcccacaacctcggtcctcacgacactccctggtgcagcagccaggtagcggctcggcggccggtgcctcagcctctgcagttcgcacatggcgcacgttgatcgccggcacgcgcaccatggaccggtcgagtggccaatgcccgatggggaaggcgctcccgactccctccccgcatcggcgcagcaagcaccgcgcgacacgacacatccttcttcctccacgcacggcactccatcccggtgtcctggctgtgcaggctgactcgctcgtcgctccacgttctcggctcggtggctcttgca

SEQ ID NO: 131709 - DNA, 330 bp, Zea Mays
ctctttgtgagggtttacagtctgctcttgagtcctacagacacgacaatgcccgaatcaaagaagaaaacacataccttcggtcggtcttgagttggatgtctagtagtgagccccagttaggcatgatgttcagtcagttcaagaggggaactggaggcccgaggttaggctttgcggttaaggatgggactactgcttgctttggcaaggtttgtgagtgtagtggattgaaaccatcagagaaaccttcagccactcccaagctcctcaaaatcaccccacctaagcctaccacccatgtgagagatggtgtgattgaggagcttg

SEQ ID NO: 131710 - DNA, 578 bp, Zea Mays
tggtcggccatcatctcaattccaattcgcaccttgcgttgataggaatagtgcaccgttgggcgtgctcacctcgcaccggtgaccatgccgccgcggtacccgggcgccacctctgcgcaagtccgggggttggggatggagggtgcgtcgtcggattgcgagtgagcgatggagttaggcctctgcggcgtcgggtgcgtcattcaccggcgagtgccgccgtgtggatgaacaggggagctgtccgccgctttggaacaatagcgcggggagagagaagtgtgaggtccgccgccgcgcggtgagctctgctcgcctccatgctccgtcgttgggggattgtgcgtgcgccgtccgattgcaatggatggcgtggattaaggacaacgtacgccatcggatcgtgatcgcacgcgttggaatgatcgcggcacatcaaaatctggggcgctgatcgaccatcgtgcggctcagacgagatcggggcttcttgtgatctcggccctagaatttagatccaaccgcggggactgcgtaccggttcggggtgcactgatctaatctgcaccgtccgg

SEQ ID NO: 131711 - DNA, 393 bp, Zea Mays
aacgggcatcggactagcagcggtaagggcgttggaccatacgatctcattgtacacacaaaagtgcgtatcgaactcacagtggagacattgaaggactaaacaattatactatttacgctcagaccatcgaagatggagtccgactgtcactataaaggttcttgagaggagaaaggagcatcaggtgatctgacggtaaacgtcagactatacgccatagaggttggccaacggttgggaatgactagtatcagcatagtaggtcagatcttggcacatagtctaacgggtgcttattggatcatttgagtatgcaaagatgactattgatgttgcaatgactatatctcttattacaggctataaatagaacctcaactgacaattgag

SEQ ID NO: 131712 - DNA, 383 bp, Zea Mays
gtttctttggtgcggcccaagtagctaccaggaggtcgcacgcttcttaccctgacccagcttggctttagggtcagtctcccttgctttctctgcccagcaagccctcgccctctagctcttcctgctagcgccgtctccgtcccgtgatctcctgttcatcgtcgatctcagccatctcaggagcacccgctcactcccagacgcccgcacaaatgaatcccccacgatctccctccaaactgcccactccctccacgatctccccctctagctcatgatctctccgcccgcccccaccccccgcctgccacgcccacgggcgcaacaagccaacaacccacactcggccccgctaccccgatccgtcgccataaatccgc

SEQ ID NO: 131713 - DNA, 518 bp, Zea Mays
cttcacatcccttctctttgccattgtcgcagccccagggtctcctttgcgtggtgcctccaacgttatctaggaaattcaaatttctatcctgggaccaatggcatacttcaattgcacgtcacgtcaatcgtcgcctctctgcctccccatggcgcacgcggagaacaactcgtttgcttaaccgaattttctgcatcatcctatatgcccatatccttgaccttccctgcgtccactcacctccatcgctcggtgcttcctatcgtgaccccgtccgctgccgcatatgcagggttgtgggtcactgacccccttccaccgtcgcttccccaccgcccatgctcgctccactcttctccctgttcatgtcgtccccttcttctggctcacgtcttttcccgatccctcctcgcccatacccacctccttccccggaccatgatgccctagttcccccacacccactactcccctagactcagaggaagcctccacgttccacatctgcatcatca

SEQ ID NO: 131714 - DNA, 491 bp, Zea Mays
gaaaaaggccgtgaacaaaagcacgtacgccttcagggacgccatctaattctatatatatccctgtgtattaattagctagagtttctgaagcggctgcctgaaagagtgagagatgtgtatcgcagtcgcagcttctcaactctgatccttgaatagctactagtgaagaatgtgctctctgatgctagcttgtggcgatgcagatgaatcggtggctacacgtatttatagtggatgctggaaaagagtggccatcgagctgcatgccttgtttgatcaggacttttgaggagaatttgaaactatgactcggtcaatccgtttgtctggctcggcaggattgacttgacacttgaaacatctcgtctggatcatcgtcatatatgctatctcagccgttcattttttaccccccgtccctggctcctcatctgcgtcagtccagttcatatcataccgtgtgatttctctttggatgccaagtcatg

SEQ ID NO: 131715 - DNA, 729 bp, Zea Mays
ggaataaggccacagattagacctctttcttgagctttttgaataatataggccaggccatctgcaacaaggtaaaacaaaaggggcaaaacaggatcaccctgtctaacacctttatgtgtagcaaaatagggaccaatcaaatcattagttttgatggccactttaccacctctgacagtcttcataacccaatcacaccaaatatcaccgaaacccttttttccatcatacaatgaagaaattgccaattaactttatcataagctttttcaaagtcaattttaagaatcaccccattttgctttttttcctcacttcatgaagaatttcattcagagaaaccacaccattcataatgtacctccctttaataaatctatactggtactcactaatcactttagtgatgcatgaagcaagtctattagtcagaactttagtaataatcttatagcagacattcaggagacatatcggtctaaaattcctcatatcaatagggttatctactttaggtaatagagtcactaaaccaaagttaagccttttaatgtcaagcaccccatcataaaaatccttgaataaattccacaaatcaatgtgaatgagatcccaaattcttgaaaaaattcagctggaaaaccatcagggccaggagcactattgtgttttaaaccaaacacaaccttcttaatttcctcaatagaaaaaggaacagtgagcaaa

SEQ ID NO: 131716 - DNA, 988 bp, Zea Mays
agctctccctacttgaaaaatgggatccccatgaagcaattccagcacaaggtattagtgtgtgtgtgtgtcaacttttgtttctagctagctagttccttaatgacaacaattggcagccttttgtactatattctcgatcggcgcatatgctcatatcatttttctcctcaactagggctctgaggattccaaagataacggcgacacgaagcaagacctgcggagccggggcctgtgccttgtcccagtggcgagcacatacacggtggcggccgagacaccggagttctggcaccctacatttggaggcacattccggtagacaaacaaacaacctcatgcaaagagtgttctgaagctaaagcaaagcaacaacctggctcatctgttcttatcaaactaagttttgtacacagatggtgatgatcgtccagttttagtagcaagctaagtagcctgctgagacggaaagcaagaaatcatgatgccgcccaaagcaatcgaaggatgttttgcaagggaaaagacgtacgatgatggatatgataataggtttccggtggtctcttctaagacatgcatacatgctggatcaggtgcagaagagagaatgattaattgaggccgtgtgtatgtgtggcacctatactcatatatatgcatgcatgcaactttgcaagcaaataattagtgacagctatatataattagcactgtgtagtatgcataggttggcgttggaaggggaaagggtgggggcaggtgccaaaattatttcgaaggaaaagcaggagggtattggtgcagatagatggcaacagtcatggcagcatggcaatgattctttatctcattataagctcctattactggaagtatgcgctcaaatttaaaaggataggtggcaaatcaataagtacacttaatttgtctagttttgttaaagatgatagatttctgagtttcaattggttttgccattcag

SEQ ID NO: 131717 - DNA, 363 bp, Zea Mays
gtttgtcgccatggactcatgcaatgcgacaaccacgaccatcggtgcgcgggcgagatcgtcccatggcatgtaccggtggtgggtgcggtgtgcatttgggcgaagggtggctcggcgtagaggaattcgtcatcggactcgaggaaggatgcagagccgccacacacccaaggcagggcataatgtctacgttttccggtgagtgtctactcaataagtttggtgttgtttggactttgattagcatcgatcgggtgagagtatgctctctggcgtgcagatgggtgttagccggccatggctgccaccgcgttgggcagaggcgtcgtcgtgtttttgccatcggtggtagagggaatg

SEQ ID NO: 131718 - DNA, 856 bp, Zea Mays
tcggcgacccgctggcgagggtccgccacgcgccggagcacgtcatgctggtaagtggcggcctaactaatctacgcgcagcaagctaccaccgaatgaattaacaagcgcataattagtagtgataaacaaaagaagctcgatcgatttgtttgttcggtacaccaatccgatcgttctggtatgtaatactgttcgaagttcaaacactgagggacagatcaatttgttagtgataattgatgtgcacgaatgaaagatgcgttcgacagcgacaattttatcagattattctgtatgtacgttggctgatgacgaagttgcaacgcccaggttgccgagtacggcgaggaggcggagatggtcgggctcatcaaggcctgcgttagggtggtgggcagaggcggcggcaagaaacagaaacgttcttcctccccgaacccgaagcaggagcaggagcagcagccgtcgccgccggcgtacgtaaaggtggcctgcctcctcggcctcagggtctctccgtctcacaggtacttcaccgcttctttccttttcttcgattctcaccacatgcgggggatgcatgcacacaacacaatgcgtccgtatctctgcttggcaccaacgtactttctctgcttgcctaatcgcccgccccgcggagtgggccgtccgagggaggggggccccaccgttatggctggttggccggagtccactgcaggcgccgcgcacggtccccgaggcgccgccgctcgcgcgcgtggttttgaacggccgcgtgctcaccttaattgcgctttccttgcaggcggctggggatcgcgacggcgctggtggagcgcgcggaggagtg

SEQ ID NO: 131719 - DNA, 363 bp, Zea Mays
gtgaaagccgaggggctcttttgcacattgccgggtccgaaggggtacacagccatcctagccacccgatctaacctaaacggtccagattagattttaaactcatgtgaaccagtattcatccaccaccgttggatcatggatcaacagtccgggatgacccatgcccatatgtaatcttctcctctcgtctccgatccaacggaccaaatcagaacgtgaagcaggggggtatggaccttttaatcctggcgcaaacaacgagatctacggtacacatgccacccaccaaattttatcctttatactcgatctccaccgtcgatccaaggaccgatgaccaccactcttctccctcaaccc

SEQ ID NO: 131720 - DNA, 328 bp, Zea Mays
agattggcacgaaggttacagtcttgggggcataaggcggttggaaatgtcaattctcagctggggctggctcgcgaggtgctgcacaggttggaggtggcgcaggacagcaggctgctgtctactgaagaagtatggctgctgcagaaattgaagcagcactgccttgtccttgcttctttggaaaggacagttgctcgtttgcgttcccggttgcattacttgagagaaggagatgccaacacaaaattttttcatttacaggctcgcctccgcaaaaagaggaattttatttcctatttggagtgtgagggaagaactgtcgcca

SEQ ID NO: 131721 - DNA, 667 bp, Zea Mays
atatctattttttcatgagatatatacccccttagttgattgattctctctttgttccccatacctctaatgttccagctaagaaacctcatttatgatttttgaaggttttgacggtctccctttcctcttacctttttgggttacaggtaccacaggtccatcctgggccccctcccattcacaattcctatcagagtttgtaattgcctccatggcatattcctgaatctcctcttccgtctgaggagcattcctattgttaatcttttctacgtgtgctttatagttggcttctgcaatagctgccctcaacttctcctcctctttaaaagcatctatttgatcatcatagttatctaactctatactgatgtctttcaaaaccgaggctaaagtttcattatgctcctgattcaaaatagtaaatgtgttagaggatgagataccttgagtgatgtctttctctagagctctcatcgtggctttctccaagattggaattccatccctaggaatcctcgagctggctctggtagctcccatagggcctttcgttgtcgttttcttcctacctcttttgttgacaaccacatcccacttacttccttcctcttcatcagcaggtatttcaccgccacaatctaccatacggatttgttgttcc

SEQ ID NO: 131722 - DNA, 687 bp, Zea Mays
tctccgatcaatggtcgtggtgttcccaagtcgaaacagtatctctgatatgacctcgattgttgcttactgatcaatggcacccatgcgactctcctctcccccatcaccggagactctttgaccggcaccccaaagtacaaaaccaaaatattctacaagctacccaacgcagtgagcaggcgaactagatgggggagatccttaccagtatccgtgcggtggcgagggctggtcacggtgcagtggcccggcggcgaactcccacactctctcacacaggtaatggcgaggcttaaactcctgggcatggtagggatctagggggtcacggatcccgtgttttaaagggccagggatgcgaggtcagggtggttgcgacagttgagaaaaaaacccgagcgaaggtcggcctcaatggaggattttttttttgttgaggcgagaggataacgaagagcggtttgttgccagctcgttgcatgcgcatggttgaaaggtggaggaaacgtccgtcgaacgagcccgacatacagtgacacgtgcaactattggatgaagtcatcattgacatcatgttgacatcagcgaataaaaaatcaatttccatcacagcaaggctttacacttgctgtgcgatgggaaaagagagttctggccgctggcacccacgtcggctaggaaaat

SEQ ID NO: 131723 - DNA, 292 bp, Zea Mays
atgagaacaaaatttgatcaacatattgttgatcagccgccgccctgccctagttttctcctctcctgctgtcttccccctggctgtgagaaccacgacctcctctcatcgccaaccgctcaaggagcggccacctgccacacacagctacaacctaaggagaagagggcataccaatctggtatcggagatgccgggcaacgatgacaacactgccagcgaagtcgcatctgctgcggcgccaaacaccaccagcgcagccctggagcagaagctggacaccatgacgaag

SEQ ID NO: 131724 - DNA, 428 bp, Zea Mays
ggaaaaaggtggattagggtttcaaacctagattaggatttttgggatgctacaatctcctcatctctgcgaaggggatgcacgggagagagtaaactcaaaagacaggacgaacccctagatggatctctacattgaacatagactcagggcctcgccacacacacgtgcgatggacgggtaaaagtcgcacaaaaagtgccccctatccaaaaaaactagagcaaacagggaccaggaggatccgaaacccacacacatcaaacaaaccaaataaagccatgataatgagatgtctgaaccaaagagaaaaaacaggaccgagtaaaccggttacggtagaccatggattatttcctacatagatacctccccaaacacaacattcgtagcaacatcaaaatcatccgtcaaacgatccatgtctt

SEQ ID NO: 131725 - DNA, 381 bp, Zea Mays
tgcaaccaacgcccaatttgcctgtctgcctaagagcgacgcccaatagaagcccatccctcctccatcgtctgctcgcacgactccgcccagttcgttgtggttctcggcgccggaactgctttggtgctcccacggaagcacgccgcccctctccatcctcccgcctcccctagtgcttaagttcttagtttctctgtgcgtacagatgtttctgtgaagctacttgcagtttgtgtgtagtaagaacaagcaatttgtgtatacagctgtttctgagatgtaaacaaccaagatgttgtttctgtgaatcacaagcagtttgtgtgaattaagaacaagcagtctgtgtatctgcaataagaagaactagtttctgtg

SEQ ID NO: 131726 - DNA, 852 bp, Zea Mays
acctcaaggtttttcagcattgaaaacttgtgttggttggctagatgactttttttgttttgtacttcctgcataccaaaatgatcagaagtctgatccataaaccatttgcaataaagtcaatcaatatttttcagaaggataaaattaacttccatcaccaaatttaggtgttacaatttgaaggctttcccccaccttctctatatgccttgtggtttggttgtgggaaaacttatctatattaacaatgtacactttgaaggctatctgatcgccacagcaggatccaaataatctcagaatattaggtaagaaacattaggccagttcttggttagtaaggccgtgtttggtttcatacggattatagaatctggagtttgcgcttgatttccaaaaatcagtaccaatcaggaagtacagaagtagtagtttaatcaaggcacgcttgatttccaaatgttcttgtttaatcaaggcgcacttgattaccaatcagcaagtacagaagtattaccaatcagcaagattgaccggttgtgtgatttggttagtaaggagcacttcatttccaaaaatcagtaccaatcagcaagtagatactgaatattctgagtcggtttggtttccttttctactgaatgttcttgtttctatactgaatgttcttgtttccatttctactgatactaaatcgcttatcattgcagcacataagtagtagtttaatgtatttgctctgattccatatgattgaaattgttaaaatcacagaaatgttgtttttttgatgataaatctatgatgttgtccttgcctacaaatctaaatattttggtacattaggga

SEQ ID NO: 131727 - DNA, 336 bp, Zea Mays
ctcagtcggatagtgtgagcattaaggattgtcccatctcgtataaggaccagtttgtcataactccttacctaaactcttatcaagtacaaccactcgcggctgtttgggcaatcgcttgatccgaacttgcatggtctgtactctagggttatcggtggttggggagcacaggaaggacaaggagggggaataattccgtcctggtttgggcgaggaggtgacctttttccttttggtataaccgttaaggtaaagtcatgcaagggagaagaaagtttcggtattcggatctcacgacggtgagattgcagaaaccggactagtgggtaaagt

SEQ ID NO: 131728 - DNA, 672 bp, Zea Mays
tgctgactgaagcagcgtaggtagatagtggcgtcagagactcataggctgatagagtcctgaaacctctatctcctgcatccatcaccctgatatgcacgcgagtgatgtagtagaaagcccgaggaggcccagacactcaccttgtgtcatatagaggtcggacgtaggttcctagcgcatgtagtacatcataaagcaggtttgggaagtgtcccgtctcgaacattgaggtgtaatgctcagtgacaggccatatcccaacaaatttgtactcctgcgcgttgttggcttcttcattgattatttcctctccttcttcttcttcatcatcttctccaccatcaccagaatcatccagatcgtcgcctccaagagcaggggattgggcttctagtgttggcagtgctgaagatcaagctccagctgcaaaggcttgtgactctgacaacggggtgggcgttgccaaaatctcctctgagctgtcctctagaataactccattctccacatgaaggtggtgaatatccatagggacttcctctactaccactgggtagacaggagcctgctgtggcggagggatatagttggtgttcacacgggtggtctggattgcacgcatcatctacaagaaaaagtgtaatcttagttaaattttaaagaggcaag

SEQ ID NO: 131729 - DNA, 790 bp, Zea Mays
actttgttgccaggactgttttgtagtcttagtgctttgttgtaatcagattcatcttgtccttatattatagccgttagcaaagtaattcaaataaaattttgcagtttgtttgcaatctgtaaacagttttaacatcatttttttgctctaaatatgttctctcattagttcaaaggtcaatgtgcactgaatatgttttaccttaattcaaggagattatgttcttctttatttttgggaaaacaaagattatctcagatttgaccttcatccgttttccatgcttctatatacaattgtgctttggaaaaatttgggagcccttaaaaccaaactaacccacttcggccaatgtttttttttcttattttagtttttaggtgaaatgaacaagcttgtatgctttaaccatgctatttcattgatgttggctaaccactccataaagtcagcttaatgtcctttgcgtccaaactgaaaaatgtttgcttgctaattggtgccttggcgctagctagaaaagtgggggatgcctgtgatatacattgctcaatttgatgatcctgtttcaaaattcttaaaccattatgtatatcaacttccatttagcattgatgctaccctctcttggtagtatatgaatactagcaggataaatgaactggaattttgcagacaatgttttcctttttttggtttgttttaagacgaggtgaacacacatgtatgtatgttgtaaccatgcgacaagtttctaacaaaacatatcattaatgtagtctaactg

SEQ ID NO: 131730 - DNA, 814 bp, Zea Mays
cgggttaccaacaaaagaattccctctgtagacttggtgaaccgacttgagatgatccttagaggcaaggtatcaaacgttggtgctccagtggcatactcggcctggaacctgcctccttccaaagctttcactcattttgtttcgaatccacctgttgctgatggcagtttgggccttagagtgcgaccctctgctgaagaagttaacgccttggttgcctcgctcgggaaaattcctaatgatgaacggcaagttcactttgaggtacctttggatcctagtgacgcagaaataagtgctatgcttgatttgctggctgaggactcttctgatgctgctcctgctgggacattggtggtagcgcctcccctagaaactgatacaaccttggatgttcagaggcctgtcagcgttcgcccaagacgcccttcccgagccaatcaacttgatcctcctgctgacgagcagaaaaggaaaaagagacgtctccggcgagtatctagtttggatcgggatgttggtccttcggttcctgctgctgaagaagtgtctgttcctgaatttactgacgctgaactcaatgggggtgctccacctgctgctgatcccaatgggagtgctccttctgctgctgaccccaatgggggtgctccttctgctactgaccccaatgggtgtgttatctgtgttgctgatgaaaacgacggggaggaagaagatgaggtccctttggctcggaagaacagtcggcggtatgtcgctagcggggaaagtagtggagttccttctcctgctctgtctgccctcattg

SEQ ID NO: 131731 - DNA, 504 bp, Zea Mays
caactttccgctcaggtagcatacctggtaaatctttcgagaacatatccggaaactctgacacaaccttgatagtctcgagtgaatctgcctccttgctatcaatagccatctgatgacaacctcctttccttggctcgggtgagactaactaagtcaccacttcttctccctgtggggacaccaacttaattgtcctcttatcacagctgataattgcttgatacttatctagccaattcatccctaggatgacatctattccctgagtacccattactatgaggttagcgggaaactctatcccccttatttccatgcttatattcaagcaaacactatcacctcgaactttaccatcggctgaatcaatttgaatgggtgttgacatggtagttaatggaagattatgcgcttctacccatgatgcaataataaatgaatgtgttgctccagtatcaaatagtacttctgcaatatgggaatcgactggaaacataccta

SEQ ID NO: 131732 - DNA, 423 bp, Zea Mays
gctgatattagtttctagcttcgggaagccgacactctttgataaagtgtcgagtatcttcaccccggcgcagtcacggatacatcccaagatctcctcatcaactccgacgaagaccaaagctcccggttgatatccgcatgacatggcaaattcttttagctcaaatttttcttcttccgaaagctcctgaccgcccaggtgccgaaggttgatatcttcttcgctcgaaggaccagaatcaattcccctttctttatctggcaccgtggccatgtcctcctctgtagtaacatctttaactacatctgatataatcctgtcaatatccaacattgtagcttcggcttcaccggcgtccttggcttcggtagcagcaactgctttagcttcggtacccgtagcagtcacggtcttagctgc

SEQ ID NO: 131733 - DNA, 457 bp, Zea Mays
cggtcgggtgaggaagaacggtagaggaccgttagatcaaaaggggtggtcgagatcaaagggtaggtaacgtttcgaccaattacatggtggccgttggatcgtgatctgaaggatggcagtgaataccggttcgggtagcgctggatctaatcctggccactggatttggatctgatggccgaggcggcgccatacccattcggctggctagttttgcgtctaggtccttacattatgttagaatcaacccgcagttcattcctgggccgtctgtgtcttaggaactcttccttattaacccctgctcttttaagaatttgaagaccagtccagagttcataagaaagggataaataaaaatctaaaaatgattttaatgagaaaaagaattgctagaacttataaaattcatagaaaattcatctctagtccaaatcactccattccagttgct

SEQ ID NO: 131734 - DNA, 440 bp, Zea Mays
gcacagtggtcctacaaccacaacgagtggtcactctacataggcgcctagataagcgttgtaggccagaagcatgttacataacatcatattttgaacaattgaaaaataactcgggtcaggagcttacgtccaagaagctacgcgtgctgctgtcacccaaagtcgtactaaagcggtctatgtcttgtaccgagcatcttagtgtgtttccctacaccacaattttatcaattttcgattacatacaagtacagttttgtgcatttcaaattgagtaacaagtttgaactagtaccactcggttaaagatgggtgctgcctccacttgggtccccactctagtggactagtcgtacaccatgtcttcgtcttcgaaagaatcaatgtcgacatagtcatcctgtgtccactgttggcatagcttacagcgagtcaca

SEQ ID NO: 131735 - DNA, 640 bp, Zea Mays
ggtcaataaagcttatgctctggtgacttttgaattccatttgtttatttgaactccggttgctattttgttgcttgtgacgatgaaacgcgtcataatatttgccaaaaagaagggaacatgttcaggtgtgatttttaggccgaggaaaaggttttcatgctatcttgatttgctttggcggactagatctagtgcaacctgactgcaccagtttagactgagacgttgtcagatgtttcaactgcaaccatacgtctgtgcaggtttagctaacgctttggggaccatttgtgccatacgtagcttgccaaatgccatgatggaagtgggctctactggaccaatttttgtacgtgtctcatgtctaatatagatctgtctgtaatcaatgctaatgtatttgtaatatagatctagtgtttgtggttgatactccaaacatggtgaaagtagtggaaggctttccttgcaaaatatagagtaactagagacattagatctgatatggacggtaatgatttaatatgtacaccatccatcacaaaatggttgccgtacctgctgtctaccttagcagaaaaggtagtagataagagatgagtcatgaaccatgatagctacagcgtgtggtctcccg

SEQ ID NO: 131736 - DNA, 311 bp, Zea Mays
gtcgctcatgcgttcttgaggtcgaacgatatggaggtatagcagaaagctccaaacggggtgatgaatgtagttttctcctcatcctcttttgccaagctgatctgatggtatccagaatagcagtctaggaaggacaacatagaacatctagtgatcaaatcaaccaccttatctattctagggagcccgaagggatccttcggacagagtttgttgagatcagtatagtcgacacacatgcgccaatccactttattctttttgagtacaagaacaggatttgctaaccactcgggatgcagcacttc

SEQ ID NO: 131737 - DNA, 327 bp, Zea Mays
ctccaatttcaagggagaagtctcaagatttggaccccaatatgcgaggtaggtttgatgattttacaggaattcttcttgcatttgattcatgcttattaagaggtctattttttgcacttttgcagacaaagttatctattcatctccaaattttgatcccaaagttttccttttgtgggtccacaaagacacgagcgctgctgacttagaggctggtgctctcaccttgaaaactgatctcaaagggagaacacaacagaaaaaactattagtcaaggagaacttcgattgttttgtctcgtgcaaaactacaatagatggtat

SEQ ID NO: 131738 - DNA, 324 bp, Zea Mays
ctaagaatatcccctaataaaatatatctagtttaataaatctgtcttatcttgaaagattctttcttatcttaatagactcatcttatcttgaaaagattctatcttagcctaatagatctaactaatcttaaaagattttatcttattcttagagactcatcttatcttaatgagcatatctatccccacctaacatcaaacaagtttttgaccaacatcatgtagtctatctcacctatatctatcttaaccatattcccccaacttcgatgatatacactgaccccgactcaatgagaccaagatcggaaaaggacagga

SEQ ID NO: 131739 - DNA, 563 bp, Zea Mays
cgatctatgagacgagaaaagagttagtcacgcggatagaaaaaaatccatatcttcataactgatggtagacgaatcttttttttaaaaaaaaattggaggtaaatatagtgaagagttgctttcagttttatactagaataaaaagcagttttcagcccaaagcagtgttgttcgcttacctttttggttgattttttacttttgcaaacacaaaagcaagttcaaagatccaactaaaaaatcatagggtacacttttgacttttgcaaacacaaaagcaagtttaaagatccaactaaaaaatcatagggtacagcgtgagcacgtcacgtagagtttacacccgggcaggacgacaatacatggatgacgaggagaataatatgtcacggcgaaaatttcagttcctgaaccttctcaccaccagcacagcaagatccgggaaggtcaagccaacagtccaaccgtgattgtagagccgctagttgaaacaaggttagggaacgcaaattttagcttttgcaaagccacttcgatgcgatatcatgagtcgtaaaaac

SEQ ID NO: 131740 - DNA, 769 bp, Zea Mays
tagggcgtggggctgtggcacccctccctcgacccggtataaggctcgtgtgtgcaccctaccctcccgactatccacgtgtgagaatcgctgagaccaatcctcgtaccgtcgcgggcggagaggggaaacgggagtccgccgccgccgtcgaaccacgacatcatagccgctctactccagtaacctggtcccgggtgtttggacgagtgcgtgagtcacgctcgggggaagaagccgggtgcacgaggtttcggggagacgggaatttctcaccgaagtaggagctccgcagtgggctcgcgccaccacgtggacgggagggtctccactccgaaccaaggtatgcggagtaaccgtctttccgctctttccgctcttctttaggcgtcgcgtagagtgtttctgattaaggtttagagccctgttgcgcagaattggagaaagtacggcgatgggctgccgtacttcgggcggcgccgccgcggttcgccgagaggaggaagaagccctcgtgcccttggatcttctttagatggcccggaacctttagatcgcgatcggacggatccaaccgggcgtactcgtttaaaatctccaccatcgatgggaggtccatcggccagcgtggcgtaccgtttcttggataatagagtttaatctggaacgctgaatgggaatcgtatggatctgaacgcacggtaccccttcggccgaatgaacttacataaaaaaccctggctttaactataatcaacccgcggtccag

SEQ ID NO: 131741 - DNA, 486 bp, Zea Mays
gaaacatcgctagatgcatcgacaatgaatgggaatatacagtctcaaccattatatggtaagctagtgaactgatacccaagtcaattgttgtctccaaaacacctaatagacgtagcagcgcctctaggcattaccagatcgttcgagtacaatctcggacagtccgaccatatactggactgtctggtagcctattacggatcatttgacaccccatcggaccatccagtgacccatagtggatcgtccggtgtccaatacatagaatggcatcatgttgacaaaatccaaccttactctacaccaaagcaacactatgctcccccgcctcaagcccatcaaagcaaaaagcattccaacacctaggacagagtaccacccgacgcacagggaagtagaagggttcccaccaccatccaccatagactacccacatatagatagctgatataacaatgcccaaccattcgagtttcacgtttc

SEQ ID NO: 131742 - DNA, 1298 bp, Zea Mays
taggaaatgaagacaatagaattcaaccccttatgcaacgagtggcagcaggcctcacaagatcaaccccaccagttttctctcatgtacttcacttgatgcatcaacggactctaaaaagtaagtgccctccgggctgttcactaagaagttaataagatggcgtcccctcctatcagaccatccatcagacatgagtgtgcaaccatagtgtttccatgcatgctcatgttcctccctcattgtatttgttgacttcacagcctcttgtagcaatggctcgcctagttggtaaggtgttggaggcttataccctgaaccaaactgtgttgtggcctcaattgcaatctgaaactgcctaggtgctgcagcattgaaaggtacaccgcactcatagaagaacaaagcccactgcatgtccacatagtgtttgtcctcattactttttgcactagccaagattgtgggctgataagagcctggaagtctctcatccaccacctcctctggtgttctccgcaacatctcaactacggacttggctgactttggttgtgctttactacttgccgtaaattgcaaggttgattgtcttttttggcagctgtaccagaactaggctgcaccttggatgcttgaaactccacagcagatgtatcattcgccccatctgctgctgccacagccaccacttcatcatcttcttcatcttcatctagaaacattggtctttttctcttgtttgcctccaaataacttgtcatctccttccttaatccactgctagccttgggacataactttgcatctccatacacccctgccaaatgttgctttaacctctttatccctccactaacaacctggccacatagggtgcattccaccttatctttattttgaagatctggccaaaatccatacttccaccctggatcagtagacttccgtggcttccgggtaggatcgctcttcgggtcgtactcaccagccacagaagatggagcttcatttggagaagacattatgttgtcgctactcgctgcagtcttgagttctacttcttgacagttcacacttgacaaaaacctgaaagtctaaaaccagggaaagcaagggaggaggaacatcgttcttgagtcttgacacctgagagaaagcaggggaggaggaagcaggggaggacctatcagtctaccagggagggggagcagccgaccagccgcgtgcccagcgagcagcagccgcgtgcagggcgcgcgcagggaggaacagccgcgcgcgcaaggggagagaac

SEQ ID NO: 131743 - DNA, 454 bp, Zea Mays
agctcaatggttcgtgtagggcacaacgtgacacatatgattatgtaggatcaggccacttgagcgtgtaataccctacgtcctatgagtttatgtggatgtattgctcggtgttcttggttacagagagttctcaagcgagaagatgactagaggtgtctacgcctgcccgtgtggactgatatttgtaggggatcctcctccgccttattcctgacgaaagagcagttacatgccacgcccgcagtgaacattcccagtccactcttctctaacagagtagtaccgacatgcgtggaggtcaacgagtcttcagggagctcgcacgtcctttgcatgcccttaacatggctctagaatcttcacgcccacacaaacacctgcttctggtttcaccttactgatgtcccctgaaggcccatgtctctgtcccatagggggcctctctggcggc

SEQ ID NO: 131744 - DNA, 346 bp, Zea Mays
gattagtatatgctgaagcaattagcaactatttaatccgaaagtgaacgcctgtgttggatgcttttaccatgatcttctggggtagaaaaggaagataccagtccaaaggaaaagggacagtgaagaagaggacactcacttgtgatcaaacaagtccttgaccgcgacgacctcgccgccggcaaggatgccgcggtacacggtgccgtagcctccctccccgaccacgttctctgggcagaacccgcccgtggcgacgtccagctccgtgaggtcgtaccacctcccccaccccatctccatctccatgtccacgcccgccgcggccctgaccgcttccgcc

SEQ ID NO: 131745 - DNA, 570 bp, Zea Mays
tagcggtttgggtcttagagtgcgaccttctcccgaagaggttgaggctttggttgcttcacttggcgaaatccccgacgacgagaaacaggttcatttcgaggtgcctttgaatccgagtgacgcagaaataagtgccatgctagacatgttggctgaagattcctctgatgcagcccctgctaaaacactggttgtagcacccatccccgagtctggcaaagctttggatactcagaggtctgatagtattcgcccgaagcgtcctcgccgaaccaatcctccaacttctcctgctgaggggaagaaaaagaaaaagaaaaagagacgtcttcgtcgggtgtcatgcttgaatcaggatgccagcccttctgctcctgttgctgaggcagtgtcatttccggtttttgctgaagctgatcccaatgggtgtgacccgactaatgctgaacccaatgggtgtgaccttgattatgttgaacccaatgggtgtaatccggccaaagttgaacccaatgggtgtaccgtccgcattattgatgaagatgaggaagaggaggaggaaattcc

SEQ ID NO: 131746 - DNA, 684 bp, Zea Mays
gcggggctgggcgcgcgacacttttagcgtgcctcacctgcgtaggcctcgggtagcgcgcagcggcggtaccgtacaccggagtatcactacctcgtccaaaacgccattagcgcaccagtcaggggaaatcgagggccgccgcgggctgagggcgttcggtggcgcgaagcttgtggaaggttgtaacgttcctggggtcggcgaatggggggtgttcccctgttgggtcttggccagcgctggattgcctgtcatggtgggggaagtagtttgggcatggacggccatgcacaacgtcgcgaggttgaagaagccaggggcccctagattctgtgatggacgactaggatttggtagatgatagagttcgatcagatccaatatccaccgttagatcctgtgtggacgaccgcgattagtcctgcgcataccccttcgtgtcattaaaactgtgccgtcgattttagatccagtggtcatgtatgtgtaccggttcggggatctaatctcacgcgtccacccttgatcgcacggccaagatctctgcgtaccccttcggcttgggcgatttgcgtatgagaccccgagcttgttatcaatcaacccgcagtcctactgctggctctctgagtcttagaaagttttgccccgtggcccctgtgtttcctataaatagtgcgc

SEQ ID NO: 131747 - DNA, 647 bp, Zea Mays
aatttgatcagacctgtttatcgtcatttttctttggaaaagctgtatgctcttgatactaagaggaagcgatgaatgccacataacgaactatcttaatactatttaaagtgaatccattaataactaacttaattttatatttcaaatctataactgaacatagacaatatttcctcttggcaacctcaaatataatctcgaccttgggatgggctgccatttcaggtgccccgtaatgcccaagttctctttgatgttgctctggagaccaaggttgggaatggggagaacaccaaattttggactgatcgttggctgcaaggcagcactgtaggtgagctggcccccctatcttattcaggtggttcctaaacgagcaaggagacaacgtactgtctctcaagctttgagcaacaggacttggattgctgatatccagggtgccctcacagtacaggtgcttgtcgaatacctgaggctctgggagtcagttgatggtgttactttgcaaccttcagtttcagatcagcacgcgtagaagctcacagattcagggatatacactagtaaatctgcatataataccttcttcgtgggttcagttaagtttgcaccttggagaaggatttggaaatcgtggtccc

SEQ ID NO: 131748 - DNA, 825 bp, Zea Mays
agtagtcgcgagcatgtcatgccgatttaagttactaccgacttaaaccgactgctccgttggtagggtctagtggtcaccctgagttaagtaaacatgagcacgtcacatcgccttaagtcattgccgacttaagtcgattgctccgttagtagggcatagtggtcaccttgagttaagtaagcgtgagcatgtcacaccgccttaagtcattgccgacttaagtcaattgctccgttaatagggcatagtggtcaccctaggttaagtaagcgtgagcatgtcacaccgccttaagtcattgccgacttaagccgattgctccattagtagggcatagtggtcaccctgagttaagtaagcgtgagcatgtcacaccgccttaagtcattgccgacttaagccgattgctccgtttgtagggtatagtggtcaccctgggttaagtaagcatgagcatgtcataccgccttaagtcgttgccgacttaagctgattgctccgtttgtagggtatagtggtcaccctgagtcgagtaagtatgcagattgacaataaacaattcgagtgcctttgagaatgaagtcattttattgatggtgtatctcccaattacagaatacaatgccgtcccaatagcttttgaaatctagctagaggtaaaacttcctaagatgctctatattccatgagttccctatttccgtgccatccatttgagtaagacgatatgatccaggccgagtgacttctgctactatgaataacccttcccatagtggcgacaatttgtcccgtccctcccccgttagaattcggcggagg

SEQ ID NO: 131749 - DNA, 734 bp, Zea Mays
gtcataatccatcttcagagtgtggtaggcctcacgggtattggtttcctcgccttctgctatttcgaggctctcttgaagggacgccttttcccttgtaagttccctgactttttgctctaggctttccacccgggaggttaggtgagtgcagtggagggcaaggtcatcgtattggttatcaagggtgtggaggtatccaaccatgtagacgatggtggggtcatcctcgacagggtctctacctgacaaggcctgaagtcttttcctccaggtgggggtattcttgttgctgggtggaaagtagcgaaggggagtttcaaagattactttgctgtagttctggcatagttgccggagggctgttcgggcaacattctggcaggtatctgggaagcggtatccggtaaaagtgacttggaaagaaggatggttcgaatagtttcggctttctcccaggtagactgccatagagcatttctccattccattctcgagatactccttccagacgtattctggcttcttgcggactcccatgcgaagcgcacagcttcgcaacagatgtgggaacccttccacttctgagcagtaggatgtcctaatggccagagagtcttccatctagaataggaaaagaaaggtctgttaacaacggggaagaggagagaagacttttcttggggtaagaggtattttctcttagggcaagttttagggtcagggctgcgacc

SEQ ID NO: 131750 - DNA, 284 bp, Zea Mays
ctgatgtgtgtgtgctttatacagatgtctgaaaacaggcgcagaggtggaaggcgtgctcagaaggagcagcaggcaccccatgaggaggcagctcagcagcagttgccaccgtcacccccgatgactattgagcagatgttcctgatacagactcaagctatccaagcaattggtcagaccttagcaacaatacagcaggtgcagcagcagccacccccacctcaacctctggtgcaagtccagatgccacaagtgcccagagacaagcgggcagagttcat

SEQ ID NO: 131751 - DNA, 393 bp, Zea Mays
caaaaccttttagttaatatgcccttgatcacccttgcttcttgatggtccatgagcgaccattctatttcacacatccttgatgatctcaccgtttcctcataacttccctatgtaataatttctgttacttcaaccattctgttgggacctcacctatctcacccttgattgtctcatccactttgccacttcgagagtctttccttaactgcatccttggttatgctttcacgatcatcatctttacccttgtcgcctctatatcttaccctgaagcttatattatacttgtcctctaaaaccttctctcttccatctcaattttagagttgtattttacctattttcccttggttgtatccgcttcctcgtcgcttacgagttttcaac

SEQ ID NO: 131752 - DNA, 275 bp, Zea Mays
gttgatggccatggagatctcgagttctcgggcacgaggaaacgcatgggcatcgccgtccgggggttgcttatctatctcgaacgatcaatgaagcaattggcacgtgggtggggcaggaggtctcgcatgagtccaatgagatcgagcaagtggctgtgggctgtgggagcactcgtcagatcatatgtgtgtgacggtggaagtgcatggaatttccagggatgaaataaatgcgtatctccaacagtagtatcgcgctgcgctttgcgtat

SEQ ID NO: 131753 - DNA, 637 bp, Zea Mays
tcgcgccaagtcttgatgacaatatggtgggtgctgatttggaggatgtcgtggaaggttttagtggtgtgaggactgacaggtatgtggtggaggaaggggatgatgatgatgaagaagaaacacttcccctggtccgtcgggaacggtgaagtaaagcttgtggtgacaattcaagccttgcttctgcggggatgatgaatttctgaggtctgactatgtctgccatcgacgatgtgctgaaagatgctattcctgaggaccttttgcttgaatttgctgaactcagagtcgtcgacgtccgtttagagtgcacggatgaagtgtcttctgctggcctgctggccgggctagaggtaagcctgtccgtctgtcatggttctttagccccaagggtgctctagcttccgtggttgctccagcccccgaggatccttcagccagttctcccttcgctgctgcattgggtgttcatgtggggtcgccaatgacccagactaatgatgttgtggtgacaagttctgttatgctcattggtccagccggcccgaccaccttagaggttggtggtcatggtactgaagacctaatgggtgctcctgtcgctgaaatccaaatggctaaatctagagttgag

SEQ ID NO: 131754 - DNA, 774 bp, Zea Mays
ctgtgtgtttgtataattttcttcccttacccggtacaatcgttcttatgttgtacctcggccttagcttgaggattttttaacttcatcattagcctcatatcttagcacgccccctgccatacactagggtagtatttcttcagatatttaccattgaggccttgggtaatctccttccttgcaagtcctcaacgaaatatgcattcccatgcacaatacctacaaccttgaatggtccttcccaattcggcgaccatttgtcgaatttattatttttgactcccacgggtaaaatcgttttccataccaactctccaatctgaaatgatttctccttcacctttttattataagctctcgccactctcagcttttctttctctatttcacttaaggctgttaatcgactttcattattcccatcaattctgtctagcattagctcaccatataccttagccgataacggattttgacaagctactctacaagcctgtaaattcacctcaataggaagcaccgcctcttgtcaataaaccaattcaaatggtgtcactttagttgctccatgccgagatactcgatgagcccataacgcctctgacaacacttcatgccacctcttcggctgttctacaatcttcttctttatcaacctgatcaacaccttgttgctagattcaacctgcccattagctgctctcgctgtccagcagacgacgacttaaataggccaccacactctctttcccaccatgttcttgtattaaa

SEQ ID NO: 131755 - DNA, 351 bp, Zea Mays
tgaaggatgaaagcaaagggagggagaaggtcaagaacatggtgatgagtcctatgaggctaagcttcagcatgacgagacctttatgttttatgaagataggctccccatgccaactggccgaagttcactttagagttgtggcagagcagaccagcacttgagatttggtccaagaatatttagtcaatagggttttcccaacactaagtgggtggggaatgccgaagcttaaaggcgaaggaaacaagtttgaacttgtgagactaccataccactttaaataccaagataccttcagcggcccctgtgccgagtggctagaaatgattgaaacaatgtgcaacaaaa

SEQ ID NO: 131756 - DNA, 387 bp, Zea Mays
agacgatagaagtgcagccgagcgcatcgctagacagtcagctcactacacactcattggggagacactatacagaaggggcgcatcaggcatcttcatgaaatgcattctctcatctactaggaagcaacttctagagaaggttcatgctggacaatgtggaatacacgcagcgtccaagacactagtcgggaaggtcttcaggtcggggttctattggccaacagcgaaaagtgatgcagccaagttagtttggaggtgcgaagcttgccagtacttgtcaaagcaacaacatctaccagcacagcaactacagaccataccggtgacttggcccttcgcatgctggggactagatatgattggacctttcaagaaagctcaagg

SEQ ID NO: 131757 - DNA, 840 bp, Zea Mays
ttttacactgctctggactgggcctcaattacaggaaaggtcagggggctcggggtaagaatccccaagacacagcgcacacaacaggtggatggcgggttgatttctataaacttcagggactcttttgaatgttttcccggccgaaggggtatggacagatctaagccgtccgatcatacacctacgctccagattaaatcgcagtaccactgaaacggtacgcagcgcacgccatcggatggaagatctacggtgcagattttaatgtgacaggattcgatcgcaaccgaccgatcagagatctatggctagggttttaagtagtgcagatcgcgcgacagccgctcgattaaggatctgtggtccaaactgaattgcttgaagggttctaatctgagccgttcgtcccaatccaacgatgtacgcagttccgcccaaccctggcccttgccggcgacgagggtgccccgcacggtggcgcgccatggccggaattcccccgctggcctacaatgcatgatttctcgccgcgctagttgctaaccgatgctgaggccacgacaaattctggaagggagtacttactcgcggtggagttgacgacggagcagaccacagagcgaagcggctccgccgcggtacgcacgaacgacggggattttctgctgacctgagtccctccgagccgatggatcacgatgtccaccctccacacatccaactcctccttcccccaggtccagatttcgggttaatcggcggtggaagcgaacccccaatcgccgccgcgcctctcgcttctctctcttcttcttctcggtcagaggcaacggcaag

SEQ ID NO: 131758 - DNA, 753 bp, Zea Mays
ggttatcctaagaaataccaatggctcggctgcatcctattgcatggagcagttcttgtcagttatagtgtatcaggaaaccggtgcttccacactatggttaaacgcctcaatcaatggcaacccttcctgtttgtttaactttaacctatatggaagagacgagtatacatgggggcattgttgtgaattgatgtggggtgtccggatatcatatgagaacccctctgagaaacaaaagatgcttcatctgcactgatgatggtaccagagagtactgtgatcagactttcaaacttgaggatggatcacatcctcctatatgataagcgttgtatgagtggggtgctgtacacgtgtactattctatggccttgaaggtgcaccctgcaaggggctaatatattgcttaccaccggcattatctgacgctctcttcagaggtttcttgagaacttcttttgcaatttagagctgcaaattcgtatttatcatgcctcttgcaaactccactctagctgaccccattgtgtggaagcactggtttcctgatacactgataccctgagcataataatttatcgtgccccttggtttgtcatcaagggggctgagccctgagcataataattttggaggaacggagcaatcggcagcctctactagggtagctttcttgtcccatcttctatctgactctctatttcaaactccattctatctgcctttactgtgcagaccagccaagtcccg

SEQ ID NO: 131759 - DNA, 403 bp, Zea Mays
cctgaacgcaagggacatgaactattgagcgcctgcatgctggtaagccaatgtcttgctagcatatttttccctgctgatcctttgctagtatttgggttttgcagttgcagccctctcattatgcagctcatcatttgttacttgccgctttcttagttcctttacattttagtttcattgatgattagtagctcagtgctttggttgatatgcaggccaagcccctggcaccggcatatttgcatttaggccccaaacgcgcgtggccgccattgctgtgaagctttgcccccatagcttcttctacacctacgacatatgggtggccgccgttgcgtccaatcgccattcctctccatcgctgagaacaaccgcctgaaacaacctcaattactgccct

SEQ ID NO: 131760 - DNA, 682 bp, Zea Mays
aacttcctgaggtgttctatattccaggagttcccaatttctgtgccgtccatctgagtgagacgatatgatcctggccgagtgacttctgctactatgaagggtccttcccgtaagggcgataacttgtgccgtccctcccccgttagaattcggcggaggatgagatctactgagaaggatcgttgttgtacggccttgtcgtgatagcgccttagagtctgctggtatcgtgctgattggattactgcattcagccgttcttcctcgagtacatcaatgtcctctatcctagtggcttcggcttctgctatgctttcgaagatcagccttggcgccccgaacttgagatcggcgggtaacactgcctctgacccatagaccatgaagaaaggagtgtttccatgcagagctcggctaggctgggttcttaggctccagacgacatagggtaattcctttatccactttcctgcaaacttttcattcttatcgaagacctttttcctgagtgcctccaatatcatcccgttagctcgttcaacctgcccgttggctcttgggtgtgctacagaagcatacttgatctgaatgcttttttgctcgcagaaatcgaagaattctgaacttgtgaagttggatcctaggtcagttataatgctgtttggtatcccgaatctga

SEQ ID NO: 131761 - DNA, 694 bp, Zea Mays
cgaagagctccaccgaagaaaaatcgagtcacaacgaaagcccaaggacacttcgtagtccagcaggacatgggtcaggcctgcgcaatcaaactcaggctggcaaaaccgtatccagtcccaagtgcacaacatatccaatcggtagcaaactggagacaccgctcgtcgtcacgaataccccgcacagcagggccgcaacgacaacaccagaggctggggcagaggccgagcccataacagcggaggttctattgctttttccatggcaaagactcggcacatcccactagggactaccctaaaatcaaggccacaaaggacagaatggctagaaaccagccggctgacaaccaaagagttgtcgcccacacctaccatccccaacaatacaaccaacaccaattccgcgatgagtagtaccatccccaccaacaaaatcacaacatatactagcaacaccaagaaatcctagctctactgcctccaccaccaccacaacaccaaaatcaacagcctcctccaccagcaccgaaacaagaggactttgccgatcagccctttcaacgggtcattcatatgatcaccggaggatcaagctccgagttcgacacaaaacggtagcagaaagaacactatcgaagggtcaaccacgtagccctcatcgtgccagtcgttcaaacaaagtggtccc

SEQ ID NO: 131762 - DNA, 424 bp, Zea Mays
cttagtgtgttcatgttttttaagttagtaagatcctatggttataataatgctaatctgacgaaacagtggacgaccttagcgtctgtgccgacagtattacagttctcagaggtgctttatatgggtttccttttttagtataagatggtgtagcagtctgatatggccatacttggggtctgccgtctgtgtgcctaaaccctttgttaacttggggcctgcgtgccaaaacctgttgggagcactgcttgttgactgaaatatctgaactacatctgatgatgtttatggtgatgcattcggactggggtttgctgcccccaaactctacagaaatggaggtgggcgttcttggttatgatacttgtggaatgacaaagctacattgaaccgagtttaattggtctcagatgaaaattag

SEQ ID NO: 131763 - DNA, 420 bp, Zea Mays
ccttttcgtcatgatggttagttcttccttcctcggtccaatccttcccttgcgcttgatcatcatagggacctagatgtcacaatgcttgccaacaccctcaatgatgagatgtatagtaccaaccaagcatacttggaatacattttattttgtgtctagcaagaaagatggacccgcctataggacgattccaataacaaacccaggacctctatcagcgctcgaggaagttcatacccccaaatgctgccaatacacattcaagaattctaatatagaatggtacagtggggcctagctattaggaccatcgctccaaggttccatacctcgagacctcccctggcctctactagggtaggtgcttgaccctcaagaaatttgatcttgggccactccaaaaggatggcatctaca

SEQ ID NO: 131764 - DNA, 618 bp, Zea Mays
ggatagtgctcggggtctcggaaatatcaccaccgtggataagtccggccggtaaaacaaatccgaccaccgtactagcttgtcgcggtggaacccgataggctcgccggtgaaccgccgtcgcacggccttgtgccacatatccgagtacctccaccgcatcgcaatgattcgttttagcttcccgtcgatcaccggagtagtcgccacgacggttgacacgagttcacttgcaccagtaacctttccccaatccggctgccaccgcgccatcctcaaattcaagcgccaccgtccttggaagctataaatcgagcccgccgttagctccgcaacctcattacacatcacaccgtccagtatcgcccccaagcttgcaaccgtgagctccaatttcaagtttccggtcagccgcagggtcgagctaaccgcggccagcccctttccggtcagttcatccccctctctccctcgtttgagcactcttatagctctgtgatgcttgccaagccaccaattcgaactaagagatcaccaatcaccgggaacgcgatcaaatgttcataaccttcgctgttctcgtgggcagaatagaataggtcaccattcgtgcaatta

SEQ ID NO: 131765 - DNA, 461 bp, Zea Mays
agcgttaggacttgaacgagggattggagaagtcgggtgattagccatggtgtctgacacctgggacatgcaccgacacgaggacatgtggagtggatcgtgttgccgacgtggtcgtggatcgacgcaacacatgtctaggacgtggaggacgcatatgcggtatgctactcacggtggtttggtcgttgagtctcaaaaccattcaacactacagatggcgggtttcaccgtgtttaggctcaaaactcggggatgtgatatcggctgtaatcggaggtggcacgtgccgccatcgcgaaggatgcattgaggcaaagcaacttcatgtggagcgtgtggtcgtcagatgtatattccaggagttggtccattttgccccgattaagtgaatgagctctatgtaactaggggtagtttaggcaagtgaaataaccccctataaaaggtgcaagggcttt

SEQ ID NO: 131766 - DNA, 314 bp, Zea Mays
tgatgacatatttccacctttataaaatacattgttgcctcagcagttttgaaacacagctagggataaaattttctgaggtgctctatgttccaggagttcccaacttctgtaccatccatctgagtgaggcgatacgatccgggccgagtgacttctgctactacgaagggtccctcccataagggcgataacttgtgtcgtccctcccccgttagaatttggcggaggacgaggtctcctatcgaaaagaaccgttgccgcaccgccttgtcgtgatagtgccttagagtctgctggtaccgtgctgactg

SEQ ID NO: 131767 - DNA, 449 bp, Zea Mays
ttgagcatcaggaacagttggcacgtcatcgatagcacgatcaaagtcttcagggggacggtctactacaaccggacgcaccacaaccaccatgagttgcaaatgggtcttcatagccgaagtaacataattatcccaatccagttgacaatcaattgggatgactcatcttatgacatttggtggatgaccaatgttaagcactccgtcaaccgcaatgtcatcatcttcatggtaacctagcttttgtttagcctttgtaaacacatcactcaaggagggtctaccaacgaatagtaccgacacgtgtcgcatgtcaatgaacttagcatttccatacggatcttgttccacattgtctccatgatataagctcaaaaaattgtccatctatttgaaacacgaattaaacattcaatatccactatggatggttattgcctaaccac

SEQ ID NO: 131768 - DNA, 523 bp, Zea Mays
cgcattgattgagcaactcatagcaagaaaaactctcttccgcactccgtattcattatagtttgtttctaatcctaaccccaggtgaagttcgtgttcaaagtttataatttacaagtttcgcctattcacccccccctctaggcgactttcagtaataccagttgacctaccctgaatagtcctattctgcgacaacgccactttgattgctttctgtcccttgaatccttgctcctagttcttctttgattaaggagaacgaaattttgccccatgtatcactggcctataattaagtcgagtcatcgctgcagttctaggctgtgatggtttggattccaaagctctcttgcatcctttagatatggcatacatgttgtggctgttctcctgtgttaggcaatcattgataaattcgtggaatgttgtatgggcagagattcccatactctttagcattttcggccttaggtccctcttgaagctagcaatcttcttgtcctctgtatccacatattct

SEQ ID NO: 131769 - DNA, 336 bp, Zea Mays
ggtagggcgaatccttgattcaggttgtctcttaaagtggtggttggattcgagttttatttgtcaggttgcactagttatcgctgcttgcagcaagttatcttagcttcttcgaagctagatatctaaagattgatcctacatcgtgaagatcagacatcgtggcgcatcatttggtatcaaagcctcagttgccacagtaggattctttacccttagctatatctattttgtgttcgtcctatccaccaaaatgccataaaatatttttgtcgtagcccttttgtttcaatcagttgttgcagtgaattttgttaagtttcagtccttagagtc

SEQ ID NO: 131770 - DNA, 293 bp, Zea Mays
cagcatggttcccttaaaacatccctaatactaactgcagtcatcggaagccgcttccatgtgtttacacagtccaatttgactgcattccaagtttacacagaacggaaacgtgcaagatcgagcaagcaacagaacccaagatgacacacacggaacggaacacgccggcgtagaaggctagccgtgtttcacatttacagcagcaggccaatcaagcgtcgtcgaccgacaggagcccaaagatgcgagcgattgggttgagctagtctgtgtgtgtggatggaaagagc

SEQ ID NO: 131771 - DNA, 528 bp, Zea Mays
gttactataaatatggacaacaagaacataacttaattcaagtaatatgccaacacatagaggtgttcaactaggcaaataataaagtaatgctaacactccaaaaatcctatgaatatcatgtggtctcactacaccgctactattatcgagtaaagtaaaatcgccacaaatgtgcaatcacactcatgtattaaaactagtagattgcacaaatatatgtacaaccgagagggacaacgggtaactcacagcatgtagattgtctacgcgagaagccaagttcagggagcacaaagttctgttcccctaaattaatttcgccactcaagcccaaggattctcggtgggaggttggtggagatatagagttgttgctagagtaaggggaaatatctatagcatcaacctgaggaacaaaggaacaccacctagtagagacacccaagaaccagaccatggtcgacaacaaccaaaaacctcatgtggtatcacataggcacaaacacgtacacgaacactcagtgg

SEQ ID NO: 131772 - DNA, 310 bp, Zea Mays
gaatgactcgcgatacggctgatcagcgaagtcttcttgttatggtgcttggggtgatttgggtggtggatgtttggctgatgcgggtgcggaggcgagagtggaggtggtacgatttgtacctcctggtggtgttggtatgcgtggttaggtggatgctgagcggggtcgtggttgtatggttgtgggaggtggtgttgatatgtgtgcacgacaactcatgggttgtcggctggttgcacccgagacatcctgtccctggtggccttcgtttccgggcagtccctcgttgggtgcgcgcagtcttcac

SEQ ID NO: 131773 - DNA, 428 bp, Zea Mays
aaattacaggggctcgtttgcaattgtgttggccgaaggggtatgatccaataccaaccgtaggatcaacatctcacagcccggattagattcggcaccaaaatgaaccggtctggctacgaaccgtcagatcggcgatcagcgatccaggttttttgaagttcgtttccttcccaaccctaggatcagatctaaacagataaggccttatctgcgaaggggtacctatgatttaatcttatgcgtatgttaactagtcgacgacccagatcctcataaagcatgacttaatctcaaccacacgtatacgatgtgcggcccagggctcatcacccacctccgactgcgcccagcgacggcgaacaggcccagcggcggtgccaccaccggtgttcagccgaaccggggacacgagttctatactcaca

SEQ ID NO: 131774 - DNA, 544 bp, Zea Mays
gtacaaccaaatttaagcagtgttccagattcatatactgaatgatttacctaaaatttgttgcttaaaacaaaaataactaaaatccatagttggcggcaataggaacttgtagtaaactgagtgatcacatggttggtagaaattccagttgagaggctgcacacccaggcttttgatcccaggtgtcacaggtcgtgtgagtacatcagtaaagagtttgatactcccatttcttaagacaaagccaaatggatccccccggtagatttacaaatatagtacaaagatttgcataaaacaacacagtctaccaattaatccctttttttaggtactgaagcgatgattgggcaattgtaaacatgccaaaatagcattaatacaattcattgcaaattcagatcaaagcagaagtcacttgaagggaattcactagtctggcgaacaagagaattggatatttgccattacaaccacggttcactttctcggtcggtaaacaccgaaatccgatgaaatttctcgttctcggtgctaagcg

SEQ ID NO: 131775 - DNA, 366 bp, Zea Mays
gcccattcctcatggattggtggttgattgcaagtgacagcatgcaccataacctgccaatgttgaatgggcacatcaatgaggccatgtagaagaaatggcgtggggtcaacacgatgatacatgattgaagcagttgtcgctggcggtgggatgctcgtcaaagcctctaagttaagcaatcatgacaagaagaaggcgattagagagatttgggtgcagcagcgggggtttgggtgaacaatgtaagttgtagaaggactgtagaggtggaagacgaagggacatccctcgagttgatcaccttcgcaaaatcagagaagtgaaccgaggcggcgagaatagcccacatggcaaggaaaagag

SEQ ID NO: 131776 - DNA, 436 bp, Zea Mays
tggccttcgggctccaggttctcgttgggttttagttccgggtgtagtcggtgcgggtggttctggattccgcgtcgggttttggctgaattggtgcgctgggtcgaggatcggtggggcgtccttgaatcgccggtggttctgggatcgaggatcgacgggacacggctcgctaggcgaatgtctggttctgtttcgattttttggttcagttgcccttctgattgaattttgcgcggttcggttcggtgccctacgatcgaggaccaaacaagtactgttcgcttttacttggtgccggtggctgtgcgtgtaacatgttcgattgatttcctactcgaggtagtgagatgctggcgtggaggacatgtgcaacttcagttgggagatgacagctagttatttccaatgttatgtggaaattactgaacatttc

SEQ ID NO: 131777 - DNA, 453 bp, Zea Mays
aagacggtgcaacatgctcgcgcttactcgacttagggtgaccactataccctactaacggagcaatcgacttaagtcggcaatgacttaagacggtgcaacatgctcgcacttactctacttagggtgaccactataccctactaacggagcaatcagcttaagtcggcaatgacttaagacggtgcaacatgttcgcgcttactcgacttagggtgaccactataacctactaacggagcaatcggcttaagtcggcaacgacttaagacggtgcaacatgctcgtgcttactcgacttagggtgaccactataccctactaacgaagcaatcggcttaagtcggcaatgacttaagatggtgcaacatgctcgcgcttactcgacttagggtgaccactataccctactaacagagcaatcgacttaagtctgcaaaggcttaagacggt

SEQ ID NO: 131778 - DNA, 523 bp, Zea Mays
caccgggttccgtcccctgcgccgtcgccgtgagttgtcctccatcgctagttgtcctccatcgccgtcgcgtcctccatcgtcgtcttgttctccctcgcgagatctcctccataagccgggcgcagcagcctccgaccaagagccaccgattgaagggcgccgctgccgcctgtccgaccgagctagaatccctgcagcctccgacccagagccgccaaatgaaggtccccgcttcttccccacatgcgcacccgtgagtttgtctctgatgttcttgattcattcaacttctctcccccccattcgtgtctcctcccccaactagatctagctcggtttctgtgtgcagtggatcgaccatggaggatttagagctgttcaatgatgcagacataggcatatctgaaaatccaggtagatatttgtgccttgctgtggtatgaatcgtgcacatgtaacctttaattttgtaaattattggttgaattaatggcaggtcccgtgatgtcttcaccaccgc

SEQ ID NO: 131779 - DNA, 549 bp, Zea Mays
agcgtagtgctgttgcgatgggtgcaaaaactgtgcatattgtacaaccccctggttctacgaacgtgtgcccggacggtccaaagttatacctggacgattcagccgtatatggtgctatttgggttgtctgcgcgctggcttgtgtagggttggacggtctgagttatctctcagatggtccgactatgtccagaggcggtcgcgcgtaggcggtggcggctgtggtggcactacgaacgtattcaacggcataccatataatggtagcgtacaggatgacccatttgtagtcgatgtgttaagtgcgggtggcaccgtattaggctcatgcaaggaaaaactaggggcagtagatttttcatacgaacacgcccatcctttaactgattcatctatatattgttttaattgagttccccgttgtcctatgaaagccttaaaaaattgatcgaaaatacttacaatgggagcctaagccgaaagtaggagaattccatatcgattttctctttaacgaatgatcttctggtggcgatccactatgaa

SEQ ID NO: 131780 - DNA, 397 bp, Zea Mays
aagccattagcaaggatctatatgctagagagaatcatttgattgtcgccaccacctctctcccaagggccatgggcatccaagacgtcgtcgtcgtcatcgtttctctcattgtgatggcatcacattgtttcatctccacccgcgtggatgtcgttgagacactattactgttacggcgttgatcgacaacaaacttgaagagcatgggtgaaatgatgttgttgcttgtgtgtgaggacgtacaactacttttactacatcgacacactctcccgttgcactatctgtctagtggtaacgattcatgatcatctagtcgtatatcatcttgggtgaacatgatcgatatattagtgtgttgcgtaaatatttttctatagtggtattggagctt

SEQ ID NO: 131781 - DNA, 278 bp, Zea Mays
agataataggtcataggtgcaagtagggagtcagggccttggtaacacctggggtgttacatgtttcttgaacttgaaatgatagggcagccgaacgagttcattcttcttcttctctttttcaagcttcggcataccccattccctcagcgttggtaatactcggttggccaggtattcttgaactaaatccctagttccaatgtgttcagatacaactctaaactcatacacagcatctgggcatggtgcccccggcgtcatgttgcactgaggcc

SEQ ID NO: 131782 - DNA, 518 bp, Zea Mays
ttcaactagcggcgaactggtggagctaaactgtagcaagccaacaaagcaacagggtacaaaggcctccagttccgcgcgcctctccacaaaagcccatctaggccctacccagcgacgttatcaattttgaggccacatatgtgctagggcttttgccagcgtagtagctgccctgccgtctgtgcccttcgacggcgagtagaatcacaggagatccgcctgcttgccatggttcaagccaaacaaaatatgtgaagacaatggcacgttgatagttgttttttatactatccaaataatcttttaatggactattgtatctggaaataatcttttaaagaatagattaaaattttcatttaaaattttaaggtggcattgttggggccttctcaaaaagagaaaacaccctccaaaaataagcgtatgctgctttgtatggcgcacacacggtattctttagtaaaaggcgaaagaatagttcgctttgtgcgcaccacgcagctgcgtgcttg

SEQ ID NO: 131783 - DNA, 724 bp, Zea Mays
gtcggagatgggctggtcccgtgcacaagcggtagggctcgccggcggtgcgtgctccggcctacccactgcggtagagtcaaattaaagcactcgcggggctttaggggtggtcagcgatggtgtcggcacaaggaatcgagaaatgactcaccgagtgacccggtctacgcgcggtggcggtccgccgaagtccggtgaggtcgcgctcgcttttccggtgaggcaatgcctcggctcaaacttgggaaagcttctccgcctctcggggaagccgtctaggggctagggcgaggctgggggtcatcgggaagggctggacactgtggccgagtgctcgggtggcttggcaggcggcgcatagctcgccggagctaaggactgggccaggacagtgagggcaagcgcggagtgaagtgttgcacgtccagggtggcttttaaaggtgcgggcaaggtgtacgggcggcgtggactgaagcgggtgcacgggcgcgcatggctcgacgcgggtgcgcgggctagcgtgcaccgggcatgtcagctgcggtcgaacaagtggcatggtttcttctgctcctgttctaacgccgatagggcgcagatctttgcgaatttgggcaagaccgccatgtaggatttgttgccccgactgagctctattgtttgtgtgtggaagtcgtgtggttttgggctatggacaaggagttgtcgcgtcgccaaaa

SEQ ID NO: 131784 - DNA, 825 bp, Zea Mays
tgccggtcgggacgaggcgcctcaggacttccatcttctcccccacctccatgtcccgtcgcccgcaggacttcgtcctggccttgccgccttccgcggcaccctggctcatcggcttcgccggcgaaggccttctgaggaacatgcccgaggacgccggcggcggcctcgttctcctcgccgtcgatgctgacgggttgcagcggctgccagtgtgggcacccatggccaatcgttacaaactgcggcagccgctgtaggccgtagctacttgcagttgcaactacggaataatgaaagagagaaatgaagaatggaatcctgcaaattagagagagagagagagatatgaggatgaggggatgctagagagagggagcagggggtgtttatatatagatactatacgagctatataggctggaagagaagatatgtgtgtgggaattaggtggcatgacaaaattaaagacgtacgatcaggaataattatcttatgtttatgtagtgatcatccatagctagctatatcatatacgtatgcatgttattgggatatgcatgcaagcattgcattgcttgaaggtgagggcaggcatatgcattcatgttctcctaataactcaaggccacatgccaccacacatgattccttaaacaaccagcacacacctcttaatctatctatcatcgatccaagcacaagcaaacacgtctcaggcgcactagtaccctttaatcatgcatgtgtgatgtgtagtgggctcaccacaccaatcctttgccagcctgtcgcctcagacgatataaaataaacaacatggg

SEQ ID NO: 131785 - DNA, 805 bp, Zea Mays
ctataaagtgcaggggctatcccataaatattcctagactcaacgaataatgaatgcggacggcgggttggtttcctagaatctcagggactatttagcaaaaacgacacaattaaggggtatctctaattatcggtcgtatgatccagaactaagggcccagattagatctggtgcatgccaatcctgcgagtaatccaaaccgtctgatcagagatccgcgacccggatttaattttaccacggtcttttcgcgtccatccgaccaggatccaatggcacagaatcatttgaccgaaacactactgatgttacgatcctaaccgacgatcgctcatccaatggccagaaacttttcccccaactccgatcagaccacgacggcgtacagggttgccagcggcggtgccatcgccggcggtgctcgattccgccattctcgccccattcactaattgaacacgtgctaccgcactactataccatggcggaactggagaagatgttctcaccgtcaattgacagggcgaagaggttagtttgcagtggtcgaaggcgtcgcaacgacggagagctcccttgaatgcggtagttgatgacgttggtcactgttgcgcaccgaggttcggctgatgaagtccagtagcctgcgccaaatctccacgggtccagcaaccctctctccctctcggcacaacacacggttcatctctccctacggtgtgacgatgatggcgacagaagtcacaaggttctcggtctagggttcacgccaggtggaggaggaagcacacgacgaggtttt

SEQ ID NO: 131786 - DNA, 305 bp, Zea Mays
caaatcacctatagatggtcaaaatccccacaacccatggcctagggttttagctcgacaggcctgttgggcccatactcgcctaccatgactacggggtcatgcttgggtcactcccttgtccccacatattagcttgaacatataccatcctcgcctcccctcactcagtccccttccccaccttgtataaccctagcatggatcaccctgtagccatagatgcttgcctccatcgatgtctcatcctcatctcctcgctccactctccatgtctccagctacctcatcgctagatctacaac

SEQ ID NO: 131787 - DNA, 474 bp, Zea Mays
ggcaggcgccagtggtgggggtggtggtaattgagcccaggaagcttgagagtgacttgctgaagcagcagaagtcgtaggctgttgattgcctacgtattccgggatatatggagagtagcacaaagcaatatggaggacctgcttcagctgattctgtcgtgcctcggcttcaacaatttccttttgcttttggatcgtgacctggcacgtcctcgttgtgtgacccttgtccatgccacaaaaaaggcagaacaatttcctgggatgattaccgtaccttcctccactgaagcttctccctcctctgcctttcggagctggtggtctgtaaaaagtttgctgcatgcccgaagactgtgagctgtgatgactgctctgagcattgttggccatttcgtcgttggcattgggattgtggattgtcctgatatgcatgggatgaagtcttcctccgaagcccctagtcatttc

SEQ ID NO: 131788 - DNA, 1467 bp, Zea Mays
ccgctttggatcggccatagagtcatatgtatttgcatttgcatccacagaggcagcaggattggagtcagcgctctccatcacaaatctgcagaataattcacaagttataaagcattttttggctgagtcatatgggccataggactggctattggttagaggttgggataattcacaagttagtattggccatacggtcatatgggctcttggtcgagtcaaactgagaggacatagagtagagctgacctgaccaagagagtagactagcagactagtagagctgaccggaggggaggggtcgagggggagctcgctagtaggggagggaggggctcaccggtaggggaaggaggtcgtcgtggagggggtcgccgcggaggggagggctcaccgacgcagcgacgcgacctggagaggatgtaaacgggagggaccgccgcagaggtgagggagtcaagtcgtcaggggaccttgccggcgcagcggagggatcagcgccgccaggagccagggactagtgtcgccaccccttacgaccagagctcgatcgggacaatttcaaatcgcatgcatcactcaggtcagatccaaccttaagaaccgtattccatccctacaacaccccaatgtgtcctcttctcatcgccttatacctcttcaaggtgccagggcgatgccctaatggccaaagcggacaccttaagctcccaggtaaggcgatgcagatgccttacgaccggagcacgtcttagcgcttatgcgtcacctaagcgtcgccttatggacgccttgacaactatgcctgggcgatgctgtggaagttctaggtgccacgctaggcctaggtggggtggtcacacctaggtgaggcgagtcgggctaggcgcgttggcgatcgtgccaagcccaagcgaggagcggtcgaccataggagccttaggtgccctaggcgtggcctcagtcgcacatgacatggctatgcagaagagtcgttggggagtcttgtagaaggggaaagtatgatggtgctagaggggccatcacaatgttagtagagagtaaaaactaaaaattcttggaagttgttggagtccgttgaaaagggaaatggcgtctcattgaagacaacatatcatgcctagaaatattgatccggttggaatactgatcaagacaacaataacccttatggtgaggggagtaacggaggaaaacacacaaggaggagcgagtttgaggaccagtggcagaaaggttggggtagctttggcagctgaaaacacggagatgagtatatgagggtggggatccaaagagagcgatatggggtgtggataagttgattgctttagttggtagaatattgaggaggacattatcctgaaacaaggagcgaacgacactattgatggtgcgaaacatgcattcggttttacccttttgaggcgaagtgtaggggaa

SEQ ID NO: 131789 - DNA, 661 bp, Zea Mays
ctttggcactatagttgattcctcagcgctccgagcggcgggagcagcttgttctgcttcggcagcggaagatgtctcttcaccaaattttggcactatggtcgtttcaatatatcttggccggtgggtcaaaaccttgattttcttgcccttcggcacagcagagatggctgaagtggcaattttcctcttttttccctgctttcgcgagggatagcaataatgaggatataaaaaaccaattgcatcgaaaaccctgttcaaccttttcttgccctgacccccgaaggctaaggacaaagcatcatcttcggctctggtatatgccccaagtaactcgtcactagtagcctcaatacatttcagccagtcatcatttggttcgtcaaaccggtctttgtatctgaaggtatatttcaaacgaattaatccaccttgactggacccggcaacagtctccttcggcatctcccagttatccacaagtggccataccctgtaggctatgtgctcttggatcaggtctcttgtaccaatgaaagcacaaacattgttgaaagccttttgacatgcttcgacatcattttcaatcgccacggtcggccttcgaaggccgaagcgagaccagatggggcgttggataatcccatttatgtcctcc

SEQ ID NO: 131790 - DNA, 556 bp, Zea Mays
ccctactaaaaatagtaaggatgtgaccccaaaaaggttttagaaaaaccctaaaaggttcaccaaagggagagacctaagagaaaaatcagaattcttctaagtccaaaaccaacccttttccaaagatcaaacatgttcaccctctttcaaacttcaaaaccacttggcacaattgacaaagtggcgcctaaagacccctagaacaccctggaaaagtttgaacccaaccctaagtcatttgacacgacttggcatagcttttgtctcggtgtggacagctctgacagagccgacttctcgcctctatatatctctagcccgaccgtacccttgcttggaactcacataaaaaaggtaggatttggtgcagggaagagaccgtacacgggggttttgccaagatctgcacgctaaggcgctcaaatcggccgttgaaccatggcagaagcaaacccacacgtgttcgacgagggctgacactcgggggggcgctcagagcacgcccgtatgccaacccccgcgcgcccgcggctgccccgtgaccccgcccgcg

SEQ ID NO: 131791 - DNA, 305 bp, Zea Mays
gagggaccatgctcaagacactagcgatttcattcccacgagttgacatcatgtgttattcgaagtagtagactatagtcaatgttggcagatattcgcagtgttgtccttcatgcatccactagtaaaaagaggaagaagtcgattagcgagcagttatggcgacacaacctgaaaatctaattgcccacacgcccgagcagatgtagcagatgcggaagacgattctaaaggcttgctctccaatattccacagcgcataaaatcgagacttaaaaggcttagatgtaactcaatggagaaga

SEQ ID NO: 131792 - DNA, 336 bp, Zea Mays
ggggacttgtgtggcccggtgacaccagccacaccaggaggacgacgctacttcttgctgctgtcgacgatctctcccgctacatgtgggtgatgatccttggcagcaagggagaggctgtgaacgccatcaggcgtgtgcaggtcgctgcggaggcggagtgcggccgcaagctgcgcgtgctgcgcaccgacaacggcggcgaattcacggcggctgagttcgcgtcgtactgcgcggatgagggtgttcagcgccactactccacgccatacagcccgcagcagaacgacgtcgtcgagcggcgtaaccagacggttgtggggatggctcggg

SEQ ID NO: 131793 - DNA, 396 bp, Zea Mays
cttgttctgtgcagatccacgagcgggggtgttctggtcattcctctggttgttgctcttctgaggtgtctgctggttgcgcctagggcagttgttagcataatggccaagctcaccgcacttgaaacaaccattgggttggactggtgcgttgttgcttttggcctgcgtgttcacggcgccaccttgacgagtctgtgaattcccaccagaccattggttggtctgagagttgttccactgctggttctgactttgattgcttctctggtctcgctgtccagagtgttgcacttgataattatttccaccctgatttccagagcggaactgagaaccctgcgagttgttcgggcgggtgttcctgctagactaaccttggaacttccttttatg

SEQ ID NO: 131794 - DNA, 329 bp, Zea Mays
ggtaaaggcagtgtcagagtggaaacaacccacttcagtcacaaagatcaagagtttcttgggtttggctgggtactaccgaaggttcattgaaggcttctctaaattagcccgaccgatgaccgagctacttcgaaaagacaagaagttcgtctggtctgaagcttgcgagcgaagctttcaggagttaaaggcaagattgactagtgccccggtgctagtcctacctgacatccagaaaagcttcaccatcttctgtgatgcatcaagacaaggtctcggttgtgttcttatgcaagaaggcaaggtagtagcttatgcttcacggc

SEQ ID NO: 131795 - DNA, 340 bp, Zea Mays
gacgtttacacgaccttttggagatgtcacaagaggagggtgttagagaaagtcaggaggtggatagacctccttctggtgcgtagaccttgtggtgtagcctctctggcgtcctcgaagcaaaggcactccatcatgctgtcgcttccaacgagcactgtgtttctgccgcacatggactgacgccaggcgaacgatcatacacacaagggtggcaaatccttgcccttcctgcaggtcgcaacgaactctcccgcatctccagtacaaagtgtatatttgtgttgtgactaataggccggcccaaaacacacaattacaggcacgactcagatctagc

SEQ ID NO: 131796 - DNA, 557 bp, Zea Mays
tgaacatgcaagacccatgggatgcaaaaattggatggtgcatgttgtttggttaactgtgtgggggtcggagcctggctcgattggtgcaaaatccaactctcaactaggcccggctcatacgaccaatttgggcgtcactcggcagcctggctccacacgcgcggcacctcgctcgcagccgcattcgctcgtgcagccccgcgtgctagggtttaccgagctctccctcgagctggatcccgcgtgctagggtttgccgccgcctcggccgggtatgccatctccactcgccctccctctctccctcgagttagatcccgcgtgctagggtttggcgccgcctcggccgggtacgccatctccactcgccctccctctctccctcgagatctccatcggtgtcgtcgtcgtgactcgtctgtgccgagctctccctctctccctcgagctctccctctccctcgagatctccatcggtgtcgtcaccgtcactcgtctgtgccgagctctccctctctccgtcgagctctccctccgctgtcaaaggtacggag

SEQ ID NO: 131797 - DNA, 648 bp, Zea Mays
gagcaatttatctacagtgaccgatgcttggggagccctccttccttgtcatgtgccgtttgaaacccggcggattgcactcgccacgtgttgtgcgcgcggacgcgtggacgccgagccctagagcgcacaggcgccttgtccccgcacgtggacgtgctagcagccgtgtctgctccatttgcgctgagcacgccaacgcctttgctttcaccttctctcgccttgcgccttcttgctcatcttcactcttctcttctccaccactccgacgccgcaccgccatgggtgccggtggatagctcttgtggccaaacttcctacatcatcctctgtctgagtcgagccccacacccagctctgtcatcgcgtgacgaagccctagagcccccacccaagcccgaaggacgccagagccccgtcatcgacatcgtcgtgcttcggttcatgccaacgctcgtggacaaagcacccccgtccgtcactgttgaatcgaggacatcgtcggattcgtcatcaacccccatgcctcctcgcccagctttcctctaccgtcggtaagccccgagccgaacgccatcgttctctccctccctctgtttgtaaaccagaagaagggcatcaggtaagaatagaggagaagggaag

SEQ ID NO: 131798 - DNA, 543 bp, Zea Mays
gcacagaccatgcagatcaacgcctccatcaacgaccatcatctcattacgttgctcaacatcggatccacccacaacttcatccaccccactgtcgccaccgccgagggcctttcctttgtgggctacaacaacacctctatcacggtggacaacgatgacaaggtggtctgctagggtcgcgccaaccaagtcacgctgtccgtgaatggcgtccccttcaccaccagcatgtacgccattccgctcagagggtttgctctcgtcctgggggtggcgttcctccgtacgctcgatcccaccctctgggacctagatgccatgcagctagcgcgatggccaccgcgtactgtggcagggtgagcgcacaacgcgctccacagcagccgcaacgtgcgcgatgaccaggccacaccgcccactcctcgatgatctgctcgactccttcgaagacgtcttcaccaccccgagcggtatgccgccagcccatccctttgaccatcgcatacacctccaaccagggacgacacaagtggttgtgcg

SEQ ID NO: 131799 - DNA, 375 bp, Zea Mays
ccatgggagtaggacaatccaagtcagtttcctgaccctcaagaccgcgctccaaggtcgatgaggggcgggacgctgcccaagatgaccccaacccggcgtcgaacacatcagcacaaacatccatcgtgtcaccatccgccggctctgataacagatcctctggaaccatatcttcaagagtctgatcaaagttcgccagagacaattcttgtagaccaatgagggcagacagagcaggagaaggaactccactactttccccactggctacgtatcgccgactgttcttccgagtcagagggatctcatcttcttcctcctcctcattttcatcagcaacacagacagcacacccattggggtcagcgtcag

SEQ ID NO: 131800 - DNA, 505 bp, Zea Mays
ggaaagggagcacaaggaccgagcaggtaaataggagaagcatgggcgtggcttaaatagccagggacgagggagaattcaagccgcggactcgacgacatgaacctgtgttgaaggtggccattaatggaggtggcgtaacgcagtgagtaaatcgcattgattaaatcgtggggaggaaatgtgtcgcgaggtgcagctgtgtgcggctggcgaggcggttcaacgtggctgggcgttggggaggcgaggggacagggcgacgagcagcgttgcctagggctttgcagcagcgtcgtgcgtgtgcgcttggtgttcttcacgaatgaacagagaagatgagggagagaggagatgaacagtggccaacctgacgtgtggggtccaccagcaagtgtaacagagagagatgagagaggaaggtggaggcggctgggccaaatggtcgagaggccgagcggggtgaaaaaaatgatttctttttttttcaaattcctttttcttt

SEQ ID NO: 131801 - DNA, 535 bp, Zea Mays
gttggatttgcagagggggcgatatcgtgacggtgatagatgatgatggaagaggtggatgacgtcggtcatttgagcaaaaaaaatagaagtctaggtagagcgagagaagataacataattcgttgtatcgctgttgggccgttaaacattgttgtggttgttgggccttggcttgacttggagtatatagtgtcaaaaattgtactcgatccggcatcaaataacagaaaaaattttccctcgcttcttcttccttttgtctgagaatcatatttctctctctacctatcggttcttcttagatgatcgccggaatctcaacgtcggtcgtcacatattcatattcatattcgaattaaaacatggtagatagtggtacctgaatttgtattcgtgcgagttcagtccaaatcatctcatattacccacatgcaaacacgaggaaacacctctgtgttgtcatgctcatgccgaagctaagtgtctttgccgacaagacgacgccggtcaatagattaagggagtagtgttg

SEQ ID NO: 131802 - DNA, 530 bp, Zea Mays
gccgagttattattgtcaacatttacgcttctgaagtagcgtccaaatgatgacgaagccacatcagcgttggaatgactgatgatcacgtcggcgcttttagaggtaacagccgagtgacttatgacgacgtcggcgttttagagataactgccgagtgactgaagacgacgtcggcgttttagagataactgccgagtgactgaagacgacgtcggtgttttagagataactgccgagcgaccgaagacgacatcggcgttttagagataactgccgagtgaatgatggtaacgtcggtgttttagaaataatagccgagttagaacgggctgcgtcggccactttgaaggtaatagccgagtgatgatgtggcacaccggtgctttagaagtaaccgtcgggtgatgactgggcgctttttggaaacggtattcgacccgggaagatcccatatgtactgcgctttcagctgcctctgctttccgtgccctagttcttgctttcctgcctccagatcctctctgtcc

SEQ ID NO: 131803 - DNA, 341 bp, Zea Mays
gacaggttcagattggtagcggctagctggcacggcgacaacggagcctttgtctgcttgagcaatttgcggagacatagttaaattgattagtaaataaaataaaccaagcaagcacgggcacgaagcgaaggaaaaaactacgggcaccagacagacaaaactttcgctatatgtgaagtgtttacataacgtcgtccttgacggtggcttataaaaggagtaaaattattgacgtgtacaaaccctaattagggtcaccaatatatatacaaaatgtggagtgtttacagatgattgtccttgggcaacagacctcaacttcgtttgccaacacggtc

SEQ ID NO: 131804 - DNA, 807 bp, Zea Mays
attagaagacaagtttgaagggttggaattccatcatgtggaaagagaccgcaacgcagcagcagacgcgttgttgaagctaggatccagtcgggcccaggtcccacccggaatcttcgtccaggaagtatcacacccaagtattccctcagatcaggcggaagaatgcaacaccttgagccaactagaatcggaccctaatgactagagagagcctatcatcaggtacataaagaatgaacaagaaccggatgataaggctgcagcagaacgcattgcgagacagtcggcccactacaccctcataggggcgcactgtacagaaggggtgcgacaggagtcctcatgaagtgcattcctcaactacagggaagcagctattggatgaaatccacgccggacaatgtggaatacatacagcatccagaactctggttgggaaagttttcaggtctggtttctattggccaacaacaaagagtgatgccgccgagttagtccaaacttgtgaagcttgccagttcttatcaaagcaacaacatttactggcacagcagctgcagaccatacctgtaacatggccatttatgtgctgggggctggacatgcttggactcttcaagaaagctcagggaggccatacccacgtgctggttgccattgacaagttcaccaaatagatagaatacaagcctattgcttctttaacctcagccaaggcagtggagttcatacaagacataatattcagatttgagataccgaatagcatcataaccgacctgggatctaacttcactagctctg

SEQ ID NO: 131805 - DNA, 432 bp, Zea Mays
aaaactgcatgtctgttgaagcccctactacctcaaaccttttctgagaccatagttgccgaataccaaccccaagtataacaatgtcttacaatgtcagaccctagaaaggttttagaccatcttgtgcattctatggtggatcgttgcttttttgcccaaaacatagtcaaattcatcacaaaactgcatgtctgttgaagcccctactacctcaaaccttttctgagaccatagttgccgaataccaaccccaagtataacaatgtcttacaatgtcagaccctagaaaggtcaaacagtacacaaccccatcagcaaatgggcatcgaatcctagaaaggaagcctgtttgagtggtagtgttatttgttactattaggccgtccagcagctcctctatctcatcccctatctcaaacttcactctgc

SEQ ID NO: 131806 - DNA, 338 bp, Zea Mays
gaagacttggattattttgctgcgttagatgtggctgcggcggagtcctcgccgcgagtggaggttggcgaggtggctggtcttcctagtgcgaggaccaagtgtcagcgacgaagggtggtgtcgaagcatagtgtgggcgagttttcgtggagtggtaggcgccgtcagatggggaaggagcgggacagtctttgagtagaatattttggtaaacgagagctattgtcttcgccgattgggacgagcattggtgaggggatctgcggaatctttttgagggtgaggaattgaaaataatgttgttcaattataaggaggcgggcatcatcccgaag

SEQ ID NO: 131807 - DNA, 440 bp, Zea Mays
ttgactttacaccggggtccttagggttttgaataacgaggaataggcctgcgcactatttactttagtcgctgacatttacaccgaagccctccaagttctatttcttcgcacgccgaggtccccgacagcgcaccgcacagggagccaagctccggcgagctagactggccggagggagcaaagaccagtgctcccgagtgtctgacactgaattgaacccttcccgagcatttcccctaacttaatttcagaaatggctaactggttaactctggccacgacgaccgcgagcggagcagagggttgaatatgttcccggcgattaagggggactcagttcaattgggttggttgaggagcatcaggggagtatactaatactgaaacaaggtaacagagggcgtgaacaaacctgggagtggctgaccgcggcgagg

SEQ ID NO: 131808 - DNA, 399 bp, Zea Mays
tccgatattttatgctgagtaattgcgcggccgatagagatttggttgacaatgtccagtggcatatcagaccagtttgtgtagccccattagatggcgcctgctcattgagttgttagttgaccaaagtgtctatgcagtgctcgtccctgagatggcgcctagctgccccgtgcatgctctccggtgatattgtgagaaccttggcagtattcaataatggcagcaggaggggcggctgggcataattaggccatgtgtcaagagacctgtggacagccgcagatcaagacgacggaggccagagggaaaaaaaaaggttctctttctactactttccagcggccgtaccggtaccggtgaccgaatcattttagtacgtacgtagtagtagtgctg

SEQ ID NO: 131809 - DNA, 385 bp, Zea Mays
gcgcatatcgatcaccgggacctaaaaactcggcttctccctctcgcgcctcgggggtcgagctccagctccagctccagctcccgcggccgcggtgaggaacggagcaccagaaggcgatgcccttttggtggccgaggaggaggtccaggccgagctccaagcgcaaggacgggcccgtgccggcctctgcctcggcttcctgctcgcctcgctactctgtcgtcgttccccccaccgcgtacgcgtccgctagcgcgtcgccgtcggcccagtgggagcgggcgtggacgcgcagcctcgtctccctggcgccgcggggcgcagcagatagggctgccgccgctgccgttactctatgcggcggcggcgggtcaggacccgg

SEQ ID NO: 131810 - DNA, 354 bp, Zea Mays
ataaaagaaaaaaagggcagaccagcgcttgggccatttctgctctccaatcagcccagctatcacatacgcggcccacttatccgctcccgtggtaccatcccttggcattcaccgccaggtgggcaccactccctagggtcgcctagctccggatcgtggatcggcgcttccgtgacggcggccgactgatgggacccacgtcccagtctcggtattccgctcgcccgcgctgtgccattgtcttgtggggtatccgtgccagggtcagctgtcgcaacactgtggatcttccttcccctccccgcacgctaacaacccagagctctcgccgtggaccccgccaacgttaac

SEQ ID NO: 131811 - DNA, 491 bp, Zea Mays
gctgcatctccacgcccaaagcctgctccaccgtagttcgaaaatccaccagcggaaaggcgcccagagcatgcctgatagagggtttcaggccctgacggaactggcttgccttttccaattcgttgtaggccacatgaggaacaaagcgaaccatcttgttaaagcccacttcatattatgtaatcgactttttctcctgcttgtacgattgcaagtctatcttcatcttctctaggaaagtgattgggtaaaatctcctttcaaattgcctaataaaaatgtcccaggtcaggtatcccggtgaagacgagtgagctgcctgcacgcctctccaccaaatttgagcctcctccttcaacatctgcgtgccaaagcgaacatgatccctaaacactatctcaaagacatccatcttatcttccacataaatcagccaatctgccgcctcaactggagtaccactaccatcaaaagtgtccaacttcaag

SEQ ID NO: 131812 - DNA, 566 bp, Zea Mays
cccttgcactgcatgtgggtttctctctcaaactcaagagcctgcagtaaacttggctttccgatccctgaccgagctagaccgtgctctgtttctgtttctgtttctgtttctgtttcttcttctctggaactgcacggagaacagggttcgatgtggacgagacttcactggacggccacgctgacatcgaaggcatggacgcttcagccgcgcatgtggcgaacctgctgtcctccgagccatctgatggtacgtaccgtacgtactagctaactctgaacaggattgcaatagaacaactaactgttaacgctgactgactgacgagaaaatattgcaatgcaatgccagtgagccttgggataggagggttcagcatgggcgctgccgctgcgctccactccgccgcgtgctacgctcacggcagattcaccaacggtgtcgcctatccgatcaacctcagggtcgtcgtcggtttgagtggctggcttcctagctccaggtatggtataataaataatccggaagagagagagaaaaaaaacaaaatatgcatggttatg

SEQ ID NO: 131813 - DNA, 337 bp, Zea Mays
atgggcctaaacatgtgcacagcccatcctacccctttatcacgcgcagcccatctccttccccctccccttttctttaagttctggcgcttacacgtgggcccactggccagattctgtgtccacgcgcataggcctcggggtcactgatcttgtggggccgcgggcgtcagccttatgattatttggccagggcgcgcgtagcaactttgtggtgggccccttgcgccagaagcgccttcctcctcacgcgcatctgacggggagatatcggcaggttgttgagatcctatgcgagctcctccgccacaacaaatcggacaccgttcgtaactaa

SEQ ID NO: 131814 - DNA, 434 bp, Zea Mays
gattgatggaggtgtaatggatctataatggacgaagtaatgtgcctgtgcgcatgttacgacaattactccatccttccgttttcttgaaactcatggcattatcagctatttcaatcacacaagaagtcacagatcagaatgagcacaaaaaaacatccatgacttctcggttcagttgcaagatagagttttctagtttcaatcctctacgtgcatagagttaggaggacatgactctgaaaccactattccgcattgaagacgtccgctagaattttagggagcgtttatgtgactgcttgctaattatcgtcttcttttaggtgttgttttgtgggacggcagtatgaatatttttctgcatcaaatatggtttgctaattcgaccaatgcataggggcggatctgaaggggagctacgggggctccag

SEQ ID NO: 131815 - DNA, 335 bp, Zea Mays
gtatgcacaccgatttcaatctttcgatgcatatgtattgatatctagactttcttctagcatacctgaacgagacaagaaattaggttcattacttaataggcttgagacagggttccatttcaatcatgtagcagtacttagtaacataccctagaaatcatataaaagggcaggaaccctccagtgttgtagagagcttgagatatagaaaagatagagcttggttgtgaagatcaagcaaggtgtgtaagcatatagtgtacaaccagaagcctacaacttgattcttaatgcaatcgttacatcgtatacaaccatgaataagcatgatc

SEQ ID NO: 131816 - DNA, 816 bp, Zea Mays
tgccaggctcaggccctcccatatataacagattctctaacaccccccgcagtggcagcggacgttgacactggaccgaaattcacagaacaccgatgacggaagtcctttggtgaagatgtcagcaaactggtatgtcgttggaacatggagaactcggacatcaccaagagcaacatgctcgcggacaaagtgaaggtcaatctcaatgtgcttggtacgctggtgctggattggattagaagacatgtagactgcgctaatgttgtcgcaatacaccagggtggtcttgggcaggggggagtgcaactcagtcaagagctaacgaatgcaggcagcctcagcgactgcattggcgaaatcgcgatattcagcttctgcactcgagcgggaaataatgttttgccgcttagaggaccaggagactagattgtccccaaggaagactgcatatccagacgtagatctatgagtaactggacagccagcccaatctgcatctgagtagaccaccagttcaaactgagaagggcgcacaagaagaaccaagtccaatgtgccacgaatgtagcgcagaatacgcttgagggcagtaaggtgagcctctcttggatcgtgcatgtgaaggcaaatctgctgaactacatataaaatatcaggacgtgtgaatgtcagatactgaagagcacctgcaaagactgtgaaaatctgtagcgtctgaaactagatcaccatcggctgaaagcttgggatttatatcaacaggagtagtgcatggtttgcattcactcatgccaacttgctcaaggatctcaa

SEQ ID NO: 131817 - DNA, 645 bp, Zea Mays
ggatcaggtttccgaggctccaacacacgacgtttgtgtggctcctcggcggcgatggtcctccgacgacgaatccctcatgcactagtcaccaatctcacttgtcaaagccatgagaatgctccacaccactcggtgctactccttgacgcgtccttgaggtctcgacgccggcagcactacgtttcagtggcggatctctacgcgacaacacctggcgactccttctccctctctcgaccctctcgctctcgtcgtgcgtgaagccgtaggtgcgagacgaccctagtgatgaggtgcatgcatatatatggctgacccgaggtggatgtcagttgtacagcggttgcaacgtcctgtgggattctcgtgatccgttcggcccgagctgatctcagttgggagacgcttctggagcgtaggtcccgtctgtcagcgagacgctcttaatgcggtgtggcgaaggaccacatgtcaattgttgaaggaagatgtggtgttcgcgggtaagagagtgggactgccctacgtggcccacttgctagcgcgtgatgcctagctgggctggtgcgagagtggggtatgggccgatagtgcttgttttgggcccagataatgcttatttcatgtttcttttcttttttt

SEQ ID NO: 131818 - DNA, 482 bp, Zea Mays
accttgttgactgaaacatgatggagtgggtccagctggcttgttgaagcttggtcccttgggtggaaacccaaaggatcgaattctctggtgcctgtcctgctgctgagctcggaggacctggaactttctcttgaggtgacccttttcttcttcccttgccctttccacttgtatggccttgtttcagaggtgcgagaagctgaggaaatcttggctagcaaggatagtcttgagttctggtcttagccctttcaagaaacgggccatcttcttggcttctgtgctgacatcgtcaggtgcataacgagccaattctgtgaatttgtgcacatactcactgacagatcttccaccttgagttaattcccgaaattcatcttccttgagctgaacgatcccttggggcacatgatgttctcggaaggcggtttcaaattctgcccaggtagcatctctgatagcaacgctgaaggtatccc

SEQ ID NO: 131819 - DNA, 562 bp, Zea Mays
agggaggccaggcatgtcttcgacatcaccaggagacacatagaaccaaaaatcccaccagttgccccacttattcttggcacaagggactatctccatgacttccgtcgaagtctttctagtcctcgacatgaaggtgcacgatccaaattgtgcaatcttgttccctattttccttttctaccaatgcaggcaataattcttagcgaaggcctccacagacggctgcccgccgtaggaagtaaccgctcaaacatacttcgccagcgcaaccacgatgttaggcatcaactggtggacctgcacttcgagccttcgcaccacctccaccatgaagcgatatgccaagaggcgaaggccggcgacaaaaaaggcctcaaaaacaaccaactcgccttcaggctcggggatctcctctgcatccgaaactagcccgacaccatcaccaaagtacccaagctgttgcatttttagcacacggaccgaggaaatcctcgaagtgtcgaacttcacggtatggccaggctgcaactccatcaccgccaaatcgctcaaagtttcc

SEQ ID NO: 131820 - DNA, 437 bp, Zea Mays
aatacccatcctgattatagctttgggagtaatttgatgaagaaagatctcaaacgtcttcaaaacttcaaccaaaaatttgctcaacgggaaccgaaggcctgccttcatgaagcttctgtaaacaacaacttaattttcctcaggtgcaggggcggcactgtctcccccaactctcacaatagacgtcacgaaaatatcttcccttcatgtcttcaagttgactctatttgatggacgactttccgaagatggtatggcttagctgccagggctgatcttcagcatcttcattttcgctttccacatcgaagtcatcgctatcactagaatcctcagacaacccagctaatatttcattcgtaatcttttccgtgtttgtcttttccattgcttcgtaaaacccagctagggcagggtccacaatcttcttctcc

SEQ ID NO: 131821 - DNA, 306 bp, Zea Mays
ctttaccaaaataactatttaactgttgctcaaataatagtttgtagactgtccacttccataaatttcaaatgccatgttatatccgtccttgtacctttttcttatcatgcggagttctgttctaatagcaatgtgccttatcatctgtatgattctggttcataatatcaattcggaattaatggttttatggttggctgatctgcaaattcaaatatcaccaatgacaaggtagactggccaaaaagtgtttctatttcccagaaatatttgaaagttgcccctttctgtacgttgttggag

SEQ ID NO: 131822 - DNA, 329 bp, Zea Mays
tagagcgaggacaacgaatgtaagtctgagtgacaggtggtttggaagagtaagactgaggtggtgtggaagtggaaggtggtgtgatgggaataagaacatctgggggtagaaacagtagatgatggtggtacagatgaagtttcaaaaatgggaagaaggctcatgaaggaggtagactctgtggaataaaaataagaatgagtggaagagttgtaaaaaaagggtcggttttcattaaagctcacatctcgagatatacacatgcgacgagaagatggaccataacaccgataacctttatgttcagggctgtatccaagaaaaac

SEQ ID NO: 131823 - DNA, 756 bp, Zea Mays
gttaagtggtgatgtacggatccacctcaatgaggacgtaggttgttggcaaggaaacgaacttcacagaaaaatcctttgtgtcggttgcacttgcgtggctcactgtctcaacacttgcacctatatatcataccttgtacatactcgtgtggttgcttgcatagttgtagcttagctttcatgttagtaaccttgtttagattgctcctagcttgtttagttggtagcatagttctagtgagtagtgcaggttaggtactccctttgctggctcactagttgctaggtggttgttctaatttgcttgcttggttgagtgtttgaatacttgttcttgcaactagacttgtgttgggagatttctttgttttggttagggtaggcaaactagtggctattaggataatcttttctactaatgccttgtctagtgttttgagcttgtagaacattttattaggctattctcccccccccctctatctgtctgtacaccctttcagataagagcaagcaagaactgctagagttaattaacaaggaaagaagtttcagtcactactacacgaaaggttttgtgagatactatgcttagattaatggagacattcataataggttgtcgcctccactaatcatcgccatacctcactacctatcgcttgatgagaggtccatgtgtggttttggaaaattgagacaactaagtggagtaacctctaccatagtgttgcatttgagataggttaagcc

SEQ ID NO: 131824 - DNA, 349 bp, Zea Mays
tatcagtctggggttcatccatgaattatgtcagattttagcatcctctcttggaatgttagggggctaaatcagcaggcacgccgcgatgcggtgcgtgaattgatctctgccacgacctgccaccttgtctgtttgcaagagactaaattattaacaatcgataggttcacagcagatgctctaggagggccaaaactcaacaatttcagattcaagcctgctgaatgaaatagtggaacccagggaggtatccttttgctttgggatagtgacgtcttagacctgtctaatgtaactgttggggagttccacttatctgcaagtgtgacacttaaggatcgccgag

SEQ ID NO: 131825 - DNA, 459 bp, Zea Mays
ggaatatatatgaagggcttggacgcactcacgcacatgcacctggtagaactatgtatctttgcataaagaacggaaaatcaaggtctgtctgatacatgcttcacctctgcagtagactaggcaaaggtttgctacaaatatacacgactataaaaggggaaaacttagaatgggtaggacctgaccacactctaataaacaaagcaatttcgatgaggacatcaccgcactataaaagaggagagattaaaagaaagatacatttctatgcgaaccccaatgatataaatattgtcacacggtctacagagaaataatttagaatcacctattttatatctattattgatcaaagcaatttatttacttacagagagattcaaacagtacaaaggctattagaatgtttttggattcttatttacttgtgaagtattgtagttaatagataatgag

SEQ ID NO: 131826 - DNA, 391 bp, Zea Mays
gttctggtcattcctctgagtattgctcctctggggtgtctgctggttgcgccttgggcagttgttggcatagtggccaagctcaccgcacttgaaacagccattgggttggactggtgcgttgcttctggcctgcgcgttactggcgccaccttgacgattctgggaacttccaccagacctctggttggtctgagagttactcctttgttggttctgactctgattatttctctggctttgctatccagagcgttgcacttgataattgtttccgccttgatttccagagtggaactgcgaaccttgagcattgttcgggcgggtgttcctgcttgactgaccttggaacttccttttatggtcagataattcctttcttttgctttca

SEQ ID NO: 131827 - DNA, 516 bp, Zea Mays
gctttaaagaaattgatatgatccagaaccgtccgatctcgatctacgctctggatttaataaggctgagatcacatcttgaccgctggctaccaatccaacggccatggtccccactccgaagcggtacctataatttaatcctggtcgttcatcaagtagccaacggccaacggagcttctccccacccaacgacgcccaggcggtggtgccctgctccaacgacggagcatcaccagagcagtgcccctcctacgaatcagcacacaaccccgaccatccctaggtgaaaaataaatatcctgcatcggcgattacagtgggatgcatcataccgactatgaggtggtggtgggatcagtccatgacagacagcgacagcagtggcatctcgactccgatgagggattcgtgatggctcaactaatcttcggctccctcgactccgcgcctaggattacctcggacccggtgatgtcccacagccctactccgaccacggactggcagcacgg

SEQ ID NO: 131828 - DNA, 508 bp, Zea Mays
gttccactgcataaaaagattgtttagtgacaaaattatgaaggtaaggaataacgaggacacagtttaaaagtaaaaatgtgtaccgatacgttgttcaagctctgcagcctcttcgactttcttagcctcttccttagctcgatgagcctgagaaagacgtgaaaataaattgagcacaaacaataagtagcaaatacgaaaagtaggaatttattatcccgaatgacctcttcttcataatgtctgatagcttcatctgctatctcacttccacctttaagccaaactttacaataaaattttcctcccagagaagtagcttcagcatagggttctttcacatcttcagtcgaaactgcaaaatccagttagattacaaccttcacatgttcgcagccatcattctcaagcagtgacactgctccgcgggctcctacacaggcgcagaaatcacctcgacgagagaagacttcgtcaaaagcctcgacttcgccctctattcatc

SEQ ID NO: 131829 - DNA, 398 bp, Zea Mays
agccgcccttctccttcacctgcccagcgccgttactccttccctagcttataaaagccacgccgcggccacgaacccctccctttccccagctgctcgtccatgctctctcgccctgcttctcgcacagctcccatgccagcgcgctgctgctgctcttcgttgtgttgcgcagcacctcaccggagctccgcccttcaccatcggtgccgagctcagctcttgtcgcctgcgtacagttcgccagctcaccagtgcctcactaacgtcgcctttagacccagctcactgtgcctccctgtcgtgcccatcgccgtcgttgcccgcgccggagactcttgtgttgccgccgtactcgtgccgagcgtcatcgctgcgctcaccatcgtcgtcaccag

SEQ ID NO: 131830 - DNA, 561 bp, Zea Mays
ttgctttctctaaaagctgggtgatcctattttaaaaaaatcttgctaacaagcctaaaatgacttatgcatgaaaacaggggtaagggtaagacttaaaacaatgatagcctaaaggcaaatcattcaaccctaccaaacaacccatcaacaccttccacactgaagtagcgaagcaattgttctctacaattatatataaatgcaagcagagaaaaaagtagcaaaacaattgttctctacagtaacgtataagacatttgtcaataaatcaggctatttttcatctccttaacatgcttagcaactaccctcattatcagcacacccaatacttgtagaaatatattccaaggcacctatatggtgaattttctaagatctaagataaaagaataggcttgactctaattaataggatgaaagattttctacataaattttaaggcaattaatgtatggatatgagagggcagattgacagaacaagcaaaaaaaacttattccagtgcccgtaatattccagtgcaaagaaaatatcctctgaaatgtagaaacagc

SEQ ID NO: 131831 - DNA, 570 bp, Zea Mays
tgggtatgtatatccactttattgtgtatggtaaaagatgtctttaaagcatagagaggtttgggtaagaaggagtgcggtaaggaaagactccatccaagatttttggatcttgattcatctgatgatctagcttgatatttgaaggcttgagttggggctgaagaccagatttggcttgactcttatccttccttacgaggctgatcctttcttcctcgagctttggtgtcttcatccgggtttgtgacaagatgggtagagggttcaatagctatatgctagatggaattagttgtgtaacctgttttgtaggtcaagttgttgggtagggtcgagttgatctaagatctcaaacttgtttataggagcagggtctaatgtattccactaggattgactattctgttaggtaactcattttagattggatcatagtagattagatggagtctagagtagatcgatatcaccagattagactaaacaatatctaattactttggattaaatcatggttgttacactactatggggtaaatatgcttattagggcaagatgaatccata

SEQ ID NO: 131832 - DNA, 412 bp, Zea Mays
acgccggcttgtagcaactagcaactcgtggagttctccggccagctactgtggctggcgactggcaaggctgcgactgcgagcaagatgccactgtgctgcggcatggtggtccgttcacggtggcgcaggcaggcaggcaagcaagggcaatcatcgttttcccggttcacggaggagcagggtttaccataccagggctgtctgttgacactgtgctcgcaaagccacaactggccggaccgtggtccacccgtacgtccccggctcctcgcccgtggtggggatgtgctactgctgtggctgtgataactgataagacgacgcaacgcaatgcaagaaggtagaaccgtagaagtaggactgaccaagtctcctctattggatgaggccgctgatcatagtaccaacg

SEQ ID NO: 131833 - DNA, 637 bp, Zea Mays
cttttgatctcaaccgagatcccaagcaacaagtaccctgaactacgaaagatggttatgaagcatatgatgcatggcccatgtgggtcgctaaaccctaactacccatgcactaagggtcgtaaatcgtgcaagaatcattaccctcggcctttcagtgacacaaccttggaagggaaggattcgtaccctatttacaaacgtcgtgatgatgaccataaagaaaaggtctgagggtgcgaactggacaatagatgggttgtctcttataacccatacctccttcgtctcttcaactatcacatcaatgtcgaggcatgtgggagcatcaaggctgttaaatacctgttcaagtacatatataaaggccatgatcgtgtgtctgttgttatgagagatgcgagcaaggcagatgatgatgttgatgagatcaagcagtatagagatgcaaggtgcgtgactcctccagaagccatgtggaggatatacgactttgagcttagtcaaatatctccacctgtgatgcagctgcaactccatcttccaaacatgcacatggtggtgtttcacgagcggcaaatggtcgagcgagtcatcaaccatccaggtgttgataggtcgatgctcacaacatatt

SEQ ID NO: 131834 - DNA, 350 bp, Zea Mays
cttgaaagtaaagacgatgggtagtgatgtgagagaggccatctcggagacctacctacgcgtggaaaaggcctaatggtatatatagagttatccaatcaggagcttggctcttacgagaacatccttataaggggccaacaagaactatggtgaagcatgggcttctcgatgccttagtaaaaataccagagtcattgatgaagtttgtatctctatctcaattaagtttgcccactttatttattgcttacctagcttgtgtaattactttcctagcagcgctcatcattcaatctgatgcttccaaaaaagttgtaaggactagttttggggttaaggctatttat

SEQ ID NO: 131835 - DNA, 406 bp, Zea Mays
agcctccgatccgtatagaaggcggaaaggggtgaacccagtcgccctgcactcagttgtgttcagagcccagaccacgtcgggtaaccggtcgggccacttgccttttttgtcgtcgaggagcattttcttgacggctgtgaaaattttgccgttggcacgctccatgactccgttggattgggggtggtacacggaggcgaaggcaagcttggtgccgatggagaagcagaaatctttgaagtcttggttgtcgaactgcttgccgttgtcgaccgtgagttcagacgggactccgaagcggcaaacaatattttgccaaaagaatttctgtgttgtctttgatgttatagtggatactgccctcgcttcaatccatttggtgaagtattcgacggcgacgaag

SEQ ID NO: 131836 - DNA, 328 bp, Zea Mays
atcttccttttccgcgctcgcacctactgactggtgggccccccgttgcagctgctcattctgctgtgtgtgggtcgtggttcctcctcaccaaccggtgggacccgtgctctagtctccctccctttctgttccgcgcatgcacatgagcatgatgtcgcggccagtggaccccgcgccgaagactcacctcctaccccgtaacaatccccaacgaagcagcggagctctcggcgggtcccctcgatccgaaaccagtgccgaaggtctcgggctacacccgccgccctcgtggctcttactgggagcatataaactagcccctgcg

SEQ ID NO: 131837 - DNA, 437 bp, Zea Mays
aacgaacatgccctttgaaggttcacaggattcaaatccagcgaaccatgaacactggacgtttgcaggagcttattagcagcacaagttctattggagtatagatggccaataagcacgagccccacgagtctgacacgaagccgctgtttggacccgatccgagcctggtatggccggttctatgcgggtccggagcatggtggtatggccggttctatgcatatatctgtttacactttcataactctgaagatctattaaaaaactatagactgggaaaacatggaaaatggtaaaaagaagaagaccatgtcggcagatgataaatcttgcaaaagccatggtatctggttgtggcttcctgcactagcgatatcgattatgcccatctagaagctttctgcagcttatcttgccatcatcaaactccccca

SEQ ID NO: 131838 - DNA, 356 bp, Zea Mays
tagcactggggctgcgcaaggcaaggtactcggtctgatgtagcctttctctaacaactcatcaatctacttcttgagttccaccaactctggtccggacactcgataggctctcttcgatataggggcggtgcctggaataagctctatggcaaattcaaccttcctttcaggtggcatacctggtaactcctcgggaaacacatctgggaaatctgatactacactgatagcctctgatggtttaatctcctcaatatgagcggtgacttggtgacaactccctttccttgatccacacaagaccaattccactaacacttcttctcctgatagggacactaacttcattgttc

SEQ ID NO: 131839 - DNA, 342 bp, Zea Mays
atttccattttctatttctatttcttttatctcctttcctcttgaacaattaattaactagataatcttaggtgctaaaaaatataatctatgtgaggtgcttttaatcaaacaaggtgtatgcatatgatgagaagacctatggggtggagtttagggagagataaataggggggaattagggttccaaacctcgggttgaatttttttgggatgttacaaacctaccccacttaaaggaatcttgccctcgagatttagacggggttcgagaaaaggtaagagtattccctcctcaaagagtcctcgctttcccaggtagcttcctcttctccttctctg

SEQ ID NO: 131840 - DNA, 390 bp, Zea Mays
tgcagggggacccgacaccttggtcaaggggcgagcagagccgtggcccatcttggggagcagcggccttatccccgtgcagctcaaccccaatgagtggggtgggcagccgctcctgttctggagccgcgccacctcggattcggaacccctcctctccctcaatgatgagctggaggagaggtcccgggataatttccgtgagtataccgaggcggcgatgaggtcgcttcggtcgaccatggagatcctttctagggacgttcccagggtcttccaggtaaggatttagatgtataccttgcgtgaccagggcattctttgtaatatcctgttttccttccttaggaacttgcagacatgagcatcgccaagtcgctgttcatccac

SEQ ID NO: 131841 - DNA, 349 bp, Zea Mays
gttcaataaggtacgacgctagtgcatggagaccacgtaacaaggaagcacagtgcggtagaatttgggcgcgggcgacaccgcgacaggagcacacacgccacggtgcacgccggtgagatattctcgccccttccccggcctaatccgcaagatgatgaatcagctcaaagttatcccgccctggccatctctatctccacttcgtttggacgcatccggattccacagcgacgcggatcttttcttcagatatttcccaacgcctctaatctttttcatttaactgaaccgactctatttagccccccttttctcccgattctttttaaggataggttaatctctg

SEQ ID NO: 131842 - DNA, 1104 bp, Zea Mays
cgtacatcgcacaactcatgtgtaccaagttataaaggaaatatttacccctagttctgtcttagcagtattttcccttccaatttcaacttacatgcattatttttcttctaacaccatgtggttccctactcttgttcctatccgaattgagtttgtaggctggtggcttagtttggtgcccctttaccgctaagagggattcatgatgcaggaagccagatctggagaaaaggtgctttcttccttgggtggtctggagtacctgcagtctcttagcctgatcttgtacactaagcctgcatacttcaccactatacaacaagtgccctagtaccttgaactacacaccttgggtcccagacctctttctagcttaaaggtcggcttcctaaactctacccatcgagtctggttacttgtgacttagtttgggacccctttacagctgaaaaggggttcagaccactgggagccaactccggagaaaaggcgcatgtttcctagggtggctcagagtacctgcatccgcttaacctggtcccgtactctaagcttgcatacttcaccactctgcaacaagtggcctagtacctagaactgcacccctagatgcccagacctcattctagcttaaggattggcttcccaagctttgcacagcaagcccgctgcatgcctcaatggatcaattgcaccagactgtgggccccatgtgtgcgctactaaacatcaaatcttgagtcgtgtgtaggactaatcccatggtttggtggtagatagcctcaatggtgttgatggaagaaaactaggaagtccatttttatccctgccacggtggaatgagctttatgcgcatgaccgggtgtaccaccaggtgtgagggttgcatgtcagtgagccattggatgcactgctatgtgccaatccgaatcaaattgcttgaaacaagatcgtggttgtggccccaccagcgggttcgtaacctctcccgaggtgagaccgggggccactgtcagtaccctgaaattggggtaccctctcctactatgccaaaggcagatacccacatggctacatgtaaccacatactaaggaactgag

SEQ ID NO: 131843 - DNA, 503 bp, Zea Mays
gttctaccgtggcattcactggttgtggagctacgactgtcacaagtgagctactacggttagcagcgacgtggtaaaagggtcccagcgtggcgcgatcacggcgaactatgtatacctcgacgacggtcgctcggccacgtcgccggcgcaagtggatgggcgacagagcggccacaatgctccgaactcattcgcggggaagatctttttactgccaaacccaatccactgacccgaggcacgaatcgtggaggtcggcgcaaatccaggcgcggggtcaccggtggcaagatatgttgcatctgttgatctttgttaggcactgtaccatcgagatcccattcagagtgcctgacagagccaaatgaagcgccttattctctaatttctgtgtgataacatgatctttggcctgtagagaaattgttgccctacaatccctctctaactttgttatagtatccacaatcaaatagtcacaggatcctactcaaaatcga

SEQ ID NO: 131844 - DNA, 357 bp, Zea Mays
gaccgctccaactgcgtacaagcattggctctactcggtgtggggcttggttgtatgtcttggttttctcacgttttggctggggatggcggttggccatgcccatgcttttcccgtccgggtcgcggcgcgtccttcgctcgcgtcttgttggctggttcggcatggtctcttctgtctccgtctttcgtctttgccagaagttccctcggatccctttgcttgcagttttgctgctctgttcccggggcgataaagctgagggagcgccagcggtcgctagttttctgtgacgatggcctctagccctacggggcagggaacgatggcctctagccggctagccctacgggcagg

SEQ ID NO: 131845 - DNA, 809 bp, Zea Mays
tcccaagtaaatcaaacttatgtttaattttttcaatctcatccaatctatgattaacgggattaaccgaacaagatctaaatatttcgaggccggacgaggattgtttcaggatcagggcggagacggagagcactccctcgggcccgacctcgccatgcccggttgccatccttaggatagatgcccttgaaatagacaagatattaaaataacacagacgaaacgcatgaagctatccatctacacagatcaacccgagtatccgattaaaatcaaggttgtgccgccctctaccccgaaacagatgagaagaaaatctcaatcgcgactacaagtttaacgaaatcaaaactgacaatcatggatggtgaatcagtaggaaaaaacatgggactatcaaatttaaaggtgaatttgatttaaaccatgggaatcgccgaaaacttttgtagaaaataacattaagggttgtagtgtggtatcaactaatgtcgatctcgcaagctgaagaagaaaacaaaactgtgggggtttgattactaggataccacgcatcagaaaagtacacaaggaactgagtgtttgtgctcggcggaggcgagcgacagccgaaaagatcttcccagccacggcaatggcggctggaggcagtgggaattggggctgcacctccttctcagccgggacaatgaagggtaggggatcgaaggggaggggaggtagctgccaactagggttaaaaacaggtcaggtcagtttgtgggcgcgtctgagtccgcgtgtaacccgtgaaccgtggctcaccc

SEQ ID NO: 131846 - DNA, 580 bp, Zea Mays
tttttggttgaacattacaaaaatagtgtgcaagaacatggattcaatgtttatttaaacttcataactgatacagcaaaacaaagaagcatagaatcaatccatgttgatgaattacaggtgggcttgggcggcaacaaaaatgggtaataaatcgattacctaaaaacataccattttggtagtctggtttcccttggaacaacaccttcatagagtgctcatcacctaccatttagtatacaccaaaataaacccatgagcaaggggaaacacacatgattcacatgagcagccgttacgaaagaaaaatatttgaagaaagagtgtgttcatacaaggtgtcaaagtattcgaacttgcagaagtacacattcctcacatggctaaaatacttcatttgcgcgacctgctcttcacaatgtttgtctagtacaaacctatgagactcaaaagttaagtattgatatacctaataagtagaatgttaacataagtacaaatctatgagttagcgttgttgttgcatgataaagacttggtatcttttaaaaaagccttgagttcaagtcctctaagg

SEQ ID NO: 131847 - DNA, 362 bp, Zea Mays
gttttgatacccattgagacggcataatgcttccctgaaagcgacaaagtgactttttcaccccggaagacaccgtgtctctccctcctctgccccgcttttgtgctgcttcatgcggcgcctccctccactccatcattcttatcaggtcattatcagccacgcagccaaagaacgcatggttttgaagccccacgcaagttggcgtgttgttttccttgaccctcctcccccgtcctgccagtgccagctctatgaatcactgtgattgatcggtccgtgtctggcgtcgcgcaggtatggcgaccggcacggcgttgtcacctctgctcaagtcgcgaattgttcggcctcgttttgtg

SEQ ID NO: 131848 - DNA, 664 bp, Zea Mays
gcaagtcattggcatatgggcatttgctcagattaaagaagcaagaaaagcattcagaatagttcatcatcaagacagaagccaaatggttcatacaggaaatggttcatacatcaagccaaagtacaagttagcatgatcaggtgatcaactgcacaaaagaatgctggttaggaagctaccagtcagcactacttcctacttactcaaaagaactaaccagcctcaactcagaacactcttaagtgtagtaatgtttgcccaagaaagtcctcatccagaggactctatgtgagtcagtcatgtgcacaaatgcagtgccatggttcttgtgatccagcagatgtgagtatgcaacaatcaaagattcttcagtgaagccaggcataaacataacagcagcatagaggtcaggatgcacatcttgttgcttggtctccctaattgcttcagccacattgttaacagcagctgtcataccaccaaagacatggacatcatcatcagttagcactgacctcttcctttttttcccagacccacttccagaaccaccactaacaggcacctccttcttgctgccatcttctgcccccttaacattctcatcagacttaaatgatacctagtgctcctgtatgggggtaagaatcctgggcgacat

SEQ ID NO: 131849 - DNA, 1062 bp, Zea Mays
aaatatagcaaacaagtgcatctctttaacattttagtgcggcatggattgtgaagacaaatacatggcacatttctgtgcatttgtgatctgtcaatgcacaagatgcttataatactgactgtagctggctggaaaaggcacggttattttatttgtcaagtcgtgactatttttctatttcattatatagccctactccctagtgtttccaaatagtcactctccatagaggaactcattggataataagtctttattaataaaaggccacttggcatgtctgacccttatcctcagtattccatctattcgatggaacttttcagtgacaaccaagcataagtttaaacaccacagccgttgggcactctatcctaaatgtatctagacatagtgtaaatataagtgcatagcaaaaaaatgctttgtatatataaaatccagagtgtaaatataagtgcatagcaaaaaaatgctttgtatatataaaatccagagtgtcttataactttgaatagatggagtatatatgtatcaagaaaagctaaaacgacctacaattttggagagagtaatacataaccacctccaaaatgtacatggtaataaccggcttagaactgaacttaaagttccaaatatacgaatattgtgaagtttaggagatatttaataaagtggaaatgtatcgttcaaaaatgaggaaaatgataaatgggcaaggaaaagaaggtaactatgtttcctttaactgaaaaattattcagggcacatgccaagttagactcgaactattggctagttccaagttgtagaacatcatgcatatgattcttctccatctcaatagaattcatggttcattgccacattactactggttgggtaatggaatagtattactactaggtgaccttgatgaacatgcaagtgagaatctaattaataattacagtacagggcagtgacagctgacgatgtcgaacagccgttgcaaaatttcctcgcataatcgatcaaataggaaaaaggtttacctacttccttcttctagttaac

SEQ ID NO: 131850 - DNA, 428 bp, Zea Mays
cctatactcgcctaaaccgtcctagcctatattcatggcatgatccaatatcctgcacgatttgatgcgcagtttgcatgtcccaagatttacgtgaacgatccgttacgattacatgcccattgtgttacatttccataaacatgcatcaccccatcgtgcgaccgccccacattcccggatgacgcgtgcgtgactacccactacccgttctgaccactcatgtcgcgtcagatgcgaatttacgcagccaataacggcaaaatacgcaagcataacgcgtgacccacatctccttaccgggtccccccacgtcaccatttatgcatctgtttcattgaaattctgtatgcataaacgccccaccgagtccatgtcgcgtcagatgcgaatttacgcagccaataacagcaaaatacgcaagcata

SEQ ID NO: 131851 - DNA, 429 bp, Zea Mays
gtgcaagcacattctttccctaaaagagagcaaaggcacactgccattcttcggtctataggcttttcatttccaaaatcgtgttctttgaacgtgatcaaagtcttcttcctcatactccactacgttgtcgtctttattagcacgttattatattcaagcaagagcaatggggctaacgacttcagagaattcccaaatctcgctacaccccaccccttcaaactaatgaactaagataccttccactttcactaacagctggttaccaatttttttttggctctggtatggaagaactttggcggtattctgaacaaaatattaccagttcatgacgtatcaatcagatatgtcaagcaagtatggatccgcccagtctcccaattacacatgtttgagccaatcaatttacaaacctagttaatt

SEQ ID NO: 131852 - DNA, 1125 bp, Zea Mays
cgagactcagagcgctgttgctctggacggcgggttcattttctaatttcataaggtctcttatgcaaaaacgacagggcgaaggggtatggagtatctagggccgcccgatcaagtttgggtggtcaagattaggttcccaatccaacgggtatgcgatccgagcggtcggatccccgatccatggcccgatacgaacgttatccgccaccgttggatcaaccatcgatagtcctgattctatgtggtgaaggggtgtctgtgatttctaatccggtgcgcacaatgtggatctgacggccagaggggcttcttccccaacccggtcgagacgaagcagtggcccgcattagcacgatggcgcagctccggtgagcaggcacccaaactgtcccagcacacggacccgagctaggatgaactacgtgcgtagtggactagggcacataacagaaaggaatttttttaccgtggaccttgtagcgtgatggcccagccactgagaagcgcggcccatcgacgaagttggattctggtgaagaattcgtctgccaccgaggtttccacccttcatcccaatgctacagtttcactccacgcgtcatggtgaagctccatggccatggcttggccttcgagcgatggcatcggtggaaaacaccgttgacaacagatctccctcgctctctgccatatctcttggcgacaaactagctgtgatggatctctggaacgcctgcttcggcagtggcgtggacagacgaataatggccaaggtgtgatgccagcacgcatatatataccaagacgactagccagaggatcctgtgattacggagatcctaacaaacttggcagcgggtctagatcctgctacggtagtggcttacaacagactcagaaagcagagggctcctggctcggcggtcccatgcggtgatgacctgacgataccagacgcgtggagataatggggctgctgttggtaatttgcatgctgaccacgacaagaggaataaagaaaaagaaaaaaaaataacacatgggctatgcggtttgcctctcaagggagtggactgattggtttattttttttactattcctatccctatcgcttttctatt

SEQ ID NO: 131853 - DNA, 519 bp, Zea Mays
tatattgttgctgtaatgtttgttttgttccttttgtgccaacgtgtagcagcatcacacaaatccgtgtaaactagttgacaccagtcaatatcagccattcgggtcatgtttgaagtcattagtacctcattgtttgtaatgccccatgaagcagatggaaaaagaagtcgattgaatagaatcagaaaaaaagcatatgattgataactcattatcatttccaagcactatctttttcctgaagcttgacaacatcaaattcttctttaccaactttgagatcatgtctgagttttgtagcagcatccacttcaccgtaccaatcagtaaactccctgcccccccagcacatggcaaacccaaaatgagacgaactgtctcttttgttatcttcagttccttgccagcccctgggcgtatggtcatgtcatgtggatccaatttatccatcaaccacctgatgagagatctgctctctaaggcatcagttcgcaaatcaaatatactggaaaatcc

SEQ ID NO: 131854 - DNA, 793 bp, Zea Mays
ggacaggagaccgcacacgatcacacacggtcactgaaatgacagaagaggtgagcacgtattagtcacatagtcataagcatatgaaatgtgaataaatacatacacaaagagacatggcacgggacgggacgatcaagaaatcaaacgacgtgaaaacggcgtttgacagacaaatagagacataggatgattggaatccgaattgaggcatgaaacgatatgggattgagccgatacttcacgaatgggtttatataggtcaatatgagtgaagtgtgtgcttggtttgaatttaggcgaagaaataggttttggggcactcggctcggaaacgattgcgtaaatcgggaattttggtgaaatttaagcctgggatctcggattggcgtgaaatttggcaagtaggttactggaagtgtggtgaaggtgcctgaaaaatttgggttcaattggagcaagtttggctggtttggccatttcaccgagcacgtggtgtgcggggatctagggtttgagagaaatggccatttgaggtgggaatgccctcccgaaggagctaaaaacaggcagggatacacactagaggtatttgaactcatttcaccaactggattcatcggatttcacagaaattagaagatttgcaaaaagggtggtgttcactccctcactgacagagaaaagtgagagagagaggaaggacagagggctgctcaccgagggggagcagaaggggtgcgcaggtcgccggagatggaggccgccggagatggaggccgccggagagaag

SEQ ID NO: 131855 - DNA, 321 bp, Zea Mays
gtatattccctagacacgccagtaggaaccaccaggatgctagatcgcctaccacagcaatagcgcaactgtcgtggttttcccttgccccacggttcagacgagaggtggaagatgacttgggaaccgtagatcttgcaatatacggtcgagattaaatcgtggcgataccccttcgccccattaaataacggccgtggatttccgatcctatggtaatcatcgtgtaccggttcaggcgaggaaaagatttaatctgagcccttgctttctgatcggacgactctaaccacccgataccccttcggcgcactagttttg

SEQ ID NO: 131856 - DNA, 511 bp, Zea Mays
gtggccttacattacatgtcaagatgtgttgagcggtgcggagcctcggcctccgacagatgggtgggatcactcgctttcataacggctgtgacctgaagaagtagagaggacaacaagagctaaagcaatggctcaccagatctacttagacttgctgctgctgcttgtctaagccgccgacaggaacacttcttcgtcttttttttccccttccttacaagaacaacagcaaccgtgtgaaccaggtgtggttcaaaccctgtctcgtatagattctgttttgggttctcccattggcagctatagatcggccttctctgcatctttgcgcctcgttttgtattgcttcgatagatcgtttgatcatctgaaaagaaaaattttggaattagggttacagcaggcgtgcacgctgcaccacaatgggggtctcattattcgttaagcagaacctggaaccgtgttgctgccttttgagcaggcacggagaagcatcatctcagctggg

SEQ ID NO: 131857 - DNA, 551 bp, Zea Mays
gtggtggcctccccgacgatcatcggacgtgtatagcactggtgattgcaatgtggtaattgctgaggcaagtggcattcggtcgacgggcagccaactccggtgacttatccggactggtcgcaaaacataaaggagcacggtggctagctggattagtgcccatagcccaacagcggtgacgatctttttaacccgcggcgttatccgggcttaagtgggcacgaatcacctcatcgacgcgaatctacgcgcgaggtcgccggcggcgagggggatctgcttctgttgatattttggtactgtaccattggaagcttttttcagttagcctgacagccgaggtttagggtaggttttctccaaattttccatggcaacatcatcatccttctgcaccaaagttgtagacctatagatcatcttcatctttgttatagcagtcctagtcgaattcccactggatttagctcaaatccgatctcaagttcgtccaataatactggcgaccacttctgctatcagattcagattcagttgttcaataccag

SEQ ID NO: 131858 - DNA, 558 bp, Zea Mays
taacaatggagctatgcagcagtctatcttagaggctattcacagttcggctgttgggggccactctggtttcccagttacttatcacaagttgaaacagctgttcgcttggcctggcatgaggaagatgaccaaacactttgtagcatcgtgtgccatatgccagcagtccaaatcagacagaacaaagtatcctgggctcttacaacccctacccattccagctggtgcttggcaaacaattactatggactttgtggaagggctaccgatgtctggagggaaaaactgcgtcatggtggtagtagataagttttcaaagttcagtcacttcgttgcccttagacatccgttcactgcattgctggttgctaaagaatttatgcaacatgtttacaaactacatgggatgcctctggtcatagtatcagaccgaggtagggtgttcaccagtcaattatggaaatgtctgtttcagttggctggagtgcaactgcatatgagctcttcttaccacccacagtccgacggacaagcggagcgcgtgaatcagtgtat

SEQ ID NO: 131859 - DNA, 355 bp, Zea Mays
aaactggccgagcacaaattgaaggtctacccctaggcgaggccgatccgacaaaaattacgttgcttcacgcccggcaagagagaagccattcgtgctgagctggctcgcttggtcgcggccggattcattagagaggtgttacatcctgagtggttagctaatcctgttcttgtactcaaaaagaataaagtggattggcgcatgtgcgtcgactatacggatctcaacaaacactgtctgaaggatcccttcgggcttcctaggatagaccaggtggtggattcaaccgccggatgttctatgttgtctttcttggattgctactctgggtatcatcagattagcttagcaa

SEQ ID NO: 131860 - DNA, 426 bp, Zea Mays
aaaaagttcaaataggtgcaccttaacattgttgctggagctatgagtgatttcatttaacaagaggtgacaagcacctaggtgtgcaaccatcttcgtaaatggtgaaatagatggtgtcaaatatgtaagatgtaagacctaagtggggcactttgagatgaagacttctacatgacagtccttgatgaggagcactacataggttacctcaaggttagccaccccaatttacctaaccacaaagtattacaacatttatgcagattatctttgggagtgggtaggcaacatgcacgtttgaaatgagctcaaatgaacacctaatccagaacactaagttgctttttgctatcatgttatttttatctataatttatgtgtttaaaatttctttggcctaatgacaaatttccaaaggtcacg

SEQ ID NO: 131861 - DNA, 396 bp, Zea Mays
ccgccgacgaccaatctccgctgagattcacgccgccgccgttgcgattcacgtcgccggtgatcaggtaagaccgccaggtaaaagccaccccctggggataactccggtgactcaccgtgactgccccttttgctctacggctgagcgataggctcgccggtgaaccgccgcctcccggccgtgcgccgcgtggctctcactttccaccgcaccgccacgacttactctaactccccatcgatcgccggaacaaccgccacacctctggacacgtattcaccgcgcccaggattcttcctcacctccggccgccgcgttgctcgtccaaaatttgcggccaccgctcactccgcctataaattgagccctcccctagctgcgtaacatcatcac

SEQ ID NO: 131862 - DNA, 328 bp, Zea Mays
tcgcagctttcactgtcttggttcgcctcttcgtttcattattcccacttggagcattggaggttgttgacctattattactctttcttccgtaccaaacaaattgtattttatcgtctcctgtttgtatcaagagtaacaaacctgtgttgtctacctcaggtccagactccagactatctactgaacccagtctccatatgcatgctacccaaatcctccaaggggatcggagaggaaacttaatttggagccgcagtaagaaataacgcatgcaatccagtagcaaaaatgcatgattcgtcgaacttggacgcgattatggcac

SEQ ID NO: 131863 - DNA, 482 bp, Zea Mays
gtgaattagctgtttgattgttaggtgactgggacactttggggatgctcgtgtttatgatctatatttattttgtttcacttggtgcatgtgtttgcatgtgaacatgtttattgtgctcctctttttggttcgcttgagtgaattgagggtcatgctttagggatgagttcgctttatctgtacttttgcgggctgttctcttttctttttgtttctgtttatgctgcttgagtgcatgactgcatggtgcaatcagaatcgtcagcctctatatttcataattacgcatttcatagagctccgttctcttagtagtactgcggagatcatgggtccgtttgtttgttaaggggtttccagactattggacccttttccactttattattacagaaaatcatgtgccagtggttgggatcttgtgcctctttttttctcaaatttatattttttcctgctagtcgtgtttaaattccttt

SEQ ID NO: 131864 - DNA, 276 bp, Zea Mays
gtctggttctagttccttaccagcagatggggatattggtgttgatgtgccagtaaagggtgctaaaccatctgtttcttgggcagaatgctggaagcatatggataagcgggagattatcgaggatggtataaaaagttatattgctatatgtcactattgtaaaaatgagttgagtgcagattctgctggtggcactgggcatttgaatcgacacttcaaagcttgtttaaaaaaggcagggcaaacttttggtgcaggtatgcaaactcaact

SEQ ID NO: 131865 - DNA, 504 bp, Zea Mays
ctgtattctttatgctgtgggatcacttactcgttttgttcagacagaaacatgcaatttttgccttgaatctggacaaccgatggagggtgcagagtagacagttgacagtagcacagtgtgttggacagttggactgcaggccagctgtagcctatagctgtaggagattggaaataagcaagcatgctgcacagtgtagggatcgtcgcagtccaatctcctgttcgtctcgagagaactgcatgcatgcgcgtttcgtcaagatcaacgcaagtacgcaacgttggctctgacgcggattttaatcggtgtcccactagctgtgtcatgcatgccacgcggcagttccatcccccccaccaaacacacacacatgcataccatggccctgcaaggtcttcagaggttctgttttacaaatgtactaactgataagagcaatctcagattctcaggagtaaaaagaaactatacacagccaaaacgctcgaaacaataaca

SEQ ID NO: 131866 - DNA, 744 bp, Zea Mays
ctggtctcctccttgcaggcaatacaaggttttgggtgtgtgggttctagtggtaccatggcgttggcccattgaatccatggaggagcaggtgctccatcaccttgtgtgggcagtggtgccagaaaggcaagatcatagccatctgtccgttttgctggtattgcggcatctttgacctgttgtggtgcaggctgccgccaccaccaccatgatagttttgttttcatccaattaattttgttctctttgttttgttcatactcatttgtgctataataggaagaggcaggccgcaggtgtggtttggtagatatccagaatgatatgctggagcgggagacatccctgacataacattgggagcagaagagaaactgtggacatcactgcaacctgaggtgagagcatatgttcagtttggtagtgttcactttaattagatctaaattgcactcagaagtttcaatccgtttcttggaatggatggggattatttcagcttgtgaatatgttcagtttggcttgcagtaccagtgctactttgtttgattgagtacactagtgtttagagttgtgagctgagctgcatagagctaatgtagaaggatccaatgcatgttcaatgttccactggttaagattaagactgcaggcacttgtatgtttctatatataatcgaccatgacatgtgtgataattatacaggtaggaataccatgcagatgcattcgctggttgag

SEQ ID NO: 131867 - DNA, 520 bp, Zea Mays
attttgacttaatagttaaagaaaaacctgtttgggtcgggttttgaggagcacaaaaaatcacgaagcgaccgagcacagtccaattctgttaaacgtggcagagagtggtcatgtgtagtgtgcaagctatgtgtttcctcaccatatgcaacctgaaacacaatgcaggtagagagtatagtaaattatgaatgagttatgagaagcaagcatgcaataaatgtataactggattacttacatgaccactatgtgtctgatcaaaaagggggcccgtgtaagttggagtgtcatgagatgcaccaatgtctcctccctgacccaaagaaacaatgatactatgttttaagcctcattcatgtgtcaattaaatttaatccataattgagattacaatggagaaaacaaagatgaaacatatacatgtttttgcggtgtggcgtcaaacaacggcaagtgggaagacggatatgagctcataggattgcagtctggtacatgtcgatgagacatgttt

SEQ ID NO: 131868 - DNA, 458 bp, Zea Mays
ggccattcatcgagttggagtaagcaggtcctgatgccttcaactgggggcagttgttcttgaagtgactagggtctccacagtgccaacaggcatttgctggtggttggttgcttgcaactgagggggcctgaaaggagctctgactctgctgactgaaatgtgacggagtgggtcccactggtctattgaagcttggtcccttgggtggaaacccaaaagatcgagttctctggtgccggtcctgttgctgagctcgaaggacttggaatttcctcttgaggtgacccttttcttcttcctttgccctttccacttgtatgactttgtttgagaggtgtgagaagctgaggaaatcttggctggctaggatggtcttgagttctggtctgagccctttcaagaagcgggccatcttcttagcttctatgctgacgtcatcaggcacgtagcgggct

SEQ ID NO: 131869 - DNA, 460 bp, Zea Mays
ttttgggatgaagcagttactcccaaagaagtcaagttgggttcagcaagagtcacaactttgactcaagatcaggatgatgaaaaaaatttgaagaatgcaatagaagagtcgaggctcgaagcaattgaacacataagaaggtatcaagccaaaacactaaggtggagagataggaaagtaaaactcaagaacatatcacctagccaccttatgctccaaagtatagcaaatcccgatacagtaggaaagttacaagtgaagtgggaaggccctttcctggtctcgactacaaacagactagattcatacagattaaaggatatggaagaaacgacattccaagatcatggaatgttgatgagcttcgaagatattacgtatgaactcaaactttggtaccttttttccttatatggggggtaaggtttttaatggggtcaaagatgtaatacttgat

SEQ ID NO: 131870 - DNA, 349 bp, Zea Mays
agcttctggacgtccttgactcgggccgggggcctcattgcctcgatcgctctgattttctccgggttcgcttcaatgccccggtatgaaaccagtaatcccagcaacttcttagcggaaatgccaaaaacgcatttgtctgggttcggctttgtgcgggttgcccgcagcttgtcgaagtccagggttaagtcctccactagggtcgaccttctcttagtcttgactacaatgtcatcgacgtagacttctactttgtccctaatcaggtccccgaaggtcttactcatcgcccgtacaaatgtaggcaaagcgtttttcagaccgtacggcataacaacatagcagt

SEQ ID NO: 131871 - DNA, 668 bp, Zea Mays
ttattaatgttttttttggtaggacaaggagatgcagatctttcaggctgctagcgaattcttaccaatgatcgacgaggtaaaagaaaaagaaaaagaaaaatccagctccatatacttagcgagatcaaggtattctcagtgcagcgccatgtgatgcaggtgtttggattgctcgtcgataaggttagggggattgacggcgcgcgagttgaaaacaacaaattctgcgtgtcggtgcactaccgcaatgttaacgagaaggtggaaaattttaaatttactaaaaacacgatgtggaatggagaaccacgcaggtacgtcacgttgacacgttcacaggtttaccgcttctgacgaatttgaatttttttttctcgttcaaggactgggcgctcgttgcacggtgcacagacgacgtcctgaaagcctaccctcgcctccgactgagtcatggacgaaaggttgcattgcaccccctgacaacctgttgctcttgagggctggagatgaaactaactgctgggagatgcaggttttagaagttcgtccgatggtagactggaacaaggggaaggctgtggagttcttgctggactccctggggctagctgactccgacgaggtgctccctatctacatcggagatgaccgaacggacgaggacg

SEQ ID NO: 131872 - DNA, 767 bp, Zea Mays
gcgatggtcacaggcgtcatctttatggctacgtcaatcactagcctctatagctcgggctcggcgcaacccatcgtgtagtgccctatgggaggtctgcgtactcgggactagtccaataggccataagtgtgctacagtccgaggggctcgtaggttatgagtgggaagcggacttgtgccgcgctttggctcggtgctaggcatagttaaatatggtcgactatttatggcgagtcagtttggcgctaggagcgagatccacttgagtggtttccttccgatacgtccagcctcccttattgggttccgccacactcgatccctggctcggtgctatggggttcgatcgggggcagacccttttggggttgatgtacctgcctctcccaactgaccaatggccccagtgatcaggggctcctttccttagcgcactctctaaccggtgggttccggagaccgggggtcattctagtaacacgcgtcggtgaggcttttgcccaccagagttgctaggcggcacactcactgtacctccacaccgttgagtcatctaagcatgttgtagcgcttggtgtaggattgtagggagtcaccatcacctgtagaagctagtgcacccctcgacgcaccaaactagtctctcccgtggggcagaattgctcgccagagtagcttctaccttgaccaaaccgccccaccgtcggtcaccccggttcggtcgtcccaccatgaccatgactagaccctcgatcggaccccca

SEQ ID NO: 131873 - DNA, 440 bp, Zea Mays
accttttgagctccaatccaaatcttgtgaatcaagtgcatgtgtgtgtgccgagtgctctagtgttgctcccctgcagattctgagctccctagggagggtttcgcatcccaaactaccgtttcaccgatgttctaaactctcgcgcaccacgtgttcggtgaaatgctcaaaccagtcaaaatagctcaaatcgactccaactttttccagcacactctagctactgtcaatacctctcacgccaaatttcacgcctacccgatattccagtcacatgtttcacaaccaattcacctttttagtgatccttttttagccaagtgccaaaaatatttttcctctgtcaaacttcaaaccaagcacccactacactcattttcacaaatatatatctatccatgaagtatcggctcaattccaagtcatgtcatgcccca

SEQ ID NO: 131874 - DNA, 371 bp, Zea Mays
gttcactcggctaccggaaggcagctgctggatgaaattcatgcggggcaatgtggcgtgcatgcagcatcaaggacatatgtagggaaagcttccaggtccgggttctactgaccaacaacagagaatgatgcagcagagttggttcagaagtgtgaagcatgccaattcttatcaaagcagcaacacttacccgcccaacatttgcaaactattcctgtaacctggcctttcgcgtgctgggggctggacatgattgggccattcaaaaaagttcaagggggtatacacacatactcgtcgctattaacaagttcacaaaatggatagagtacaagcccatcgcctctttgacctaagcaaaagctgtg

SEQ ID NO: 131875 - DNA, 287 bp, Zea Mays
caaatccccctgccggggatagtggtatgggtcttagagtgcggccctctcccgaggaggttgatgctctggttgctccgcttggtggaattcccaatgacgagaggcaggttcattttgagatgcctttgaatccaagtgatgcagaaataagtgccatgctggacatgttggctgaggattcctctgattcagcccctgctaaaacgctggctgtagcacccatcccagagtctggcaaagctttggacactcagaggtctgatagtattcgcccgaagcgtcct

SEQ ID NO: 131876 - DNA, 379 bp, Zea Mays
ccagtgccagcgtttgttctatcttgaggccatcgactgcctacacaacacaacagcaagccactcgccggtgaacaggaaatcgggccatcgaggactagggacttggggagaactggagaagaggacaatggtcacctgcagcagctaggagtcgccatgctagggatcgagggggcgctagtcgcctgttgtcgcccgtgtgctctggtgagtatggtctagggttcgagggtgagtgggcgactgtgtgttctgagtgcgtggcggcgttgccgttgcctcttgtggtctgctgctctcgtgacggtttagtgggttgtgtgtccgtgcgtgggctgcagtggctagtggaccgaaacaaaaacgaagtgggcca

SEQ ID NO: 131877 - DNA, 429 bp, Zea Mays
tatggttcgagtgcttgctttacactatttttttgcaggcgctgaacgtgaagagggagggtgaagccgtagtagcaccaggtgcccacattaagttcttaatagagtagtatagattagttgggtccttattatgtgtttgtgttgcttctaattgtgggaggggttctctctgtctttacaacctggtgttttgggctgttactgtactgaacctcttatttgtcttcttatcaatataattggcagttgcctatctgttttaaaaaaatacagtatacatgctatgaatgacaagtagttatgatactacatatggtgatcctgtcagaatttttactagcaatacacgcgtctattatctattcagaccaagagaccagctgtttcagtgcctcccgaaatcgaagtctcctggttgccatattt

SEQ ID NO: 131878 - DNA, 629 bp, Zea Mays
cacaaattcacagagccggcttgctatgcgcctgatgatgtcagcatggaagccaagaagatggctcgttcttgaagggattgagacctgaactcaagaccatcctcgccagccaagacttcctcagcttctcgcacctctcgaataaagctatccaggtggaaagggcatgacaagaagaaaaaagccacctcaagaggaagtttcaagttctccgagctcaacaacaggacaggcaccagagagttcgatcttttgggttccctcccaaagggacgaacttcagtaagccaatagggtccgcttcgtcacgtttcagccagcctggtcaaagttccctccacaccccatctgttgcaagcagccaacctccaaccaatgcttgttggcactgtggagacccagtcattacaagaataattgtcctcagttgaagacatccgtacctgcctactccaactcggtgaatggccccaagaatgtttcatcacccgcctccaaggcaccctccaccaacagctagctaagcaagacccagtttcacggtagggctcgagtgaatcacgtcgacgcccaagaagctcagcaagcccctggagtagtgctcggtgagttcctagtcaaattta

SEQ ID NO: 131879 - DNA, 463 bp, Zea Mays
tatagggtttgacggtttgtggcagactggtggcgggcggtggctgcagctggagccggtgagcagcgacgcatcctcctcgtccggcgaggtatcacctgattcccagcttgttctccctcatccagcccggtgcgggcgcaagtagtgtagcacgcagcgccgccacttcaagcagcgccgtaccgccacttcaaccagggccacttcaagtagcgtcgccacttcaagaacccggcctgtgaggctgtgaggagtactacaaggtattgtcgcttgcttcagatgacaccctatttcctgttgcgatctatttatccaagctgacatttgggtgttgctagcttttgatgctagttagatggtggtggttgctcttcacgtaggctacctatatgacgatttgtctaggtgtactgtttccaagttttgcatgtaatttgggtgctaatcttgtctccgc

SEQ ID NO: 131880 - DNA, 1205 bp, Zea Mays
atagacgtcgggacctggttgggttggactgtgtagcctagtgtttggcctgggcttcctcttgttatgagaagcccatggatatatatgtatatatagggttgaggtaatggaagccctggggttccattactagagagagccccggccagggtaggtccacgggcatagggcgacgtgtcaggtggtgggagtaccgcgcgggtgcaccgggtcttggtgaggtcgagcgtggggtgttccacgtttatgcatacggattttgacggaaacagctgcgtaaatgggcatagtgggggtgtcgcgcgagtgcgtcgggatcgtggtgtggtcgggcgtgggtcgcgcgtttatgcatgcgtattttgacgatagtggctgcgtaaattggcatagttgtgcggtcgggacgtggtcggggtgtggttcggcgtttatgcttgtataaattgccgacaacaactgcatatccatctgacgcgacgtgtgtggtgagggcgggtagtgggggtgccgcgcgggtcaaccgggatcgtggtgggtcgcgcttgggggtgagccatgtttatggtgttgtaacacaattggcaggtaattgtaaccgtgtcgactcacagaaatctcgcgacatgcaaatcgcgcgggatatttggaacatgccatgaatatcggccaggacaattttggcgaatatagtaggataactccaaaaacaactgggctacacaccgccaacgcttttgttcgatgacctgggagaggtagggtatacacgatggcgacggccaggggattggtgcagtgtggagaggctacaacgacgatgttaccctgtgggtcagatgtcggtatgctgtaactccactggctgcgttactggcgccaggattccttgaagacagcaacgcagttcatccaagtttggtgggagcaactcaccggatacccatgaggacaattggtgatcatgagcaggacacaccacacattctccaaagccatgtaagttcagtaagataatgtcagattttgtgcatatttgttatactgtccgtgcaagttatgaagtcctagaaattcaacatgctgtaagattattttgtatatgtgcactacatgacgaatccattaattgaataggatgatagtatagatcaacgattggtaccgaaggtcggtatgacatttactaatgtggacgaggc

SEQ ID NO: 131881 - DNA, 494 bp, Zea Mays
tcgtgtgtgtatatgggttccagttggcccgagcttacacacaatccaaaagggatgatgtatgttttactcgaagaaagcaccaatgctgaaaacaacagctgaaccaaaagttagacctctgatacaaactgaagacaggtcactatccaggtttctattgatgctttctctttggccacatcccaggtacaatatatattccattaattcagcaccatagtcaaagatgaaatattacgaatgtatatgcatgctaaaatggcctgtttgcagggctgtggacctacccacttacatccttgggtacggtaaatgccatggcatctttgtatcagaggccatgtttagcacaactatacatccaagaaccatgtcgaatttaaggtttgcaggataaaatatgaggtgtgtacttattttagaaacgatgggtatgttttaatccaaactaataaataaaactgaactggaataatacgtacgtacaacat

SEQ ID NO: 131882 - DNA, 556 bp, Zea Mays
cataaatggtaacattgatgtacatgttatctttaatagtgaaccgtggaacaaattgaagtactactgtggtcactatgatttgacaactcgataaatggggaatgcaccaaccaattggttggtgggacaaaccatagattcttgaattgccttgttcagttattcatatcttacgtggatatccagataagattaaaacaatataaaagattttaatttgtttagaatttaaactcattcaattcatatatccatgttcatatgggttgagaggaataagccctaaagtgagggcatcaacagagcaacaatggtggcgttgtagtgaaggcaaggatcaggatttgggagtagccgtgccggtgcggtggggaagctgtgagagcactgagtgcgtgaagaacttgacacttactattgaaaatttgtgcttaagttccgtcgatttctcgaagaacccggggtggcgacgcgtaccatgctagggcttgttagaatcggtagcaggagccaagtgttcggagttcttgagggcgctaaacctctgccagct

SEQ ID NO: 131883 - DNA, 420 bp, Zea Mays
cgggaaccacctatgattccctaccccacaagctcgaacagaagcgttcgaggaccataaacaaacttctcaaacttgccatgagccatgccttgagcaaagaggccatcgaggtgatcttcgaccgctctaattgcaagcggaaatgggaggaggctcttgacagaggcagcttcaaccaccacaaatgggaaagaagaacaagaagtggatggaggttgaccttatcatcattgtggagtgcaagaacgacacatagcccaatgaggaaactctagacttcctagaaaaaagctagagcaaccatgcctcaaccacgcttttcgcgtaaaacacatctacaaggattgcgtactaacgaaaaaaattcttctcctgaagcctccaagaaaactagcactgatggtggacaaagatgag

SEQ ID NO: 131884 - DNA, 273 bp, Zea Mays
gattgtaccgtcctttgcattgtgttttcattagatactagtaagaacttggtaagacacggtagtgtgtgttcctattcacccagagagcgcgtagttgcttattagggataacctttactgtttgttcctgttttggtgtttccaatggtaggatccgatgacgagattgaggtagtcattcccacacaatttcccgattgtgtcagccgcgaagacttcgatgttatttgcatgcgtatggaggaaaatatggaggaaacggtccacaag

SEQ ID NO: 131885 - DNA, 534 bp, Zea Mays
ccctaacctcatagttttgtttactaatcacacgccaaaatcagtgcacctagacagaattgaagcgtcaccaactcaccataacaagcaagcacataacagcaaacacggtctcgaaagtagttgctaaattcaatggaagcacataacagcaagcacatgacagaattgaagcaagcacatatcagacaattctaaattcaatggagaccgtaaatatcaaatcttacccgcggcattgctcttgtccttctgctacgcgaagctcgcaatcgagatacccgggcgtcgagtttggggatctggcggcgatggcaaggtcgtataaaaatgctaagcatataggcgcgacagattcgcggggagatcggaacggcaaggtttttgagggattggagctgtcgcgcctagatttggggtctggtgggtcacgccagggactggtgggatggagattcgcgggtctatcgccgccatccatggcgtgagatttgggattcgcggcggcggccgggcttcgcggcacgcgtgcgg

SEQ ID NO: 131886 - DNA, 317 bp, Zea Mays
atttagtttaacaatactactcatttttagacactcgagacaacaagcaacatcaattcaagacatctaattgttcgctaaacatagaatctaatgattactagcaaagtttcatcgtgcttaattaaaccaaatcagcatgacaatatcgttagaacctgtcgactagccggataaaataataaacctaggctttacattattaatttaactacacatccaatatatgactactcatactcttcgcatattttacactttaaatctaaactttaccaaacaactacagcacacttgactaaataattaagaaagcc

SEQ ID NO: 131887 - DNA, 386 bp, Zea Mays
cggctgtcacgcacgcacgggagcagagcaggagagggccaaggattcatactactgatgatgggatgtgcccgcccccaccccaacaccacatgtccgaacccaaaaccgtgttgacctttggatctgcgcatgcatgggccagctcctctgtccggggcgagtagaaatgagtgacgactgacgactaggcgtacgcagccaaatcgcctactgtacgtacgctgatctgaatctgatccaagcatggccgcatgctagccggccgggcaagcttttctcttctggaatagtggatgtcggctcgtcaggaatttcgaatgtcttccttatttctcccgtattccctcggttaaattaaagggtgtgttttcgaacagattagc

SEQ ID NO: 131888 - DNA, 590 bp, Zea Mays
aaaaaaaggaacagttagtttcgacaccactcagacggaagctatgcaataacacgttaatattactaagccttttgggagtgtgccacatttctatctagtatactgttttagtgtacacaatcatgtattgcgagcatgcaaaatgactatgtgtatactgagctgagaacaagtagggatgagaaggaaaggaagagtgagatcttgtgaaccaacaatatagcaaaacaatgatgatataacacgagcacatgacatgtaatacgattttctgaggaaaaaaaaggagccagcatataatcatgtaccaagatctaagctgtgcaattttcgcgcacatgccagagagaaacagaaatgtctcacctggccatccttgtcttccttagaatatgatgcactgatctgaagcccctagtcttctagcattaaattttgaatatgtgagacaaggggccaatcctcccccactccttccctgcaacgcctaagcaggttggggttgccgcttatatataattcctcgagagcagtaaggcattgtatggagtgaggcaaagaggtaaggccagggcactgtaggaggc

SEQ ID NO: 131889 - DNA, 543 bp, Zea Mays
ctccgcgtgtgatggatgctgaagtttttcctggtccgagtgctgggcgcaggcggcgaagggcggtggcgaagcgtagagtgagtgaggtggagggtgggtgtcttcgtgtggatagggctggcaagcgggaattgttgtccttgccagttggggcgagtgtaggtgagggggagttgcgaagtctctttgagggtgaggagctgaggataatgatgtttaactatagggagatgggtatcatcctgaaggttgaaccaatgtaaggtgtgatgccctcgctgtatgtgtgtaactttaattggtatgatgatttgtatgatgaggctgtgtgcgtttgctgatctggcggtgcccgtgggggacttgtgcacttgatctagcgtgtttattatgtcggtccggctgcacctgcttttgagggggacttcgattttgagcacccttgttgtgctaatccttgttgcgcactttttgtgctaatccggctgcacccttaggcgacttttgcacggatagtcttttggggtagacttcgatttt

SEQ ID NO: 131890 - DNA, 1174 bp, Zea Mays
gacggcggtcccgtcaagaccatccaggtcgacgcggattcttcctagaccacccgtatcgcgggcaatctggaggagaaataggaactcgcgctcgtcgcctttctccgggcaaatgtcgacgttttcgcatgggaaccgtcgcagatgcctgggatccccagggaggtgattgagcaccatatgaagatccaccctgacgccaaaccggtgagtcagaagcctcagagacagtccgttgagcggcaggacttcattcgtgaggaggtccggaagctgctacacgctggcttcattgaagaggttcatcacccagtgtggctggccaacccagtcatcgttccaaaggcaaacgagaagcttcggatgtgcatcgactacaccagccttaataaggcttgtcccaaggacccgtatccacttccacgcatagatcaaatcgtggattctacctccgggtgcgacctcttgtccttcttagatgcttactctggttttcatcagatccagatgtctagggaagataggaagcataccgcttttgtaacagtggatgggctttattgttatgttgtgatgccctacggtctgaagaacgccttgccaacatttgtacgagcgatgagtaagaccttcggggacctgattagggacaggatagagatatacgtcaatgacatcgtggtcaagactaagagagggtcaactctagtggaagacttgaccctggtctttggcaagctgcgggcaacgcgcacgaagctgaacccggacaagtgcatctttggtgtctctgctgggaagttgctgggattcctggtttcgcaccggggcattgaagcaaacccggagaagatcagggcaattaaggcaatgatgcctctggcccggatcaaggacgtccaaaagcttactgggtccctggccgcccttagccgcttcatctcacggctggctgagagggcgctacccttcttcaagctcttacggaagtccggcccattcttttggaccgaggaggtagagcgagccttccaagagttgaagcagcaccttgtgtccctatcgatactggtagctccggagctaggggagccgctgtacttatatattgcagcggctacagaggtggtgagcatggtgctggtcgtcgaaaggacggagcaacattccc

SEQ ID NO: 131891 - DNA, 453 bp, Zea Mays
ccttccaaaaaaaggacaagttaacttaaactataatgaacttgttggtcaggtctatataataggcatatgcagcatgctttgggctagtagacagagcggctagaccggccgacggcggtggcgtactttatttggggcttgcgcaggagtgacaataacgatgcattatattcgggacccatacgctgggtagtagtatttttttatgcggctagtatttttccacctgtattgtaattctgcctcgaagttctggtcactattaagaaaagtaatgaaattcacagcatgcatgttttacataaagcaatagtgtatttcattaaagtaacatgtgtacatatctaatgtaaaccatatgcatacacgctaggctccatatgcatgctttgctaaactcatcaagactgaatatgcgtgcattttatgcgtcacgtagaacccgcacaa

SEQ ID NO: 131892 - DNA, 447 bp, Zea Mays
gttgagttctcaggctctagactacgtatggcagttctctgatccactttcctacgaatttctcattcttgtcgaagactttctttctgagtgcttctaatatcatcccgttagctctttctacttgcccgttggcccttggatgtgccaccgaggcatatttgatctgaatgctcttttgctcgcagaaatcgaagaattccgaactggtgaagttggatcctaggtcggttatgatgctattcggtatcccgaacctaaatattatatcttgtatgaattccactgccttagctgaagttagagaagcaatgggtttgaactctatccatttggtgaatttgtcgatagccaccagtacatgagtgtatcctccttgagcttttttgaaaggtccaatcatatccaatccccagcacgcgaacggccaagttatgggtatagtct

SEQ ID NO: 131893 - DNA, 300 bp, Zea Mays
gccaacccagttgtcgtgctgaaggccaacgggaagcttcgaatgtgcatcgactacaccagcctgaataaggcatgtcccaaggacccgtatccactaccgcgtatagatcagattgtggactctacttcggggtgcgacctcttgtccttcttggacgcttactctggtttccaccaaatccggatggctaaggaggataggaggcataccgcttttgtgacagtagatggactatattgttatgttgtaatgccctacggtctgcggaatgccctgccaacttttgttcgggcaatg

SEQ ID NO: 131894 - DNA, 377 bp, Zea Mays
tatatgggccgcacgattagaatctgagggtccagatcaaccgattacttaaccggaccggtatgtaatacagatcgcgggatcacgatccaacggccgaaacgctatcaacccccagatccacacgattccctacagatggcttggattaaatcactacgaagagttatcccaggatctaatcagggccgtccaatcccaaatctacggacgcggccccatcttcttcctcccgtcattcaaaccgacggccatgcgcagcgcagctcgcccacgtggcggcgcaccatcggcacggacctcaatccaagcctccaatgcacgaactcctaagataatgggctctaaacgtagcggggacaagagtgaacttaaag

SEQ ID NO: 131895 - DNA, 381 bp, Zea Mays
gcattgatataaaaagcttgattacttgcttcggatgattcacacgatcacaaccaagacgacaccttacctagagattgtggtaacttccaattcacctgttctttttggattggtgctgaatttatttcttgcaaagtaagtttatttctcctagaacataagccatttaattttacctttttgcaaagaacaatctaaaacacacacctctgaatttactgaacaacagtctaaattgggtaccaaatttgaggcgccaaatctgaggcaccaaatttacattttccatagaatttggtgcctgacacctctaaatttactgaacaacagtctaaccgacactcgacttatatctctatacttatatgtagatcaaag

SEQ ID NO: 131896 - DNA, 422 bp, Zea Mays
tgaatagtactaggccgaatccagcccaggcggcccaattccaggggaaaaacgcgtgcacccacgcccgcgctggcagacttgcacagaggcccctgtatttttgaatatccgttaagaacccttagctactatttaacgtctcactaacaaatgcaccgaggtccctcaacttgtgtttcttctccaaacaggtccctgaccacgacgcgctcgccgttcattaccgacgcggcccgtactggccctggccggcggtggatgctcagtcgagcgatagggggagcataaccgacccaaggcgacctaggaacgagctttactgtggcttgaacactttgagaacggtctgcccacgtgcacggcggaaaccgtgatgtcgatcccgtgttcccaatcatttacgcccgaattggttaaac

SEQ ID NO: 131897 - DNA, 485 bp, Zea Mays
atgtggaggtggtagtgggggaggtacgatttgtacctcctggtggtgttggtatgcgtggttaggtggatgctgagcggggtcgtggttgtatggttgagggagttgttgatatgtgtgcgcgacaactctagggttgtcggctggttgcgcccgagacatcctgtctctggtggccttcgtttctgggcagtcccttgtagggtgcgcgcagtcttcgtcgtggaacaagcagtaaaatctgcatggctgctgcgcacgtccccggccccgaccacgagttctatttccgcggccctaggggggatactcttgtcggcaaggagcctcaccagcggggcgctggttggcaatgttgtgtacctgctgctgactgcggccgtcccgaccggagtctgtctgcgaaggcctcgtccatgtacggctggactacggagggtctttgggtttcctttgagactcgactttgcgctgatggagctctt

SEQ ID NO: 131898 - DNA, 482 bp, Zea Mays
atcatattcaacatttggagttagtattcagtcttcttcgagctgatcagtggcagattaaattgtccaaatgctcctttgcacaacaagaaattgcatatttgggccatgtcatttcagtgcgaggggtggcaacagattcctcaaaagtggacgccgttacctcatggccagtacctgcaaactgtcgagagttacggggatttctcggcctcgcgggatattaccggaaatttgtacgacacttcgcggtgatctctaaacccctaactcagttactgaagaagaacacacatttcgtatggactcaagaccacgatcatgcttttcgtacactcaagacagcactatcctctgccccagtcttgcaactgcctgacttctcgtccccgtttgccattgaaactgacgcgttgggatcaggcattggtgcggttctcagccagaacagccaccctctcgcttttgtcagtaaagctctg

SEQ ID NO: 131899 - DNA, 671 bp, Zea Mays
ggaagtagtaggcgccgaggtggtccttagccttcccagacttcaccaacacgaagaaatggcggaagagggaggtgcagggggccacccccacgaacatctcgctgaggtggacgaagatggccgcctggaggatggagtggggcgtgaggtgctgaagctggagcccgagctcctccaccagtgttgtgctcgcctcgccggcccatgtagcgatgcgctggaccccggcacgatgctccgcctagagatcttcaagtactttcttcgtcgcctccaccgccttggggctgatgttgcctgcgcctcctggaactaccggatccgctctaccagctttttctccttctcctccgcctcgagctcatgctcggccagcaacttatcccgcctttcaaacatttcctccctgaaggcgagatccttctcccgccaggcgagatctgtctcccgcctatctagggacgcatccttctccttgaggttctcctcggccagggcaatgttcctggccttgtcctccaactcccgctcccatttttggatcctctatggcctccacttgctggacccgctgggcctccagggtctggtccagggccttcagcttggctcagagctctgttgtaagggtctccctttcgctcagggcctcctccctcctggccaat

SEQ ID NO: 131900 - DNA, 574 bp, Zea Mays
cctcgacattccccttaaggacaacattaaggggtggcgtctcgagtggttcattgtggagaaccactgcaagtcactccccctaggttagggaggcagccagatgtccgcacatcgagctgtatagaatctccgactccttcggagataagagaggctagagtactgcttgtcgaggtctgcttgctgaaggatagaggtctgactgctgaagttgtggttgctgatttcgttttcaagaacatccaacctttgaaggacaaggcgtaccctgcttatttgtacaatggtgtcaacgattctacccaggttacgaataggagaatccctactgaagatctgatgagccgactggatatgatcccgaggggtagagtttcaaatgctggtgctcctattgcgtattatgcttggaacctgccaccatttaagccattttccgcgtttgtgtccaatcctcctgctcgtgatggtagcctaggtcttagagtgtgaccctctcctgaggacattgaggctctgcttgcccccacttcggagtcttccaaaggatgagaagcagactcatttcgag

SEQ ID NO: 131901 - DNA, 692 bp, Zea Mays
ggtccactggacgccagcctgcgccatttatgcaaaggataaccacgtatcctggattacacgcgacatgcaaatacgcaaccataaatatgtgtacaaatgtgcataactcatgcataaatggaatctttgcatgccaggaatcgcgcgcacgaatatttgcatgtgcttgacgtttacgactgcataacgttgtgatacatgatagcgtaaaccatgcaaacgtttaaaatctaccaccggatttgagataaggcaatacgtgatcttcgtgcgcgtaaataaaggcacagttacggcaggaaactaatacaactttacagccgcgtccacgttcgctcgtccatctgaaatattggcggcggttagcggcggcggaagtgagaggtccggccggcgatgggcggcgagaagatgtccaccaccggcgctggcgatgacatcctgcctgtaacatctgtgcataagccagcaggtacgtctgtttcaatggacatgcatcctgtagcgtctgcaatcgccccatacacagagggtgtctctgttactcctccggcggcattgagggcacctggacatatcgaagagcacataaaaacagcagacgtggtcggcgcagagaagcacatccccatgagacatattgggccgcatgaacaggacacacctcatattcttcaaagccacgtaag

SEQ ID NO: 131902 - DNA, 631 bp, Zea Mays
agcaattgttagatgaaatctatgtcgggcagtgtggagtacatgcagcgtcaaggactctagtcgagaaggctttcagatacggtttctattggccaacaacgaagagcaatgctgccgagttagtccagaagtctgaggcatgccaattcttatcaaagcaacatcacttacccgcatagcagctgcagaccattcctgtaacatggtcgttcacatgctgggtgctggacatgatcggacctttcaagaaagctcagggaggctatactcatgtactagttgccattgacaaattcacaaaatggatagagtacaagccaatcgcttccttaacctcaaccaaagcggtggattttatacaagacataatattcaggtttgggataccaaacaacatcatcactgacctgggatccaacttcaccagttctgaattctttgatttctgcgagcaacggagcatccagatcaagtgtgcgtcagtggcacacccaagagccaatagccacgtagaaagagccaacggaatgatactggaagcactcagaaagaaagtatttgacaagagtgaaaagcttgcaggaaaatggatcagagagctgccatacgtggtttggagcctgagaac

SEQ ID NO: 131903 - DNA, 764 bp, Zea Mays
ctagcacaacaactgcgcaaaactagtcttccccaaaaagactatccatgcaaaagtcgcctaagggtgcagccggactagcacaacaagtgcgcaaaattgaagtcttcctcaaaatactatccgtgcaaaagtagcctaagggtgcagccggactagcacaacaagtgcgcaaaatcgaagtcttcctcaaaagactatccgtgcaaaagtcgcctaagggtgcagccggactagcacaacaagcgcgcaaaatcgaagtctccctcaaaagactatccgtgcaaagaccgactacaggtgcagccggaccgacataataaatgcgctaaacctagtgcacaagtcccctacgggcatgaccggatcagcgaaggtacacagcctcatcatacaaattatagttacatacgtacaacgagggcatcacaccttacattggttcaacctttgggatgatacccatctccctatagttaaacagcattatcctcagctcctcaccctcaaaaagacttcgcaattccccctcacctacactcgccccaacaggcgaggacaacaattcccgcttgccagccctgtccacacgaagacgaccaccatccacctcactcactctacgcttcgccaccgcccttcgccacttacgcccaacactcggactaggcaaaacttcagcatccgtcacacgcggagatgcctccaccgcaaccacatccaaggccacaaagtaatccaagtcctcatccgaagactcttcc

SEQ ID NO: 131904 - DNA, 289 bp, Zea Mays
catgatgcttcgaaggttcaccgtagcatcagcaccaagcatagcatcatcatgagcagcaacatcactggtgtcatcattgtcatcctcaccgtcggaagcactaatgtagccatcatccgtagcaatgtatgttcgctgactcgggcaatccttcttcacgtgaccaatcccatgacaacggtggcaaacaatacccgaagaacaaccactggaaggtgctgcaggtgctggtgaattctgtttcttggcgggtacctgcaaaggaagtttaccaacatgtgcagaa

SEQ ID NO: 131905 - DNA, 460 bp, Zea Mays
gtgtgctcgaacattctgtcagaaagtattttcagtactgaatgccattattattttcctgttgttagaatccaacagtagttataattgcagaagtaagtgcagtgtgatggttttgagacttcttttcatttcacgaggcatagagatcgccttgagatgagtaatcgcaagtgtgattgtgttggatcgagtagacgtgagcgcgtcgtgccgatttaagtcactactgacttaaattgactgctccgttagtagggtatagtggtcaccctgagttaagcgtgagcatgtcacaccgccttaagtcatcgccgacttaagtcgattgctccgttagtagggtatagtggtcaccctgagttaagtaagcatgaggttgatagtaaacagtttgagtgcctttgagaatgaagtctttttattgatgatgtattttccaatttacagaatacaaggc

SEQ ID NO: 131906 - DNA, 553 bp, Zea Mays
cggcatttgaattggaacagtgtatggctccacgatagtttgttggttgaaatacaattccatgggaccatttagatgtcgaaaattaaattcacccggatgaagaccaaactttacgttatggatattgtaaacatgcttttcatggagcaaattgctgaaatgtttcactgtcacggacacatatgttatggcctcgatcttggctccctaatagtatttcagtaggattttagtaggagaagaggcgatggtatgaagatcgtgtaactttgtaaatgaaacttaaataattgttggcttacatggatgtcagataaaatgaaatgttgtttatcacgataacgtggctcaatcgggaatttaacttctacccgagcgacaatactgtatttccgaggtagcccataaaaatcttcatcacggtagtcgtcgaacaacctgtagctatattaaacatacgactaaataatggtcatttctttgatagacaaattttgtgtaaatagatttatgtaataacttacataggcttccgttttatgcggtccgc

SEQ ID NO: 131907 - DNA, 501 bp, Zea Mays
ggcaagacaccgtacgagctctgggttgggaccacgccagcggtgcaccacctccggacctttggttgtgtggcgcacgtgaagaacaccggtccaaatctgaagaaactcgaagataggagcagaccgatgatatttgtgggatatgaacccgggagcaaggcgtacagggtctatgatccgaccacaaggcgtgtgcacatcagccgtgatgtcatctttgacgaaatggccaaatggagatgggaagacgatcagatggtgaaccacagtgatgacttcgcagtggagtacatgacgacagtgcatcaagagccaatgaccaggctccaatctcagcacggtgcgacgtcgcactcgcccacaccttcttcggtggctcctataacacctgcggtgactgcgacgccagccgtggagtttgtgtcaccgccgactgttgtcgatgaagacctggacgcagaccacgatgcggatgtgcccctcagattccgcaccatg

SEQ ID NO: 131908 - DNA, 415 bp, Zea Mays
gccacatgtgtgatcatatgatcagtttagttagacttcacatcgtggatggatttatgcttcgcccgatctaaaccctaaagtaactgcagaggatcatcgctgtggttacacctaaacttaatgctactgctggagctacttcgccagaagtaactgcagaggatcgtcgcattgcggacagtgatttccatgttcctcaagcccaattgttgttaccccactgcttgcagggctgagaggtgcataggcaacagattagcttttggctgattaccagttgcactgtgcacagatcagcgtccgatttaggggattcactcagtttagcaaaactgtatcactggccttcttgacttggtacgaattcctcgcatacagcattaataacagcttccctatctccagatccgac

SEQ ID NO: 131909 - DNA, 371 bp, Zea Mays
cttggaccagggtgctagcccttctgctcctgttgctgaaaaagtaccggctgaggtctttactgagttgatcccactagtggtgtacctgctgaagttgaccccaatgggtgtgatcgtgaagcaactgatcccaatgggtgtaatcctgttgagactgaaccaatgggtgtaatccggctgaagctgaccccaatgggtgtgatcctgcaccatattttgtctgcgttcttgatgaggacgaagaagaagaagttccactagttcgcaagaatagccgactctatagaggtagtaggggggatagtgatattccttctccagctctgtctgctcttgtcagcctgcaagaattgtctaacggactttga

SEQ ID NO: 131910 - DNA, 508 bp, Zea Mays
ctgcgttattggcctaggataaattgcttgtgaattgcaaaatggaagtcctgactgtgtagctgtgttacgcataaaagccagttgcttacttcacctggttaccgaagtgatagttttagtcctttattcctagtgatgtttttaatcatgatgaatgcatcttcatcttgaattggcaccttggtcactggaggatctaattgtatgctttgcaaatccaagccattgacatgctatttcattgctcatatttgtatccccctatttttgttgtgctatgcaaatttgtgtaagggttggggaactcatggctcatggtggtatttgagccaactttggtgctttaatggcatgcccaccattagacttgtgtcactgtcatcattgatgaactacaactgatgcagctttaaacttgttaagaagttcaaagtaccaatttcattctttgtttggtggataaaaactagcttgaagccttaaatatctcactcctgttcatttt

SEQ ID NO: 131911 - DNA, 509 bp, Zea Mays
gtgactgattttgatggcaagaaacattcgaaggatctggagttcatattgatgccgacttgaattcacgtttttaatgtacgcttggtctgatgattgatgtcactaggaggaaatcattgacaaggtggtaaaggtcatggtggaccctaatgaacatggatcaacagttgaggaatatatcaaaattatagttaagctgaatatttgcaaggcacttcgtgggtgatgatgcaaatggatgtaggaggaaagccttgctggtgcccaatcagacatgaatttcttccaaactatgtatgttgtgaattttgggtcatatgggtaaagaatgtgatgagaaatgcgggaacgatgagacgaaacaatatggagaattcttgcgggtcaatctttcatgttgaagagtggcctcttgtaccgagaataaagggacaataggaatctaggatcatggatagttgggggaaggagaagagcaaaatgactacttcatggtcaaacgacac

SEQ ID NO: 131912 - DNA, 539 bp, Zea Mays
ctccctgtcactgccactcactctccgtgtcctccattctactccggacagctagctggtctgaagtctgaacggccctccgtctcttggaggaacggaatggtctccatctctctatttctccccctgcgtggccccatctttctttcgttggcattattgtgcatatattcctagtgtatcaggaatccaaagctccgcgtctcaaacaagacaaaaaaaacgggggaaattgagagctactagtatactgtgacgacaggtgggtgtgtgagtgaggccagaaggttggagcgccggcgcagtgccgaacgactcccgcggtagagcgtgccagaaggttggagcgccggcgcgccacaaactcccaaccaactgttccggccaaccactgttgcctgggtgctgctcctgcttggtggtggcaatgccattgttgccttccccagagattaatgctttgttgactgactgattcttaccaacctttgcctcttttcttttagggctaatttgggaataccatttttttccaaaag

SEQ ID NO: 131913 - DNA, 289 bp, Zea Mays
aaccatagaattcccttgctgtcctgacggaagcacttgtatttttcggccttttgcttgatcatttccttgatcatctgaacacccttatcttcaatctgtgccctgactatttgctcttgcaatgtgggctccaccgagatataacttaagtcacctgaagaaacaacttccaggttcagcttgcacagctcatcacacagggtggtaactctcgcatccatgctcatgcaattgcactgggcctttctgctcaaggcatctgccacaacatttgctttgcccggat

SEQ ID NO: 131914 - DNA, 1674 bp, Zea Mays
ctgggccatttttatctgcagctcatctgcattagtcaggtaatagctggaaactccaaaccgtccactagcaacttgcttaatcgcacttcgtcttgggttcattgagccatcaggaagtggttccatccgagagggctgttcccctccctcaccttcacagatatattaaagcaagtgtatttggtcacataaatcttagacttgggaataagtatatttaatattaagatctagaaaacacactgtctgctcatgttcctgaactacaatataagaacaagttgaaggggtttataatcaaaaaggaacaatgcatacagcagtatttaaccacttctattaaaccaaagaaatttatagcagatgtcctcatcagttagcactagcgtttaaaaattataaaagcaaaaaaatatcttgcaataaactataacaaacaaaacagtatgatatgttttcagaagcaatgctcacataataaaacgtgattgtctaaaatgttagtgcagaggacaggctcacataataaaacgtaggcagctgttgttcatgtttcaggaaaagaacagcacatcacccttacaaaaactagaaaatggtccatacatcctacatttgttcagatggtttttcatggagctaatgtgccaaaagaacaataattcctccacatctataacagagaaatatcacgtatggatgagaaccatacctgtattagattttcctccaagtttgttcatggcaatagcaagggcagtatgtgcttctaatgaaatagaaccataactcattgctccagtacaaaagcgtttcactatctcacttgcaggttcaacatcatccaaagatatcttgtcagaaatatctttaaatttcagcatgccacgtaaattgcacgccttgttgagctcctgaattcgtttcgaatattccttgtatgctgcccggctgttgactctagctgcttcttgtagttttcccattgcaagtgggtcgttgagatgaacttcaccatttttcctccagtggtaatcccctgggttgggaagggcctttgcatctgcactgccagctggaggggttcttgatgggaaagctaactcatgaagacgaagtgcatctcgtgcaagcatttcaaatgttgcaccctcaatcctgctaggtgtgccttcgaaacacttgccaatcacttcggaagaaagaccaagagcttcaaaaatctgtgcacctttgtaggatgcaagggtggatattcccatcttcgcaagaactttcatcattccatagttagaagcatagaaatacttcttcaccagctcttcctttgagttgggttgtccatcaccattaggaggaatcttcccatcattctgcaagcaccaaattgcttcaatagccaaataagggcatatagcatcagcaccaaatccaagcagggtgcagaaatgatgcacttcacgaggttcagctgactcaaccaacaatcctatgcgtgtcctctcaagatttgcaacaaggtgctgatgcactgctcccactgctaagagagaactggcagcaacacggtctgaggaaaatcctgcataacaaagttaggcaaacaaaattaagtcaaatctccatgtgtgaaactttgatggactgtcaaaggaattgaattgtgtaaag

SEQ ID NO: 131915 - DNA, 573 bp, Zea Mays
aaatgcagtgtgatggttttgaaatttcatcatggggcacagaagttgccctaagatgggtgattgcgaacgtgccaagcgtgcagtgccaatttaaatcagcgtcaatttaaatcgactgctccgctagtagggcgtagtggtcaccccgagtttagataagcgtgagcatgttgcaccgccttaagtcattgccgacttaagccgattgctccgttagtagggcatagtggtcaccccgagttaagtatgcgtgagcatgtcgcaccgccttaagtcattgctgacttaagccgattgctctgttagtagggcatagtggtcaccctgagttaagtatgtgcgagcatgtcgcaccgccttaagtcattgccgatttaagctgattgctccgttagtagggcatagtggtcaccccgagttaagtatgcgtgagcatgtcgcactgccttaagtcattgccgacttaagccgattgctccgttagtagggcatagtggccaccccgagttaagtaagcgtgccaattgagagtgaacaatctgagtgcctttgaaacctttttattgatga

SEQ ID NO: 131916 - DNA, 405 bp, Zea Mays
gtcgaactgcttgccgttgtcgaccgtgagttcggatggaactccgaagcggcaaacaatattttgccagaagaatttctgggccgtctttgatgtgatggtggataccgccctcgcttcaatccatttggtgaagtattcaacggctacaaaggtgaacttgaggttcccctgagccgtgggcaggggcccgacaatgtctaggccccagcgctgaaggggccacgtgtgggcgatcagcttcgtgaactgcgaggggcatcccgagcgtggggaaaatttctgataggcctcgtaggatctgacaacccgatttgcggcgcagataatggcgggccagtagaaaccttggcgtatcacctttgccgctagggccctggggcctgcgtgggagccgcaggtccc

SEQ ID NO: 131917 - DNA, 590 bp, Zea Mays
aggggatgagctgggacagatgtaccctttttgttgaagttctgctatttggagctttagttctgctaactcggtaggagccatgcggtatggtctctttgcgatgggtgtcgtgccagggatcagatctatgtagaactccacttctctttctggtggcattcctggcaactcttctgggaatacatccatgaattcttctaccactgatatgctttctgctgctagattaaacaccattggatcattggcgggtggctgagcctgacaagaaactgactttccttggtggtctgtgagaaggacggtcttgtttgcgcaacttatgatgcccttgtgcttggttaaccaatccattcataaaattacatcaatcccttgggatgacaagacggttaagtctgctaagaacactaccccacttaaaagaattctgacttgggagcatttgagctggcatagaaggtctgaccctggggttcgggtgaccatgggaatttctagatgggtagaggggatgccatgcttttccacaaaaccaatggctataaaagaatgggatgctcctgaatcaaaaggtacagtagcgg

SEQ ID NO: 131918 - DNA, 357 bp, Zea Mays
acctctcccactcattttaagattaagaagggtccaataaaacgaggggacaactttcctttgactttgaatcttctcatacccctgagtggtgacaccttcaaatagacataatcaccctctttaaactctagttgccttctccgggtatcagcatagcttttctgccttgactgtgcagttctcaaattttcccttatttgctggacttgctcctctgcttcttgtataatcttaggcccaaacaactgcctttcaccagtttgatcccaatatagtggagtcttgcaatttctgccatacaaagcctcaaacggtgacatcttcaaactggcctgatagctattattgtatgag

SEQ ID NO: 131919 - DNA, 656 bp, Zea Mays
aggctggtatttgaaagcctagctgaagtcgaagctactaggctagaagatattaacgtgctagaggaagagcgattgaacacagtaattcaatcggccagataccagcagaccttgaggcgctatcacgaaaaagccatacgaaactgatcctttgtggtgggagacctggtccttcgccgaattctaatgggggtaggacggcacaagttgtcaccactatgggaaggccattcattgtatcagaggtcacccagccaggatcatactgacttactcaaatggatggaatggaagtggggaattcatggaatatagagcatcttagaaagttttacccttagcaaggcctcaaaagctatcgaagcaacgttgtactctgtaattggagaatacatcatcaataaaagatttcattctcaaaggcatccaaactgttgactatcaattgacttcgatttgattggacttggaaccaacacgtttactcaacttagggtgaccactataccctacaaacggagcaatcggcttaagtcggcgacgacttaagacggtgcaacatgctcgcacttactcgacttagggtgaccactataccctactaacagagcaatcggcttaagtcggcgacgacttaagatggtgcgacatgc

SEQ ID NO: 131920 - DNA, 463 bp, Zea Mays
cgcggtgtgcatggcatggagattacaatggatgtctacataccgtgattcgggcagcgcagagctcacgcatcggtacacggcggcatggctgatctccgttgagaaattcgccggttgctggttactcccccagccgtagatgcccccaatcgtggcggaaggtgggtccgccgtgaagcggcgatagcggcgcggagttcccagcgccacaccccattgccccgcacggaaaagacacggacgccaacccagtgcggccgcgaatgtccacggtcgataatcccgggcatgccggcgttgtcccggccacagattcctcccccacatcatgcgcccgaggaagatccgcacagggcgttcttaccctctctccctcaccacccttgaggagcccaccgggttcgatggctgggtcaagggggtcgcggagctcaacctttatacatcacggacgaagtcc

SEQ ID NO: 131921 - DNA, 414 bp, Zea Mays
aaaagaatctaagccgtcggccatctaagaaaatgagaaagaaaaacaaaaacaaaacaaacaaagaacgcaagcatcctacccaacacggaccggcacttggcccagcagccccagctgtttccacgatgcgttcccctcccacctcaactcacttacgtgtgggccctcccagccctgcttgtcttccagccccttgcccgcatgcacgaatcggatgacgacgacgacgccatgagaaagctgaagcgccgaccgccacttcgtgtctgctgctctgctcttcgactcccggctcctgcgccgtagagaagtcgaccgtccgtcaccctccccactcgcgcgtatttctctctcgtctttcccattgttgctcgccatcaatggcaggtgtcggccatcgcctgctcgtct

SEQ ID NO: 131922 - DNA, 1076 bp, Zea Mays
caagtttgaattcaaacttgaattcaattggatttgaaaatggagaaaaaagaaatgaaaaagaaaagaataaaacaaaactaaccttacctgggccggattacctcatcccagcccaatttcgcaacctccccgcgtggcccagatcggctttcctcgcgcaagacatctgagccactgaccagcgggtcccggccgccagccactctgggttgtcaccttcgccattcggtctctgttgtgtggggccgggcggtcagcagcttcgtcgccgttacaacgaacccgcgaagaccgcggcgatgctcccgcgcacgctctgcctcgtatagcctataagctcgggagtttctctctctctctagaccgcaacgcgcctgcgactccattccctgttaaacactctcgccgccggaaccctagttgcgcggcgtgcgcggtgggtgtgggtcacgcacggccgccggaggaatcacgcctgcgccatcaattggtcacggcgtgtggcttcggggtgttcatttggtcatcgcggaagtgcggatggtcaccgggggagcaggagggcaccacgacttcggcaactgctcgtcggagtgccttcaacaccgccgagccgccccaacgcgagaacaacccgtctgcgctcccgattcccggtattcttcacctccatcgtgtttcccatggtcttatgtcagtgtagcgcaagtgaattgctggatggcggcgggattagtgcgggcactactccggcgatggcccccgtgatttggtgggcggcgccgccgtctggccaagctgggagggggaaaagcagggaaaggatcgttggccataggatcgtaaacgaatggctctgattaattggtagctacccccccttcatgtttgaatcccagccgttgacgtgagatcggatggattcgtgccgatctcggtcaaataaaatccagactgttgaagttagatccaatggccctagttgcataccgattcattttatgggagatctaatcctagcccttgggttctaatccaacggctcaaaatgcacgataccccttcggccctgg

SEQ ID NO: 131923 - DNA, 384 bp, Zea Mays
acttcaaaggatctcattgacggagaccgagtcttcgctctacaggccctaaacaaataccaagctcagacaaaagcatggcgcgaccacgcagtcatcccaagggaatttagcgaaggagacctcgtactcgtccgaacggttcggacagagtccaggggcaagctggagcccaagtgggaaggcccctttatagtcaagacgaaagcttcccccagcgcttacaggctcacaacgccaaacggcgaagacctggagcactcctggaacatcgacaacctccgcaaattttttgtttgactcatcagggctgattcgcccttgtaattcgcaaaaacaatcttattctggtccgcactcttttcctcccgagggtgaggtttt

SEQ ID NO: 131924 - DNA, 582 bp, Zea Mays
gttatgctgatgtgaggaggcgggatttggaatttgcagtgggtgaccaagtccttctcagggtatcacccactaaaggagttgttcggttcggtgtctccggaaagcttagcccgagatatattggaccgttcactatcttggtccgggtgggcagcttggcttatcgcttgcaattgccggattccatggcaagggtacacccagtttttcatgtctctatgctgaggaagttctttcgggatccggaccatcagattgagatggaaccaattgcggtgcagcaagatctgaccttggagtgtcgtccggtgcgtatcttggaatcctcagaacgtgttttgaggaagagatcaattaagtatgtcaaggtctgatggactaatcagtctgagcgcgaggctacgtgggaacttgaggagctgatgcggcagaaatatctggaactttttgttgtgagtaagtgttgttgattcattaattttttcccttttgtcgttccgatagaagcgtcagaattcgaggtcgaattctttttaagggaggtagagtgtgatacccagtttgcaaagaggagaagtg

SEQ ID NO: 131925 - DNA, 325 bp, Zea Mays
cttcatgcaaggcaatagccctttttgtcaatgttgaagtagtcgagcttgagggtgtaggtgtcgtggtcgagtataccatgttgaagatacccgtggtcaacatagtgtctgtgtcgtggttgcgaatattgttggaatgttggaacctgacaagtgggcccaagcactcgggagtaggtgaaacgagtagcacgacaaaagggatgacacggagcttgaaaagcgtctagtgaagcatgtcccatttggggacgagatgtgggtatttatagggtaaccaaggtttcgggaactaaagtacacttatgcccttggttacttg

SEQ ID NO: 131926 - DNA, 284 bp, Zea Mays
gaaaatccatattaaaggacactttacattttagattattagaattttttatctaaatcccaatactacgatttttaggtttacaacttgatcgccttatgcctatgatgagacctatcgtggccttccatcgatgtgactagtccttacggctctttaaagagttggatggttggacagagatgtcttcagcgtcctttggattgtacctaccttaatggatgcactcctagccaggcacgtgtgccggacacttagggtgccataattgtgttagccctgca

SEQ ID NO: 131927 - DNA, 279 bp, Zea Mays
tacatatgtaactataatttgtatgatgaggctgtgcgcttgcgcgcatccggctatgcttataaaggcgttgcgcgcttagtctggtacgtttattatgtcggtccagcgcgcctgtagtcggtctttgcgcggacagtttggtgtagggtttagcacgagtagtcttttgaaaaacacttcgatttttcgcgcttgttgtgctagtccggctgcacccttaggcgacttttgcacggatagtctttttgaggaagacttcgatttttcgcacttgtt

SEQ ID NO: 131928 - DNA, 416 bp, Zea Mays
gggagagtagtgaaattccttctccagctttgtctgcccttgttggtctgcaggaattgtctctggcaaattttgaccaggctcttgaagatgtgatccctgaagatctgctgtccgagccggtaggtggtggtgtgatggatgcttgcgctgacttgcatgatgtcgggttagagttgtcccaatcagcatctcgtgcctcatcgaccttagagcgcggtcttcagagtcaagaagctgatccagattgctacgctcccatggaaatggctgagaaccccctagccttagaggtggctggagcggagagtccagtcctcaaggatggcgccagcgtttgcccagcccccgagggtgttgccggaaatgatccggctcaggtgggcagcacgaactgtgacccagcccctgaggat

SEQ ID NO: 131929 - DNA, 841 bp, Zea Mays
catcgacacgagatctgtcgctatatttacaaccatcaggcacgtacgcatgacaactactaaatctagctcagttatataccactctactttgtactttgtagtgatggtattatttggttgattgatattgtatcccatatgcagaatgaagatggtggctggggcatgcaagaggttgggccaagcaccatgtttagctcatgcctgaactatgtcaccttgagacttctcggggaggcgtgtgcgcagcatgacgctttggccaagggacaagcatggattctgtctcatggaagtgcggcggcaatacctcagtggggaaagatttggctctcggtatggcaattttgttttaattaattaataatatatgcttttgccctacgtactagcagaccccactccaacaactacactgtgtgcttggtttccttcagttagttccacctgcaacaggaaccatgcatggtagttatagtggggttggtacgtaattaaaatgccaagttgatttatatataagttaaagtaaaatgccaaagttgaagcattgttttaaatctgttttatatatgtggagcgtcctttcctctcggttctaaagaatgatggccgaattccagctgcaccctatttgatttgtataaattagtaaccaagaaggaactaattaatcccttttctcttttccaactggaggtgatcggtttatatgactggaacggcaataattcgatcgttcctgagttgtggcttgttccatattctctcccattccatccaggtatatgcatgtcttttgtttcttcgaacaattataactgaactttcataggca

SEQ ID NO: 131930 - DNA, 466 bp, Zea Mays
cttcagtagggtcacacccattgggatcagcatcatcaagttcacacccattggggtcagccccagtaaaaagttccacgggtacttcttcagcagcaggaacagaagggccaacatcctaattcaagcacgacactcaccgaagcctcctctttttcttcttcttcccctcggcaggagcagttggatgactggccgggcgaaggcgctttgggcgagcaccatcagatttttgagcattcaaggttttttcaggttctgggatagttgcaacagctatggtttcagcagggaccgagtcagaagaatcctcagccaacatgtccagcatagcacttatctctgcatcgcttgggtttataggcatctcaaagtgaacttgcctctcatcattggggagatcaccaagtgaagcaaccagagcctcaacttcttcgggagagggtcgcactctaagacccaagcc

SEQ ID NO: 131931 - DNA, 501 bp, Zea Mays
cagagccctccaaggaacccgtccgacaccgaggagttgtccctggccagccttgatgaccttctcaaggaatttggggacactttagagaaggagttcgggaataccttagatagcactcgcgtgtgatgagcttgtggtagcagggtgttgtgttatgtaatggcttgatgtaatgaataaaataactagttaaaaaaaatggcatgtgcataatagtgactctcttcccatggcagatggcttcggatagaaccacgcctaccgcctccgggattggagcaagacttcctctaggagctgaaggagaggctggcggagaagggggtgagacccacctccccgcacctccggaactaccattagacctagcccaagttctggccaatcaaacccgactcattgaagtcctcactcgaagtctggaaaaccagcgcccaggcggtggaaggccacatgacaggatgggagaatttctgagactcaagcctcccacattcg

SEQ ID NO: 131932 - DNA, 599 bp, Zea Mays
aatccactttcctgtgaacttttcattcttgtcgaaaactttcttcctgagtgcttccagtatcataccattagccctttccacttggccattagctcttgggtgtgctactgatgcatacttgatctggatgctccgttgttcgcagaaatcaaagaattcagagccagtgaagttggatcctaggtcagttatgatgctatttggtatcccaaacctgaatattatgtcttgtatgaattccactaccttggctgaagttagagaagcaatgggtttgtactctatccatttggtgaatttatcgatggcgaccaacacgtgagtatagcctccttgagctttcttgaagggtacaatcatgcctagtccccaacacgcaaatggccatgttacgggtatggtctgcagttgctgtgccggtaagtgttgttgctttgacaagaattggcaagcttcacatctctggactaactcggctgcatcaccctttgctgttggccaatagaaaccagacctgtagactttcccaaccagagttctagatgctgcgtgtattccacactgtccggcgtgaatctcatctaatagctgcttcc

SEQ ID NO: 131933 - DNA, 401 bp, Zea Mays
ccaggctttctgcagtaaccatttctaaggttgatgggccttcgaccacttccatgggaccaggacgatccaaatcagtctcccgaccctcgagatcgcgctctaaggtcgacgaggcacgggatgaccccaacccagcatcaggcgcggcagcacgagcccctgttgcatcatcatccatagactctgacaacaagtcctctgggaccatatcctctagagtttgatcaaagttggccagggacagttcttgcagaccaataagggcagacaatgcaggagaaggaactccgctactctcaccgccagcgatgagctgctgactgtttttccgagtcaaagggacttcatcctcctcctcctcgtcctccacagtgacaacgcaagcagcacacccattg

SEQ ID NO: 131934 - DNA, 752 bp, Zea Mays
ttgcaattttgctgcagagcttgagttgagttgtcattagaaattaagagaaaatttagctccaagtttggctgtcagatggactgaatggcgatcccatggtacagtgtctgcaccggatcagatcgccagcgcggggctctcaccgccgacaactgatcttcaccatgattcacgccaccgccgttgtgattcacgtcgccggtgaccagataaggccatcggtaaaggccatgcgctggacgccactccggtgacccccccaccgtacttcccctctgccttgcggcttgagccgataagctcgccggtgaaccgccgtcgctcggtcttgcgccacgtattcgaacacctccatcgtgtcaccgtgcctctttacaaccgttaaatcaacgccggtgagctcgccacgactgaggacacgaaaccactgcaccagtgcccttcctccgaccgccgcgcattatcatccgaattcccgaccactgccgttgagccctataaattgaagcccccaccagccccgcagggtcatcactcacccagccaccgcgaatcgctagcaaccgttcgccagagctcatgaattttgaattcgccccaaatcaattctccgccatcgtgtaagcacctcaccgtggctagccatccacaggtcagtccctgtcccctgcttcctcgtttgagcactctcatagctctgtgatgcttgtcgaaccaccaatttggactgcgggctcaccaatcgccgg

SEQ ID NO: 131935 - DNA, 465 bp, Zea Mays
gttggcaacgacttaaggcggtgcaacatgctcacgcttacctaactcggggtgaccactatgccctgctaacgaagcaatcggcttaagtcggcaacgacttaaggtggtgcaacatgctcacgcttacctaactcggggtgaccactatgccctgctaacggagcaatcggcttaagtcggcaacgacttaaggcggtgcaacatgctcacgcttacctaactcggggtgaccactatgccctgctaacggagcaatcggcttaagtcggcaacgacttaaggcagtgcaacatgctcacgcttacctaactcggggtgaccactataccctgctaacggagcagtcggcttaagtcagcagcgacttaaggcgatctgatgtgattacaattactcatataaggatgacttctatatcctgcaaacaaatttcaaaaccatcgcgcatcgttttactactgc

SEQ ID NO: 131936 - DNA, 462 bp, Zea Mays
gtttggtatccgaccgcataccaagggtaccctcgtggcgcttttgggcaggatagtgtcgtagattgtaactcgatggttcgtgccgggggcacgagaagagaaagagtcgagtgagtttcagcaggttcgggccgcttgaggagcgtaataccctacttcctgggatgactctgtatgtgggaggtgtttacaactggtgtctaccacgtggtgaagtgctaatgagattaaaacaatggggacccccttggccttatatacacgaccgtagggcatttcccgcgtacacgctgatcacactcttccagcttatctcctagctaatagtgaacagacttcacttatctcgaggaaaacccggtgcctccgttccgagctatccccagtgttcgaggatgtcgtgcgcgggaaaagcaaacaacttcaacgggatcacgcccaatccacgaataatccgga

SEQ ID NO: 131937 - DNA, 386 bp, Zea Mays
gcgccagtctctggttctgtcctgttacttttggtgatatgctcccacaatttcttgatgctgttgcagttctgcctgaggttgagatgtacggcccgagacatctttgccagacctccttggcaaatctacagttaattatcatgtgagtatgagattcctttcttgtacggcacaactgacaaattggattgcacttcctcattttttggattctgcctgccggatagttttcattgcagtagatggggttttccatattctgtttctattacaatcaagatgtgaagaggacgaaccgattcaagcataaatgtcatgccgctggccgtgaaccaccacctgtagtgccttcttctgcagttagctggatgcctggatctgtt

SEQ ID NO: 131938 - DNA, 343 bp, Zea Mays
ggaagacaagcggtccaggcatgtgacgacccgcctgaggatgtagctcgacgcagtctcggagaacagggttccaggccggattgaaggacacaaaagtgcctcggacaagctggccgtcgtaaagtaagacgcgcatagtgatcccgtcggaaccaggcggagctaggaaggagggggtgctagcagccaatacgaaggtggggccgaaggggccaggtgcaacgggagaagtggaaggtacgagtgctgcagtcagaggagtaggggcaaggacggatgggggcaggtcgtacgtggtggcgccgtaggagtaggggatgggtaccgccatggagggagc

SEQ ID NO: 131939 - DNA, 456 bp, Zea Mays
attgcatcacaagagagctatggtggagcgccgagatgagagcatacatgtcatctccatttcacttgtgctaatttaattagtatgcgcgcggttgtaataatatttaattaattcagaagttgaggggtggacctgctagatgctacctcgcgctttgggcgctggactgcaaaaccaggagtagtagacacaccatccgaggaagcctgcaatggccacacatgctacgactgcgatggcggcaatggcaccagatccgagcccaccgggagctggcggtggcggtggcggttgggacacacccttcttctctaactgtcgggagcatggatctctaggagtatgcacgtagtataataataatacgatgaaatggattaagtagtgattaattaaggaatgtccgtgacttaccacaaccagcccagcagcagcagactctcatcattatcg

SEQ ID NO: 131940 - DNA, 463 bp, Zea Mays
gggatttccaccgcgacagacgcagcggcaaccgtcgacgtcgtagcctctctggttgggcgcgttcgtcgcgatgcaggggggaatggatgactgctacagctccaacgacaggaatgggcactcaacgccctttcgtcgccatggtctggggatgatgtcgtcctcgcgctgggtgcccaaggggaaggtcagttctgtctcttttgcagaccccgttgttaccgctgtttggccgcaggtggagtgccatgggtcatctgaaaatgttggagacagacccggttcgatggccgctgacatccaggcttcgttgcacggccctactgccaccacgcacaaggtaaacaatacagttgatcttgctaatgttttcaccacaatccacaaaaagcttagacagtgtgcctgtttgttcccccggcgttggcatgatcaatctgagtacaactttaccgaacac

SEQ ID NO: 131941 - DNA, 481 bp, Zea Mays
cgcagatgtggcaggaacgccaagagatgtgccaagagagagaggagatgtgccaagagagagagagagaggagatgcgccaggagaggagggtgcaacagcagcaagcaccactgccaccaccgccaccaccaccacttccaccccgggataagcaccgggaatttatgagccacaagccacctacctttgccagctctccagatcctctgcatgccgatgactggttgaagtaagttcagaagatgctaaacattgcccaatgctccgaccgggagaaggttctctacgcttctggtcatctgactagtcctgctgctgactggtgggattcatatgttgttgcccatgacgctgctgacactattacttgggtggaattcacaacacagttcaaaaattaccacattcctgctggactgatgaagattaaaaagaaggaatttctatcattgaagcaaggcaacatgtctgtcagcga

SEQ ID NO: 131942 - DNA, 757 bp, Zea Mays
cagagccatagtttccccaaatttgagactttactgaacaaggcaattggccttgaaaacaaaaggaaagaactgtccgaccacaagaggaagtaccaagggcagactagcagaaacacccgacaaaacaactcccaaggttctcagttccgctccagaaaccagagtgggaacaataactatcaagcacaacgtctggacaacaaggtcagaggaataatcaataccagaaccaagagagaagcaacactcagactggtcaaaggtctagtgggcaacaacagaatcgtcagggaagcacagtgaacacaccggccaagaagcaaaatgcaaccaccccggttaaacccaatggttgtttcaagtgtggcgaacatggccactattccaacaaccgccctaggcgtaaaccatagacaccccagaagaacaacaaccagaggaatgaccagaacacccctactcgtggatctacacagaacaagacttcgcagaaccagagtagaggaagagtcaaccatgtgacagcaaaatcagttcctaaggatgccgacatagtgtatggtatgtttcttattaactccatacctgcatcagttttatttgattctggagcatctcattccttcgtaacaaagtcattcgtagaaaaacataatataccaaactatcccttgaagaagaaactattaattcgatcaacacgaggtgaatttagagccactcactcatatccttagactaagattgaaattag

SEQ ID NO: 131943 - DNA, 596 bp, Zea Mays
aaaagtaccttgatatggtctgaaggatgggatcttccttcgaagggttcttaataaaaatatcatgagactagacaataagcatgccgacatgttggccaagtctaccacctaggggctccttttacccccaaagtattttttgaaatattaaaggcaccttcaatggaattgatggaaagggccatcttgatagtatctcctacacacagtgaagactggagaacggagaccataaccttccttcagggaaattatccagtcgatgatgaagtatacattaaaaggatgcaggcaaggacaaggctatataaggtcatagaaggggaattattcaaggaaggtgtttgctccactatgctgaaatgtttttctagagacgaaggccaagagctgataagataaatccattctagcatatgtggatcacatattggccctagagccctactggggaaaatctttcatcatggtttttactggccgaaggcagctttgaacacaacaaaatttgtccagaagtgtgacaactgccaaaggtgtgcactagatcaaaaccaaccttcatccttgacccaattgatacaaccaacgtg

SEQ ID NO: 131944 - DNA, 639 bp, Zea Mays
ttgtgagcttacactagagcgtaactacgtgaggggtcccaagggcctataccgtctgacgttatgggacgtggggtctcggggccctatattgttaggtgcctcggaatgtgaagggtcgtagaggcttatacaattaggtgtccgagaacatgaggcctttgagagcttataatgaatgtcacagaatgtagtcctaaatagttggtctcgaggatgcccctctataaactgattgaggggtcccaagggcctataccgtcagacgttatggggcgtggggcctcgaggccctatattgtccagtgcctcggaatgcttacactagagcgtaactacgtgaggggtcccaagggcctataccgtctgacgttatgggacgtggggtctcggggccctatattgttaggtgcctcggaatgtgaagggtcgtagaggcttatacaattaggtgtccgagaacatgagggctttgagagcttataatgaatgtcacagaatgtagtcctaaatagttggtctcgaggatgcccctctataaactgattgaggggtcccaagggcctataccgtcagacgttatggggcgtggggcctcaaggccctatattgtccagtgcctcggaatgtgaagggtcg

SEQ ID NO: 131945 - DNA, 671 bp, Zea Mays
gctggttcctccatttttgctccgactccaagcgcacagaacgcgttggtttcttcgcggaggccgcgacgctctttggtggagccagcggtgctgaccaagccaccgcgggggaggtagaaggatgcggagcctcttcagtgtcgcagggcaagattacgctccacgacggcggataaccacccgcgcaccgcgtcggcctcctcccatcgttctagggccctatcgcggtctcgccagcttgctcttcttgtacgatgtgctgatgtggctgcgaggagcgcgagcgacgctgatgccaagacggcagctaaaatgccaaaccctagacgagggaggggcttgcgggtgaatcagacgtttggtgcacgcgccggcggcgtgggaggctgaggcctacgaggtgcggtggatgcgacgctggtagcgggaggcgaggtagacgggggctgggtggcgcggctatcgtgaaggtcgggtggcgtaggtcacgggaggcgaggctggcagggtgaaacgcaggcagggtgcgtgggagacaaccattgacgagcggagcgctgacatcgcggagtccattaaggcagggtgcaagggggttgggtggcgcaggtcgcgggaggcattggcgagcggagtggcagatcgttcgtgggactcacgagatgggg

SEQ ID NO: 131946 - DNA, 275 bp, Zea Mays
atcagaatagacggcatggagaaacgtaagtattgggcccgtggcggtggttgcaaaacttggcagactagccaccgtaaaattgatggctgatgggggtgggggaataattgttattttgccctaacctaaccattatgagaaaacaaaaggatgacggagatgcaaacaaacagaatctgcagattccatcatccggggcgacctcccgatccagggatcgtgttggccagctactacccgccaaagtgtctggcaagttgcaagggtcatca

SEQ ID NO: 131947 - DNA, 539 bp, Zea Mays
gtctccaacagaccctctaagctgatttggctctgcttcatcactaggactagaatatttgctaacttgatggatttggttgtcttctacttttgaaggatgtcctgtagattgtgatatttctgatgattcagcatcacccaccttagatgtaggtgtctcggtagagctatcaaacttttcttctgctacatggacttcttccaaattttaagacagttttggagatgttgttcccgatactttcgaaggatctacctcagatatatgtcccttagttggtgtgctattaattccttcctcgccattgtgtcccatgaaagacatgacaggaatgaagaatcctattctatcagagttggatgtctgtgattttgatgcatctttatcgccacacttctccttcaggccgagcgcactttttgacaggtcaccctgcaaggtattagcagtattcccttttctcacttcagtttggttatctttatcctcccttatttcatcgtctgctaactgaaactgcagcacctcattctcag

SEQ ID NO: 131948 - DNA, 850 bp, Zea Mays
caagactttttggaaagcttggacaaagcactatataatttttataatcaccaagaattgattctatgttgaactgaatcaaacaattcagttttcgaaatctgttctgtcagtggacagaacacagctaccagtttgtaaaattcataactcttaaactgtcaggcctatggttgtgaaattttaacacaagcaagataagaaaagcatctacaacttccgtataacgaccatgaacatattgtgacattaacttaagcaaacaatgcagtttctgaaatctgtacagaatttggacagattcagttactgaatttgtaaaaggcataacttctaaacgattagacttatggctgtcaaattttaacaccagcaaggtaagaaaggttatctacaactcttctatatgacttttctacagaaaacataatttagttcattaaacaaacatcacaacgaaaacagtgcgtgcagtccaaaacagcaactagtaaaattcagcttctataccattcaagaattgtcgcgtcctagagacttgaattattttaacactttgctatttgttggagttgaaacaatcaaattaggaccaacagtagattactaactttttatccaagttatttcgtgcgctagaattaccacataattaacaaacacattcaccaaataaagcatttcggcacacatgtccgacatcacacaaaaccacgatgaagcactactaatatttagctttagaccatcatgacacaaccacttaacctctaattggttttaaggtataactcaagccttccatgaatatgcatgattttatttactcctaattttcactaagtcttgt

SEQ ID NO: 131949 - DNA, 410 bp, Zea Mays
tatacatcattcacaaccttacaaatgcaggactttctatacttaaaatgtttgtacttttgggccaaaactcaccagccgatccgtggttgtctggctgcagagctggtcagggttgttagggtctggtcctttgtggccctcctggtagaccttaatgtcactaggcttttggccactcgtagcttcctgtataaacaaaaaacattcataagcaatcgtactatttgctgatcgacatagctagatcaaacttaccattcttttagcttttcgtagcatgtcgtcaccgccaaatttgtggttaggattggttcctcgacattgcctgtgatgcgctgacgctttctggaagccttcagaagcccaatatcaacaccaagcatagtacacatcaggcacgggcgtca

SEQ ID NO: 131950 - DNA, 458 bp, Zea Mays
ttagggtttcatcagtccaccactcacaaaagaggatgcaagtccatgaaaaatcctaagataacctatagtaggagatgtttttaatcttgcaagtccataatttagagggaaaatcctaagataacctcaagaaaggaagaaaaaaacataactaatataacattgtgcttcatctctattacagtggcaagtggcaactggagaaactaagcaagatgacaacacataggaaagaaacaatttactgctatctcgcttgtactctggacacacagtttctctgtgttagaacaatcacgtgtccatgatttcggatattttttgacataaattaggataatacaagtgcagtctgttgaaggaccacgggagtactaaagaaagtaaagaactcattgaccaacaaatgtagttcagaagcaaagattcaaaccaaatgagcagtcgaatcttgt

SEQ ID NO: 131951 - DNA, 500 bp, Zea Mays
gccatgtttaagttgggcaattaatgtgaagatagatccaccactaaatttgaatttaaatgggaatttaaagttgaatttgaaaaaaataataaaaagaaaaacaataaaacactacttgggccgagtcctcactttcggcccattcttttttttcccgataccgcacggcccaacgcccctcacccgctcgtgtggccttcgcgtcgccgccaggcatgccccacattccagggtcacccagctaaattatccacccagccgacagtggtcttcttctccctccctacctttcctccgcttcgtgcgcaaaaccggtggcgctggtgagctcgtgcccaattcacgaaaatcgtggacccctagcgcaacaacccccgtgccccgaccccacgtacagcgctggcggcgcacctgcccgccgctactcccgcaacggcctctgccgaagccccaggattctagcgccgcccggttaacgtcctcagcccggactcgtc

SEQ ID NO: 131952 - DNA, 370 bp, Zea Mays
aacgtgaatatgatctctgaataatgaatgcaatgtatgaggggtcaatctcgctttttaaaagagttgaaggggcatcgattccgacagcatttgtctacagttgacatgttcacgccgggcaattctcgcggcgatacaggcagctacccggtgacggcggggcgacgcgtttgtcgtccgaaatctcgtgcactgctgcgcggggatttccaggtttgatcggttcttcgctcttcctcaactgcctgtcgcatctctgcgaaaactcggagccacttgaccgtccctgttcttcctgccgacatcggcagcatgagcgtgctgtcaacgttagtacgtactagaaatctgggtgctctcttttttt

SEQ ID NO: 131953 - DNA, 773 bp, Zea Mays
cggcggcgacgtcccaccattgacgaccatccccagcgcgcggttagcgccgattacgtccttcttattactcgctaaaccatcttatctatctcgctgtgcgtgcgtgcgttcatgcacgcgtgcaggagactgccgggatctgtggagggacgaagagcagggtcgcgtcaaactcaaaccaaaactgaaactggggaggatttggcaaacgcagggagtcaagaacgcaccgcgtgctctccttgcaagctgttgcacatgccctcgatctgatgagcaacacaacaccttgcaagggggttggttcgggcattgactctcttgctctgtcctcccgtcgtcgacctgccactctctcctcggtccatggccgggctgtagtagaagctcgtccgtcagacagctagctaggagcttagaccatgcatgcatgcatatgtagcttgtaactgggattcttccattgtaacgtgcctgtacctctgcctctgtgcatgcacggagcgaggttgtacgtctatggagattgcagaagtctaaaaccggttaatttgatttttttttccaccgtcggagattcattgcttctgtgttttttttacgttcagcatttttttagtatcattgttgcaatattgaaatgcatgtttatactcgtatttacatatttcaatatttataagatcatttacaccacatccagtccgaatccaaataatcgcagcaagaccttgtttggttattctagtattcacctcaatcgacatgta

SEQ ID NO: 131954 - DNA, 324 bp, Zea Mays
ctctcacagcgatggcgaacgcggcggtgcctgttggcgggcgcgagactaagaggaagggaaggacctcgacctggcttccttataacggctgaagggggaaaacgaaaggagagtccgcacggatcgcgcgatctccggcggaagctgcgttggccgttgatgaagaaaggaggagatgagctgaccggtgggtctcgcaaatcagtgaggcatgcgcgaaccaccgaagaaacccgagcgactgaccccgggcccttcctgtcagcgcataaattccttgcttccgttgtgcatgcaacaacacaggatgcgcctgacgac

SEQ ID NO: 131955 - DNA, 894 bp, Zea Mays
gggcgatgctccgagagaaaaaaagggatgcgtccaaggaggatgctctgagagaaaaaagggacccgtggcttcactggcgtctggaattcttgagggcggatggaaagtccatgtgtgatacacgcccgtggccaacggcggtgagaaccgcggcgtgagggtgctcggcggtgctcaccctccgaccaacttggaacacaagtttgtggagcaggtatttctatttttcttttctgtctgtctctccccacgaggttcaccttatacaagtcttaacagaaagccctacggcctgacagtggaccaacctttttacaaaatacgtaaacgacaatgaaacacgtattacacttatgccgtaactccggtgatggttggcgccggtgttacatcaccccctcctggaatggaagcttggccccaagcgcttgaatcagggaaacgagcttgcatcaccgtccagtcttcccatgtagcgaaatcagctggaagtccttgccattgcaccagcacttgtacaatagccgcgccacctttcttgaccaatcggcgttggagaatacattgaggctgcaggtccctttgagtaagatcaggtatcttgggaaggtcagcatatactggagagtagtcagcagtatagtgcttcaattgggaaacatgaaaaacagggtgcaccaaactcccagccggtaactccagtttataagctgccacgccaatcttctgaagtattttataaggaccaaagtatttgaaggccaatttaggaaagggtcgactgaccacagaggattgggtgtaaggttgcagtttcagaagtaccatctccccttctgcaaactgccgatcaatacgcttcttatcagcttgaagtttgatacgagtttg

SEQ ID NO: 131956 - DNA, 361 bp, Zea Mays
gtttcttttgtgcatctatgaaaccttcttaatcataacatgcttagatgtttcgctttatatacatgattgtgttgatcttcaattggtatatgcaatgatagttaaatatgaagcatgtacaggttgagtaaatgttagacttccgtgagtattcaattggattaagtatcactgaggcgtgctttgccgtatttagtcaacctttcatttagccttgaaatggtgttaagtggcgtttcatttgatattcaaattggcatccttgtgtgatgaaagtgatagagtatgccttgaccaaggtatgttgtgatcccctctagccctaaagaagctagaatgtgcaaagtgcaagtcattc

SEQ ID NO: 131957 - DNA, 284 bp, Zea Mays
tgaaaatcatgggctcctgctaaatgcaagttcttgtggttggctgccatcgaaaatgttggacagataggctaagcaggagagggcttgatcatctagagcattgtcctttgtgtgatcaacatcaggaatctattgatcatcttttgacaaattgtgtgtttgctagagagttggtaccgcctgctaagtcaagtgaatctccagtttcttgctccacagcctgaggactggagctttgtggtttggtggagtctggcggctggtcagatcagtgcggttgc

SEQ ID NO: 131958 - DNA, 558 bp, Zea Mays
ataaaactacacgatcaaaggggtatcgacccaaatccaaccatcagatttgaatcctgcggtccagatcagattcctaccctttatgaaccgatataaaatcttccactagattacggatcaacgaacgagagacaacaacaccgcacccatccctagaccctagccttccgggttgatctaatagctcagttttaataagtgaaagggtatttctacgatctaatgtaggccctccattttctggtcaatagagggaactcttcttcttccattgacagtcctccatggtagctcaccacccgcatgaggcgatctcgctggagaacaatgacgtggagcgctgatgccccaaaacctaaatagactagtgctaactacattggagatgctagcaaattcctagtggtgctcgctaccatagattaggcagcaggagaccatgcccacaatgggacacagttctatggtgtcggactttgccaatgagcacacatctcataacctagtgcacgacttcctactcaatcagacgctaatcgaatcggagaataaggc

SEQ ID NO: 131959 - DNA, 1133 bp, Zea Mays
tgttcatgtcgaagtggagtcttcgaagtgcagaaggagcaggatgccaggtatgaagagggaagctctgttcgtccatgatgtgaacagtgagagaccgaaggttatgtgtggccagtatgtgaagtgaatgtatcaaaatacccgcataagaaactttatcaactcgtgttccgtaatgatcccaacttatctccaactctctaagtttacttagctgagccagctttttcaggaagttcatatggtacatacacgtattgacatgtgtcagctcttccaaattttgcattttaccaatttcatatggtaatctggtgtcaagatcaatgaacagcctagccaattgccgaagttgaataatagccggaggtaactcactcaccccagtgtttcttatatccaatgtatccaagtactggagttttaccacttgctttgggagctctgtgatttctgtttctctaaggttcaagtatttcaggtggattagcctctctatattttccaggtggtggttttctaatcccttacaaccttctaggtcaagcacgcgaagagccttcatgtttgaaagagatggcagttgcttcccatgcccaaagatagtcactgatctgacatgagatagcgatgttgactcttctagcaccaaagctggtggttctccgtcaccacattggatagataatcttcgtatcttgttctgtggacttgatgtaagttctcgagagtctaacaaagtaacaaagttctcctctacagactttgttatgattaaatcaagaatcatgtcatgaactcgacaagtcaccacactcccactgtcatgatcgataaaccatggttggaccagtcttctattgataagctcattaaagtaactttcacctatatcatgtgcatttttcccatattcttcttgaacaaatccttcattaatccatctaactatcaaactctttctatttatgatgtaatcttctgggaagatacttatataaagaagacaagttttcagataatgtggtagatcaaataactgatagatagaatctttctcatgacctctatgtctggattattctcgagtgtagacccaatagaatttgccactctgttccactgatcca

SEQ ID NO: 131960 - DNA, 374 bp, Zea Mays
tggaattggatgaacttagggctcaattctaagcaagatcctgtgactttttgtgggtgcacaatgtagcaaagttggagctggtctattaggctacaactttgctgcagagcattggtctagttgccatggaaaattgggaggaaatttgccctacacatgactgtcagactgactgaagagggatctgatggtacagtaactgaaacagatcaccagattcacccccctcaccgttggtgatcttgcgctcagatccacgccggcgtcgcgattcacgcccgaccgaactcagataagcgctcctcggaaagaaatatcgcgctggagataaactccggccactgttctcaccgccgtcgtgtcccgccgtg

SEQ ID NO: 131961 - DNA, 620 bp, Zea Mays
gtggccaacacgatttgttgtcctcgtcgtttgggatgagtattggtgaggggggtctgcagaatctgtttgagggtgaggaattgaaaatgatgttgtttaattatcgggaggcgggcattatcccgaaggctgagccgatgtagagtgtgtgatgcctcacttgtcgtgcggtagtaagtgaaaacgctaccctcccccggctcgcaataaagagggaggggagagcgcgattgtatttatttgtgcggtggggctggtgggccttcgctgtgtgtgtgtaacttgtgacttgtattgtaatgtgccctgttacccttcgcttgccggtgcgatgttgttgaatgagatggggaatctatttgttgtgactgtctggctgcacccttaggcgacttttgcatggatttgtctttttggaaaagacttcgtatcatgtacttgttgtgcttgtccggctgcacccttaggtgacttttgcacggatttgtcttttagtaaagacttcgtattgtgcacttgttgtgcttgttcggctgcacccttaggtgacttttgcacgaatttgtcttttagtaaagatttcgtattgtgcacttgttgtgcttgtctggctgcac

SEQ ID NO: 131962 - DNA, 457 bp, Zea Mays
cccggatgctgggaatctgccgcctgctgttggagctgaggtccccctgagtgacactctcaacattgtccgtgtcaatgctccatcatcagacagtgcgccgattcctccagctctcggacttcccttatttctttctaacctctaggtgagctgatctttgccttgcattacttacgttgataaacaggttcccttgctaacttttgagcttgtagaatgtcctcaactctgaatcggccaagttgaaatcttgtggtgcccctgtccccgatcaaatttcgtcttttgatgtagtggaatcctctcctgctctagaggcaaatagatgatctgaaggcctcaaactttggttagtgggtctgcagcttccctttgctgtttattgcttctctcgttttacatcttttatttttttcctgttgcttcaccagctctgaatcaacgatgttccgat

SEQ ID NO: 131963 - DNA, 441 bp, Zea Mays
gtaaaatgatcataaaggctgcttagattcatagttcttttggggtgtatatggcttcttatatcaggtcgacgagagcattgttgggaggcagcatgttattgtgagggggttgaaaggcgatggcggccgagggtgagacggtggcactggagttcatacccatcgctgagcgatgcctccagtacctcggcaaggtgtgtatgtgtgcgatggctactctactttcctggattcactcagccattctatctcctgatatcgtccatgtcactgatctaggtgtcgtgtgctgctgaagctcaagaaaaaggcggtcaaagaaggtgccccatttcttcttgtttttgctttgacacttatcacaggaggtcaagaggattgcatgccgcttggcattatggtttatggttatgagaagcacctcaataactgtgttct

SEQ ID NO: 131964 - DNA, 407 bp, Zea Mays
cgaatcgcggtgctagctttccttttacttggaaccttctgacaccacgcatcggggagaccttaaggtagacgaagtctccttccttaaatctgagttctctccgcttgttgtccgcataactcttctgccgactctgagcttcaagtaatctcctgcggatcaggacaactttctcttccgcctctttgacaaaggcaggtccttccagtgccttttcccctacgttagaccacatgagaggggtctggcattttcgtccatacaatgcttcgaacagtgacatcttgatgctggcctgatagttgttattatacgagaactccgcatagggcaaactggattcccaacttctatcgaatgctagcacacaggctcttaatagatcttcgaggaccttgttgact

SEQ ID NO: 131965 - DNA, 355 bp, Zea Mays
gtcgaagccgagaagcttgccaacccaatgatgctgcgggattgtggcgagacattgatccagtagaaatttaagtctgtagtggtctgtccgtactgtgaaacgccggccccaaaggtacgacctccaatgtcgaatggcctgcacaaggccgatgagttcccgctcatatgcagctagggagcggtgccggggagctatcggccggctgaagtatgcaatggggtgtttatcctggagcaacaccgccccaaagccgtaggtcgatgcgtcgcactccaccacgaacgggcgcgtgaagttcgggagcgccaagatcggagctgaggtcaccgtggttttgaggtcttggaag

SEQ ID NO: 131966 - DNA, 461 bp, Zea Mays
caggcacgttaggttctaattggacattatgacctctcgtcttttctgattggtgaggtagtccaatcggtcttacctgttgtcgctcctaagtgtgttagcgatgttgctttggtggccggtcacttgagtcagccttctttttcacatatttagacaataattgattaaaggttgggccgaatttgaccagtcgaccagctgcctttaatgtgttagttttccacgtaccgatttctggtcatcgtggtttgaaggtacgtggtcgtcgtggctcctaggcgttgccgaaccatccgctggaatgatctagactgtccgatgatgtcccagatcgtctgtgtctatgcgccagaccgtccgtgatgcgcaggatagggacccacgcctggttacctacccgcgtctgcccccagcgttggaggtcgtgatggtaacctttcgagtctcccctccatcgg

SEQ ID NO: 131967 - DNA, 438 bp, Zea Mays
cggcgccaaggaagaagggggcattgtcgattagagtatgaacggtcgggattaattctgggcatatcccctcgctccatctaacgatagccgtggatccacatgggaaaagttggatacgacccgagatagatgtcgcccacatgtgatcggaaccatccaattggaatcgtgtggctggaattagaacactcatcgatagaatcatgactgtagatcctcaatcgagggcgatcgtcgcgtactgattcgaggagatcagatttagtctgggctatccgattttgatcggacgagtggaatcccctcgtaccccttcggccctagaaacttgctaatgagtccctgtatttgttataaaacaacccgccatccacgctaggtagaaaataattagatttgagtcctaatatttatgatttcacccctgggcttcct

SEQ ID NO: 131968 - DNA, 639 bp, Zea Mays
gaaggagagtaagtcttatgcaaagtgttagccttgctgctatgtaaaatttggagataatggtgctgcaatcctctatgtcaggtttggcatggagttatgtcagttagctgaaatcagtgtttcagtatttttgttaaactttggagcaccataaccatttatctgtgtggttataagccaaggactctatagcaaagtgatagagggttagttagtgaacaagtttgtttgggaatgcttgagctgtccttgattggaatagggataaaaaggtgttcaaactgcttttgtcagacatgtgaagtgcaggtctgatgcagtaatttgagttttggttcagtgtctttctatggattttggagcttgtttgtgattgatccaaggggtttaagcctaaggtccctgtggaggaatggtagagggtcatttggtcgacaagttttgttaaacttgatctccctattgctatgtaaaactgggagtaagttgtgtccgaaagttccctgtcaagttgaggttgtgctgttcagtaactgaaaattggaggtttcagtgatcttttgctgtgtttggggcatcataacttttgatccctgcatttttggtcttggactgctgcaacaaactaatagagct

SEQ ID NO: 131969 - DNA, 686 bp, Zea Mays
tgaacgcgttggttctcctccagacgacctgctcgtggcaggaggtcctgaaatcaattggcatactcctccaccgtacgattcacacctgctgaggaagagcatggggtcggacttgtcatcgtagcgggggaagtcgagtttctggaatcggggggggtcgatcaagatcgcgctgcccatctgagcggccgccggtattcggactcgaagccagttgctccttcagagtggccatgtcggccttcatggtggacatctctgtggtgatggacttgagcatctccatcatgtccttcatagtgggatcggccatggctggcggctgctgggcggaggcagtagaggactgtcgtgatggtggatggctgagtttgggcgcggcggctgtggaggactgatctaaatgggtggaagaggatcgacgtgacgacgataccaggttgtcaaggatgttggttcctaaggtagctggccctcgactccgcaactcgtagtctcggtccgtcttcactggcagggttataccccctagccgtcgacttgacagggaaaagaggaagaagactggacgactaaattcttgcttaattccctcaagtgccggttacagatatatatagctttgccttgcaacaactccccctaaactttaggatctaattccttatctttctattctagcc

SEQ ID NO: 131970 - DNA, 431 bp, Zea Mays
gaagaaagaagaagggaagaaatatgagcttgtccgtctgccgtaccgcttcaagtttcagaaaaggtttaaagaaccatgcactgaatggttagaactgattgaaaccatgtgcaacgaaattcttggaaactatacaagaaaagaagattagctaatgactgctacctttggcacctggccaaagcgaaggctgaaccgtgtaatggatgctcttaaatttgagtaccttgactacgaaaggcttgatgaaggggccagaggagtcaagaggaaaaagattgtcagtattctaagtaggcaggctatctggcctgtcaaagaagacaaagagacttcaaagaagagaaaaactgtgccagagccaaaagtatcggctcccgaaaaacggaagcttgccgagaaatccttagagaagacgaagatgcaat

SEQ ID NO: 131971 - DNA, 356 bp, Zea Mays
atttctattgtgtgggctggaggagagagtaatgtccctctgcccgaagctgacgaggtagttgtctacagaagtttcatgaaagcggggcttcggttccctttggataatgtgctggtcgaagtgctgaaaaccttcgaagtctaccttcatcagcttatccctgaagccatcatcaggataggggtttatatttggaccatgaggagtcaaggacaagagccgaatgtgaaatgtttctgcaacttgcatgaattgacttatgagacggaggctattggaaaagagcaataccacaataatttcggttgttatggcttcgtaacctgttctgaagtaagcaatccagtgccaac

SEQ ID NO: 131972 - DNA, 1278 bp, Zea Mays
ctgacgtacagggacttctcgcacaacggcagcctcagcgtggacccgagcaggaggaacggcttcgtgctcagcaccgacgggcatcccagcagcctggggaccttcccggactggatggtgacgtcacaggacaacggcacctcgctggtgctgaaccctcctccggacagctctaacctgaccgagttcttgcagttcagcctggggcaagtgagcctgatgcggtggtctgcagcggcgaacacgaacagcagtggctgggtggctcgctggaccttcccgtcggattgcaaatccagtggcttcttctgcggtagctttggtgcttgcaggagcaatggagaatgcagctgtgtccgcggatttgagccttcctatccagcggagtggagcctcggatacttcgcaaccggttgctcgagaccgagatctcttccgctgagctgccagacgaacggccagactgaacaagacgactcctttatcctgctagacaagctgcaggggctcccgtataatccccaggatggtttagcagcaactgatgaagactgcaaacaagcctgtctcagcagatgctactgcgtcgcgtatgcgtatcactccggatgcaagctgtggtactacaacctgtacaacctgagcttcgcttccagaggacctcctccatacagcaaggtttatgttcgttggggctccaagctcaggcccaagagtggtctgcgcacagggctgattgtatccatggtggtcgggtcagtagcgttggctgccgtgatagtgatactggcgctcctatggcgatcccggacctggagaggtgtatttacttgcagtcgcagagagtttgaagcaggaggttctctcgcgttctactcttacgcgcagatgaagaaggctacaaggaacttctccgacaaactcggcgagggagggtttggaagcgttttcaggggaacaatggcaggaccaaccgccgtcgccgtgaagaggctcaaacgcagcgggcaggcggacaagcagttcagagccgaggtgcagacgctcggggtgatcaagcacgccaacctcgtccgcctcctgggcttctgcgttagaggagacacgaggctgctggtctacgagtacatgccgaacgggtctctggacgcgcacctcttctcggagagatccgctcgtctgagctggagcctccgctaccagatcgcgctcggcatcgcgaagggcatcgcctacctccacgaggagtgcgaggaccgcatcatacactgcgac

SEQ ID NO: 131973 - DNA, 1010 bp, Zea Mays
atttttttcttgattgaaagatagggctcatgctatttgtttcttaataaaaaatataacatgtttttgctgctcagaatgtgtgcaacatggcacatgctgtcgtttaggctttcaaggtacacaagttacaatttcgtcccatagttgctccagttgcccattattatacgtgatactacattggatattgagttctggtatctgatttttttttctgtactaaactttgacagatttgattctcacccatttctaatttttatgcatggatcctagcaacaagccaacaaatctatgttgcaacttttaacagattgactggttcgttaaccgatacatatgttggtcaagagtgcgagaacaaggttcacatgaacttttaaggcagcacagtacagcaatgatgcaacttgcttggtcttgtccctgtgctgttcgtagccccatgacttcgagagtgtgcattacagaaggtctcttctatgggcccataccatcaggttcctgctattagcaaggatactgcacttctaacgatgatgattatggagggcaaatgctggtgttcttgggagcaccaaaagtacttgtacattatttagtccttttctccaagttataagttagcattgccttaagacaaacttctctaattttgatcaagttcctataaaagtatattaacatttgaatatactattatgatatttcatgtagaatctaactgaactaatttaatattataaaattgatgcatttttctagaaatttcatcaaagtaaagttggacttagaacgaagctggaggatgaaggatgaaaggatgaattatgtgtgttacttcttgccataagtcatttgtgagatgaacgtgatgaagagcattgttggctgagtcttctacactggacttcatcagttcatctccacttgatgaatcgtctcatgtctttgtggattcatagacctcatataattttagctaaatcttattaacacttttaaga

SEQ ID NO: 131974 - DNA, 421 bp, Zea Mays
gggccatcccggaaagttgatgagtagccaattgaacacgctgattctctgggcatccgatggcttctaacttccttttaatcgtgtgtagccagtcatctgcatcgaggggattgctggatccagcgaatgtgggaggcttgagcctcagaaaatctcccatcctgtcttgtggtcttccaccattcgggcgttgattctccagacttctagtgaggacctcaatgagtcgggtttggttggctagaacttgggctaaatctaatgggagctccagaggtgcggggaggtgggtttcactcccttctccaccggcttctccttcagctcctaggggaaaccctgctccaatcccggaggcggtaggtgtggttttatccgaagccatctaccaggagaagagagttactattatgcatat

SEQ ID NO: 131975 - DNA, 352 bp, Zea Mays
accatgcgaatgttgttcctatcaaggataacgaaaataaatgcacgcggaatacttccgtgtcggccaattctcctaattgtgctagaaactggccaatgtgttcgcgtgtgcttttcccttgatcacccgaaaattttgcgaattcgggtatcctggtttcatgtgggtatgggtgatgatcaaataggctgtcataaggtttccgatatgattgcccccagggaccatgcttactccgagcttatctcgaaacaccccgactatttcctccctcactatatcgatggcagacggtgcgagaccaccggctctctggtcaaacataggtggggttggctggatattagcg

SEQ ID NO: 131976 - DNA, 507 bp, Zea Mays
gtgaacattccttttcctcaagtgaattggccttctggtatagaacttggtgactatccgattgtgcatggttatcatcgtttcagctgccgaactcggatcagtagcatggttctgaaaagtgaggaggtgatcatttccaaacaaggtaggcatttcataagttgtctcgacacgggggagaatatcgatagtgagcttgggagcttgatccgggcctgtgttcagataattgattttgaacttaaactcattcataaggcactgtaaactactatgcagttcaggaatggccgcactcagccaggtaacctcaacgtttgggacaatgttgctattatgaaagcttgtgatgggagtcagcacggtgttttctcggtggtgttgattgagctgcacctcttgggtaccttggttgactaactgagcttgctctgcaacagagttgggctgcatctctcgagtgggttgagctggcatctgtgctgtgattgtgttcaagcccgg

SEQ ID NO: 131977 - DNA, 616 bp, Zea Mays
gtcaagcgataactctgaacaaagcaaggcccaaagcaatgtgctttgcaaagatcgaccgatgtgaaattaaaattgtgcacagcgcattagactagagtttgatcatttgtagacagaacaccaacaccaaatggatacaaaaagttaacaacccaagcaatacaaaagaacatgcataaaacctcttgaggctgaaccaagcaagacataacagattatgctaatacttgatgacaaatctattgctctggtgtccaaagttaattatatgaatccaaggggaaatggaaacaagaggtcacaaagatgataccgttcataacagattaaaaaaagttttcttcgacataaggtttattggtctgatattagaacaatagaaagtcattaggttgtcaatgtgtatttgcagaattaaaacgaagacaaactaaccttcaacctaaatccagtaaaaataatacacctaaacaatactggcttcaatttggcacgatttcacttccacacaagaatcgctaacattagcacatgatgtatttagtcacctgagaaacagaaaccttgtagtcgagtagcatctggggcatcttcttcatatgatctaggtcat

SEQ ID NO: 131978 - DNA, 454 bp, Zea Mays
gcgatggtcaagagacttgtgataattttttgaatatacctcagcccaaactttattaaaatctgactggcaccttgaccactcctcctgcttttgtttaagcctggttaaaataactggtaatgtcacaccaacattttttcgaagaacatcaataacatcaagtccatggtcaccatatagccgctcaatgcacctcatattcaaacctatcaagagaagcaaagagttcaatgatatgcatgatgttcaacaaaaggacaggagacaaccaccatacatataaagatgcatggtcaattgcacatatgtggatgcttactagtcaaatgttcatcgagggagatagagctgtctggtttcagtgaattgccttccatcctttccaccaacttctcaacacgctcaattgcaacagtaacagattccaacagcatgtccagctcaaacctga

SEQ ID NO: 131979 - DNA, 411 bp, Zea Mays
gagggaatcacaattacaaggctcatttattaccagcaaagcaagggagggggaaggggatacattttgatcaattattacagagagattatacaccaaagatattgcatcacacctctatttgttagcatttgtgggaggcgaaggcgttgcgcccacagacgagtgtccgacttgcacccgcatattacctggcgcaaggagttgagttcatccttgaagactttggcattccggcgtttccacagatgcaagcagcaaagcagaatgaagtcattgaagccccaatcttgaagaaccgggggacatgcaagctcatgaagatgagagcggtgcatatcagaggggacgacaatgcaaccatatatctagaaagctctggcaaagacacagtggaagagaatatgaagg

SEQ ID NO: 131980 - DNA, 733 bp, Zea Mays
cttcgattagatcggggcggccaacacgatttactatcctcgacgttcgggacgtgtattggggagggggatttgcggaatctgtttgaaggcgaagagttgaagatgatgtttaattttcgggaggcgggtcttattccgaaggatgagccgatgtagcatgtttgctagcctcgctctcgtgttgcgatagtgagtgaaaacgctgccctcccccaattcgcaatagagagggagggcaacaagatgtgatttgtattattgtgcaatgtggccgacggacccttcgttttgtgtatgtaaactatgatgaaaccgtgggctgcgcttgttgtaagattgtctcgacttgtaatcgtgttggcgtggcacttggatgggatggggacctcgcttcccacgggcgatattgaacgcttctggcacgtacgcggctgcgcccttaggcggcttttgtttggccgtatcggatagtagagactttgcacccttatggtgattactcgcgcttattatgcatgttcggctgcacctttaggtggcttttgctcagacatgtcttatagtaaagacttcgcacccttagggtgatgttgtgtacttattgtgcgtgtccggctgcacccttggtcagcttttgctcggatttgtcttatagtaaagacttcacacccttagggtgatgttgcgcacttattgtgcgtgtctggttgcacccttggatggcttttgc

SEQ ID NO: 131981 - DNA, 446 bp, Zea Mays
cctttagttaaggtaattaactgagagtgagctccgtttcctgccggcatgcctgatgcgggccgtgttgggcttcgaactattgcttcctagtcctcagcaagggtgtacatttgacgcgctaagcgcatctccaacaaatacttgtgtcgacgacggctaatgttctggaggaaaacagtcacattggtttacatgtgaagcacccagggccaaccaatacttgatctatgatccaaattagacggtctgatttgccaaaccgatacacttcctcactcaccggatccaaaatctacgaccgagaatccattacaacgcaatctagtcttgatcgttggtttcgtgaccgaccgtcctgattcaaagcgatgaaatggtatcccaccttttaatttgatcccttgactctcgatccaatgacctcttcggtgtttctaccctcg

SEQ ID NO: 131982 - DNA, 332 bp, Zea Mays
gggaactgcgatcagcagttcagcaccaaggaggaactggagaggtgcggattgttatctctcttctgatcttctccacggtcaggacgaagaacacacgagtcgtgagctgtgacctgaccctaatctaagcatgcatgcatgctactctactcacactggccgctgctttcagccatcaggtagcagcgagcatccaatccaatgactctaaacccatcgggcgtcttggcctgattgattggaatggaacgggacgggaggagggggagtcgtctgcgtccatctcatcactccagtgaggagttctcagccacgcaagttcgtccgtc

SEQ ID NO: 131983 - DNA, 285 bp, Zea Mays
gtgctttttaaggctgtaaggttagtctgtcttccgtggttctgtcgttctgccaactcagtcatattgactctggcaatgtgggtcatatgcttcctttcgcatccctctcacttgtttccttcccccagttgctcaaccgtcgtcctgcacatattgtcggttccccacctcattctcggtatcctctatactcgccctgcttccgtgctctcacaaagtgcaccgatgcccccgttgtcgccgcccttccgcctcatcctctccacgcccgctgctctcgcc

SEQ ID NO: 131984 - DNA, 470 bp, Zea Mays
gggtaccatagtcgaagcaaccacgaggcggtgaacggtaagggcgctgaatcccgataggggcgggagaaccaccatccagatagtggcatgacgtgcattcagcatgcaattccgcaacctccgcccgcaccttgcccaactcatcaagggtgtggtccaactctgtgttgagcacgacggccaagttgaccatgctgttcagcctgggattgccctcaccaactggcgaggcaatcacacctccagcactgtcggtcgaacaacaagagtagtacttcagatcaaggccatcaactaccccactgaacaacgagcaatactgagaaagtgcccgttgtgctgcatcttgcatggctgcctcgacaatatccctctcagtaatagaatagtgctctgagaaggcctctgcaccccggagatcatcgtccggacgccgcaccaagcaagtagcctcccactggtccggg

SEQ ID NO: 131985 - DNA, 401 bp, Zea Mays
tatatattgggttgcttgttggaactaattttttgcgctccgaacttctgaaaatctttgccatatccatttgatgattatgttctgattaagtgatggtgtctaagcaccaaaaatgaaagcaccctgactcccgcaactgaaaattgatatcaaggtctttctgtttgatcttgttcactgagaatatgatgtacccattcacattctttgctttcccatatatttttctagctttcaataggatccttgtgaacccaatccactatcatttctgcttaagttgtctccctaaaatgaaagaagtatagacattgacttaagaagcatgacgaggtaaaatgaaaattaaacaaatcctgactatagcacacattcacgccaaagaccttaaattgctt

SEQ ID NO: 131986 - DNA, 576 bp, Zea Mays
ggttgtcgagggtggcactgttagtgtgaaaataaataatcagattggtaaatatattaagagttacaaaggagtgcgtcagggtgatcctctctcgcctatcctctttaattttgtggcggatagcctcgctagaatgatggacaaagcttgtgctaatggggtcttgaatggtttgggtaggcatttgatccccaatggtgtgattttgttacaatatgccgatgatactatcatttgtatggaaaatgatttgtccaaagctagaaatttgaaaatgctcttgtacatttatgaaatgatggcaggattaaaaatcaattttatgaaaagtgaaatttttgtgatcaatggggatgatgatactaagatgcattatgtgaatctctttgattgccaattgggctctttccccatgatgtatcttggggtccctgttagtccttcccgtctgcgaattgcagattggataaggttggaaaaaaagtttgacaaaaagttggatagctggaagggaagctctctttccattgctgggaggattactttgattaatgcttgtttatccaattcccc

SEQ ID NO: 131987 - DNA, 670 bp, Zea Mays
cgcgcggacggcacgcgaaacaacgcgcacgacagcgcggaacgatgcgcgaacgacacacgacgacttgacaccgaacgacacaacgtaagagaattattaagttacgtcgtgcctatactaaacaaatattaattaaaacatttgagtagatataatcctgttaacagatataaataaagtgtggctaaaagtataaattagtttaactaaactactactttaatgactcggataaataagtaaataatcaactagttaattaaaacacgccttgcgatgaaataatgttactaacatgttggtgacgaggttacgaagttaaagcgaccgaaacgaaatagaaacggctttatggcacattataaatgaaatagctaacaattcatggctaatgaacaattttattaaggcgtgcgaatcgcgactcgcgtgaacgacgacatgtgaacagcacatacgaacgtcgtgtggacacaagtgacacgtgagggaagggtggtgatagcgtacgggaacaatacaggtgggtagtgtgcggacaacacgcgacatgcgcgagtgacgcgcaaagcagcacacgagcgacgcgcgatccagcacgccatcgcgcatggaacaacatgcgcgacatgcgagaagtatttaagcaaaggacacgcatacacta

SEQ ID NO: 131988 - DNA, 512 bp, Zea Mays
aacaagaggactggccggtgaggctgatggtttaacctaggagtagaggaaaggttaggcacggtgagcagaccatgggagcaacgggaacatagcaaggctcagtttttgcttcaaacagccatggcaaggcaccataaagtagcaggctacctgtggctttgctgggacttaacacaggtgaaaacacaagctagcacgttccacaactctaccgcatgaccaccacgtaagggcaaagcacaaggaggcagcaggggtgaccaatatcactgggtcagcacaccatcaagtagggcaggcagctgaatcacaggatccccagtcctatccttgggctgtgaacaatctcaggttaccccctccccaaggtagagctgtgcttatcggcaatttacccagaaccacctggaaaaagggtagtggactgagatctttctcagatatttgccactcagttttcaacttcataaggtcgactgcagtccaaagttcagggcccttgttctcac

SEQ ID NO: 131989 - DNA, 508 bp, Zea Mays
tgttcacggtgacagcggacaccacgggtaaccgaacacgtccccggcgatcctagggactctagctcaattggatgggtcagagagtatcaggagcatccaaggatactgaaacgaggactcagaggacatgaacggacctgagatgcgctggccacggcgaggtcaaaccgctcggtgttcttgagtgatttgggggaaatcccaaattggggagttctaggggatgattcgaggcacgggttgcttcactggttgcacaactacctagcggagcaagcggggtcggcaatttatagtaggcttgagcggtggcgtccaatttcacgacaatgcgctggcggccgaagaggaagaaggttactggctttcaccgtgactgctctccgacgatcaccgggcatgcatgacgagtttcactgcgacgtggtctagcgctttagcatgtggcgcacagcggtgatcggccaacggcggcgaggtctatcccggccgcacgacgagcaag

SEQ ID NO: 131990 - DNA, 668 bp, Zea Mays
gcgatctaccctgctttgtccacggtgatagcggagacagtcaatggaaccgcgtgttcccagtgatctatggcggtttagttcaatccgaggggtcgaggagtttgaggagagcttagggatgctagaacaaatgactgagaagcttgaactgacctgggataagctggtcgtggtgagggtgttcttgcggtggtagaacaggattgggggaagtaaggaattcatggtctctggtgagcgatttgaagcaacagctggtgcgttggattcgtgattacatggcgcaacagacccggccatcaatttataggattgttaagcgatggctgatgaatttaggcgagacgcgcggcggccggaggtgaaaggagctctatgcttggaacaggtggctttcaccgtggcagtcactccggtgatcaccggaaatgcaccccatggttcaccatgatgaggactagcgcttaagcacgtggcgcgcaacggtgacagatcgacggcggtgaaggttatccgatcgaccgatgagctggggggggggtacggcggctagtcggattggtgtccataacccaacggcggtgatgatctttttaccccgcgacgttatccagactaaaatgggcacgaatcacctcatcggcgcgaatctacgcgcgaggtcg

SEQ ID NO: 131991 - DNA, 519 bp, Zea Mays
tggggcaagctagcattctgctagctagtggaaggagaaggacgacctggtcttggaatctcagggcaacagtagcattctgatgttacggtcgtcgctgcggccaacaagacttgccaaatcagacgtattctcgtgttttttcttcgatgcatggaaacaacgagtggagactggagaatttatatcacggggaggctggagagaccaccgccatgcatgctcaaaactagtggagcttgaccggtgttaagtcttctcacgagttagcatccgagatgtttgccaaagcgaattttgaagagtgctcggtgttttttttcttcttgaaagcgatatctgagaaaagaatagtatttaactataactgtgatctctcgatgctttctaactcagattcaggtagcctttaattcgttgaggagtttgataaagctagtgtttagatctctcataaaatttcttatcctttgtcttgataggctcgtgattgccagccaatcccgtctaacccgtcta

SEQ ID NO: 131992 - DNA, 984 bp, Zea Mays
tttggaaggataagtggttatatggtaagcgaattaaagatcttactccaagtttatataatattatacccaagaggattatcaatagcaggacagtttatgaggcaattatagacagaaaatggatctctgatattaaaggtccactgatagtgggagtcttaacagattatcttcaattctgggatatgacttcagtttggcagctgcagcctgaggttgaggataaacatgttttcagtattgctcctaatggcatctattcagcaaagattacttacgagggcttctttttagggtctgtaattttccctcatcacaagaaaattttgaaaacttgggccttgccaaaatgtcgtttcttcatctggctggttgcacaaaatcgtctctagacagcggatagacttgctaaaagagggctgagtcatcctgagaagtgccccttttgtgatcaagaagatgaaactattgatcatctccttgttacctgttccttctcctaggaattctggtacctgttgttaaggaatttcggtctgcattctttggctcctcaacctactgttggctcatatctaggctggtgggaatcggtggggaatattgctgctgggctcactagaaaagggcttgattcccttatcattttgggagcctggacattgtggaaacatagaaacaaatgcgtttttatggctgcaaccccagtgttaccatgagtcttagagttgctaatgaggaaaggatgcaatgggagattgctggtgccaaggggctctgccatctagttgtacctttagctgaaagctaaggagagtctaatggattcttttatgtatgcttcttactggcctctgtaaggaggctgttttgtactggcctttcttggccccccttttcctcttcttaatatattatggggtgcagttctcctgcgctttcgagaaaaaaacactaagtctgaaatccaaacctgctagc

SEQ ID NO: 131993 - DNA, 351 bp, Zea Mays
ctggtgcatgccgtcgccattgggtaatatcgaaggggaggaagaaggtccttcagccgtccgatctggagtgtgtggattagattagatcgggtatagcctcttcatccaactaaatctacatcgtccggttctgtctgaacaggggagattcgatctccatatacctgttcaaccattgtatcagggccatcggattcaatacaatagtcccgattcactgataccctttcgacgggacggttttctaaaagagcccctagacttttgctgaacttacccgtagttcagaacgttgataagatcattgcacagaggtcctagaatttatgaattaaactccaagctctc

SEQ ID NO: 131994 - DNA, 402 bp, Zea Mays
tcaggcactacggtcagttcaatatatcgcggcctatgggtcagaaccttcattttcttgcccttcggtacaccagtggtggctgaagcggtagtttttctcttctttccttgtctttgtaatggttagtgataatcagggtatacgaagacaattgcatcaaacaccctgttcaatcttttattgccccgacccccgaaggctgcggacaaggcatcatcttcggccttggaatatgtcccaagcagctcgtcgctggtagcttcaatgcatttcaaccagtcatcgtttggttcatcaaacttctctctgaatctgaaggtatatttcaatcgaactaggccaccttcactggattcagcagtagtctccttcggcatttcccagctatccacaagtggc

SEQ ID NO: 131995 - DNA, 350 bp, Zea Mays
cgagcttcggttttcggacttgactatcatcgaaatggctgaagacaagaaaagcgctgaccccatacttgctggcttttacgaagccatggaaaggaccaacaaagagaagatcactaacgatatactagctaggctatctggtgatttaaacgaccgtggaagcttcgatattgagagtgagaatgaaaatgccaaagatcggccatggagacccagccatgttgtttttgggaaatccacaatcaaacaaggtcaaattgaagcaatgaaacgtaaatactttcgtgatgtatctatagtgagggctggaggagaagacatcgttcccctgccagaaagtgatgaag

SEQ ID NO: 131996 - DNA, 361 bp, Zea Mays
ggctgaggagaagtacgccgaggcctgcctcgccgcttgcggcgctgaccgcctcgcccggaagctccagctcgagatggcctcctgccttgcctcggactcgtgcacgccgcccgtccgctggggcccttggctgtactaccgacgagcggacgagggcaagcaataccccgtgctctgccgccgctccgccgcgctccatagcgaattcgtctcgtacagtgacccctccgcaggtttcgacttcacggctgggaagcgcatcgagcagaaattggtggattacaacaaggaggccgagcggttcggaggtaacaaccaaagttttaccacaattccagtttgtttcgagggattgccc

SEQ ID NO: 131997 - DNA, 500 bp, Zea Mays
ggcttgacgagggaaggtcagtaggaacaatctgaagatcactatccggggtgaccttagccccaccagcagacagcaggctccttgcatctagctcgccgacctctaaggcgacttgtccagttaaagctgtggaagcacgtgctgccatcgctccattggaccaaggtggggacgacccgatgtggacatccatggaggcattggaaagagagcagacctaaacaccctcggggactaggttgtagtttgcactacccacaagagctggatcgctaccagcaatagcctcgggggctgggtagctgccagcaccagtctcggaggctgggtcttctgcagtagccacctctaaggctgaaggcccctcagccacctccatgggagtcggatgactcagatcagcgtctctgcatggaagactgccctccaaggtcgatgatgcacgagacaccactcgggttacctcttgcccggtggaatcaagcaacgaaagccca

SEQ ID NO: 131998 - DNA, 371 bp, Zea Mays
gtcaagaacaagtaccccctgcctcgaattgaagacctatttgatcagttgagaggagccagtgtgttctcaaagatagatctaaggtcaggttaccatcagctcagaatccgacccgcagatataccgaagacaacattcatcaccaagtatgaactatatgtgttcatggttatgtcattcggattgactaatgcgccagcttacttcatgtatcatggactacctcgacaagttcatagtggtgttcattgatgatattctcgtatattcccagaatgagcaagagcatgaagagcatttgaggaaggtacttcagaggttacgagattgccagttgtatgccaaacttagcaagtgtgagttctgga

SEQ ID NO: 131999 - DNA, 749 bp, Zea Mays
caccagagactatgcacacgattgaatttaggccgaacgagggtaggaaagcgggtcgacagagagggtgtacgtggcggcgttctacgggattacggggtgttccggtgtttgtgctttggtaaaattcaattcgccggcaccgagagcaataggaggctaaagacaagctagaacaagagacaaatgggcgagtactgacccgaggagggctgcctagaaaggggtccttcacggcggcgctaagaacggtgaggaggagattatggcctatttgagtccctcggtggaattgggttgtttgcgcaagcactcgtgtgtgtgatgcggtgaagaagcagcgctcgggctcaaattatagggggtggccggaggtggatgagattcaaagatcttctagtgcgctggcgagctcacctgcgcgggcagaaccacggcgagcgtccggtgaacaccgattaactggacagcgccacgtcgcggaagatttttaccgcggccacagtccgatcctcagacgtggtggcaatcttatccacagcgagatttgctgaactacggtgaacagtacgcctgcctggccgaattcaaatggctattgcttcaaattttatgtggttgcttgcaaacgaatctgcatcaaagttgtacctagactaatgttctttcattttggtataacgaccatgtcgaaaaccctcatggattaatcaggccaggaccctcaagttggcgcaacaacactgaac

SEQ ID NO: 132000 - DNA, 626 bp, Zea Mays
aatcggaggcacgagtgggtgcgttgagtgcttgactacatggcggagtcgagggcacgctcaatttataagattcagggtcggtggctctcaatttggtcatggcgtgctggcagctagagatagggaagaacacgggttgctgtgaccgtggcgttcaccggtgcaacggctcaaggattatactcctaagggtgccacgattactaccccatagtaacaagctatggcatggcgcaaccgaggtcagcggagcttccatggcgacgctggcagtccggccacgtcgcaacggctacaggcacggtgataaacttcaatctgcgatcaaatccattcccccgtgagatcttttaccttcccgtagatatccaatctgtgccaagcacgaatcatggcaaccagcgcaaatccggacgcgtggatcgccggcggcgagcttactgagctggcaatccgatcgggatactgtatcatcacatagttccttcagaacgactgatagagcaaaatcagggccgattttctccaaattcgatgtgataacctcataattcatctgcatcaaagttatagacctataatctatcttcatttttactatagcatctctagtcaaattccta

SEQ ID NO: 132001 - DNA, 520 bp, Zea Mays
taacttttggctccactaccgtgtagtttacagcgcaggggatacgcacgccgtgtggtactggtaccgaatcaggtcctgtctgttgtcgcccaacgtgtcatcgtcgtcggatgtcgagagggacagcggcagatgatccaaggggctctcgcgttcggcttcctctccctgtcacgccccttctaccggccggtcccactgtggatacggtgcgctcggcgcgatccgtcggagcgccacggcagccagccagccacacacacgtaacagcgagctgctgtttcgttaaacgaataaaggcctcttcattctcttcgttccgaggaattgtttgcggcgttcttttcattatcatcaggcgatactagctgggtaccgttgacatctaggactcaccatactggcaagtggcaaggggcaagcttctattttcgtaaacgtcggaacatatctaaaaatcgcacattagtaaaacctagcacacgtgtaatggttaaatgaccttgaacacaaacta

SEQ ID NO: 132002 - DNA, 345 bp, Zea Mays
gtttacctaaaaaagctagcttggtaagacatcgtagatgattacgacgcaagcagaaatgatgacattttgtcctaaccacttttgtattccgttttctatggtgtcgcatggtgcaatggtgatagtggtattgtgcgtgtggggtgacaaactagtgatgtttaggatgtgcttgacttagttgtggactatcgaaaagcggcccggggttatgagccaatagaaagccaaaattttgtcatatatatctcatcatctatattttttctaaccatattatcagaattagtttccaccaattttttcctaatactctattttttcaataaaatctagtatgag

SEQ ID NO: 132003 - DNA, 367 bp, Zea Mays
gctaaaccaaactgatgctaaaccaaacagatctcgcgcgaggtcactcaggacactccatcccgatcgacctcagaatcgacgacaattcatttcttctccgatggcagaagggacgccgggcgatctggcgcgctactgcccaccacctgcaagccgaaggcgcaccatcacctccgttccaagtcctccctctccgtgtcgtcgtcctccgtcctccgatccccaccgccgctacgcatcctgtccttcccttactctccctcacgccctctacgtcaccatgactcccttcgcggcgctcttcatctttgccttccttctcctttgcttcccctcatctcactccacaggcgttgtcttcccc

SEQ ID NO: 132004 - DNA, 395 bp, Zea Mays
gttcgattgcatggacggaggagtcttcagatgaggacttggattattttgcagcgttagatgtggctgcagcggagccttcgccgcgcgtggagggttctgaggggctcccgggtgcgagtactgggtgtaggcggcgaagggcggtggcgaaacggagagtgagcgaattgtcgtgaagtggtaggcgtcatcgtagtgagatggagagtggttgtcttcgcgtggacgggactggtaaacgagaattgttgtcctcgccgattggggtgagtgtaggtgaagaggagctgcgaaatctttttgagggtgaggaattgaggataatgctgttcaactacagggagatgggtatcatcccgaaggttgagccaatgtaatatatgatgccctcg

SEQ ID NO: 132005 - DNA, 1340 bp, Zea Mays
tacaaaacgtatctggtcttcagttgcaggtatatatgtgggggtgatgattgttgcatccccgatccctatttaatcgacatttgattaagtttagatacaattcatgtgttgctataataactagatgaaattatacattagacaatgttataatagaatttgctaaagattaccatattttaccaatttctcatacaattcacacaaacaacaagaatataatgtatatccatccacatgcatcacaaacaccattcacaactcacttacatcacatcatcaaatacttcacattacaaattcctcaaacaaacacatagaaacacatattcattttgtcggtgttttggaccaggggtcctcaaccaactagtgaaacgatattgcgtgccctagacccagatggtgatttgagttgacacaagcgatttatcctggtttggactacgagaggccatacttccagcagaggtgggatgatgcttatattactcacacaaaagtgctcgtggtaggggttacaagcatagcgggagaggggtggatcctaagtcccagctggtgattgaggcaagtcccaataccaggtaggggagaagaatgatcaagtgttcgcctgccttgtgtctccctgttccttgtggagccgtgaactatcctatttataagctcggggagagttgccttgtagatgggagccaactacatgctgtgaaggggtgtcttcataacctatagacaatatggccttgtactttgccgttgacttgggcttgcttgttttctgctgagagcagaggccgaggctgagggcttggtcacgtacccgagccccctggcgtgggatttcccataccgtagtggttgacatagtgcctgtcatgggaaaaagcttcttatgggatgcgtcagctctactatttctgatgatgttgggaagtcctctgccataggtatcgagggaagaactgagctcgggcaaggcggaggtccgtctgaggttgcgaccgagtcttgtcttgagatttgatgacgtgtgccacactcgatggagtggccttccacgggattcacaggggacaggtagccgaggctgggttcgagcgaggcggagcctacgcccaaggtcgagttctgtattgggcgaggcgaaacttgcgcccgaggtcttggtccgcatcatgtcatattacgcgtcccatcaagggttatcaagcggcatgcacatgcgtaatgatgttggtgaatctttgataagaccgcggtcctgttgaacgattcgcctgtagcccaacgtgaggtaggtgtccgcattgaatgcggttgtctcccaacgg

SEQ ID NO: 132006 - DNA, 571 bp, Zea Mays
caccaaactcaggcatcatggacggttcaatatagcgcggtcggtgggtaagaacctttaactttttgcccttcggcacaggctcatctggagtggcagaagtagcagcttctcttctttccctgcctcgaagcggatagcggtagtcagggtaaacaaagccaatggcatcaaaaactctgttcaatctcttctttccccggcctccgaaggctatggataatgcattaccttctgccttggaatatgatccaagcagttcatcacttgtagcttcgatacatttcagccagtcatcgtttggttcatcgaattgatccccatacctgaatgtatacttcagccggaccagttcaccttcgctagacttggtgatggtctcctttggcatttcctagctctctacaagcggccatactctgaaggctatatgctcttggattaaatctcttgtaccaatgaaaaacagacagtaccaaatgccttctgacaagcttccacatcatcatcaatttcaaccttcggccttcaaaggccgaagcaggaccaaatggggcacataatgacttcc

SEQ ID NO: 132007 - DNA, 527 bp, Zea Mays
gcggtggtgtccctcccagaggttgatacaactttggatgtcccgaaacctatcagtactcgcccgaggcgccctagccgaaccagtcagcccgagccttctgctgatgagcaaaagaagaagagaagacgcctccgacgagtatccagctttgatgaggacgccggtaccttagctcctgctgctgaagaagtgcctgcaactggccttgctgacactgatcccaatgggtgtgctccatctgctgctgaccccaatgggtgtgctgcttgcgttgttactgtggaagatgaggaggaagaaaatgaggctccattaactcggaaaaacagtcggcagttcattgccagcggtggaagtagcggagttccttctcctgctttgtctgccctcatcggtctgcaagagctgtccctggccaactttgatcaaactctagaggatatggtcccagaagacttgttatcagagcctgtgggtgatgatgcaacaaagacttgtgctgccgtgcctgatgctgggttgag

SEQ ID NO: 132008 - DNA, 687 bp, Zea Mays
gtaactatcgagcgatggctgacactgctggcgctttagagataaccgccaagtcatatctgacgcttggaacttagcttttcccgagtaatgacttggcactttttagaaatagtgcccgacccgggaaaccccatttatactcgcgccgacatgcagttttgattttcgagccctaacttcacatttccgcctcgaaccactcctccgcttccctgagatctcgctcttgttcgttccactgcaagattatgatggtgccgaaatggaagagacaaagctccattgcggcaatcatcccgcccatcgaccccaacagctagttgccattcgcggataaccacatgtctgttattttagaatctgaccttcttcaccttgtcaatgttggggttttacttccaaaagagctctactcttggtgaatttgccgcggggtcactgttccgacagaggatacccacaaatctgtcgtttacgttccctttcttattcatggccttgctcttcccgtttctccctttttctgcgccctccttgatttctacaaactgaacttgacccatctaaaccctaattccatcttgcaagtttccatttttgtacatctgtgtgaggcctatctcggtattctcccccatttcggtctctggaagtacctgtatcattgtcggccgaggatggctg

SEQ ID NO: 132009 - DNA, 298 bp, Zea Mays
ttttgcaaaaattgtaggactggtctatagaattacttacactagcatggatgtcgggttagttctttctaaacgcaggggttcttttgcaatttggcgctgcccaaggggtaagctttaatcctggccgtttgatggctagtcaagcacctagattatattaggttgacaccaaaccagtacgccaccctggacacccgatctaacatcaacgttcatgatttaaaatgctgagatggaatcccatacgcccaatctcgatccaacagcatagcctcaatctaatctcgtccatcca

SEQ ID NO: 132010 - DNA, 569 bp, Zea Mays
ctactgctagttcctacccttctttggtgccgagggtgcaggcttcatgtggccgatgaggtcatgagctcgttcgtctatggtgatgtagatgtctgcctcccagaacaactgttctgaggtgatgggagccttctggaggatggcccggacaaaggatgagtcgttagacttatggtagaagtccttgatcacgacagcctcatggtttggaagcacccatgaatgagcagatggtctcgtcgctttggagcttgatggacttgaggtcccaaagttgtgtcggtttattgtcaaggggttgaaagtttatgataatcgctggtgacgggatgtcagagccattgcagcgcatattgcctgaggacaatgggcaagtatgttgtcatgacgtcctccgtcgccccagcggctgaggcggtagtcatgtagacggtcatccagccgctcgggtcctgcttgggctcgtacttgtcgatgttggagaccttgaagttcggcggccattgaattgctcggagtcggggggtaagggctgaaactctgcacgtctcctggtcctctcggcg

SEQ ID NO: 132011 - DNA, 336 bp, Zea Mays
ttgaccacaacaacttggggagagatgattcacgatggatttgggacagaggatgcacacatgagagctgagaggcaagggatgaacgcacgcacgacgctagctaaacagtcaaggcggcggcttgaattgggaaggaggatcgtcgcagcttgtgttcgtgctgacgctgaacggggcggtggcagggcgacgatttggaattgggaagaagaaaataactatctagggtttggttcagtaaaagaataggcggcagcttggaattggcctgcttcaggtgggccgcgcttgtgaaattttcgcgccaatggaccaagtgaagcgcgtggaggc

SEQ ID NO: 132012 - DNA, 390 bp, Zea Mays
ataggacaaagttgcaaatgatgatccatgggtgtgccaaccatccaattatcagtgatactgataccgacacgggcaataagatcgtgtatgtacttggtccgagaactgtagtaaccattggcatattacttaacttcaagcctaagaaatagttgggagggcctaaatcaaacatttgaacacatcatcactagtaatcaacatatggaagaaacaaagtacgaccacgtggtgagagatgaataaacagagcaaagtcatgatcactagatgtgaagccagcaacctttataaaagatacaaaacgttcaaaccaagcatgaggagcatgtttaagaccatataatggtcttgtgagcaacaagggcaaatgtctcttcataatcc

SEQ ID NO: 132013 - DNA, 501 bp, Zea Mays
caatgatgatcaaaactcgtagtagggtctacaagcgggcgagagaggaagtagaggctctcaattcactttataggggtggaagtggagcttaaaagctacagagtggaatcctagctaagtcttggcttggcggcggggctctggcctcctcgtcctcgttggcgctactcctcctatttgtcagtttgtcaggggttcgtctttgtgggtgtgtgtccagatgaactcaactccgtctaccgtagtctctatgttttgtccgtctgtcctccctttcatgagggctaactcctctcatttataggcctagagagggatcgaccagcggtggcttccttaaaaaggagccatgaggcaaggttaaaacaaatgttatttctcggggtaaaaccacacgtactcgtggacccctgggccacccggctatctcgtatttactgtggcagacagcgtggggctgcctgggttccaggctccatcatttaggctaagccgacc

SEQ ID NO: 132014 - DNA, 328 bp, Zea Mays
gagagaaggcccaacaggaaatgggctggaccggaatgggccaaatgacgcgtgaagcggtgcccggggagcagtcctggtttttagccagccacgggaagcgtaggatttttgggttggaactgaagtctgaataccggctgcgtccggcgatatggtgagagagagctaggctcgatctctgtaatagcgaattcccacctgtactctggaaaccccagttaaatttgatcttcgtgagaggaggagagtaccgggaacggtgctcgttatctcagatttggttcctggtgtgttctggcggtggagagtttattctgcagtgtca

SEQ ID NO: 132015 - DNA, 438 bp, Zea Mays
tttggatttcctgacttccaagttccaccattttttttggccttcttttctgcagaatagcccaagaatccaatcagaagcaacaagcaaaaatcacatcagcaggttcaataatgctcctgttgttaaaacaaacttcatttctaagcttccaaatagcccagagaacatcccccaccctgagcgtgattaaatttttaacatcatgaccaaaattactcagccaatcaccaaaaagggagtcaaagccctgaggacatcttttcagatccagggccacttgcaccaccctccagacaaagatagccacaggcaattaaagaagaggtgattagtagattccaaaacgcgacaaaaactcattggatatctacctacaattttctgttaccaaactctcacacgcacttatgccgaacaactagaagctgacaccac

SEQ ID NO: 132016 - DNA, 873 bp, Zea Mays
cgggggctcttatgcaagccagccacacgaaggggtatggagtgcctggggccgtccgattagccttcggccgccaggattagacgcgcgcgcattatacccccacaactcgcccccgatcgttggatcacgcatcaacagtagagaggcagccacactctaatcttgatctaggtcgttcaccaccgcatcaacgattcagatcaaactacgcgaacccggtaagatcaaactacgcgaacccggtaagctacgatctaatcctaaccaccaggtactggatgaacggtcgagaatagcccacgctatccggccggacatgagcgacggagccataagcccgcggcagcggacaccgcagccgccgacctcccgaaccgttcggcgcaccataacccaattaaaacctcccacgcgagcctgcaacccggcgaatcgatctagcgagctaatttatgcgtatgatcaatggaaactacggtccacaggagagggcggtccacggtggtgctaccaacgccgacgagagattagcgccccgacgcgactgaataactaaatcactcgggcctacattggatgaggttaacgaggagagtcgcagaattcttacataggtccattggtgcggggaatttggtactcgcgttgaggtggcttggcggtgacaacggcaatggctccgagcggtagtggcggcgcccaacttcccgaggtgacccgaggttcgtgaggggaggaaggaggaaaagggacgccgggcgcaggtttataccttggaggggtcgttggttaaaggcccgaagggagcacgcggcgcgacacgtccagccacgtttgtcgcgagtgattgaggagacagaactaacggaa

SEQ ID NO: 132017 - DNA, 352 bp, Zea Mays
cgacatcgatcttgcacaagggtttatacaggtttaggccacttttgaatgcataacaccctacttcctgtcgagactgtgtattggattttctctggagtatgaagattacaagtgagctttgtgggtgctcaggtgttgtcgatgagtgctggtgtaaaatgggacggggtgagatgagatgattttgtaggggtccccattggccttatatacatgaccagagagttatctctttacaagttgttatcactatctattctatctatctcctcctttatcgtggtttgtagtcatacatatccggagttcaatcaccttctcagccgagtcatcgtcaaatgcctagctc

SEQ ID NO: 132018 - DNA, 814 bp, Zea Mays
gtcgtccttggccgtgatcatgctgctcgttagcaaaaggctatgccaaagtgggaccaacggctacttgctgcgtggatgcatgctactggatctgctcagtctcatgggcgccttcgcggcaggaagctgcaggagagtatccacctcagtgtacgccatcctggctgttgctgttgtttttgcctacgtcatggctcaacttctggtgctgacctttgcaaaagagaaggttggctacttcttcgagtgggtgctccgtgccactcctttcaagagtccgcatccatccaaggacggcaagcgaagcatcgtggccagccagaaacctgagcataaatggcgaaaagatcttattctgattgggaccttcgcggcgagcgtcacctaccaggctgggctgctcccgccaggagggctttggcctgatgaccgggacggccatttcaccggcgacccgatcctccatgacgccgatccacggcgatacaaggcattcttctactgcaacgccaccgcgttcatggcgtcggtggtcatagtcatcctgctgctcaacagcacaataagcaagtacaggaggtctctcctccccatgaaaacggcaatggtgctggacctgcttgctctgcttggggcttacgctgctggcagctgcaggaaactgaagacttctgtatacgtcttcgcgctcgtcgttgctgttttcatgtacattgtcgttcacatcttgctgtccttcgataaaatggcacgggtcatgaagaggactggagaacagtgggttccatgtctgaagaagatgtgggcactc

SEQ ID NO: 132019 - DNA, 390 bp, Zea Mays
gtatgatatgtctaatttatgagtatcatcaatccgatgctctacaataaaatctactacgacctagcctttcatagatctcaatggttcatatgccaagtcatattctatgagtgcataagcccatttaccaattctaccactcataatcgggttttgcaacatgtatttgatcacatcggtttgaccggaaatggtgcaacgactagacagtaaataacatctacacttggtgcatgcataaaacaagcataagcattaacttctcgatgaaagtgtaccttgtttcagcatccaccagcctccgacttagataggtcaccacatgctcctttcctccggtctcttgcgtcagaacaaccccaataaccttatcttcagttgcaatgt

SEQ ID NO: 132020 - DNA, 550 bp, Zea Mays
gggtggtgcttaccaaagcaaaggaaacatcggggactcatcagtggtgcggaacactggcttgtcggcgacgacgtgcagcgtgcaggagcattggaactacggagtgcctgggtgtgtgaggagcgggggcacgcacagagctcagatcctcctacttaggttgtgtttggttgaagagcggacgagaatggagcggttacattactgtttttttaatgtttggtttccaacgaaagaggattggagcagctcctagagtctatatatggtaattatttatgatgcttccacttcactgaaactacttgatacgagcgttttcctcccctccacacatcattaaggaccgagggacatgggatggcaccgacaggcgggcccagcgtgacagcaaggtagaggacacgggtgagattgtgagaaggtggtttgggtgaggaggtgggtcgtagaccgatcaaggaggtaggtgagggttttttcttttctctttttgttttggtgtttaggcttaagttttaccaagtggttgattgttccatcccac

SEQ ID NO: 132021 - DNA, 479 bp, Zea Mays
ctcggtaatcttcccctccgtatggtcgcagatgtctcctcttcgcgtagctgcggtccaatttatgtgggcgtgcgtgtgtgcccaacgtgcatcgctccggcgaggccccgtctctacgacctctgcaccgccgtcataggtgtcggggttggggaagagtggggcgaccgtggatcttcggttgtgcgattcagattagatgtgggcagatccgttaaacgatggggtggagtagatcaggccagcactaaatcccgggcatagatcttgaatcctacagtggctgtcttatatcgagttgagcttagatctggactgcggatgtccgatcgaacaacgctgatcagacgaagtctaccggttcgcctagatctaatcagtgccctaaattctagatcgggcggctgagataaaccagtacccctttagctcggccagtttgctaaagagcccctgtggaaattgtgaattaaccc

SEQ ID NO: 132022 - DNA, 497 bp, Zea Mays
ggtaactggaaataagttcctgtactattcctgtgtgccgctgacagattacagaaaggcccttccccttctatttcttctcccgatacgtcctcgacgacggcagtgcacggaggagctccggcgagccactgcaccggccgattggaggcgatgaccggcggcacccgagcggcggacaccaaatccaagctaccccgagtaattcccccaagttaattgcacaaatcgtgaactactgtggtctggccacggtgagcgcgcggatgaaccaaggatccatgcgttcccgacggtcagtggacccttagttcaattgggcgggtcaacaagcatcgtagacatgtgagaatgcttaaacgagggagagggagggttggactgaccggaaagggggctggcctcggcgaggttagttcgcggtgttcttgaaccgaattggggagaatgcgcaattcgggctcactggtgttcggttgggagcaattcttggtgtg

SEQ ID NO: 132023 - DNA, 484 bp, Zea Mays
aaacaggccaataagaattggaatattcccaacccaagtttaggcttcaatgggagtctcaaaatgttccattgatgaacctttcaagccacggtgaaaattataggtgctctattttgccaaaactgagatcaaaagggacaaatacatgcatagacaaggtcacaaggttcatttttttctatgcgacagggcactgaagcagttaatttcttggaacaaaaccacccaactccagcggttatactactgtttaatcagctagaatcaaagctgcattttgcggcacccaattccatagccccactactcacgagaaagcccggcgccgcttcccaagactatcccaacaaaagaaagatactcatacataggcatagcatcctgaaacaaagcgggaaaggaagtatccagggataatatcataacagggatgggcaacaagggtaccattcttttaacaagcaggggagctatgtattat

SEQ ID NO: 132024 - DNA, 963 bp, Zea Mays
ggccagccgatctccaccgtggacttggccgccgcgctataaaggctgcggcctttggccaccaccttcctcgcccccttgcggttgtgtgccctcaaccagtcgcgttcggcccgggtgccatgcgctagcgtgctttgagagagatgcagggtcaacggcgtcgactcttggccgtgcggtcgctcggtgttcgcggtgtgcctgggatgttcaccatcgtgtgcgcgcgggagctcggtgttgtcgaacttggggggcaaattggagggccgtcgatggctgaccgaatcatgctctcattccacaaccgcgccgcatcacaccctggctggagtcggcatcgcgaaattgttggtaatgccgccaccatggtccgtcatctccgcctccactcggtatccatggtggggtctgggagaatcgccggagcgcgtggattgtgatcgggcatgtgcttggccgcggtggccttcggagtccagtgaatcgctcgccggagtaccagcatcgccacggtgccgccgtataccgcgggcagggctaatctccatgccaaagacctgtaagtcatctgtcctcgtgctcttcgtgtcctctgcgtgattaagtagcactcgcattgggcttggaaacctgtagctcggtaagaccgcgccggcaatggcgccgccgctctgggcacttccgccgccactattccgtcgtgggggtacgagaactctgggggccactgattccgggttggacggttaggattaaatcgtccgcttaccctttcgtccattgaacgcagatcgtggatcgtccatccgatggccaggatgggtcatagttgcgggccgtcgatcggagcacgggcggtcctgattggaaacagtatcccctctcatgcaatcgtatctggaccgtagatctgtaattgcgcgggtgagagtcgaccgtgggcgttataatatcctg

SEQ ID NO: 132025 - DNA, 527 bp, Zea Mays
tgagttctctcctcctgttgtctacataactcttctgccgactctgagctttgagtaatcttttgcggattagggcaactttctcttctgcctccttaacaaaggcaggcccttccagtgttgtttcccctacgttggaccacatcagaggggtctgacactttcgtccatacaaggcttcatatggtgacatcttgatactggcctagtagctgttgttatacgagaactttgcatatggcaaactggactcccaattcctatcgaaagtcaacacacaggctcttaacaaatcctcgagttctttgttgaccctttccgtctgaccatctgactgagggtgataggcggtgctgaagtctagcttggtgcccatagcttgctgaaggctcatccaaaattttgaggtgaactgtgttcccctatctgacactatcttccgtggaataccgtggagtctgactatttccttaagatatatccgggcaagggcagctcctccgaaggtagtttttactggatgaaat

SEQ ID NO: 132026 - DNA, 683 bp, Zea Mays
ctttgtcctcactcatgtgcacctgagaaggcttctcggttggtcacccatcccaagattgctctgggctaagtgaggaacgatgccttgatgggacagccacccagatccgaacaaggcaaggaacgaaactcgtcctactggtgcctagggttgggtggaagagcgtagagcactcctaatctagggaacaaaagggatgaacagagggggcaaacagtaccaatcgatacaaccagtgcctcagaggctgttccaactccgatgagggccgaagcctgagcccccccgtcgtcgggaccttgggctttcagccactgcatccttcgggcacccatgccgtagcgctataggcccccagtcaacatcatgaagtattaaagggaattagattatcgcctttagctatgagactatcggctagcatgtcaggtgggaggagcagattgtgcgacttcataatctagaatctccccctatatctggccgattcgacgtgagcatggctcgaaaacctcatacccaagagcatccagaactgagctgaccttgagaaagtcttttttggaaacatgcccgagcaacccgtgggatctcaagaattgttggcaaaaattggacggaactccaagggattacatcctacacttttcacgacaatgtaacaggctaaccaaccttgc

SEQ ID NO: 132027 - DNA, 680 bp, Zea Mays
tgagctctatgtatctaggggtagttgaagctagtgaaataaccccctataaataggtcgaaggtctgttgtgtgcaaccatctcttttgcctatctctttagacacttgtttagaaaacaatagttttccactcactagttgctctagtcttagcctagagatccgtaggaaatttgtaactcctcatatgtgaaccagtgattttgagaggaatggtggccataaccatccacagtccagtgttcgtcaaatgttgtgctaagtttgtggttgctgcagttttttatttgattttgtctttgctctttccccttcttttctcttgttggatttagtgagaattgttgatttcctgagtttgaggattgatttgggggacacctactgttgggacactatccttggatcattttgagtcactggttagagcatatcatgtatgtgcttcgttctagcagtttgatacgaaatagccaaacccgacaaaaccccaatcgcaattgagattttgaatatgttcgagaaggtttgatcttttcctattcaaacttcacaaatatcgtctccttcctcaactcttgctgcctacaaaatttgaggacattctgacaatttttatcgagcggcactgtcgctcattggcctggcactactcctcatcggcactgccggactttg

SEQ ID NO: 132028 - DNA, 355 bp, Zea Mays
cgacaagcgatgtcactaaatgcaaagaatgtggtgtgttggcaaatcaaaacaacactatgaataaaacaactgatgaacagaaattcaagacccaaagggatgcacaaccgaaccaacaaacaattaaccctggaacctgttgttgttgtgagtactatggaattccttgtcgccagatcaatacaaacgaaagtgaaactacaaaacagaagaaccggattttattttctggcataaacagacagatgtctccccaagaacaactaatagcagattctctcatacctaatgcactgtcagttgatgaattgcaaagtattccagaaaggaaacatcacaaggatgcccagcc

SEQ ID NO: 132029 - DNA, 370 bp, Zea Mays
tgcacgagaacttcggctgctacaattttgcttatcgcaaagatgcgaagtctctagttatcagctatcgtaccaaatggccagctggctagaagactgaatggttttatgtcaaagttgatgagaaaaaggagaagctggttcaaagcccattagaattaatcttcggagagactaggccccggtgcgacatgaaaccggagagtccatgccaaattgcactgggcgaatttcgagttattgcggagcacattggtactagggatctggtgcaaaattcttagcttttagagtattcccaactttgaaagaatgggacatgctgaagctcaaaggggaaaagaaagagaaggaacttgtttggttgccc

SEQ ID NO: 132030 - DNA, 585 bp, Zea Mays
ctttaatcatcgttaaaaatcccaactcaaaaatatctatgaattttcgagtaaaaaaaaaaagaaaatctcctttacagcccgttgcatttccttcttatcccatctctccctctctttcttatctggtatgcgtgagtctttggaaaggaaaaaactctctagccaatccaatccccgccgctcttctcgcctttagatttttcagccgccggtacttatcttctgtgcgcagttcctttgcttctcatccgtcggcattcctctccattatttcctaccgctgccatggcctcaagctgaatgagctcgcccccatgtccgatggcagttgtctctgcccctcctccctgtttttgtgccagccaagttcgtccagccccttgccgctccatctcatcagcaccgtgcagctcgcttccatggccgttccctgctcgttcttcctggcgcgcgtgctcttcccctgcgctcgccgacgctcctccctcgcccatgccgcagcgctccagctcgcatccaatccctgcgctcatgcttttccccaagccaagcacgtttgggtgttgacggctccagtctcct

SEQ ID NO: 132031 - DNA, 448 bp, Zea Mays
gatgaacagagcaattgccgcctcaagttaaactgtgctcacatctctctcactcacctattggaatcaatctgcccgggaacgcaagttccaacatcggcgcccaccattcgtgctacgagaaaaccacccgcgatggcacccaaaagagctaactcgaaggcagccccatccgtcgacgaagcagcgaagggccgaaggcagacctgctagctgagaaaaagggcaaggcccccgctgacaacacccaccaaggagctagcgaagacgaagcacacagtaagagacaacgcaacgatcaacacactccataaggcacccttcgcacctgcagctccgaagggtagccacaagtgccatccccaggctttgcaccactagagggcaaggacgcagtagaggacggcgaggtcctcggcgtctccgcagaagaacagctacagctacg

SEQ ID NO: 132032 - DNA, 465 bp, Zea Mays
aggaagagcatgacgatgccgattgggttgctctcgagccaactccaccggccgccccagtcgagcctgcttcaactactatggctgacggacccgaccccactccttccaccacttggggtcagctcgagctagctcctgctgagactggaggagtggaagctgttgttgagggggaggccacttcctcaagggaggctccacaacatatttagcactatcacccacctcagcagatgatcggagagcttcacgagcgagtcactcgctctaggtcacaacacatttctcattttgctcactcagcttttgttgctacttttgagccctgagatgttggacatgctttatctgatcctaactaggttaatgctatgcatgaggagcttgaaaattttgaaagaaatcaggtttgggttttggtgccacctccttctaactgccatcccatcggtacaaaatggg

SEQ ID NO: 132033 - DNA, 310 bp, Zea Mays
gaggatatcgatattgatgaaacacaagatgcctttactgttatccctgacgtacctgacccgtacgacaaggtgtatagtaacatacctgaagaaacatatttgttgaacaatgttgctgactgtgactactgcaaggcaaagaagtttcaatatgaaccacctggattttgttgtcgtaatggacagattgatctagccccattcgagacaccatctcagcttaggaggctgtgggagtgtgcagatgctgatgtgaggaacttctgtgataacattcgattttttaacggccatttctcgttcactt

SEQ ID NO: 132034 - DNA, 445 bp, Zea Mays
acatgaacttcagtggaactgtatggtgatttctagagaacagttcagttgcaaaagataaaagggaataaatggccatcacagaggaacgaggggtctggaaagaatatcggtggtgtcaatgttaacacaagaactctactgcatgctactgggacacgataagacgtcggtattctcactgtttgctattgtggcacttgactcagctccagcaaaaatgtgcccatgttgcctacaactctagctccagcaatgaacagttcttgtatatgttcccaaaataaactaagcacaagcaagtgagtgtactattcacgtccttatttgttccaacctcacatactattagcaagaaggcggagcagcctttactcctggcatgtcaaatattagaccttgtctgaaaaggtactacctccatcaactgtggatgaaaatgatc

SEQ ID NO: 132035 - DNA, 896 bp, Zea Mays
cattttctataattgttttggctctggggataaaagaaaaagacaaattgatgaatagtactgggctgctttcagcccagtagcccagcacagagggagaaagcgtccgcgcgcgcccgcgcgtgctggcggttttgcgcaaaagtcctcggggctttcacaaactgggatccggtcttccactgtttaacgcagtcgctgacagtttgcataaaagtccttccccttctatctattctgagtttaaagtccccgaccacggcgcgtttgccgttcatcactgacgccgcacggactggccccggccgacggcgaatgctcagtcgagcgacagcgggagcataacctactcaaggcgaccaaggaacatgcatcaattggacaagaacgccatgagaacggcctgtccacgttcacggtgggaaccgcggcgttgatcccatgttcccaattacgcaggcccggattgggcaaacggttgctacggtgagctttacgtgcctacatagatgctagaacaatacttgagaggcgcggaactttaccagagtggtctggccacggtggggtgggtttcacggcggcggaaaatgatttggggagaactccgaattcgcggctctcagtgaatgattgaggctgattcgaggtggctggttagcggacgaccttgcggagctagtcacaggctcaatttatagggaggacgggcggtggtgatcaatttggccgagccgtgctggcggccggagctggagaggaacgtgggtgcggtgaattcgtgtccaccgccgtggcaacctccccgtcgacgatgggacgggtatagggagtcatggcgacgcggtggaaaggcttggacacgcggcgcacagccgggaagcggcgttcatcgg

SEQ ID NO: 132036 - DNA, 319 bp, Zea Mays
ggtggatccgtcgtatttagagatgtttgctggtgcacgtacctttggggggaactacgcctttcggatctcatgcccgaaggctcgcagtcctggtccaggtgggatggggctgcattcgcgccttcttttgagtggctgctcaacttcttcctgctcctgacgcctattgtcgaggatgcatcgggtgtcatagatgcttctgaggtggtccttcatggggacacacgtcctcgtggatcaagaggattgtgccccctactccaagacaagaccgtttgtgggtcgtagctttccgtcctgagcgggaagtaccgat

SEQ ID NO: 132037 - DNA, 425 bp, Zea Mays
gggacagggtagcagcagtgttcgtccccgctacgtttcaccacagggtacaccgactcgaccaggaggaccacgcccagttcagtatgctccacaggggtctccacgaacacctcctactcgtcaggctactcccactggcaccccgacgagacctgcaggacagaagaccagccctacatgcttcaagtacagtcagattgggaactatgctaatgcttgtcctatggggaattctggtacaccagctaagaacaagcaacagactcctggcaagggatattctatagccaggttgaatcaagtcagtgtcgatgatactcctgatggtgctgacatcgtactcggtatgttttacattaatgccattcctgcaaccatactgtttgattctggtgctacacattcattcatgtctgctcgat

SEQ ID NO: 132038 - DNA, 394 bp, Zea Mays
ctcggcaattatctctaaaacaccgacgtcgtcttcagtcactcgacagttacctctaaaacgccgacgtcgtcttcagtcactcgtcagttatctctaaaatgccgacgtcgtcataagtcactcgactgttacctctaagagcgccgacatggtcatcagtcattccaaagctgatgtggcttcgtcatcatccgggcgctacttcagaagcgtaaatgttgacaataatagctcagccatcacccctaaaagcgacgatatgatgcccgagttactcagccagaggaatcgacttcacagataaggcaaacggaggaacgattcgagaacttcaagttacgacacaagcataacatatagagaacatcacggacaataaatatcacgacag

SEQ ID NO: 132039 - DNA, 394 bp, Zea Mays
gttcctcgctggggctgtcctctgccaggggctgcgtctcgctgctcgtcggtgccgttgtttgggcacatatgtgctcaggatacttcattgatggcctgagggtgtccctgtgtggtgttgggcggctgcggatgatcagtgctcaacgaattgctcgccggagattaactccgccgctgatttgatgctatcctgtggccagcgatctccgtcgcaccttttctattgagctttctcccatcctgtccgtgttggccttagagtcgtttagcgtgtttcaatttatcaagtagtgcaccagagccgtggatcaccgcacgacggcgggagctccgccgtcgttcactgctgcgccgccgtgttcaggctgggggtagaagatcatacgcag

SEQ ID NO: 132040 - DNA, 385 bp, Zea Mays
cctcagccgaaaacctttcgggataaaggggaccaactttttagaagattggaagaaggaatcagctcagctaaatgcatgtctgggagacaacggtagcctggaagtcaagccaatgctagaagacctcatatgcaaggctcaacgcctggacacggagacaacgaggcttatggaaaaagctcgcaaagagcaacttccggaccttagggcagatgaacaaggagttctttggttcaagaaccatctgtgtgtaccaataggagaggcacgggaagtcctgctcaatgaagcccacaactcagcctactccatccacccaggaaccaccaagatgtacctagacctcaaagccagatactggtggagagggatgaaaaaggag

SEQ ID NO: 132041 - DNA, 898 bp, Zea Mays
cggagtagcattagggcaattttttatggtactacaagatcaggaaaacagagagaagggttctacttttaacagagggccagatgaaactcgtgaatccagggagatccatggtctgacactcatcagaccatcccagttaaattatttatttagatgacatcctcgcagattcaattcttcagatcttgcgccttaaattattaaagggtgttcatgattatcaacacaagtacctcaagctaaaaagaaatgccacatcggcttcaacttccttcagtcaagcccaaaatttgaagcccataaatacacaggaaccccatttggtttacttgaacgaattttagggcacaattcaatctgcggggatgtcatctaaataaataatttatatctaaactttgaaaggtaaatacactatccttgtaaaatgatccaaaattcgaagtaaaacaaaaaatacactaaccacattgtcattgttggcaaaactttgcctttaaaaatttagttcagcttgccagctacttattttttaactgaaagctttccatgcatgccgctacaatagatgatgtgcttgtgattgatcctttttgaaactgaatttagttatattacagcctaaaatcttgctgctacagtggatactaaacaaattctaagaaatacccacagttctaggaatatatttctatttaccttcaatctgtaagataaagcctaaaaacatgctgcggcaatggatcctaaatagctaagaaaaaattgaaggcagtccatgagttgtccttatattcagttatctatgctttgcctccagcaactctaggcctctagcacaccatgatttcaggttatgaaaacaacaagttataaatttcagggtataaatact

SEQ ID NO: 132042 - DNA, 347 bp, Zea Mays
tgggagtatgtatgtcagagcgcgtatgtcttccaccacgacctattggtggacagtggatcaaccacttcgtagctattaagtcaacaaaggacactggataaatcgttgcaggacatgactgagtgtaacgatgggctctagggtggcctaggtgtgcctacaataccctaacggaggaagaaggcatcatccatggagtccctcgactgatgggaaccaaagaggacaacgaactagacgacaatgcctgaccttttttcgcttgacccttaggctcttgtaacagggttggtctatgaccttggcctataaaggaagggaaagggacatgattccgaggatga

SEQ ID NO: 132043 - DNA, 2554 bp, Zea Mays
gcccccgacaacagaatttttttggcccactcaaaagagtccggcctcataagcaggcccataaagaaagctgcccaaagttttggaacggggatgaggtctacattgggggggcagagctcagcccaggaggagaaacgttttctggccatgaaatcttcgtaggcagggtcctgagagggctgatccagatgagtcatgcagcccacaatgatgttttcatcagcattcagattcaaattttcctcaccctgatcgttatttccctccaaaaacggatccgctggtgggagggctggtagagcaagcacaacaacttcttgatcttggacttcttcctgagggaagtggactgcttgcgggataacgatatcgttgaaaagccccacagattcatctgaaggcaagtcctcaagaccgaaaagctgatagctaaattgttcctcctcattgttggcaattggtactggtgcaggtggttgctcttgctggacctgttcaaccggccatgggtcccaaccatcatcagcaatgttgtcatttacagcatcttcttcaatttcaccaatgggagggatgttgagttcaaattggaagttgggcacaggctgccccaaaccaaaaaattccaccggaagttgatgaccattatgaggatatggaggcacaggctcttcgtcctgaggcaaggcaccaagcatgaactgttgaactatgtcgcactgaatagtccaggaaaccccatgaaaaccttcagccactgaaaaaacaataaactaggggacttcctgtagagatgtcacccttgctctaaccagcaatctagtagcattagaaatatcaggatcccacatgagcacccgaccaaatgacccaatagcattctgaatgtgctcgtttgtccagaaatctaggggaaacccaaggagcatcagccaacattcatgattaaaatataacgcttgttggttccaagccgcattgtgtctaatcacagtgaaagtaaagcccaaagcttgctgcggacccatagccacgaggttgtccctatcaaaaataaactggaacctcaccaaagcctgacccaagtgggagcgctgaacactcctaatccggacatgtctaacctccaatagatactcccggacaatgtcatcgaaaaagtggaaattgacctcatgttcagggagcggttgaaccaggacgataccccaatcatcatgagcagacggttgcgggcgagtgacggtatgtaccatgatctcccgatgatcaataggttgcgccgtgaagccatgacggagaaaagggacgggatcaactcgatggaaagccattccttccgagatttcagtgggcgggaccttctggaacgacgcacacacaccccgcagaagagggcaaagcaatggtgggattgaccacggcagaggggcggaggagggttttgcgcacagtgcaagttcggtggaaggcaaagagccacttctcggaagaaccgcctgagcaaactcaccaaagttattaaaaaaggcgggtgagaaggcccaccagtaggcaaggggcaagcggtcttgaaccacagctgtggggggaattcccaaacgacgcctgcaaacttactggggaaggtaagaaaatctcttttataaatctgcctaggaaatccgaatatttgacagttattgcctgaaaaagagttgttcctatgggaacgagaatcatccgacatagtagcaaaaggcctcattaaggttgagggcagatttattcttagagatctcctggtgacgattcaatatcctcttgggccgccaaatagatttgtgcgtggcccaaggacgcgctcgagggctcctcagagaaaaccaggagaaaggcttcgccagattaccagaactaggatttgaatgactttgaaaatacgcacgtctatcaatctgttcatgagagtatgggcgagagaccggctgatcaacatgacgacgaaccgggaatgagatccgattgaacactgatgaacggggtttcaaacgccctgccctgacctgtccacccaggggaaccaaattcgcaccagacagaactggtgaacgagcaatatcagcataggaagtcttcagaaagcgaccacgggaaaccagagtccaagagcttgattcttcatccgaaaagagttgccattctttgatccaattagggccgccagaattccaaagatggagataagctttgaaggatgaacaactaaaagaatggcgcctatacactgcgaagcccacttccttgcaggaaagcaaaaatcaaaaaacccggtctgacagctgaaggggcctgaaaagcatcgcagaaccgccaatgaaagattgaagcagaagacccaccgactcttcactcaaacgcgaggaacatctgccgaaagaaacgacaaggaagaactcatggcggtcaaatttgcccggaagagggttaaccggacgattaaacttgaatccaatcctgaaaatgaaggccgacagagaaatccagagaaatggcagtcggaagactcccc

SEQ ID NO: 132044 - DNA, 691 bp, Zea Mays
ttcagattcagggaccggtttgacgagcgaaatgatgattggctgaaatgtattgaggctactagcgacgagttacttggggcatatactagagccaaagatgatgctttatcctcagccttcgggggtcggggcaagaaaagattgaacatggtttttgatgcaattggcttcatataccctgattactgctaccccttgcgaaggcaagaaaaaagagaaaaactgccgcttcggccaccactgctgtgctgaagggcaagaaaataaaagttttgacccaccggccatgatatattgaaacgaccatagtgcctgaatttggtgaagggacctcctccgctgccgaagcgaaacaagctgctcccgtcgcacggagcgctgagggatcgattgtagtgccgaaggtgcctatagtcgggtcagccgaagccaaagatgatgcggccagagagccagagttggaaaaaacagtgatgctaccaaaaattctaagtcctccggcagaggcagatctgccgaaggtgacaagagctccggccacaactcccaagaggagaagaatggctagcaagctagacgccgttgtggaaacaacaagagcactaactcctactcctgtgaagaaggttgccgaagctgctacatcacatacgaaaaccgaagctgggccctcagtgcccactgaaac

SEQ ID NO: 132045 - DNA, 407 bp, Zea Mays
caaggcaccagctgattttaagtggcttgcctttatcctctgacgcgtgtcgcatttcgatacatattgggctatctcccttttcattctggtccaccaatataggggctttagatcatggtacatcttggtgcttcctgagtgcacggagaatttggagagatgagcctcatccaagattctcttcttgaggtatctatttttaggaaccaccaatctatcttcaaaccacagtatccccttgcggtcttggcgaaagcacttatacttatccacttcctgatgaagattctccttgatgatttgcactcccttgtcactgagttgggccataacaatctggtctagcaaggttggctcgacagagatgtgagacaaggtaccagaaggaattacctcgatcctca

SEQ ID NO: 132046 - DNA, 499 bp, Zea Mays
caacacttcaaataacacaattttatgaaggcagcctttagagataatgattggaacaatagacaggcaagtgagaaaaatgaccatttgtatctgaaggaggaagtacttatatatgtctaaataaattgaacatctatgcttggtaagttcatggcaaaatttttagataacaacattcagagtaaatgtatacctaagtagctagaacaaatatatagctaagtacatcgatatcatcacttttaagcaaaccgtatagactaagcttgaataataatgttttttattttattcagaagataaacagcaagatgcatatggtgtatgtgtcaatccgaaatgatcatatgggtaataattagaatgtggagagcataatgcacatctgtttctttcctcccttttatctctgcacctataagagaagcaaagcacacatataattgccatgtcgtgaaaacatacttattgcttcaatgtcttagttccccaaatc

SEQ ID NO: 132047 - DNA, 393 bp, Zea Mays
attgaacaaccttgaccaacctcttgactccgaagaccgctttccaaggtcgacaaggcacgagacgctactcgggataactctaaccccacctctgggatgtcagaacaaacgtccatcatatcaccatcagctagctcggacaacatatcttcaggaacgacatcttcgagagcctgatcaaaatttgctatggataattcttgcagaccaacaagagcagacaaagctggagaaggaatatcgctagtcccccccactgactctgtaacgccgactgttcttttgaactaaggggacttcctcttcttcttcctcgtcctcgtcaacaatacggacaatatacggcatagggtcacacccattaggatcagctctggcagggtcacaccc

SEQ ID NO: 132048 - DNA, 449 bp, Zea Mays
caaagttcccaaatcaatagggtcgaggaacatgttatgggtggtaaggaaaatgacccgcgtatccggatcctggttggagacgatgttccctggtcgagggtcactggcactgtagctaatacactggttatcaccaatatcggttgacatcaacttggctactgatgatgtggtcatggtctgaatgcttgcccccattgactctgatgatgggttaggttgatcttgtgttcgtgtttagtttggttgcagcttttggcgttaggtggcctgctccatcttgcttttctacgggtaggatccgtgctcaagttcgtctctttgatgtgccagctgccaaggaatgttcctctgattgaccgtcaaatggtttggtccaacagaacaggtactaaacctacagggacactcgcctttatcgccagaatacaaaatctctttttttt

SEQ ID NO: 132049 - DNA, 600 bp, Zea Mays
ataaattttccaagttctctgctgaatataaaaatattaattagaaatggctaaaggaaaaacagttttgcactggggtccttggcgaaagatttttaaatgaattacagacaggtcctcgatgcactattcacttgagtctacggctctgccgaaaaccccctagggttttgcaaaatcgaacccgcagtccttccctaatggaatagtgtccgcggaggaagaaagaggtgaaggggcttaccggcggcgagactgctcctgtgaggtggtcgaggatgtaggggaggtcccgagggtcacggcgatgtgcgggtcgctgtcgggaatggtcggagtcggccggtccacgtgcgcaagcaaagatgctcgtcgacggctaggaatccggtctactcacggtgcgattgtccaagtgaaccggttagagagcttcgccagaggtcaagaaggatagtggtacaaggaattagagaatggctcaccggattgttctgcccacgcgcggcggcgggcgatcgaaatccggcgagggtgaatccacctctccggtgaggcaatgcctcggctcaagcttggagaagcttcacaacttcacgg

SEQ ID NO: 132050 - DNA, 332 bp, Zea Mays
cttaatctgggcctaattctgtcagcccaaaatacggttagccaccgttcagccagaaaaacaaccttccgcagttccgctccaattgcgtccccgggaatccggaaggttcgcgcgagagctcgagctccccgtctctgcaccagacaccagtgcaccaccaaatccgagccgaatcttctcgaccccgctcctcccccgccctccgacccagcgccattttcacgatcctaaggtccttgcccgaccaaacgacccgtgacctccgccacagctgctgcagagctaaccaatggacgtgctgaagcgcgagctgcagcgcaagcgccagc

SEQ ID NO: 132051 - DNA, 373 bp, Zea Mays
ggcggcagcagcacagctttatgaacacatccctgatgcgctaaccagcgaagctttggctgctcgtgatggcgtggtgctggcccagatgcttagtatggaaaaagtgattttagaagttgacaactctgttctggtggctcttctccggtcagaggagggaagaaggagtgctatcgcaggtttatggcaagaaatcagagagaggagtgtggttttcagatcttttgatgtatctttcgttaataaagaaggaaatgaggtagctcacatttgtgcaagtaaggctatagagttggcttctgttttattttggctagattgtttccctaattggcttatggaagcagctagcagggattgtaatgtcact

SEQ ID NO: 132052 - DNA, 635 bp, Zea Mays
gagcgctcttacccgagatagtcacgtgtaacgtctcggccatggcggcgtgtggctctcggagtccggtgagagcatgcccgtgatccgaaacttcccccacgctcagcagtgccccagacttgtgtggcacgatcccatgaaacttccaggcccggacgcccggtaccgaggcctcgtcattggtatatccatagaatcatgccggcgactagcttgtccccctttccctcttagacatgtttgttctcatgattttctgtgttggtgctgcgttggacgaggaggaaagggcgggcgacgaccggaatttatacacaggggataagaatctacggctggcgaggttgttgcaatcatttcctcggattccaaagaggctgttacggtatcgcgcgtgaagggagaagggttctgtcgtggtagccccacctaccagaggttcctcgcgacgagagaaagaagcgcggctgaccgctgacggcatgaccccacctgtctgtgtcgggttgcgtagttgggctggcgacaaaagggcaagtggcccgatacgctagggaaaaataggaatgggccgacatgtggaggggtttcggcccatggcgagatatggtcttttcttttttctatttctg

SEQ ID NO: 132053 - DNA, 425 bp, Zea Mays
tggtgatgcaaagtgacacaagtcgtttatcctggttcgggcgagagaaagccctacttccagcagagggaggataagacttaaataacttacacctaagtgcttgcagtaggaagtacaagttgatcgggagagagaaggatcccaagtccctggggttgattgaggcaagtgccaatatcgctgtggaggagaaaaccgtgaagtgttcgcctctccccctgaagccgtgaactcccctatttatagcttcaaggatggatgcaaggagtgtcagggttgtccgcgtacagtaaggaggcgaggttgagcccctgtagatggtatggcctgtggtatgcaacttgtacttgctgttgacttatgcccggtggagacgtccgattcctactgagagccgaggtcagggctgagggcttggtcac

SEQ ID NO: 132054 - DNA, 483 bp, Zea Mays
tggccatgtttattagtatgtcttgccatgcatgtgaatataagcatttttggggcagctaattctagcttatgcttgtaaaggaatgcaagggcgagagtttgcttaggcgcgaaatggtacgtagcgtaatagttaaggctttcgagtaacatctttagatcctgagttcaattctaccttagggtgattttttggcttgactaaaaaaatccccttcattgtatcttgcctgttcacgagttacgtcatgcgcactatccttcgatcgttgcagattcgactgttgcagattggacggtgacgaccagctagcgataagggttcagaggttatcgtccaaaaacatacttcactcatcggccgagtgtttgattaggcagagaattagagcgagtgtttgtttaggtagagaattagagaaaggcatctctcttccttcccctctcccacactccacgtttggcatcgccaagacaatac

SEQ ID NO: 132055 - DNA, 500 bp, Zea Mays
taccattcatcatcattgattgagctatcttgacgaagctccctgtattggggtcttcggtcttggtcatcctgagtgagatgacacatttcttcagcagcttcgtcgatctttttctgaaggtcagcgacccgaagcatcttttcccttttcctttgtacttgttggtggatagcctccaaatccccgatctcttgatctagctcctcctcatgaggtgttgggctagtagccttcctcttttggctcctagcttcttgcaacgtctcctgattagtgtctagtggctgcagggcagcccctagcaccgttgtcttcttcggcggcattgcgaaagtcgatgcttgccgaaggtggtcgaatgagttcaccggatgtgggcgccaatgttggtccttgtcctcgaatgctatacatcaagaacaaagcaacacaattgttaacgattaaagaccttcatccttcgaagcattatctcctttgggacataatgatcttca

SEQ ID NO: 132056 - DNA, 394 bp, Zea Mays
tctgaactaacagttgacaacgacaagcagtttgacaaccaggacttcaaggatttttgtttctccattggcaccaagctagccttcgcttcagtttatcatccgcagtccaacggggtcgtggaacgagccaatgggaaaatcttcacagctgtcaagaagatgctccttgatgaaaagaagggcagatggaccgacttgttacctgaggcagtctgggcactaaacacgactgaatgcagggctactgggtttactcccttccgacttctatacggatcggaggccatgaccccacaagaaataaagcatgggtccccgcgaacggttccgtcagccgtccccgacgtggacgagccaacttcaaaagatctcattgacggagaccgggtct

SEQ ID NO: 132057 - DNA, 690 bp, Zea Mays
cgcggcccaactagcccacgcgacagctcccgaccccatcgcaagcaccaaaccaaagaaattctactgccctagttgtgaatgttttccacaaattccaaaaccccaaaatgcaacaaccgaatgaggaaaaaaacaaaaagaacaacccccaacttctcttctttgcaaaccgggtatcacactctacccctcttaaaaagaattcgacctcgaattctgatgcttctatcggaacgataagagaaaagattaatgaatcaacaacacttacccacaacgaaaagttccgggtacttctgccgcatcagctcctcaagttcccacgtagcctcgcgctcagactgattagtccataagaccttgacatacttaattgatctctttctcaatacacgctccgagaattccaatatacgcaccggacgacactccaaagtcagatcctgctgcaccgcaattggttccatctcaatctgatggtctggatcccgcaagaactttctcaacatagagacataaaaaaccgggtgtacccctgccatggaatccgacaacagcaagcgataagccaggcttcccactcgggccaaaatagtgaacggtccaatgtatctcgggctgagctttccagagacaccgaaccgaacaactcctttagtaggtgataccctgagaaggacttggtca

SEQ ID NO: 132058 - DNA, 576 bp, Zea Mays
ggtttcgcgtacaacggatggaggacaatacaatagtaacttgatgaatcgggatgacagtaacttttctttggacgaccttgatagccctcccatgcagcagccttcgcccatggttcgctcatcaagaccaaaccataaaaggtccaaaattttcactgaacatgaggatgcattacttgtgtcagcatggttgaatattagtttggatccagtgcacggcactaatcagacaaagggtactttttggtagagagtttataattacttccatagcaacaaggactttgaatcggatcggaactagtgttcgctaacacatagatggggggctattcaggacatcgtgaacaagttctgtggatgtctaaaaaggattgaggatagaaggcaaagtgagattacttttcaagacaaggtaattctcatgaattttgttttgtagacactcctatttgattcatagaaccttggccttgctaagttatactttgtttacatgtgcagcttgtccaagcaatgactttgtttaaagaagaggacaaagaccataaagctttccaattcatgcattgc

SEQ ID NO: 132059 - DNA, 597 bp, Zea Mays
ttcatcgccgcctagtgtctgcgtgccttcaaaccctacccctacttgcgtcgcgtcgtcctacgtacgtgcaccctcaccaccaaaaacccatggcacttcctcctcctctcgtacgaaggcgagcgccgtagcttttagggagcgtgttcagcggcgctggtgtctgttgtcgtcgtccctgagatctagcttgggctgtcgaacttgccgcagatacggtccttccatcacgactatttcggccgcacctcagttggtcggtcggacgcagatcccttgccacgttccattttaatctgcagcccgttgcaatgcatgtgagggtttccatttattaatgttattgcacagtttagtgttcaggattggcagagttgtgctaccaggatggttggttgcctcattgatagataggatttgttgtgtttacagttcgccagtttctgctgcgcctgccaaacttgttgtttcattgggtgctgctcaaaatttgacatgctaggtaatttcggatgcctatttgatacacagctgttgtgtcatgtcctgatgcgtacctgttgtggtggcttcttttggtgccatcgtgccaac

SEQ ID NO: 132060 - DNA, 994 bp, Zea Mays
ggacttcattctcctcttcctcatcttcatcaataatgcagacggtacaccaattgggatcagctgtggccagattacacccattgggatcagcatcatcaaggtcacacccaatgggatcagcatcagtcgggtcacacccattgggatcagcttcagcaaaaactagcaccgacacttcctcagcagcaggagcagaaggaccggcatcctgatccaagcatgacacttggcgaagacatctctttttctttttcttcccctcagcaggagaagttggttgagtggctcggcgaggacgctttgggcgagcactatcatacctctgaatatccaaagctttgccagcctctgggatgggtgctacagccagtgtttctgcaggggctgcatcagaggaatcttcagccaacatatccagcatggcacttatctctgcatcacttggattcaaaggtacctcgaaatgaacctgcctctcgtcgtcagggatttcactaagtgaggcaaccaaagcactaacctcttcgggagagggtcgcactctaaggcccaaactgctatcaccagcaggaggatttgacacaaaaccggtaaaagccttggaaggaggcagattccaggctgagtatgcaacaggagcaccgatgttcgacaccttgcctctgagtatcatctcgagccagctgaccaaattcacagcaggaattcttctgttggtaacccgggtcgaatcagcgaggcctcgatacagataagtcaggtatgctctgtcctttagtggctgaatgttcttgaaaatgaaatcggcgaccacagcttctgcagtcagacccctctctttcaacaatccaaccttagcaagtagagcccctgcctcagccacctccaggtctgtgggggattcggtccagctcggagtgcgaacatatggttgtctccctgagcgtggggggagggaattcccgtgattctccacgataaaccattccag

SEQ ID NO: 132061 - DNA, 549 bp, Zea Mays
ggaaaatacaaacttgattggacaccaaaattaacacatgaataaacataaatatatacatgttacctgtgattttctaggagtcttctgtttaggagagttttttttgtaatgatattagactttggacttcttttcacgcaaggaacttgaggagaaagtacttttaacttctttgcactgatttgttctgaaggagaaggtgaggcagatctgaattagcgcttcaacgatggagcatccatgaaatcgtcgtctgacagtgtggatggagcaagaggttttctttttaaacgacaagctaacgcctttctgcgaaaacgatggattggggctggctgtggctcattctgctcctgtttttggggaatatcatcttggtgagctgagctgctggatcttgtacgtctggaaatgtcaattgaaaaaacctcctaactggattcaatggttaatctttttggattactgggcgggcgatcaacagacttcatgattaaatactgaatagatctgcaggaaaaaaaagttgtttttaaatacattgat

SEQ ID NO: 132062 - DNA, 514 bp, Zea Mays
ctgctcgacacggttgagaacttgagatggcatacgagcaatcaagcaggggtcactaccacttccggctataaataagagataaataagagatgagaccattatctcatgagacagccatgcaatgtcgccaaggatttaggaacaaatagtttttttgtcattaacgacaacattgcgtcgtggtttagttggctatcacgtcagtctaacacattgaaggatctcctggctcaacatttttttcccttcccttaagtccgtgttaaagaaactgcatcatgcaacgctggaaattttgctaaacaaatgacggatttgcatcacacagattcacactccactgtgcccacagagacactattgctctgtttggttaccggcatcctcggtgcctaactcgagcaggtcttcagtagaaacggacgattcttacttccccacgcttacagaccaacaagggatctgcacacacaacaatgtagccaaaagaacacctaggattttccaaaaa

SEQ ID NO: 132063 - DNA, 681 bp, Zea Mays
cggatagggcgttaggccaccattgtttacctgcgctgtgcaccggagcaccagagtcgtccacgacacaccgacgagagagaaccgagggcagccgggcagggaggaatgaggaagagagaccagatctggattagggttaggttttcgggccgggagagaccacgagagagagacccggaagagcaccgccggaagctaggaaccacaccggcggcgggggaagagagctagggtggaccggaggagaataccacgccggagtccggatgcaccgctgtgggatgggggaggcgggaggcccagaggggaatcgtcgctgcgccgctgcagagggaggggaagaccaccggtcaccggagtccgtactcactggtcaccggagtccgtactccgtaggcggtggaggcggcagcgggattcgccgagtcgggagtcgccgagtcgggacgggaacgggacacgggagagggagagtggagagtggagagtggagagtggagagtgaggaagagcgaagagaggaggcgaccgtgaccgtgagcgtgagttgtaaatgtaacgggctgtacgggccgcccgtttatacgggccgtgcctgggctgacccgacgggctgcttcatcgacccaagcacggcccgatggtcgggtcgggccaggcacggcccgcgtgttaccg

SEQ ID NO: 132064 - DNA, 396 bp, Zea Mays
ggtcaacgaaatcgtgcgccgatgtgctgcaccgtcgcggctttgcagtgcgccgtcggtcggagtgctaggggtaggtgatgggttatcggtcgtgggatctagtttggatgatgtagattagatcaacaaatacctcttcatccaatagaatcgcgaccatagatctacaatccgatgggtgcgaacgcgtctggctactttaaatcggggccttagacattgatccaatggctcagatgaggtggtagcatgccccttcacgcgttagatcgtgtccaccgattgcctgatcgacaatcctctgcgcgtaccaattcattaaagaccagatctaatcctaagcactgaacccagatccaacggtcagaacagatccataccccttcgttgcat

SEQ ID NO: 132065 - DNA, 394 bp, Zea Mays
caagaccagatggttttaatacagactttgtgaagaaatgttggctggtgattgctcctgatttctatgaattatacaacaaattttttgaaggatccctctgcatgcgtagcatcaatggttcatatgtgactctcattcccaaaaacagctctccggattcaatcggtgactataggcctatctccctccttaacacaagtgttaaagtgctgacaaaaatcttagccaaccgtttgcaacaggtgatcacaaagttggttcattagaatcaatatggctttataaaggcttggttaatccaggactgcctagcctgggcttttgaatacatttctctttgccataagtccagaaaagaaatggtcattctaaagctggactttgaaaagac

SEQ ID NO: 132066 - DNA, 281 bp, Zea Mays
tagctatttaagggcttttcgggcaacactttggcaagtgtctgggaagcggtgcccgatgaaggtgacttggaagggagggtggtttgggtaacttcagctttctcccaggtagaccgccatagagcacttccctattccattttcacggtactccttccagacatattcgggcttcttgcggatccccatgcgtagcgcgcaactccgtaggaggtgaggaaatccttcctcctctgagcagtaggatgtcctaatgacccaagagccttccatctggc

SEQ ID NO: 132067 - DNA, 317 bp, Zea Mays
ggaaatgcctgcataactgttagtttaattgttgaattggtagtcttaaaattcaaaatttgaactttctgaatttgagcttttccttcacatcttatgctagcactagtaagcatctgtataccggttaaatttcaccaaatttgattgcactttctgatcttcaaatatgttggttacttcatcaatcatggaggcaaaaacctccaacataacgcaacacattatggctgctgtaatagttacagtccaagtgtccaactccacgccaattgtgccaatgcatggtactctgcacatatatggattctgactac

SEQ ID NO: 132068 - DNA, 653 bp, Zea Mays
agaatacctcagcacccgcccccaaggcgccctcctccatcagccattagaacaagacccaatatcaaggaagggcacgagtaaatcacgtcgatgctcaggaggctcagcaaactccgggagtagtgctcgatgagttccttgttgaatttactcccgctactgtactttttgattcaggagcatcccattcttttatagccactagttttgtggaaaagcatggcatcccctctacccctctagagattcccttggtcactcgaaccccagggtcagaccttctatgccagctcaaatgctcccaagtcagaattcttttaagtggggtagtgttcttggcagacttaaccgtcttgctatcccaagggattgatgtgatcctaggaatggattggttgaccaagcacaaaggtatcataagttgcacaaacaagacagtccttctcacagaccaccaaggaaagtcagtctcttgtcagacttagccacccgccaatgatccaatgatgtttaatttagcaacagaaagcatatcagtggtagaagaattcatagatgtattcccagaagagttgccaggaatgccgctagaaagagaagtagaattctacatagatctgattcctggtacggcgcccatcgcaaagaga

SEQ ID NO: 132069 - DNA, 532 bp, Zea Mays
ttatggtttaaaaagctatcaacatcactttgcatttttgcaaaggagctgactagctgcagttctgagctgcacttttcaaagtgctttatttatctaaaggtatcaaaatacgctaactggaattttgctgtagtgagaagtactgctactttgcaaagttcatgtcagattggaataaagaataggtagatatagtctccatatcaatttagccatgcaaagttgcaaactatttttttcagtgactgacttgcaaattgtcatgcatattttgtgtgcctggacaaaatgaagccacaatagcattgtttcattggtccaatgtctgcttggttattctacttgacacccagcctaactctgctccttaggcttgctgatgatgaaagaagaaagtgggaaattggtggggccaaggggttatctcaccttgttgccccgctgccagattcttgatggctgctgtgagagtaaccttctcggggtggttattttccttatggattttttcttgtatgcttgttactgg

SEQ ID NO: 132070 - DNA, 504 bp, Zea Mays
gtgctacggtggttccggggtcgccggagttggctagaaatgtaggggacgactcggcgaactcgctggcggggttgtggccacgagaccggggtcagagaggggagaacggcgggggaaagacttcgggcgggtcgggacaattccagtgaggaatttcggccgctaggagaggcaatcgactgtgatggggctcggtctagattcagtggaggtgggggagcactatgggcatacgtcagggcactggacagggttgggttggccggacatcgtgcgggcgcggcgagcaagcgcggccgcacgccggcgaggccaaattggctaaaggcaggcacaaatagaaaaaaccaagcacgggagaagatgtctcaccttaggacggagctcggggtcgcttggcatggcctccggcgagctagaagaccggcacggcgggcgtgggtctccagcgaagctgagtggcgtgggcagagcgcgagagagggcggggttgtgtgaaat

SEQ ID NO: 132071 - DNA, 379 bp, Zea Mays
atttgctagaggacatcatcatctttaggcacaactatgcggttattaaaccatactatgccttgatcatcctttctgaaacagtttgctttaccagcctttattttctcatgaatatgtctcatacccttatcacttctttgtgcatcaataatcttttgcagaagaactgactcaagcttcaattggtttaaggttccatgttgaatcattcccaggtttaatttctccatttcttggcataatgtgatgtcataagtctttactgtaagacaacgacaggaagccttgtgacttagtgcatctgccaccaccttggccttgcctgggtgatagtgaatttatagttaataatccttaatcagctcaagccatctcc

SEQ ID NO: 132072 - DNA, 1617 bp, Zea Mays
gggggaggcccagatattcagagctgtatgggatggatagagatccagtacctaggaaaatcaaggcgagatcaacgtcgagaggtttaatccccccaacgccatcagatgtgatgtgatgcgatccgtcccgcgccagcgccagagccatcatgtgatgtgttcccatgtgcatgtactcccggccggcccacgcgagtgtgtcgtaacggcgtcagaatcagagaccgggactattcgcccgacaagagattgcttcggctgtgagaatcgtttctacgagaatcacagacaaatcgtttctacgaaaaaatcgcagcaaaatcaacgtggacgtagaatccgtcaagtcgtctgtcgttttctaaaccttaaaccctaaaccgtgtgcagactgatcattcatcttcctccacacacgtaaatatcatggtgttcagattctcataacaactagattattcataaattcagtttcttataaaagctcttaaagaaaattgggtcccaaagatgaacccgccccacggtcgcctccaactccccagcgcgtgcaatcatccggaggaggggaagacaaagtggatggaggagcaatgggcgttgtactgttgtgcatctaccaccacggagaaaggaagcacgggccgggatgagccgagttgacaaaccacgcggacgtcttgttccctttttttttgggtgggaagtggggtgataaaattgagataagatgagatcgtgtcaggcttttcatcgccgtcgtcgtcatcgcgttgcgatgggcgatgagagagggacgagagagcgatgtgtgcgggcagctccggtagaggaagcaatacaaccgggaaaaggaaaagggctgttttgtcaacttgttttatttgtttcagggagaagcaatcatatatactaataaatatctatctttcatgcgcgcgcggatgtggtcgcctcaatcaaatgtaaaaactcatatatactgttggtgtcagcgcagagcaccccacctgtgactagttccgtacgtgtgggggctttaccgtggcgtggctgctgttgattggtctgcggtctgccaacctagcttctactagctttgacaccaaggcccgcctttctggaacgcacgcgggatgtttttttttgtgaaaaaataaatcgatgcctttgtcaacttcctgcggtacgtatacataactgaattgtctagtgtacaacatgttatgttaacgcactcatgtgcctgtacataactgaattatctagtaaactctactgtttgcgctagtgcgatctggctttatgcagcttcaattactctcggctactctcgcacataaacgcatgcccgtgtacgtagtgcgtttcagcgcatagcctggctccaactatatggctactttactactacttgatccaactgccggccggtacggtaacggtttatcctatcgtcggccgtctcgttcgagatacaacgggtacacgcaggcaatccacgcagcagcagcagcagccagcaagagaacgaatggccggcagatcgagaactaccaaattaaagctagcaggaacgtgccgtgcgcgagatccagtcgacgactggagcaa

SEQ ID NO: 132073 - DNA, 546 bp, Zea Mays
gcggcctcgctggcggcgatgtcatcgatgtcgatctcctcgagcaggagaagcgtgcgagcctcctcgaaggtgaggaagggctgccacatcttgaggttggagaccatgggccggaacttgccattgaggccgcggaggagggtaaggaccagggtacgatccccgatcggatcgccgccatcgtctcaagacggcggcagtagtcggtgatagaggacgagccctgtttcgctgtgcgaaactccgccgagagcagcagggaacgtgattcgcgctggccgagaaactcgttctcgaggtatgtccaggcgccgcgagcgttgggcttgcgtttcgtcgtcgactgctgaagatcggcgtggatcgtgttgtagatccaagtgagcacggtgcagttcatctgcacccacgccggacgatcggcgttgacgacgtcggagaggaaatgatccgtgagggcatatttgcccaagacggtcaggaacagagcgtgccaccgattgtagttgtccgcggcgcgatccaaaaccaagggcacgagga

SEQ ID NO: 132074 - DNA, 672 bp, Zea Mays
ttttcattttgagttcagggaaattaatcatttcatcaagcttctcttgagaaggaaactgcatgaggaacccgacatgacacttggtggctttccaagtcttgccccagggaaagtgaaacccaaagtctttctcaagatcttcagcagaaatcaaaccctccataacagtcaccaaactgatgaaacttcttttaggttttctggacaagggtttcgcaaaatgggaagagtaaaaccctaatccatcagccgccatacccacaataggcatacaaggtttgttctgtttaggcaacacacatcgggcagtcatgtgggtttctttgtgacaaatgtcacaccacatggaccgaaagcaatcacgagcatggtggccatcaaccccacatttttgacaaaaaggacgacgcacaacctcaacctcttttttcagagccgcgggaggggttttgaggatacctgtgtgacctccctcgccagcagacgaagcgccaatgtcttccttgacgtcagattttcctagaatcggcttcaatctccagctaggattccagatcttgttccacgtttgggaaccttgaggattctctttctgattccaccggtcccagttagggtttcgccccttcggatccatctttgacactgacaccgcgcgagacagcgccg

SEQ ID NO: 132075 - DNA, 388 bp, Zea Mays
caaatcagaaagacgtttgagaagtaatagacagattgtcgtacaatatattaatactactcgaaacatggtcaacccttttactaagggattagtatgtgctatgattgatgaaacatcaagggaaatgagattaaagcccacatgatgttataatatagtgtaacccgatctatgcgatcggagatcccatgaattaaacattgggaagaacaaattgttttgtataacaggagagtacatcattttactcgtttcctggtaaagatgcatacccttagtactgcaaggaaggctgactttgtcttaatatattccgaggcctataaaaggcaaggtactattttacagggtatacttgtaagaatacacatatgttagtttgaat

SEQ ID NO: 132076 - DNA, 712 bp, Zea Mays
gcaattttagaaattggagaagtaaaggaaaactactatacaaaataaaacaaatatgggataaataaaaccttgctatgatggtttgaccaaactgcataattaaaataggttcaaattcccaaataagtttgaatccaaatttggatttaaaagagttaaggataaaagaaaacaggaaataaaataaaaaaagggaatacatggcaactgggccgcagaccacctattcggcccaccagaggaaatacatcgcgcagcccactccgcgctcaccggccacggtcactgaccggcgggacccgaatcccaggtaaaaaaaaactccctgtgcagtgccatctcccattgactcgtggggcccgcttgtcatctctttccccaccccgtccaacagaacgcgcgcgcccgggtcccgttggcgagctcagcacgttatcctggatccacctccctctcgctgactgcgagcccgaatgacagaccatcttcctcctcgtatcgttgcgcctgatgccgatgtccgcgcaccgcaacaacccgccgcgtagatctcgggccgacctactggtcaccgcctcctcctcgctcggactcggggaaaataaatacccacatgttctcccctgctccctcaatcctcgaagccgaatgattcctgcggcagggctccagcgtcgggggaaaccaccacgccatagctgagcgccac

SEQ ID NO: 132077 - DNA, 876 bp, Zea Mays
ctataagcaaacatcaactatgtgtggtattaggctttgcaaattgcaaatgttgttggatttgctctttttggtgttacggcggcttgcgaaacaccaatactaagttgaccttggagtctcttggtatgcttttaattgaagggcaagcgaacatgatacccttggctacaccttcttttcttcccacagctaaatcatattagaaattcagcaaagctgatttcaggaaaatatagctcaactgctcaaccaataaaagcacaaaagaagttaaatactagttacaattactggaagatgattcaaggattaagaatcatggttttcacagtgagttgacaatttggtatatttggtttacctgaatcaacatggagctgttcttctatttgttcttgtagttattcttccattgttactttgttaatgcttggaaagtagtttgcatttgtctaggatctgctatggttttctatctaatcctttgttttgtgttttgtcaaactgtatgtgtattttcaaaaatatggttttactcattatgcggttactaatggcattgacatagctgcctttgtagagacaaatccaattggaccagtagctgtttatgagcatgctctctgttatgtttcatttgtttttattttgcattgccatccttttgcacttatccacaaatagcaaattacactgaatttgattgcgtttcctgtttagttgtgtgtcattacactttaagtcatttgccagatcattgagctttgctataatgagtgaatttctgccatgtctttatattttttgtcctcttaatgaccaaagatcaaagccttgtaagctgtgaaggctttctgtgttacctttgtccat

SEQ ID NO: 132078 - DNA, 560 bp, Zea Mays
atcattgaaagcctgggaatattcttctaccccatgctgttgtttcacattgaccagcgctctcatggcatgagggtactcttccaccccaaacttctccctcaccgcatgggtgaactgctcccagtctcccaaaccatgtttcagtttatacacctgcagccacttcgacgcatttccctccatgtgcgtcgaggcagtgcttgcccagatccattcgggcacctgataaactgtgaaatattccacacacctatcaaaccagattcctggatcattcccatggaacttaggaaacgaccacttcggtagagaactgggcctgaactcccttccttcaccccattgctccctccgttctctacctccttccctgccgaatcctccgcccctctcatccccgcgatggacacggtgttctcgctcagagttggattcgttaccttccaaatccttcgccagcagctcgagtcgaagacgcgagacagtctgctcggtctcctgcagttgacgagccatgagcgcccgatcctcctcagccttcctctgaccgacctcca

SEQ ID NO: 132079 - DNA, 346 bp, Zea Mays
ccgccatgctgatcgtcacctacgagaacgaccacaaccacgcgcagccgctggacccctccgtgctcaccgccgcgaacgcggaggcttgagagcccgtccgacggatcggattcggagcctctgccagcgtcgtgcttgagcgacgccgccattcttttcattgaaaacaagatgtacagtagtgacaacttgagtgcgtttcactgcttctgtttctccgtgtctgtttagatgaaatccattcagatgaggcctcttgtttaatctgtgcatgccaaagaggcaaagaccaaccagattccaatcatcaatcgttgtacgcttgcagtcgtgtacctatcgc

SEQ ID NO: 132080 - DNA, 891 bp, Zea Mays
caaagtttgggtatcggaggcatcagcaggtcgggttcaatggaacgacggatcacgtctgtgtgtcgctttcgcagcagcggggagagcgcggggcccggcccaggacgcatggaccgatggacgcatgcagaccatttttgtttttgtttttgtttttgtttttttcctgtctaaaatgtaggtgtgctctatcttgcctcttcatgcgataatgtgtgtgtatatatatacatgcccttcactcttcttatagctcgctagcccagctttagtttatagcactctctcactcagtagtcagctccctccatttgtccattctccaaaggtagttagctaggttaggcacacgcgcgccactcgactagctagcagctatggagggagaagatgacggcgcccaaatgaaactgcagcaacaacaacagtcgccttgcagtgacaacttgagcttgtccgccgcctcctcatggctgccgccacaggtaaggtcgtcgtcgtcgtcgtcgtcgtacacctgcgggtattgcaagaaggagttcagatcagcacaagggctgggaggccacatgaacatccacaggctggacagggccagactgatccaccaacagtacacttcacaccgtattgctgctccccatccaaaccctaatcctagttgcacatcagttcttgaccttgagctcagcttgtcgtcgctgctagcgcatggtgctgccagcagcgacggaggcttgtctgttccagtggcaaagctggcgggcaaccgtttctcctccgcatcgctccccacgaccaaggacgtcgaggggaagaacttagagttgaggataggagcgtgcagtcatggcgatggcgcggaagagcgtctggatcttcagctta

SEQ ID NO: 132081 - DNA, 501 bp, Zea Mays
attcgacagcccaaagggtctcatatatagcaatactagttacagtggccttcctagttcctacaacgaagtttaatctgcattaacaacagcagaaatgcttttgtattgtttgggagctcttaccccggcacgtctctatttcagaaggatgagtggggcgaattggtcgatagcataaaaaaggaagtttatgtactagagactgttctatggcagcaatccatttcagattcagaagaatgagtggggcgaaaaatatcaaatgtatggtggataataatatataaaaaaagggaagcttctgtaatatagactgttccatggcagaaggtggggcgaaaggcgtttctgtactgtagactgttgcatggcagaagaatcaatccatttcagaaggatcagtggggcgcgcggtatttactttttgtttctcaatggtctgaatcatgcacagtaggggcatcccttgctactatcccattaaaaaagagaggaaaa

SEQ ID NO: 132082 - DNA, 457 bp, Zea Mays
ttgtcctctagctttcggacggctgtgcagtacttgcccatggagtcattagagcaatcccactctttatttatctgacttatgaccaccagtgaatctccatataccatcagtctcttgatgcccagtgatatggcaatgttcagtccatgaatcaaagcttcatattctgctgcattattggacgctgagaatagcgattgaagagcatatttgagttgttcacctccaggtgcaatgaagaggattcctgcgcctgctccctgcagtttcaacgagccatcgaaatacatccgccatacttctgtagtctctgggttatctggcacttgttgctcggtccactctcatacgaagtaaactagtgcttgagtcttgattgcagtgcgaggtcgaaactcaatgtcgtgagctcccagcttgcaggcccacttggctattcttccgatggcttctt

SEQ ID NO: 132083 - DNA, 389 bp, Zea Mays
cgcagcccagcgcacgcggcgcgcgccgaccccaaacagtcagccagcgccggacccataagtcagttcccatcacatcctgttcatctccctcacgaaaccgacaacccccctcgtcccagaaaaccgtccacgccaagtctggagtcatcgccgtcggatgacgccgtcgaggtaggcccctccttctgtcaatccctcctctcttttccatgtttgcggtgagcccactcctcggcagctcacctaccccgcgccccctcgtcctaattgctccctgcgcgagcggtgcgcccgccatggcaactagccggagctcggttagacaaccatccctctccctcttccctctaccatttctcctctgttgcgacgtgccctttcacccc

SEQ ID NO: 132084 - DNA, 593 bp, Zea Mays
ggcaggaacaccatgtgtgcggggcccacatagcggagggaggcaactacaacgatgttaaggggaggcagtgagcgcccggttcgatttgaaccgtcccttggtggagcggcttgccgatagttcaccatcgacaacttgattcttgggtgggggagagcacggtgacgaggaggggggtttaggtgaacttaggggaaggggttaatttaggacaaacgctctgggaggttgggttccatggcgaggcaacacttggccagaggtcggctgagagcctcggctctcgtgcattttggctaggaggcggtggtgggcaagtgagagtgtgttcaggcggagttgggtgtggggttgtattggagactagagcttctaggcgagctctcaccggcgagcggcggaggaaggagacggtggtgttggcggcttcgcggtggagaagagagaggaggggaagtactctggagagttggtgcagggcagaaggaggtctgggcaggccttttataggccacggggttgagcagggccgttccggactatttgggggcctgaggcgaaatgcaatatggaggccccatccacccatg

SEQ ID NO: 132085 - DNA, 328 bp, Zea Mays
gtttggcacgagatggtcgtgggggtgggtttggctccaggtttatatgcccaagctatggtgtgaatgacttcggagccagccgaaattccggtggcggttacggtgcgtcgttactgcttggttcagatggcacgtgtttggttgtccgtattaggagagccagactcttcagatgcattgattatgtatcagcatgtgtttggttcgttgtatttaggaggccggacgcatacgcaccggtacattgtaggctcatttagttgcatctacagaaacgaaaaaaacgctcgtatccggcggactaggctgccgtgagccaggttgc

SEQ ID NO: 132086 - DNA, 274 bp, Zea Mays
ctgcaacaggtcctcatgaccacgacgttgtggcagggactaatttgggtggatgaatttttgacgcccctacctcaacttttagctcgaggatgagctgtttttgcaggcagggagagatgttatggctagagtacagggacgaaggccataagcctagtctttagtactccggatcagattactatttcaaattagattggattagtatttcagattagattggatctatataagatcttcagattagttagataagataagggttagctac

SEQ ID NO: 132087 - DNA, 585 bp, Zea Mays
tgggaaccatgatatcatacgggatcctaatgtcgtacatgaagacgatgcagggcatctgataccctcgcgacaaccacaacgcctacaggatgctcatcgggatatccatgggactttaagctatggtccaatagtggggcgtcatgccagtctcaccaccaaagttgctctttagtcacttggtggtaaccatcgaactcgagcttattggtcagacgaatgagaaaatcataatattcgatgggacaaacatactgtttactaagaagatcccactattaggtaaatgctgtgactgagaatagcggtgttggaccagtctcacgaccttagttgctctctagtaactctttgatgactattaaactcaagcttattggtttgacggttgagaaaatcatgacaactgatagaataggcgcattatttacctagagggtcccactatcagataactattgtaactgagaatatggacgctggaccatggactttggtatggtagtggtcatcataccagtcccaataagggttagctgctcttggatttgtctacgcaagccattggaccgagaagttttg

SEQ ID NO: 132088 - DNA, 430 bp, Zea Mays
gtttcctacatcttttgtgtgtgcttgtcgtgaccctaatctgcatataaatagagagagtgtttttcttgaaattcacgagaaacaaccaatccactaatggatatggttttagaccatggagtcctcgtatgtggtgttaagatttgaagattggatcagataaccagagaggccaatgaaaatctttgctctggacaatattgacttgcttcccaaaatattatctcaaacatctaaaacaccaaaactcacaaaagaacataaaacaagaacacctcaatcaacagatcacaaactgtgtttggttgttgtcaattaggctttactcgtgcgaggtgtgtgtttggttacctgcgagtagatatggagctaggctcgcacgatactcaaagcaccgtaggccatgctctacaggcgtgagtaaatt

SEQ ID NO: 132089 - DNA, 348 bp, Zea Mays
ggcttcttcaccaaattcaggcaccacgaccggttcaatataacgcggccagtgggtcagaaccttcaccttttgcccttcggaacaactgtggtggccgaagcgacagtctttctcttttttccttgccctcgcagcgggtagcggtaatcagggtatacaaagccgatgcatcaaatactctgtttaatcttttcttcccctggctcccgaaggctgcggacaaggcatcatcttcggctttgctatatgctccaagtagcttgtcgctgatagcctcaatactttttagccaatcatcatttggctcatcaaaccagtctctaaatctaaaggtttacttcaatc

SEQ ID NO: 132090 - DNA, 420 bp, Zea Mays
cacgcgcaagcacatgaaccaccaccatcccggcggctcccacttgctcttgctccccttcctctcctcgctctgatcctcctccagtgcactgctccgttccggcgacctcgctgccggcccggcgctccccggggcaggcgggtaatgcttcgtctccgttgtgtgcctgtcagcctgtgtgacggttaccttaccttggtttcatctgtgcggaaaaaatcggagccttctaactgttcttcgccgggagcgacagcgaccggcgagtttgtggccgggaatgggaaggtttttgtttctgggaagttctgagtggatctttgctgcttttggcaggaaagggaacggctttatttgttggtcgcggcgtgtcggtttggcgcggtttgagagttcttttggttccttgtttttgtt

SEQ ID NO: 132091 - DNA, 441 bp, Zea Mays
ctttgagcaaaatatatctgtttacatactatcaagaatgacaggataacatacaccattcacaatcatccaatagctttataaaacacctaataaattaagtccgtctcacttaatttggggctacacttaagcaagtcactacgaaatgttgtatgaattatccaatggcgccgatatcacagcctcacattcacagaagtagatcagcttgctggacacataaatataataaactgccaaaaatgcatcaggcttttccatacaaaaatgcagaaatgcattcatttctcaactgaatgtccacaagctgatactaacatgcaccagtcagtatatttcaagattaaaccatcaatataccaatcagaaacactaaataagtatagtaagcatgtcgacctaccattgtatctatcatataagggccacccaaaaaga

SEQ ID NO: 132092 - DNA, 551 bp, Zea Mays
gatgcgcggagtcaaaaggtttcaagtgaaagggaagctagctccgcggttcgtcggcccctatcctatcattggcagagtaggaaccacaacataccgccttgaattgccataatctatgccagatatccacaatgtgtttcatgtgtcccagctccgcaaatgcctacaagtactagaaaatcacttcgaagaagagacaatccagattcagaaggatcttcagtaccgagaaaagccagtaaagattcttgactcggtagtccaaaagacccgcaactcagaagtgagactctgtaaagttcagtggagcagagaaggagaagaggaagctacctgggagagtgaggactccttgaggagggaatacccttaccttttctcaagcccagtctgaatctcgagggcgagattcctttaagtggggtaggtttgtgacatcccaaaatttaaccccaaggtttgaaccctaatctcctaagcccccctaattgctccctagactccacctcataggacaactcatcatttgcatacactatgattattag

SEQ ID NO: 132093 - DNA, 507 bp, Zea Mays
agccgaacgaactggtgctgatcgaaacgattgcatgcatgcacctccgaaatgccggaaagtgtcgtgcgtatgctatgcatgaaaccattgattttattgttattaattattaggactagttaattagcagtgacctatcattgagcaatccaccaaagtacttactagtagcagagggcaaaactttcctcgaaatgatgaggtgcataagtatgcatgtgtgagaaatgagaatggaaccaggcaaaaagactttgggaaatggattaataattaagtagtggtgacaagggggggcatggatgctgcttgatatggttccacttttttggtgatcagtggctaactagctagctaagtagtagtttggttttgacattgttatacatcttgctagctactagctataggttctgtctctacccaaccctaggtagcaacaataacatgtttttttaatttcatctcaagcaagcaatctcactagtacttctcacagctaca

SEQ ID NO: 132094 - DNA, 373 bp, Zea Mays
gtaggatagagtggatcgaagatataaattatgtgacatgtgattagtgtttttaagatgagatgtgcgaatggtcggttagtgtttcacttgtgtagttgataaacattgtcacaaataattgtgctaaaattggtcattagaatgcagtgggcacgtggtgtggttggatgtgataagtagatcggaagtgtgggtttgtcaaagcactgtgatatcgaacgtgtatatcaaagtgcattgtagtggtgattgtgttgagttaaacggtaatgtctcgagtgcacgccacaatatggttgtatgcgagacaaggtaaaataaggtgtgctcggtatgaatgttcgatcgttgtaggtggaaattgtctttg

SEQ ID NO: 132095 - DNA, 741 bp, Zea Mays
cgaaggggtatggaacgctatgcaccgtccgatctagatcctacgcactggattataagagcgagtttattattcggtatacgaacatcgaccgttgacagttagatcgacggcagagattttaatcgcctgagatccgatcgcgcccctcggatcacgatcctagggtaccggtttgatcatcgccctatcagccttcaaccgttcatcgcgattcggacggcaagggcgctaccctctccccaacaacacgccgcggcggcgccccgaccgcccggcggaacacgccggcgagatggcgcaaacgtggctggtagcccaggatccccaaccgattactccaattcggaccaaaggaaatagctagcatggggggcgttcaatcggaggtttgaaatgacggaggtggtctgcccatgagccgcggcggaggtacgtcggcgtgtggcgctcaccgaactacagcgagcgaaatcgagccaggaagcacgcatatcgacgcgaggtttaaagcgagctgactaggtatcttaccggggatagctccgacggcagattggctggccccgcgcgggttggcacggcggcgaaggttctccacatggcaacaatggcggcaggatttcggaggcggcagtggtcgtgcggtttcggatggcttggtgggggccacggggcaccgagcgcaggcttttatagggtcaacttccccaaacggccgagcgaacttcgtggaggtcg

SEQ ID NO: 132096 - DNA, 537 bp, Zea Mays
atcaccaccattaacaaactgattcatactaaggcaaaaggaaaaggagtactttagtatagtggctgagctgttcagtcaggaactgggttgttgtggcaaaatttgggttacaaagcctggaaatcaaatggcagtacactaggaaatcaaattaaagtcgcttacctttcactcagtaaaggccccgcacaaaccagagggacaagtcaaaagccagaacataaatcaacagaatactggctctagctggtaaccagaaggtaactgaaaggtactgaccgtctgatggatttcgagtaaaatattacatgtttgagaatggtaagacacagttttcctgctccatttccagctattttcaaaagacacaggcttcaagttgacattactgatcagcgtgttttgtcaactaatggttgttaactggtacaactacgctcctatgtatcgtgcaagtgtagccatgccataagtgctaatttgaaataaggaccaccggtcaaaccctggctgacctagtagcttgtaaattgc

SEQ ID NO: 132097 - DNA, 419 bp, Zea Mays
tcgtagccgtgaggaatcgatcttgtgctccaactttggtaagttgctaatcttgtgcttgtgcttgtgatctgtgtttgtgctccctaatctagtgccttcttgttatgtgtttgtagccgtgagggaccgatctggtgctatgactttggtaagttgctaatcttttgcttgtgcttgtgatatgtgttagaaccctaatctagtgccttcttgttctgtgtttgtagtcgtgaggggaccgatatggtgctccaactttggtaagttcttaatttggtgcttgtgcttatgatatgtacttgtgatctgagttcgaaccctaatctagtgccttcttgttctgtgtttatagtcgtgagggatcgatctggagctccgactttgataagttgttaatattgtgcttgtgatttgta

SEQ ID NO: 132098 - DNA, 351 bp, Zea Mays
tccgttcttccacttctgccaccaccgcctcgcctcgctcaacatcccactcccacacgcactcccctctctcctgcctgctccgtcgcttctgcgtcgatccagaggacatcctgctcctcaaggacacgctcaagccatctaccgcgggactcccttgtcccatcggagacgaagccgatggcagccagagagccgcctcgcctcttgctgcccctactccacgcccgattcgtctgggaggagggcctttagccgacattccatggggtcagcgcgcgggggcccgtgtcggcctcgcctcgtggcggtcagtcgatggaggcgtcgcggacggctgcttcaacaacg

SEQ ID NO: 132099 - DNA, 317 bp, Zea Mays
agaaaatcttgtcaactatgagcatgaaatgtttgttagatcgcaggtgaactcagagaggttatattaggcaattgggtcagttacttactttggcatcatactgttaggccttttcaaactgtgagttgcatctattagttatggatgtgtggctgggtcaggggtgacaattggttggagtcaagttagtcttacggaatacagagtatttcactaggaacccatctgttttggtgttgcatttggtactacatatgccacttgtgactggctattttgttgtggatgggattctaggaattcttatttagttg

SEQ ID NO: 132100 - DNA, 527 bp, Zea Mays
catggttcgaccgagggtgggtccttctaaggctagcgcacctatctcttctgactgattaacgaatcctagggatcaagggttgtttccttagcgctctcactgaccggtgggtcctagggatcggggatgatttccctaacactacacgacacccagcttaagaccgatcgaaggtatgtgttttcttgcttgatctaggtcttattgtgtctacaggactcaagagctgactacaaaccctcacaaagtgcacactacacaggtacatggacactcactaggctagccttctcaagcaaggctatcctagcgtttctctcttctagcttagtctgcaagccaggacaagcaatacacgcacctaacaagctagacctagatctcaactcgtcacgctcatctagcaaggtggcatacttggtctgcaaagttgtgatgttcgtcatgtgtagggcgcagtcatcatgttctgtctcctcaaacaccccaactgaagctctagcagactcaagcttcctaagcgt

SEQ ID NO: 132101 - DNA, 352 bp, Zea Mays
caaacaaagaaatatcaaccaaaccaaatcaaatgttaggaaagcccaaaaaatcaaaacacatccatcgtgaactccccgagccgattcttggccaagactacatgcatcccctccttcatgagatccccgagctaatgattgtaaactctccgagcctatctttggtcaaggctgcatgcatcccctccttcatgagctccccgagctgatcatcgtgaactctctgagccaatccttgaccaagactgcatgcatcccctccttcatgagctccccgagctgatcatcatgaactctccgagtcgatccttggccaagactacatgcatcccctcctacatgagctctt

SEQ ID NO: 132102 - DNA, 1372 bp, Zea Mays
ggggaacaagaggaagagcatccaatggccagccattgaacatagttcatggggaaggtcctttaaattctagcaggttatatccaaatgtactttgacatgtaataaaatgagctgtaacgccatgtatggatatggccgtgcatgtgactattacagttgtgtagagctttagtttttattgaggaaattgtattcggttccgatatctgcagagaagatggtacactccgttggtaggttgtgttattcagtacctttgttaggccctgctgtattgatctgtcggccagtggtgtttaggtcatggtattggtgcatgaatccacggatcatccagtacaaaacatggatggttaagcttttgagtgccttttgcttttcagcaacggtggttggcattatctaatcgcctcaacgccttgtggtgtgcagagcaaaaggtcaactgacgcaatgacaaaagggctatacctatactcatcggcaactggatcgatgggacttgcaagcaagagtctctcagtttacagaaaagaaaaaaaaaataccacaaagcgacctagaggaagctcagtgtaattaatgtaagtgaacttttgtctgtcgattttggtacagggagcagagagatggtaataggaccgcgtaatttacagagacaaattaccatttccttcagaagataatacagtttctggaaacacgaacggttggtaggtttgttctacaaagcagtggacaagtacgtagatttataaaaggaaacgtctcgttctcttatttaacatatcctttgcaacgttcctttttctttccctgctttcttattctttctttgtgtagggataaagcaaaccgagtcactgctctttataaacagatcccgtgtcacttcatgcaaaagatatgccaataaacattgcattgcattgtatgtttaacctactgaacaaaagaatgccatgagcgcatctagttacttgcccacaagtaattaatagacattgggacaatgaaagaaaaccatgctgactttattgctcaagtttatgctagtgccaactgaagcagatcggtttgattattagacgaatggatggcttgtgagtttttgatctgcatgtagaggtgtgatcgtactgctacaaattgcttacaggatcataccaaaaaaaagggaaatcacgctaatttcctgccggcaaattgttacagactcacaggcaccacctactgtcacgggcaggtatgggttgctgacgagagaattatgggtctgtccatattttgcttaacttttctatataaagttagttctttaattcaaatgaccaacattatttaaagtatgacataattagtcacgaac

SEQ ID NO: 132103 - DNA, 331 bp, Zea Mays
caataaacttgatcccagtgtcaactccttgacccagcgatatggaggtcaacttgcaacacaaggtgctggattctgaagtgaaggcgtcgattcaagcaaggaagctcgatttcaactacaaggtgctcggtttttaccacaagttgctttataagcactgcgagttcattaatctggtgggaaggcgttgattcagcgggatcgtcactccagtggatgcagaggagctttttcagagaggaacaataccagcaaaaccaaccttgtctgcgtgtggccgtgtgggagccaatttggctcaccagcatgggcataaaaattcttgccg

SEQ ID NO: 132104 - DNA, 418 bp, Zea Mays
gctcacgcgtgctctttccttagtcacccaaaaactttgtgaattcgggtattctggtcccctgtgggtatgggagacggtcaaactggctattataaggtctccgatatgactgccccccggggactatactaactctgaacttatctcggaacgccccagctatttcctctcttactatattaatggcagctggtgggagaccaccgactctttggtccaatatgggtgagtttgtttggatgttggtatgttgtttttctcccccattggtttgggttttgcggcgcgttaatacatgccctatgaggctcataggactgaccattcctttctggccttctgggggccggaaagttctcactctcacgggtttggtagattatattatggtgctggtgtgtcatacggtgagatg

SEQ ID NO: 132105 - DNA, 470 bp, Zea Mays
tttcagttaacacgcccttgaccacccttgtttcctaatgatccatgagtggtcattttattttgcacgcctgtagtatctcgcgagtttgtaacctcatccttgttgtgcttttgtttcttattgcctttacccttctcatctcttaatcttaccttaacgattacgttatgttcgttatctaaaacctccaatctcccaccttagttcaagcgtggtctcttacttatctcgccctcgactatatcctcttctttaccgcgtgcaggcccagacttaactccattcgttattgtatttgtaccacttgctcttctatgcctttattttttctcttacacccttgtccgttatcgcctttggcccttgtgatatttatgttttctacctaaaagcttaccttacaattatcctttaaatcctcccctttctttcaacccagtttgagagttgcgagtcacctacctctc

SEQ ID NO: 132106 - DNA, 693 bp, Zea Mays
agaacatgacacatgtacgatttaaaccacatacagatagtactccacaaaatatatcttaatttggtgcaatgagaaaattaaagatagtcgctgtaataacaactaactcactgatcatagccaaataaagtgaaaagtctcaaccaaacaaaaccagcattaacttcatagcagcgtgttactggttccaacagacattttgatgagaaatgtctgtgtgatgcattacctcctgcaaaatacacagagcagcaggcaaccagctccaaggtatatgaagagaggacctaggtggaaccttctcttttatgtttcctgcataatcttgttcgaacagaagtttatctctgacatctactaggagagcctgacaaaaggcaacacgcaaatgattaacatcaggattattgcattccctcacaaaacaaaacatggggtacataaatagatatagttgcagaaactaatcaggaacctgtctgaaagtggagacctcagctgtgtatccatcttctatcccagcatttttcaactccatcgcggccttcacgatttcatctttctcagccttctcggtaacgcctagcatctacacggtcattgttaagcttaaacatgtcaaccaacaagtttttaaaaaggacaaatggtccaatcgattgtgaactgatcagacgaaaaatcagaacg

SEQ ID NO: 132107 - DNA, 300 bp, Zea Mays
ctggtatattggattggcgtgaaatttggcgaatatgttactggaggtattgtgaaggtgcatgaaaagtttgggttcaatcggagcaatttttgctggtttgggcatttcgtcgagcacatggcgtgcggtgttttagggttttagagaaatggtcaatttaggttgtgaaaccctccctaaggagctaggaacgtgcagggtagctcaagggatacatagatgctcttggattcacaagaatttcataagaattggaattgagcaacaaggggtgaaaatggagttcactgcactgag

SEQ ID NO: 132108 - DNA, 613 bp, Zea Mays
actcaagccgcacgagcagaattaccccacccatgatttggaattggcagccatagtgcatgccttaaagatatggaggcattacctaatcggaaacaaatgccacgttttcatcgatcacaagagtctgaggtatatatttactcaacctgatctcaacctccgtcagcgaagatggttagagctgatcaaggattatgacctagaaattcactatcaccccgggaaggccaatgtggtagccgacgctctcagtcgaaaaccattcggaataaaagggaccaactttctagaagactggaaggaagaatcagcacaactaaatgcatgtctgggaaacaacgacagtctcgaagtcaagccaatgctagaagacctcatctgcaaagctcaacatctagactcagagacagcaaggctcgtggagaaagcccgcaaggaacaactcccggacctcaggacagatgaccaaggagtcctttggttcaaacaccgtctatgtgtaccaaaaggggaagcccgagaggtcctactcaaggaagctcacgactcagcctactccatccaccctggatctaccaagatgtacctggacctcaagaccagatactgg

SEQ ID NO: 132109 - DNA, 733 bp, Zea Mays
gcgaaacctccccatacgctcaccacgatctccccaatattcgactctggatatggaatggtgggctggtgacgcggcgcgcgggtataggtataggcagggaaggtcgcgcgaaggtcggaatgcccggtacacacacggtcagcggaaatcgcgcaggagcgacggtgatttcggccggacgctgcgcacgcaaggatgaagatccgcagtaaccgggggctctactggtcagctgtgctgggatataagcctgcacgctggagaagtcccgccaaggtggcccactggtcaacggcttgcggcaagcacagctgagggcgtcaacacgagtgcgggtgaggctgagcgccagggatactatggctgggcgacacggttggagtcttggagacgtagccaggaacgaggcaggtatgcggtgccctggtgtgcatggaagctagctaacgacgggtcccgtgtagtgaccatggaagcatgaggccatgtgctttagcctgatgtcatgtgcgactaggattcataaaatagaaagaaaaaaatgtgggctcaatggaattccataggaaaagggagtgtgggatgattttgtttttcctattttatttactcctttctttttttctattttgttttccttttctcttttcctttctattcttttttcaacttaaactcaatttcaattataagtttaagattgcaagattaaatgcacaagcaataaaac

SEQ ID NO: 132110 - DNA, 470 bp, Zea Mays
tctgaatctaaggattgaaataaggcggatagacttcctcactaacctagtagtaatgggtcctcaagggttagatgtcatcctttagggatgaattggctatacagaaacaaagctactattagttgtgataagaggacagtcaagttggtgtccccatccggaaaggaagtagtaactaaattgttcttgcctgaactagaaggagcctgtcactattttcggtagatgacaaggagggaacctgattgaggatattagaattgtgtcagaatttcctgacgtgttccctgaggagttaccaggcatgccacctgaaaggaaagttgaattttgcatagagcttatcccaggcaccgcccctatttccaagagagcctatcgagtgttcggaccagaattgttggaactcaagaagcagattgatgaattgttagagaaaggctacatcagaccaagtaccttgcctt

SEQ ID NO: 132111 - DNA, 364 bp, Zea Mays
tctcctcttatgttgttggagaggaggcatgagagttaggatcttgatgcttaggtccagtttttgctgccctccgggctttgtattttagtctatttgtacatttccacatttcctctcttaatacaacgatgcatagctctcccgcgctttcgagaaaaatactcctcaaacaccatttctgccattgcccaccaaacaaatgcacaaaccagacttgttccccaggacaaacaagtacacactgcaacactaatctcccttcttagactaccttcaacgaatccctccggcctccccctccatgctaggggcgtcctgttcctccaactaacaactctcctagcggtacattgtgctttcc

SEQ ID NO: 132112 - DNA, 773 bp, Zea Mays
gtttgtttgggctatgagaagccaagggctagaaccgagcgcgaagtgtttttgcaatatgcacgaactattgtacgagacgaaggccactagcaaagagcagtttcacaacaacttcagttgttatggattcattgctcattctaatgcaagctacccggttccaacatttcagaaaggtggcccaggtcctggatggaggaatgattttatgttgagaacaatctaattgaaagggaggacataaaggggattatccaacgcccgatatggtctcgcttcggccttcgaaggccgactgtggtgattgaaaatgatgccaaagcatgtcaaaaggctttcagcaatgtctgtgcttttattggtacaagagacttgatctaagagcacatagcctacagggtatggctacctgtggataactgggagataccgaaggagactgttgccgggtccagtcaaggtggattaattcgtttgaaatataccttcagatacagagaccggtttgacgaaccaaatcacgactggttgaaatgtattgaagctactagcgatgagttactcggggcatataccagagccgaagatgatgctttgtcctcagccttcgggggtcggggcaagaaaaggttgaacagggttttcgatacaattggttttatatatcctgattattgctatcccttgcgaaagcagggaaaaaagaggaaaactaccactttggccatctctgttgtgacgaagggcaagaaaatcaaggctttgaccca

SEQ ID NO: 132113 - DNA, 508 bp, Zea Mays
cccttttgtgccctaatcaatttcctgtcaattctagtgaatccaagtggtggaatgtgttcccatgtgtctcttgaatatccttgtaggttctcatctccttaaggagggtttcacagccttaaatagccgtttcaccgaaaacctaaaccttcgcctaccacatgctcggtgaaatgcccaaaccagccaaagatgctccgattgaacccaaatttttcaggcaccttcacaacacctccagtaacatattcacaaaatttcacgcccatccgatattccaggctttaatttcaccaaattcccgtttcgagcgatcgtttccgagccgagtgcccaaatctctttttcttcgcctaaattcaaaccaagcacacacttcactcatattcacccatataaacctattcgtgaagtatcggctcaattccacgtcatttcgtgcctcaattcgaattccaaacctcttatggcactttttatcgttcaaacgccgttttcacgtcgt

SEQ ID NO: 132114 - DNA, 598 bp, Zea Mays
gaaaaaccaagagatatgggggtgaaggatcatctcaggggtctgaaaagcggacaaggttggtaattcgtcccttcaacccaaatcgttcttctcctcgtccacccacataccccttcaagcaaccagtgttcatccgtcccactcctgcccctgcccagaacaatcagccgagtgcccctggtgctcgtttccctgccctccccagttcctcaagtggctactttaattgcgggaagtctggacatttcatcaaagactgcctctatccgaagcagaacaaatcaaatttccaacagacttcggggaatgcgactcaaggaaagggaaacatggtcaaccctccagcgggcaagaatatgaagaaaactgggtgagtttattacacccaagtggcgactaccccgaaaggagaaccggtgatgatgggtacgtttcttattgccaaccatccagcagttatccttttttattatggtgcatcacataccttcatgagtaagacttttgtggagaaacattgcatacatagtactgaatcaagggagggatttgttattcactcacctaggggtcgaatatttactaaggactgatt

SEQ ID NO: 132115 - DNA, 370 bp, Zea Mays
cgcaattgaaggccgctgcggtctttttcgagcgcaacttttcgacgattgctgcatcaccctcggccgacatctcaagcagcgctgcgacgacctcgcccaccatgtggaagacacagaacaagacgcgaacgcgcgtctgattgcagtggagatggcacaagttgagttcgagcagtgggacctgtttcatggagtgcgtcaccgatatgtccctagaggtgatgcgggctacccgtttcatggaacgcgagcaccgcgctccggccttccatcaactgggcctcttcggctaacttgggtcgacaatcgagtacccacctgtcgaattcgccgccgacggaccgtttggccaccgcggtgaccacca

SEQ ID NO: 132116 - DNA, 606 bp, Zea Mays
aataacttccttaatatcttctcttgcctttaagtcattcttcacgtaaaaccattcctccatctaggttctggaccaccttttccggaatgttggcaccgggtagcttgcattggggtgggcaatagacccataacaatcgaagttattatgatactgttctttcccgtggcctttgtctcatacaaaagtttgtgcatgctacagaagcacttcgcacttggttctatcccttggcttcttgttgcccagacgaagattcccatcctcaatatagcttcgggggtcagctggtgaagaaaaacttggtaggtcttcaatacttcaactacaaacttactcagcggaagccaaatcccagctttgaagaagcttcgaaaaatcacaactttgttttcctcaggggctgggacgttgttgtctccgccagcctcacaatagacatatctcgaaagtatcttcccctcatgttttcgaggtgactttgcttaatggaagattttctgaaaatggtatggcttggtctccagggttgatccttagaatcttcgccaccactttctacatcataaatgtcactgtcactagtattttcagacaggccct

SEQ ID NO: 132117 - DNA, 416 bp, Zea Mays
atcctctttaggtgcaagagccacgagcaccaggtgctggttggcgtccacttcatccccgactgacaacaaacatcgtcagcatgggtcaccttgacgaggatgatcgcaaggtcctaatcgagaacagtgttctcaggatctaggaccaaagctaacatttgttggtcaaagtgcggcattcagtgagccgcctctacatcttcggcatcgctcagcctgtgtgtttagctgcccggggctcaaaggtggcctggcaatggcataccaggtccagacatctcaggttctaggggctcagggaattattgaagggtggcctggcgtgtagactgccgccaatcgaccatgttgactaggtccgcgagagttgcttggccgagaagcaacgacgatgctcgtttcctacatccagc

SEQ ID NO: 132118 - DNA, 374 bp, Zea Mays
caaaaaaccatttctgtaaattccgttcacaagctgctctcagcttttgccgtatgcaatggcatctctccatagagtaaattttagcaagcaaccaaaaaagtgaaatgtgtgcgctctgtaaccaattcagttttgtattagttctgaaacgtcatgctctaaaactattaaatgtgtgtgctcttcactgaaaattcagttctaaaacaaaagaaattgatgcagtaaaaaaattagtaccagagcaaatattcttttgtgatgtagatgcacacaaaagtattgtgacacaatctcctatatctgcaaatgtagaaccaagttttaaattcaaatataaagtaggcacatatgttcatgtgctattttag

SEQ ID NO: 132119 - DNA, 334 bp, Zea Mays
tagaaagacaaccaaacatccccgagtcccacgctggttttacacatgccttgcggctcattctcatggaagtcaccgttggtcgacccttctcctagcctataaagggggaggctggcctcatggcaagggaagaatcagagagggtcgagaggagagagctcttaggcaactggacaccattagacgaacacgaatccacaaggacgaataggaggaagaggatcaccaacgaggacatggaggccggagccccgttaaagccaagacctagttaggactccacccagcagcttctaagctccacttccaccccgataaaagacttgggagc

SEQ ID NO: 132120 - DNA, 389 bp, Zea Mays
tgcgaggtgagagcgcaccacccgttcaggctcgggtaccaccgctccatgtagcagctcaggcagctccggggttgaggtcggtggcgcgcccacccatttctttaagagccccacatggaacacatcatgaatcttggcctgtggtggtagggcgaggcagaccgctacatcattgatgatctcggtgacgcagtagggcccaaagtgtaacaccccagtgtcactaagggtttcttctcagtgctaactcaagaccattatcacatgtgaaccaaattgagcaaaggacatcaaaaattaggagcaaaggcttagttaagtccttttcatcttaaggattgttccttaatcatattatgcacctcaaggtgagaagaattcacaaa

SEQ ID NO: 132121 - DNA, 419 bp, Zea Mays
ttcatatttgagtgctcagagagttgtcttccatcttatactcgagcatcgcaagatttgggcggggctggcgcgtataatgggaagtacacgagcatcgcaagatccgggcggggctggcgcgtagaatgggaagaatgagatggcggggtggtcctgcacttgcgatgggatgcgggccgatggtggtcctgtgcactggatagcgacgaggggattggattgcgattccttccatggcgacaaggcatggatttcgtttggggtgcagaggatatgggtggggcatccgcggtgcatgggaagaatgattgggcagggtggtcctacgcgtgcgggtcgtcggcgatgggatacctgcgtgctggattgctaagaggcgtggatagcggcgaggggatgtgtttccttgtgtggca

SEQ ID NO: 132122 - DNA, 444 bp, Zea Mays
tgagcctgctgctgagtgagagactggagaatcgaagcaatagcagggtcaatagccggaggggcagcaggggtagcactagaactcccagcctcatgatcatgagagcgtggaggcataggaggcagaggcggaggtggaatcccaaaatcatcatcatcaactgctgcatcctgagcttcgagctgatgatgagcagcatcctcggcctgagtgtcaaaaactggagcagaagctggcacaggatcctcaggcgctggacggtaggacccaaagacgaggcgtgaggcctcaagtatgcccttaaactgtggaggccgaatcagctgcgcaaaaatgtggcacaagtagtgagcatacggcagctagcgtcgagcacgcagaccatccaatacagtgtcctcgatctcacaaataaggaaatccacgacgtcaaactcggag

SEQ ID NO: 132123 - DNA, 352 bp, Zea Mays
cttttaccccgcaaggttatccattagctatgagcgcgaatccggacggcggcagcacgaatcacggcggagggtgccgtcggcggtgaggacagccgcgctggcggtctgatccctattgagcactgtaccatgagatcgccattcagtccatctgagagcccaagttggagctcgattttctgcgatttttatgtggcaccagaactagccttctgcatcaaagttgtagtgccaccaaccagctacaagtttgttatggaaatcattcacaaatttgcactggatctcaattgaattgactctcaaacttagagcaaagtcactgttaacttgaaattcagactatttc

SEQ ID NO: 132124 - DNA, 444 bp, Zea Mays
cggagagcccaaatataaacactaagcctaacgattgcgttaggagttaattgatgaaggtatatcccaaatttcttcaatacatcagcaatcatcttgtttaaaggaaatctcaaaccagctttaaagaaacttttgaaaaccactacttcatcctttcctggcttcggagtaatctcttccccgccgaaacgaaccagctctttcttcgcttcattgaaatagcccaaatttatcagcttcggcatgtcatcttcggaaatggtggatttcccaaaatccaggtggctgggtttagttggcactgcgctgtaatcatcttcagactcaagttcttcggcatcagcctgctcggcttcagcggcaggtgcatcctccgatgctaccagccctgagcgcttcatcacttcggagattggggtagtttcggcacctttggcttcc

SEQ ID NO: 132125 - DNA, 617 bp, Zea Mays
ggtattgtagacaagcgttgatccagaagaaatttaagactatagtgatctgtccgcgccagaaaagctcttccccacaaatatggcctccaattcctcacttctttgactaaaccaatcagttcccgctcatacgctggtagtttctgatgatgtggtgctacggcacgactgaaatatgcaatggccccatccccttggtgaagtactgccccaaaactagtccctgatgcatcacagtccaccacaaactgtttagagaaatccggcaactgtaacagtgctgctgatatgagagcttgcttgagttgaagaaatgcctcttccgccacttcagaccaacataaagcctcacgcttgagaagagctgtaaggggtgcagatatggtgccatagcccgcaataaacttgcggtaatagccagtgagacccaagaatcctcggagcgcccgaatagaccaaggacgcgaccatgcctctactgtcgctaccttgtcagaatccatggaaactccctgagctgagataacatggcccaagtaagcgactgatgttttgccaaacgaacagttggactgtttgacaactaacttgtttgctcggagtgctgtaaacac

SEQ ID NO: 132126 - DNA, 892 bp, Zea Mays
tacaagaataattgtcctcagttgaagacatctatacctgcctactccaactcggtgaatggccccaagaatgtttcagcacccgcctccaaggcaccctccaccaacagccagctaagcaaggcccagtttcatggcagggctcgagtgaatcacgtcgacgcccaagaagctcagcaagcccctagagtagtgctcggtgagttcctagtcgaatttaccctcgctactgtactttttgattctggagcatcccatacattcatcgccactagttttgtggaaaatcatggcattcccactacatattttgaaattcctttggtcacccaaactctagggtcaaaccttctatgacacctcaaatgctcccaagtcataattcttttaagtggggtagtattcttggcggacttagccgtactaccatcccacagaattgatgtgatcctaggaatggattggttgatcaagcacaatagcatcataagttgcatagataatactattcttctcactgaccatcatggaaaatcagtttcgtgtaaagctcatccaccaacccaagatccaatggtgtttagctaagcagcagaaagtatatgtgtggtagaagaattcatggatgtgttcccagaagaattgccaggattgtttccggaaagagaggtagaattctacattgatctcatcccaggcaccgcaccaatcacaaggggaccataccgcatgactcccacataattggcagaactaaagctctagatcgtagaacttcaatagaaagggtacattcgtcccagttcatctccttagggagcaccagtcttgtttgtcaccaagaaggatgggagcatgagaatgtgcattgattaccgatccttaaatgaag

SEQ ID NO: 132127 - DNA, 552 bp, Zea Mays
cggttcaaaagataactccaatgtctcccctagcaatatcatcaaaccaaccacggatgacctgtctattgaagaatatcagaagctagaagacatcgggaagaagatacatgcagaagtcgatgagaagttctgagctaatttcaacgtcaatcgaaaccaaaagctcgtctgtcaaagggaatgcaacctggcgaatctttgacccaccacactcgaacccactataagtaaatctgacgacatccaagatcttcgaccttacatagatgaataatgagaacagatgcaacaagtattaggggtgtacaagaggattataggaggctagcacgtgcgtttgataaatctgccattacccattttccatcgcatgatgttgaaactaaagaaaacctacaagatccattggctgcaaacgagcatgcccaatcccaaccactttatgggatcccgatgaactcttgcactggacaaacacatcctccaccacctatatgggaacaactcgtgcccctgcgcacgaccggacaatctagccccgaggctaga

SEQ ID NO: 132128 - DNA, 453 bp, Zea Mays
tggggtcttgttttgctggctgacggaggagggcgtcttgggggtggatgccgtggtattcttggggccattcaccgagttggagtaggcgggtcctggtagcttcagctgcggacagttgttcttgaagtgactgggatcaccgcagtgccaacatgcattcgccgggggttggttgcttgccactgagggggtatggaaagagctctgactctgctggctgaaccgtgacggggtgggtccagctggtctgctgaagtttggccccttgggtggaaacccaaatgatcgagtcttctggtgcctgtcctgctgctgtgcttggagaacctggaactttcttttgagatgccctttttcttcctcctttgccctttcaacttgcatggctttgttggaaaggtgagagaaattgaggaagtcttggctagccagaattgtcttgagttctgg

SEQ ID NO: 132129 - DNA, 297 bp, Zea Mays
taagaccgctcatgtcatgactgttgtattgtattagctgctactccgttgggtcccatcccaaaggtcagcctcctgcttccctatacaagtccaccacaaccatggtttggttgatgctcaacgcacacggcgctgaacccgtcattcatatatatccagattcccctcctcccttcctcccgttcaacttcaacccacctttctgccacacacctcgagcgaagcaagcaccgcaagaattgaagagccagggagattttccgtcgctccgtccgatccatggccgaacagtgg

SEQ ID NO: 132130 - DNA, 311 bp, Zea Mays
ctttgattgtcgtgaatcccttgatgactgtggcggagacggtggattagaaagaggatgaggagcaacatgggaacattgtggaggtgatgatggatgtaaaggtactaaagtttgaggaggcagagatggttggggatgagatgacgacggcgttggtggatcaaccaatttgacatcccttcgaggccaaaggatgaaatttttgatggcttgtccaagtgtctcgattccttcgggcccagggatgtctagcatgtcgtcctcagatccttggacgaccatcgtcacttctaccctgcaataatcat

SEQ ID NO: 132131 - DNA, 727 bp, Zea Mays
agagaatgtgaaacaaccttgccactgctcagagttcctctgccacctttggaacgtcttctttttttcttgttgcagagagagcgctgggaatgaccactaggaacaggattctccagcagacctttctccatcagagcttcaccagcaggggtaataccacactgatttcttcttcagagagtgaccctcagtcaaagtgagcggcgccggtggagctgacagctgttgccacactgatttcttcttcagagagcgaccctcagtcaaagtgagcggcgccggtggagctgacagccgatgccacaccgagggtctcccacacagatgaccaagacgttgccgcactgaattcctgctgacctgatgatccacacggagggatggacaccaggcagcttgatgaccaagatggaaacaacgagcaacaactcggtggctgggcgcaaggcagttgaagcactttccacgaagttccacttggtgccggcgacggggcaggggtactccgcgagacctcttcttgcgcatgactacttgccagccgtcatcgtccataggtcgcccccagtactactcgtcaccttcagagggcggctggatatagatatcgctggggagagagacaacccgcaccgcgatgatggagaggggtaggcttgaccaccaaggctggagaggaccgccttttataggatcgttggggtctagaggattcaccaggtca

SEQ ID NO: 132132 - DNA, 305 bp, Zea Mays
gcctaagcgggaccacaggagctggaacccgtgtggaggtgagctcgtgactgtgattcagcttcaccgcatgaactctgggtagtggggtggtatgattagggctcaaaacgagacgagctaagcttggctcaaccatttcacgagttgaggagacaagctcgaggctcaatcatttcatagagcagaggctcaatcatttcatagagcagagacacaacttctgttctagtagataaattacaacgtcaatagaaaaatgttaataagtaccttgccctgcctctaaaatcagcgacgaaaac

SEQ ID NO: 132133 - DNA, 312 bp, Zea Mays
cccacgcgaagaggagagcaaggcgaatcgatctaagggtaactcaccgtggaataagtagcaggtcgctatgccgacgatgaagggcggtccgaggcaatttcttgaaattcggtgagcaattgccggcactccggccaattcccccgtcagaggaggtcaccaggatgcgtggttggcgcgaccgattcttcccatactatatttaggtggacaacgacgctgcacactgattccatgcacggtggcgcccacccccgcgctggtcgtcgacgtgatgctctgcagagtcgttttggtgccccggttcga

SEQ ID NO: 132134 - DNA, 1440 bp, Zea Mays
ctaggtgctctcaaaaccatagtaaaatattatttgagtctccaaaccatagtacacgttttggtccccggaggacggtaaggctattttggcctcccgcgacacatgtttttgtcgttgaacaacaatttgatgccacccgttcgccacccttgttttggccactaagacaggtaaggctgtttttggcctcgcgtgagctacaacacatgttttcatggccgaacaaccaatttagtgtccaaccatagtacactagtgttaaaaccatagtacacatttttgtccccggaggcctgtaaggctatttttggcgtcccgcgacacatgttttcttcgtcgaacaacaatttcatgcctcccgcccgccaaacatgttttggctactggcatgggaaaggttgtttttagcatctattgagctacatcacacaaaacacttaaatcctaaaccccgagccccaaaccctaaaccatgaacccgtaaccgcgaacccttagactaaaacccgacccccaaaacacaaaatcacaaatcccaaactccaaaccctaaacattaaaccccaaacgctaaccctcaaatcgaaacccgaaatctcgaatcccaaaagcctaagctctaaacctcgagccccaaacgctaaggcctgaacattgaaccccaaaccctaatttgtgaaccctatacctcgaaccctaaatcaaagacccgaccaccaaaacacaaaactccaaaccccaaacttcaaaccctaaaacacaaccctaaaaagtaatgtaaggctgtttttggcctcgcgtgagctacaacacacgttttcatggccgaacaaccaatttagtgtccaaaccatagtacactagtgtccgaaccattgtacacgcatttggccccggaggccggtaaggctatttttggcctcccgcgacacatgttttcgtcgtcgaacaacgatttcatgcctcccgcccaaactctaaacacagagccccaaaccctaaagcccgaaccctgaaccctgaaccctaaattgtgaaccctataccccaaaccctaaaacgaaaacccgaacaccaaaacacaactccaaacccaaaaacacaacactaaacagtaaagtaaggctgtttttggcctcgcttgagctacaacacacgttttcatggccgaacaaccaatttagtgtccaaaccatagtacactagtgtcactgtaaaccctaaactccaaaccccaaactccaaaccctaaaacacaaccctaaaaagtaaagtaaggctgttttgggcctcgcgtgagctacaacacaagttttcatggccgaacaaccaatttagtgtccaaaccatagtacactagtgtccgaaccattgtacacatttttggccttggaggccggtaaggctatttttggcctcccgcgacacatgttttca

SEQ ID NO: 132135 - DNA, 365 bp, Zea Mays
tttccatacaaaatgggcaatcatgattgcaacacaagggggcgaaattgcttataaccaaattattcggcacgcaccaataaagatgggaaccaaaatattcaaaactgatctcattattctaggactataaaatgtggacatcatcttgggaactacttggatgagacagcaccaggttcagctagttttcatagcccgagcacttgaaatacactcccccacctatggagaacgtgtcttgtaccttcctagccaagatgacacccattcttgtgccttttccatgattgaatcacccttggaaaggattccctttctagtgagtatcccgacgtctttcctgatgaattgctcggaatgcc

SEQ ID NO: 132136 - DNA, 486 bp, Zea Mays
ggtggtcgaaggtgtgggtgcttggaggcgatgggcttgggcttcagtctttatttggatcgtattgctcctagcatcgattatacccatggccttcgatgggatgctcgtgctcctacccacaacgccaggtgtctaggatatctcgtgcatcccggattgacccaagatatcgtcgagcgggagccaactaatgttcgtaagatagttttaagttgttgaactagataagtgttctctcttagtcatgctgtggatgcacgctggctggctttagcttgccaagacatggagctttcgccctgttgttgagcaacaaggatgagaaggcctcatattttgcattgggtcttgcgttcatccagtgttttgggttttggaagtttgtcaaggaatgatgtcgcgactgtgatgttctgactatccagccccttaggggcatcgaccacctcaggtccagctttgacggtcttgcggctgtttttc

SEQ ID NO: 132137 - DNA, 469 bp, Zea Mays
ggcgtggcagttgctccggcgatcaacggtgagtaggggtaagttgtggcgatgcggtggaaagggtaaacacgcggcacaaggccggagggcggcggtcaccggcgtttccacggcggcacaggcagaccgcccacgtcgcagtgataagaatcacggcgataagctcaaatgtgtgatcctatccactcctccccgcgagatctttactttaccgaagttatctccccgccagcggacacaaatcccaacgacagcgtgaatcacggcgtgtgggtcatcggcggcggaggggaaagaggggtatcttctgcagtcactgtaccatgggaaaaatctgattcagtcgcctgacagatcatcttagagctccattttctctagaatttgcatgtgaacttcatcaaccctctgtaccaaagttgtagagttacaaaccagctacaattcgactataggacttgaacac

SEQ ID NO: 132138 - DNA, 327 bp, Zea Mays
ccatctagaagaacaatattgtatgaatgaggatattagtatgaatgagtctgaaaacccagaagatagattgcctgatatggtacgagagttgttcacagctggagaggaaggtgcacataaatctatgtttgcagttgtattggaagatatggagcaagaacttcaccctggtgcatcgtacacaagattttcttttgttgttaagttacttcataacaaatctttttaccggatcagcaatgttgctttctccgcaattctaaagttgttatcattggctttcccacagtgttgtttaccagcatcttataaggaagctaagaa

SEQ ID NO: 132139 - DNA, 330 bp, Zea Mays
cactgcaggaaatgaagaatcaccttgtgaggccataaagaagcttgcaataggtgaagtgagacctcaagaaaaggatggtgaggaaggaactttatggatgaccaatgaggtttttgatgtgggcgcaaaggtggtgggtgataaatcctccacccaagcaaacccatcaacctcaagtcatccaagtcttgaagaaggtcatcaaccccaaaggatgccaaccatggtagaagatgaacatgaaagtgttgatggtgaagtgcttcttgatcaagtggatgatgaggaggagcaaattcaaagacaaccatcagtgccccatcctcg

SEQ ID NO: 132140 - DNA, 357 bp, Zea Mays
gcgagtactgggtataggcggcgaagggcggtggcgaaacggagagtgagtgaattgtcgcgaagtggtaggcgtcatcgtagtgagatggagagtggtcgtcttcgcgtggacgggactggtaaacgagaattgttgtcctcgccgattggggcgagtgtaggtgaagaggagctgcgaaatctttttgagggtgaggagttgaggataatgttgttcaactacagggagatgagtatcatcccaaaggttgagccaatgtaatatatgatgccctcgctgtgtgtatgtaaccgtagtttgtatgataaggctgcgcgccttcgttgatccggccgcatgcgtaggccacttctg

SEQ ID NO: 132141 - DNA, 312 bp, Zea Mays
gggaatgataccaacgtggttcaattagcactagttttccaacatttggaagcaaagagaattgataggactgtgtaattatgaaatatgaaaacgaaacacaaatttgtctgcgaatgaaatttggcagaaacaaggaccatatacagagggactttgtccagagctcacctgtcaggaacaacagaatcggaatacagggttagctgatatttagtgttgtacttgtataaatatgaactttaaaagttaaattgagctcttatctattgggaaatactcttggaatgctagaaaacactagtgggctag

SEQ ID NO: 132142 - DNA, 651 bp, Zea Mays
aactcagattcgaggaaggagattttgtctacctcaaggtctccctaatgcgcggggtcaaaagatttcaagtgaaaaggaagctagctccacgattcgttggcccctatccgatcattaacagaatagggcccgcagcctaccaccttaaattgtcagaatccatgtcagatatccacaatgtgtttcatgtatcctagctccgcaaatgcctgaaaatgccagaaagtcacattgaagaagagacaatttagattcagaaggatctgcagtaccgagaaaagacggtgaagattcttgattcagccatccgaaagactcgaaactcagaagtgaaactctgtaaagttcagtggagcagagaaggagaagaggaggctacctgggagagtgaggactctttgaggagggaatacccttaccttttctcaagcccagtctaaatctcgagggcgagattcttttaaaccctaaaccctaaacccccccaattatctcctaaaacccccacctcatgagacatttcattcatcatatgcatacactatggttgttagtagcacctctcatagaatattttgacacccaagaaatgtagataaatatttgtttaaaggaaaaaggagattatagaaaaggagaaagtaaaat

SEQ ID NO: 132143 - DNA, 504 bp, Zea Mays
gtacttagggaatagatgtcatcctagggatgaattggctagataagtatcaggcagttatcagttgtgataagaggacaatcaagttggtgtccccactaagagaggaactggtgaccgagttagtcctgcctgagtcgaagaaaggaagttgttatcagatggctgtcgatagtagcgaagtagaccaaattgagattatcaaggttgtgtctgagttcccagatgtgtttccaaaggacttaccaggtatgccactagagcggaaagttgagtttgctatagagcttcttcctggaaccgctcccatctttaagagagcttacaggatatccggaccagagttagttgcgcttaagaagcagattgatgagttgtcagaaaaaggttacatccggccaagcacctcgccttgggccgcccctgtcctattcgtggagaagaaagatggcaccaagagaatgtgtatcgattatcgagctctgaatgaagtcatcatcaaga

SEQ ID NO: 132144 - DNA, 829 bp, Zea Mays
ccgccgccgccaacaatttctttatgtttttctgttttcttgttcagagaacacgcatgttccatccatgcccacttgcgcgttttttttgttgttgcagttcttcctcgtttgcagttcttcctcgggatttgatttgattgattggattgggttggtgcgggggcatgctgggggcagatgacgacatgcttacgaagcagaagctgctgcctccgtgacgaggcacgccgtgttgctcgtcttccatgactctgatgcctgcctgcttcgctcccaccaccccacaccttaatcgatggattaggaattaacctgcagcgcccgtccaggtctcgtgagagatttatatgtttggatcagattttagtttcttgaggcagatgacgacatgtgcatcctgcttgagatgcagaagctgcctcccagaggcttagccatgttgctcctcttccatgactctgatgcctcctcgtcctctcccatcatttgtgttttgttttgtattggtttttttttgctgtcttgctgtcagtgatggcccatcccctagcggttaaagctaacaaaacaaaacaggcgatgtttccttttcttgtcgtcactcaggccttgaaagcacgcagtcagttctatgcattggattcagtctgcgtttcggctacacaattcaacacagggaaaaaaatcctagggtggtcatgtgacagaaataccaaggtagcgaataagattaaaaagaacactttgttgtgcttgtcattgtataaagggatccatccgaggatgaattggctaggtcggtgagagattggagatggataggaac

SEQ ID NO: 132145 - DNA, 352 bp, Zea Mays
cactagatctctaacttagaacaacttggttttggctttcttattatatgctcgagcaagtcgagccttgtctttctccatatctttgagtggcttcaatcccttttgtgtcacctcatcaatattgtctatcataaaaccatgatacataacaaaaactaattcattttgtttaacaagcctatatacacccaaacttacttcgataggtaacatagcttcttgcccatatactcattcaaaaggagtaattttagtaccaccatgtctagacacatgatgtgtccgtagagctttagacgaaacctcatgccacctccttggattatcctcaatcttcttttcgataagc

SEQ ID NO: 132146 - DNA, 287 bp, Zea Mays
tattgatctcaagacgaccttatgatctcaccctaacgagatacctacctttctagttatctgctaggagggtgaacatatttaggtattcatcattgatccaaattctctctccctagacgactctacgtcgtctgggacattttgttaatttggacattttgttaattggaacatggagcgctaacctgagataatagtgctaccataagagtgaaatgagacaccattggccaattaactaggaaacctagtgatggatgaccttacccaaaagggcatgcggg

SEQ ID NO: 132147 - DNA, 769 bp, Zea Mays
tgagtggactgcgagttggatacataattttgcagggactcattagtaaaatggccagcgtgtagatcgcgagctactcccgagccgtccgattagatcggatggcgcagattaaatcccgaaccggtacccgatccagacccttcgatccatcacctacggcccagatttaaattaatctgattcactcgtagccatcgggtcttatatccacgggtacgatttaatcggacgacacattatcttctgatctaatccacgcccttcaatcccgatcagacggcacggatcctgtcttctaatctagctgttaccccgtagatcaatggccctgtgtctctccccaacccgagcgtgcaccggcggcggagcacggctcccgcggcgactagctcgccggcgagggtaaaatccggccagccccttcccccgagcctaaaattgaccaatgctaaacgttatgaaggacatggcgaatgcactagggaggtaatttaccttgtttcatggcagcaaggtcaccgatcacggcacagggcaggtttggacgcaatagcgaggtacggcaagcaattccagggcgtccagtggatcacacgcgtggagaagccacgaaatctctccgcaactcccttggttacacttgtacactatcgggtcgagatctcacggcgtagagagggacagtcgcggcggcggtctctcgctgtcttggatggcgcaggcggcggcgatttgggtctgcggtagatgagctcgcgcgagagag

SEQ ID NO: 132148 - DNA, 279 bp, Zea Mays
gtcgagattagatcaaacatatcctttcgcttctttaactcgggaccgtccgatcgggatttggcgcttgtgagcgggcctggcaatttaaaatccggggcgttcacccttgatcctgcggtctctgtgcgtagtggttcatggaatggcggatttaatcagggtcgtctgttttagatcctacgtcccagaatagccaatatcccttcgcagaactccttttacataagagccctcgggttttagtaaaatcaacccgccgtccatatggggttagcc

SEQ ID NO: 132149 - DNA, 471 bp, Zea Mays
aaagaaatgaaatgaatttcgtgggacgaaaccatgtgtacactgtttccaaaatgtctgtgttttatatgtgacctagaaacaacaaagatgaaagtatgaaactacgcattgagtgaaatatatcatcggagtttcaaacctccgtaaatgatgtgtcactctagttaatcgtgctcatgaaacttccattgagaatagtcttaaggggtgtttagtactgctccacttcactaactccacctctgctccatcccttctgttaagccttgtaccactttgctcttgctgctaatgacgttttagatctgcaattattgctctgctttaatatcaatgccttaatgctatgtcgtttacttaatagatgatctaatgaatcatcgaataactaaaactttctaattctccattatgtatccttcttcctcctccatttccttcttcggtatcggacgtcacttcttctac

SEQ ID NO: 132150 - DNA, 393 bp, Zea Mays
aacagaatgaaaagggaaattgctaagtatatatctgaatgcgacacttgccagagagtcaaggccagtcatttgaaggtagcaggcaccttacagcccattcccataccatcttggaaatgggaggatatttgcatggatttcattgtgggattgcccaatacctcccggcaccacgattctatttgggtcattgtggataggttgaccaaaacagcgcatttctcgccagtacataccacccatagggcagaaaagtatgcagaaatttatattgaccagatagttcgtttgcatggaataccaaggactattgtgtctgacagaggagcaccatttgtagcacgtttctgggagcaattgcaagaatcacttgggacccatgtaataaga

SEQ ID NO: 132151 - DNA, 334 bp, Zea Mays
caaaactccgagggctctttagcataaaagcaacgacgaagaggtatggatagatttcagccgttggatcctagttcaagcgctcagattaaatccgagccctacaaaccggtacgcaaatctggccatcggatcaagatcctacaatccaaaatctctcccccgcattaaaccgttctgacccttggatttccaatccacggctgaaaacaaacctcttacctccattcttcattgcgcatccaacggtcctccttcgtcttcctcacgtgaggtaaacagagcagtgagcgttcccaatccgcggtggtgtccgccgaacaggagcccgagc

SEQ ID NO: 132152 - DNA, 772 bp, Zea Mays
accgcgggttgatatcactctttcgtggggttcttacccaaaattacagccgcgaaggggtatcactagatctcggtcgttggatccagatcaaggacgcatgttctatctccttcccccaaaccagccacgcggcgataccacacacacggcggcgcacgccggtgagccaccccatcacgacgcataggtacgcgattcccaaatcaatctggtgctacacgatgtaggcgcatgggtggatcggttaggggagttcttaccgtgtctcaacgcagcagaggacgtggccataacgcacagggatgtggcagtggtgcaagagctccgatgagcaattgatgccgccccagtagacgattccccccaacagtcacgggcgcaacaccggtgatgtagtgaaactcccagcgacgacctagaggtcttgcgttgcagccgagcttgttccatgagcgcagttcaccagcgacgacttcttctccgtgtgcaccggtgaatgattgcccgagcggtggcatgggacggatgaggggaaaagctccgtttaaatagccgcaaggagccccgaaactggtccgacgccatcggcacttgttgcaacaatacagcgaggttcatgggagggagaaggatctgcatagtgggccccaccaatcagagtctccgtgcccagcgagcgcacccattcacccaaactgacaagtgggggccagcaggcagagagagcaagaggaacggatgggtggctggtacgatgagtcaactcgac

SEQ ID NO: 132153 - DNA, 434 bp, Zea Mays
ggccgaatgccagagtctccgacgagtgctctatcgcaagccggccggcaccaccgcctgcgtgcctagaaggagggaaacacgtctcgaccgttggatcctagggtagcgaccgggattagaagttgcagaccccttttcgtctgatggcttgtgcaccgtcgatctttgaatcgggcgggtgagaagcgatctccgttatttaaatctccatcgttgctctatgatattacggtcacaggtttggggggatcagatctaattgtggccgtctgcggttgatcctgcggcccaactaggcccatacatcttcagcctgcgaactttgcaaaagagaccttaccttttagggcaatcaaaccgccatccacactagtagaaaataattagaacggagtcccgatatttacgaatagaaccacgtacttcctaga

SEQ ID NO: 132154 - DNA, 291 bp, Zea Mays
gggtggaaagcctggagcatcaagtcagggaacttacaagggaaaaggcgtcccttcaagagagcctcgagatagcagaaggcaaggaaaccaacacctgtgaggcctaccgcactctgaagatggattacgacaagaagctgaagaagctcgcccccgcaagaaaaatccgcaagaagaccaaaagccaaggatgtcagactgagcagaaggaagaagcccctccatccctaccacctaccaggatagggaactcgtctgacaccgaagaaatgtccctagccagccttg

SEQ ID NO: 132155 - DNA, 465 bp, Zea Mays
cagcgacctagagctttcttcttccttacgccgcagcccacatctacctatgtacacgacaccggtacaaggagacagcacaccggcaccatttgcccaacccgaacgcccagtcggccgcgatgcgcaacaccaagccaatcccagctaccggccggcacagtccaggccctacacatcgacaccgccataaaccgagcgaccatagactcttccccggcttcgcatggatggacgtcgaaaggagaaacggtagattagggagaggccataccgcaggttcgccgcacaccggggcttccgatgagcgctcgtgtgccgcccccaagagctcggatgagtagctggcgacccgcggatcccacacgactaccccacggggaatatcgttggtgcagatgcgtgtcgacgatggcttggttttcccccacggcgtcgcgacgagaagttcgggaggcaatgctg

SEQ ID NO: 132156 - DNA, 469 bp, Zea Mays
gtgaaatttggcaagtaggttactggaagtgttgtgaaggtgcctgaaaaatttgggttcaattggagcaagtttggctggtttgggcatttcaccgagcatgtggcgtgcggggagctagggttttggtgaaacgcccatttgaggtgggaataccctcccgaaggagctaaaagcttgcagggatacacaatagagacatttgaactcattccaccaattggattcacaggaattgacaagaattcaaaagggtttggaattggtgcaaagggtggtgcactgcctaagagacagagagaaagagagacaggggagaaaacaaatctgctcaccgagggggaagaagaggggagcccaaagtcatcggagcaccgccggagatggtggccgccggtgaggggagatcgccgggaggggagaaatcgccaagaacagagagcagctggcggctggctgggaaataaaa

SEQ ID NO: 132157 - DNA, 382 bp, Zea Mays
gttgcgcctgcgccgccggcttcgacgacctaccgaacctccccgagcttggtccctaggtttggagatgatactttctttgtatgctaattttctcaaagatttttcttctcttctgtgtttgcaacaaaggtgtggagaggtatgaacatgaatctgtaacactattttctttccggtgcttaattttttaatgctttgtacaattattgtgtgcattgcaatcttgttaatatatatctttagtcatcatgaattttcaatgtctgtatttattcagcatacattttttgttacatctgtgtaaaaacaatgaaggatcatatgtactttctatttctttctacaggatcaagcttacttcctatatgtaacattgttc

SEQ ID NO: 132158 - DNA, 420 bp, Zea Mays
gccagatatattacatagtggaacaatgtttattcaacacacatgtgggatgggtctcttacaagaccacttgaaccatcacattcaccacatattatttcaatagtgcccataaatgtccgaacttcaagctcgtgactttcattttgtgattattggttcagcctcgattgcatttatcaatgacccgataagagagctgcaagcactcatgcctaggactttgttttggatccctttgcaatctagagaggcaagataggtgtcgacacatttgtctcccacatttaataatgatcttcgtcatttcccaaaaacaaaagattcattgttccgtattcctagcacaatgatattgcgcgcattgctaggaatttcatcatcaagatgaacctcttcatgaggcaaatcatcatcacg

SEQ ID NO: 132159 - DNA, 683 bp, Zea Mays
aacccccccgccccccattctaaaatctgagaatgatttggtgcgtagggttttttgcaagaaatgtggtttagatggtcatcatgctagggagtgctttaagtctttgtggtgcgaaatctgtcacaaagaaacccacaacactgctcggtgtgttcttcccaaacagaataagcccagcatgccgattgttggtatggcggcggatgggctagggttttattcctctcatttcgccaaacccttatccaacaaacctaaacgcagttttattggcttggttaaaatcgttgagggtttgattaccgctgatgatctggagaaggatttcggttttcactttccttggggccgcacttggaaggctactaagtgccactctggttttctcatgcaattcccctctcaagagagattggatgaaatgattaatttccccgagttgaaaatgaaattgtctggagccaaaatctctatctcttcttggagttctcaggctaaacctaaatctaaattgcattctgtgtggattgtggctgagaatgtgccagaagagttacaaaattatcaggccatttgtgaattgggatccactattggagcagtggaagaagtggatattaactctttaaactctaaagaaattgtgaggtttaaagttcatgtgaagagtgttgctatga

SEQ ID NO: 132160 - DNA, 280 bp, Zea Mays
gacgtccatgtgatgaacgtgccagccctcctgggctgacagcgcaaggagtcgcacggattccattcgtgccacgggggcgaaagcatcgtcgaagtcgatcccctcctgctgtaagaaaccgcgtgccactaagcgagccttgtgcttaacgatggcgctggcttcatcccttttcagtttgaacacccatttaagggtgatcgcgcgatggccatgagggagattatcgagctcccaggtgcggttcgtctcaaccgcgtccatctccgactgcatc

SEQ ID NO: 132161 - DNA, 415 bp, Zea Mays
accaagcttgccttcgcctcagtatatcacccgcagtccaacggagttgtggaacgcgccaatggaaaaaaattcacagctgtcaagaagatgctcctcgacgaaaaaagggcaggtggccgacttgttacctgaagcggtctgggcgctaaacacgactgagtgcagggcgactgggttcacccctttccgccttctatatggatcggaggccatgaccccacaagaaataaagcatgggtccccgtgaacagttgcgtcagctgtccccgatgtggacggacccacttcgaaggatcttatcgacggagaccgcgtcttcactctacaggctctaaataaataccaagcccagacaaaagcatggcgcgacctcgcagtcatcccgcgggaattcagcgaaggggacctcgta

SEQ ID NO: 132162 - DNA, 369 bp, Zea Mays
gagagagaacacaaaaggaaatggagtggtttagctagcctccattttgcatggggtgatgatagggaccttgctagagtcatgaacaatacccaacaccgcatattttggggatacataatcatttacatgacctggtggagttggtcttagggtttcccattcggctatttccttctgcacacaccaaggtcgcaccacaaggcccataactccacaacctcagggttgggcgctacgttgggctaggtatgtctacctatgagtaatcgggtttgggtgttgtcctcccaaattcatactcgctatacccgatggagaaaggatttctcctagattaatactcatggggattaattttaaacctac

SEQ ID NO: 132163 - DNA, 497 bp, Zea Mays
gccaagaccagtgcttagcatcggcctaaaccaaattcattacctagagaacgtttcccctaagttaatttgaagaatggcactctactttgccctgcccacggtgaccgagaacgttacagagggatgaaggtgttcacggcgagtggtggtgatctagttcaattggacggttcaaggagttcgcgggatgcctacggatgctagaacaagcaaccgaaggacgcgagctaaccggaatcgagttggccgctgcgagctgttctttacggcgacggagaccgaatttggggagaattggaaattcgcgcgtgctggtggatgatcgagggtgggagcgggtgctatagcttcgggatgacttagcgcagtagcccgagccatcaatttataggaagcttcgtcggtggcgcttaatttggtcgggccgtgcgggtggccggagataaggaagaacgcgggtgcggtgaatccgtgttcaccgtcgtggcgagctc

SEQ ID NO: 132164 - DNA, 647 bp, Zea Mays
cactagacagcgttgtcaccaacggtcgttaacggccatcgaaaatatgcttatttgtaactgcttatgaccgacggaccgacgtcgttagaaataagccctaacctttggaattaaactatttcagacaattattagcttatatccaacaatataagtcatcatagtttatgttgtttactattgtgtaaaacatggaacaaggtgtgatgttattgttgatactgcagatcatatgtttagctttgccattatgtaaagtataggggcaagaaagtcaaagtaggatgttgagactggataagaaggtagacatggcatgattaacgaactcggtgtcattatcatatgggaagcatttaagtatagaaccaaactgagtctaaatgtatgcaacaaaatcaacaaaataatcggatctcagattttttactcaatggaaaggactagcaaaaatgactaaaaacatcaagaattccaagataatatatgtaatactaagtgttaaggagtagagatgtccatacatcacaatgaaaaaaagcaaaaggttctaacgtactggacactaaactagcaaaaggttgtgtttcccaagttgacaggcatgaaacaacacattgctttattatgtgataaccaacatg

SEQ ID NO: 132165 - DNA, 445 bp, Zea Mays
atccttcagcacgctgttttggcgacgaaaacgagtgtacattagcgtatcgggtttggctaatttcgatcgaatcacacataataaattatcagtgccgaaatcagtttatttcgggctatcgtttctcgcccagacctaaatcttttgatataagtaactgagttatgaatttctgtatcgcttaaaaaaaggaaaacaaaatatccagtcgccctgtccagattttttctttccttctctagtcaccattctcatccgcgcgcaggggggaaaagatctgccactgctcctggtaaaaattgcgccgctccagctatgtcctctttatccccagccacacttctcttctcccccacgatttctattgttcagcaagccattcgtcatctcctccctggcgttcgtcctcggctcccatggtaggctccacttccctgcttcc

SEQ ID NO: 132166 - DNA, 612 bp, Zea Mays
gtttaagagcacaagctcttaacatatcctccagcacttggttagtcctctcggtctgcccatcagtttgaggatggtaggctgaactaaaattcaactgtgtatccaggctctcatgcaacttcttccaaaaccgagaagtaaactgtgatcctcggtcagacacgatcttcttaggcactccatgtagacaaactatctgagtcatatacaattctgctagcttggctcccgtgtaattagtcctcacaggtatgaaatgagccactttcgttagtctgtccacaattacccaaatagagtcatacccagtaggggtgcggggtagtccaacaatgaaatccatgccaatttcttccactcgggtatcttaagcgggtgcaatagtctagctagtttttaatattcgaccttgactctttgacacacatcacacttagccacatgtgcagccagatctctcttcaatccataacaccaatacttctgcttcagatcttgatacatcttagtgctactagggtggatagagtaatcagaatcatgggcttccttcaatatggtctcacgaaggatatcaatctcaggaacacatatccgatccttgaacca

SEQ ID NO: 132167 - DNA, 841 bp, Zea Mays
tatcatcaatcaagggcataggaaacctatttttaatggtcagataattcagtttctatagtacacacaaaacctccaactcccatccttcttctggactaatagcacaggggatgcaaagggacaaatactgcgcacaatcaaccctgcagataacaactcagctacttgcttctctatctctattttgtgtaagagaaaatacatgtaaggtctggagttaacaagtaaatatcctagtaccagagatatatggtgatcatacactctagaaggggggagttcagtaggaactacaaagacatcttcaactcctacaacaatgcatgcaaagaaactaggaactgctaattcctccttctctacctcctgctccagcatcattggtgcccacacatcacttcccttcaaccacttattcacctacaacatagaaacttcttgagatacctctctctttgcatgtacccatctcccttcaattggactggaaccctttatccacaaaggttagcatcttcctttgccaatcacactacatgaggctatgcgactgcaaccaatcataacctagaatcatgtcatacacctctaactccaacactctcaaagaggttgtataagtgtgacctcctggccaacactccatctccaccactcttttattgctcaacatctttctcccatttgccaccctcacttccaatgcctcataatttagtataggtagtcccaatgtgtccaccaaattttgactaacaaaactagtagagctacatgaatcaatcagcaccactaacacctgattcttcatataggcttgcactcccatacacccgtc

SEQ ID NO: 132168 - DNA, 695 bp, Zea Mays
tcgacgaacccgggacccataagtcccaccaaaatcaaagatctctaatcttgtcttcaccttctttctatgctcataccggtataccagcaactcttggttaatatcaaacgaccataagttctatgacaacatttaatttttaggtagaccgtcctacgaagaaagagtctcgaactagacaataagcacacgaacataggttgcatctgaaaatagaatatgtcccatgagcaaacaattccgtgaatctactctaaaatgactctagtcctgggcttatatgtacgatacttgcaagatatgaaatcaaaaaagcgagagatagtcgcagttgccccgagcttgaatgcacaggctctggcagccaccgaaggccaaagggcatgtatagacggacgacgaacgagaagcaggggtccgagaaggcgtcgtagcaggtggctgagcacaccttggacgagctcatggacggtgaacaatggaggacatgtcgttgccgctaaggctcgccgctctgtgcaggggccgagccaggcctcaggccacacaacgtggatcacgtcggagagcacaagcacaacaacgatgtcgccccaacccttaccgtccttgagcaagaagagcctgagccaagaacagacgatcgttgccagcctggtgcaagaaggctccacccggcggccgtcgctcgc

SEQ ID NO: 132169 - DNA, 746 bp, Zea Mays
gaattgctcattagtagaaagccacacatttcttattttaaagtatttggttgcaaatgttatatatggagaaaaggaagctgactatctaagtttgaaaagaaatgtggtgaaggttttctacttgaatattcatcaaataacaaggcttataaggttcttaacaagactcatggtattattgaggaataccaaaaagacaacattagacacctgctccgccaacacaaaagcccatatgccatccccccattgccatttctacacctataatgtagatactgcatgcacatgctgcatgtgctcgacatcatccccttgtagggatgaaaacgggacggatacagccggatatatggtcattctgtatcataccctaatgtatttctctcggatatgggaccagatacgggtagttaagattcgggacggatacaggatgggaccgggtaataatccagacgggtaagaaatggataacggatactactcgggtaggtaccggttaattgtcgggtagttcatccgatgatattaattgtccaatcatccataagttaagtaatacataatcatgtatatgatagatcagatgtaagaaaggaaaccggtaaaattgacatcatgcaattcaaagttgcttatcacaagaacattgtagaaccaacaccgcaatatttaaaattcataaagtattctagtttcactaaaaattgcaaataagttacaaaaactaataaacattt

SEQ ID NO: 132170 - DNA, 628 bp, Zea Mays
tggttgtacaatttgaactgaaaccaggttatgtaaggagcatatcagtggaggagaaattgttggggaaattgccatgcaccaaaaatgcaagtcaatatgtgggggatgtcgatcctactatgatgcatgatgctgatatttttgttggtgatgagcaattttatgctgccttgggatttagggatggcgctcaggaagctcctcaggtggaacaggttactgaggctgagatctgtgaggcgcaaattttagttgatgatgatgcagattgtgaagctagcatagtggttgacaaggaaaatcccaaaattgaggttggtgaatcttttcctacaatgcatgattttaggatggctttgagacaacacgcaatcaagaaagagtttgaggtacacaatgtggtgactaataagacaaggtatcgagctgaatgcaaagcagaggggtgtggttggagaatcgtggctcgtaaactacagcgtcagccaactgttgtggtattactcatatcttctttgttttttttcttcttctattttttagatcttgttttctttatcgtaaaaaacgattgtgttttctttttgcagatttcaatgataccttgtagtcatgattgtatttc

SEQ ID NO: 132171 - DNA, 402 bp, Zea Mays
gccctttatccatacttcagagtaaaaatttaccgcttaacgaagatgcttcggctgaaggattcttaatgtcgtcggttgagataacaagttctggctgaacaacagcctttgcatggtcatagccgaccttctccaaaattgatacagccccgcgggcaccagcaaaagcacagaaatcccctcgatcgctgagtatctcatcaaaagcttcggtttccctgctgatcaactagataacgccatcggggtcaccgcggatgaacttctgctcggaagagtatgctcccacctttacaaaactgttctttagattcttggcgcattccaaggacatttcatagcatctctctttggagtcatggaactgttctttagattcttgtcgcattccaattttgc

SEQ ID NO: 132172 - DNA, 326 bp, Zea Mays
atttttccttggcatggaggtataaccccctcgtcatctttggcaaattcctccaaatcttgagaactcaagaggtcatcttcactctcatgaaactcttcatcttcatttataggatcattgtcatagcctttatcttcagaaatcgggttcaagtcttcattgttatcacccaattcaggtccccaaccagaagatttgccttgagacatcatatccccaatgttttcgagtctcaactcttctttaacagatttccccctacatttctagcctttttgacagttttttcataagaaggatcatcaagaccttgcctgtccacc

SEQ ID NO: 132173 - DNA, 1130 bp, Zea Mays
cttgattccaaacaagccctaagcattattccctccttcccataacaggttcgtgttctccctaggtactagagcctgcaaatgatgcatacacaaaaacatgatacatatgcacaagtatattagttacacatggaggacatatagtcataatccactcttcatctctttgtttctgcaattgaacctcctctttcctcacctccacaagttctttttcattgttaactcactcctgttcaagtgcaaaggctttattgaaccactcctcttttttagctctttctcaacatcagtttctctcttttgtgcccacatattttccaatgttgttgtcacacttttcttcttctcttgtaacggtgttgctttagcttttttttctttccactaggccttgtcaactgaatatcctctacgccttggacctcacctgctcatgtttcacttggtacccttgcagtagcatcaccatcaggactagtcttctgtctcttgttctaagttttagcagcaaccaatttgtcaaatttagcaagccattttggttgtgtcctcaactttttccaacaatgcatgaattgaaatgccttatgttgttcatcttcagatttatataaggcacatgccttcacaacctgcacaaaccaaaatccaagggtgtatgagataataaactaattaagctgtaacaaatcgtataccggaaacatagtaagtaccttatccggcattgtggtgccactctaatgtcgtagctcaatccgtgcaagacaaccacaaaaattattcttgcatttctgaatggtctcccatcggtgcattaaagaattaatggtacactgtgattggcatggcttgtgttcattgaagtactcataaatatgagaccaatacctgccaccttttttatatttccctaccacaggatccaaacttacattcaaccatgcggaaaccagtacttcatctttctgatcactaacttttttggatgtcttatggtttggccttgcaataagagctggtgtcccaacaggttttgcttgtgaatactgtgcaacacttgtgttggtatagttatctacatccccttgcatgcttccatccatcatcatgttggaaaaaat

SEQ ID NO: 132174 - DNA, 347 bp, Zea Mays
gacctacccacaataggcatcaagactcatgaaatgactaaccatcctttgcaacaagtagaaagctaaggtttttctaagtgcccacatcacttcactcctttatccttcttagtctccatcagggatgtcaatgggtatatacccgtcgagtagtatcattccatactcatatccatcaaaacatttttattcgttaggttacccatattcgctcatgagcatataatcttactcatacacatactcatgcgtgtaattttactcatcggataacccgtacccgctaggaaagtcacaaattctaatatgtcaatcactcaaaatgtcaaacaaacacacaaaaa

SEQ ID NO: 132175 - DNA, 373 bp, Zea Mays
ggcttcactaatataacctagcttcatcaacttaggcatatcaccttcggtaatagtagacttcccaaactccaggtggctaggtttagatggcatggcgttgtactcatctttagtttcaccttcttcaacatcaatctgctcagcttcgacaacaggggtaccttcataagcttcttccggcactgccagccctaaccgtttcatcacttcggaaatcggagcggtttcagcagcttcggcttcctctccgtcacgtataaccctggtcatagaacgtacccttgccatttgatgatgaatttctcacaatttttgaaattgctgactttttaaattttgctgaaactcttcctcttgagacgaagcaaag

SEQ ID NO: 132176 - DNA, 745 bp, Zea Mays
ggcgtccactgttctccggcgacctcgacccagtgctcctctcctgccctcgcttggtgagcagccccttctccctctgtcttctctctctctctatttctctaggcagtgcaccccttatttccaccctttgtgcccaattcaaaatcatgtgaattccagtgaatccatgtggtgcaatgtgttcctatgtggccattgagtatccttgcaggttcctagctccttcgggaaggttttcccaccccaaatagtcttttcaccgaaaccctagaaccccgcacgtcacgtgctcggtgaaatgcccaaaccagccaaaaatgctccaattgaacccagatttttcaggcaccttcacaacatctccagtaacatattcgcaaaatttcacgcccatccgatattccaggctttaatttcatcaaattccccgtttcgagcgatcgtttccgagccgagtgcccaaatctctttttcttcgcctaaattcaaaccaagcacacacttcactcatattcacccatataaacctatttgtgaagtatcggctcaattccacgtcatttcgtgcctcaattcgaattccaaacctcctatggcactttttatcgttcaaacgctgttttcacgtcgtttgacctctcgttcgtctcatctcttgttttctgtgccatatttctctgtatatgtatttattcacatttcatatacttatgactatgtgactaatacgtgctcacctctt

SEQ ID NO: 132177 - DNA, 479 bp, Zea Mays
cgtagcagtcggcatgaccataggcgggccggcagtaattgcatcaacaggtgcgcaggagcagcaggccaaccgctaatcagactctggccccacctgcaggctcgcatcctcccctgaggcgggcccgggggccactgtcggtaccctgaattaggggtaccctcttctacaacatgaagacgttgtacacgtacgatgtctccacgccacacggataacggcacccgatcccaccacatgggcagggctaagggcaccacgtggcaaggaaagacaatacacccaaggatgcatcatttggtccggacctccatagagggacaccggacccctgtacgtacaagtctggagctcccaagaaggcatgtcgggcccctcgggtaggcctcaggtccctccgagtaaggttcgggccttagcaaggtcccgggacggggaggaccccagcatgattaagggtccggtgctggcacgtg

SEQ ID NO: 132178 - DNA, 271 bp, Zea Mays
tccgattccacggagcagaataggaatgtgatagatttggggagagtgaggaagggcgaccagatcgcgaggcagaccagcataggccaacagacacaatatctgattccacggagcagaataggaatgtgatagatttggggagagtgaggaagggcgaccagatcgcgaggcagaccttgatgattcgacacgggaggttgttgttggcccgcacataaggcagtgcccccatgacaggagcaggtgacagcgccggagctgacggtcg

SEQ ID NO: 132179 - DNA, 795 bp, Zea Mays
gcctccagcgtccctacgaacatatagcaatgacgcgtgcgacccgcactagcgccacgccaccgcccaaatccgacctgccaatacatctcccaaactatacaacttcctcaacctattttcctttcttttcttactcatagggcagcgaccacctaagcagcgagcgttgtgtgctgagtgctgactgccatgtgcccgtgattctcctctattgtgagtaattgttcccgaatgtctgattccctttctctatctgccatagttccactggattgttttaaatattactacccataaagtgcgaaaaaataaaagacgagttgtacatcgttatatttgtagagtggtccgggacgttatttttacggagctccgccaatggtgctcatcagtgtctcctctttctcacatataacaccatcttctaagtcaatattttccttctttaccttcagcagctctgccttcctcttacctgttcgcctagcataacaaataacatatgttcgccctaatttaccaatgcttctggtcaatacgtccaatataagtaaaacactgggtgcaacagatttatccttcagcactcctcccttaaaggctggtcctgagcacaagattcaaaatgctctgtggatagatttggccacccttccctcggatacagagttgaagaacacaaacacaaatgcagaactaaaacctacggatctcggctacactagggaatagatactagagagcaaaaatgaaactaccttaatgagatagccccaaagagatggctgaaac

SEQ ID NO: 132180 - DNA, 1144 bp, Zea Mays
gtctctttcacaaaacacgctagccgaaggggtatggcaaactgtgtgccgtcagatcgagaatcaggggctcggattagaagaccacacatctgaaccggtacggacttaggaccgttcgatcccgatctgacgcccttgcttagatcacccgaatcattaccccgcgccaaatctcattcgtccatccgaaaaccgatggccgaggtatccccatccatggatctaatcttggccactacattaaagatcgacggtgctggtgcttcttctccccccaacaagtctgcggcaaccgcgacattagccacgacggcggcaacatcggtgaaccctagttcttcgcctagggacactatccccgagcccgctagcgttgatgtgatgcagacatgatgatgaaaacgaggatggatgacttaccggtagtggcgccgaagacccccccccggccacggaaccagacaatccgcggcgaaacccagtcgacaacgagcaattcaccctcacccgatgaaggtctcggatcaatacgacgatgcacaccatgcgcgagcacacacgaagctcccacaccacctgtcgggaccagaatgacggcgtagaaccaaattgccagcgacggcagatagccctccaccaatgtcgacaatggcgcccaccacccaggtgcattcaagtgcgtcaggggcgtggggcatcggcatttatatgcccagccagaggaccagatggccccgggcaatagcttggcgagatccgcgcgagcaacggagttcccggttccgagtccgacgccgcgcgctgtgggagataacctggccagtaggtcctatgcgccagcgactgagacggagtggtctgtgcgcctgtttgaccgacggatggggcccccatgtcgacgccagggagtgagttgtgcacgcgcgagacaagaggtggcaatgcggccccatcagtcagcaagcgcgagcgtataggggagatgggctgcacggagaaagttaatgggccaaacgcagttccgcccaagcagtttactctcttctttttctatttctttttattttccaattcaaatttcaaaggtttaaattcaatttaaactcttgttttgaactcaagatttccaattgtctaatac

SEQ ID NO: 132181 - DNA, 482 bp, Zea Mays
cttatacctccaaggtcattatcacccctctgactagatcgaagtcaaaatattgaagcacagaagtcgtgacttcacagtgatagatgggcagctatacaacaagggataagtcaacctatgctcaaatgcatcacaacggtcgagggcatagaactccttcacgaagtccacagaggaacatgcggttcacactcgggacccagagcccttgctaccaaagtcatgtgccaaggtttctactggccagctatcgtgtgtacagttaaccgagtggtccgctcatgcgaagcgtgccaaaaattcttacctagaacgggtgcccctttgtaattcacaaagctcatcgcccacaccaggcagctacaacgatggggccttgatatcgtcagaccattacccaccgtgcaaggcaacctaaaatttgcttttgtcgcagtcaaatacttcaccaagtggatcgaagccagagctatgtcaac

SEQ ID NO: 132182 - DNA, 607 bp, Zea Mays
caacctaccgagaagcgccctgcgccttcatcgaagaccgaggcggtccacggctagtacttccgtcgctgcgtcgccattccaaggccttgtactaggtgtagaaggcagatgtccgattagcatagcagcaggaggaagaaagtgcaggacgcctgggtggaggaacaacgggcgacagcaggggagtagttgttcctggtctcgatcctgggttggcatttgggtgtaggtcaacggcgccgggcaggagcaagaggcgacaacgagcggtacagaggttcggcgggagggaaattgaaaacctggctgcgcatgggagggttggctaaaccagattttggataactactctgatttaaggctttaatgttggacttaaattgttttttggtgactcaaaacatctcgttttcatgttataaggcatttttatgggtcaccttgttgaagatgctcttagacaaagtgtgatgcagttagctacgaaccaagcagactctaatatacatgctgggttttccgtccgacattatgcattgcttcttttgatggtgtgtgtataagagtctgtttggttgggctgtggcggtgaaaaaaactgttg

SEQ ID NO: 132183 - DNA, 274 bp, Zea Mays
gggaagacaagcggtccaggcacgtgacggcccgcttgagggtggacctcgacgcagtcccggagaatagggttccagacgggatcgaaggacatgaacatgccccggacgagctggctgtcgtggaggaggacacgcacaggcacgagagtggctggcgaggtaaagctcatgtaaggtgggggtgacgccatggaaccggtgtgggtggagacaacgaggtgggccgtcaagaatggagaatggagcacgcagccacaaggatcgggtcggg

SEQ ID NO: 132184 - DNA, 462 bp, Zea Mays
gtcagaagaatcctcagctaacatatccagcatggcacttatctctgcatcacttggatttaaaggcacctcaaaatgaacctgcctctcgtcgtcaggaatttctccgagtgaggcaaccaaaacactaacttcttcgggagagggtcgaactctaaggcccaaaccgctatcaccagcaggaagatttgacacgaaatttgtaaaggcctaggaaggaggcagattccaggccgagtatgcaacaggagcgctgatgttagacacattgcctctgagcatcatctcgagccggctcaccaagtccacaacaggaattcttctgttggttacctgggttgaatcagcctggcctcgatacagataggccggatacgctctgtctttcagcggctgaatgttcttgaaaacaaagtcagcgaccacagcttctacagtcagaccccttcctttcaacaatcc

SEQ ID NO: 132185 - DNA, 426 bp, Zea Mays
gaaggttctatatgcagacgacacatgacagtatgacatgtggttagctatattgtactcaaagccaaagcgagatggaggtttgccagcattgattctatgatccctacgttgtgcaaggggtaaatcaacatgttcaagagaaggtgcaatattacccattttaggtagaggcgaggagcttgatggagagagacttgaggagagatctaggagtggagatgcaggtgattgaggctctggctgcatgctttttcccccctaatttttataccgccttctttgatacactattactcatttctcattagtcttcatatgacctatccttacttctttatcatgattccctcctgtgtagtctcttggacatgggattgtcccaacgactaccacttcattgtcatcatgaacatcattcctttc

SEQ ID NO: 132186 - DNA, 769 bp, Zea Mays
tctatactcaaaatgtccattatgagtctggaaagctattttaggtatatctttgggatccatttggatttgatggtaaccggagctaaggtcgagactagtgaaccatacagcaccttgtaattcatccaaaagttcatcgatcacgggtaacgggtacttattttttatggtgagagcatttaaacgatgatagtcaacacagagcctccaatcaccagtcttttttcgtgctaggataattggtgaagcaaacgagctgcaactcagttgaatcatccctttttgaagcaattctgctatttggcgctctatctcatctttctgtgctggattgtatctataaggtctcaatctgaaaggggttgctcctggaaccaatggaattgaatgacaatgtgatcttgggggtggcaaaccagtgggttggtcaaacagggaggcaaaatcttttataagatcctgaatctcttgaggcagactggtgttggcctgattttcagctatgtgctgcaattcaatcgtgcaccaaagttcattcaatctgtccaagtgatacagccggcaaacagaaatttgctcgggtgtggaattatctgccaactgaccatgaagaaccactctttgttgatcatgagtaaaagctaaccactgatcttgccaatgaatctccatcggactatgggaagataacgagtccatgcctaatatgatatcatagcactgtaatggaagaaccttaaggttaatagagaatacgtgacccggc

SEQ ID NO: 132187 - DNA, 531 bp, Zea Mays
ggtgcatcaggcgtcctcatgaaatgcattctctcaactactgggaagcgacttctagatgaggtccatgctggacaatgtggaatacacacagcatcccagacactagtcggaaaggtcttcaggtcgggattctattggccgacggcaaaaagtgatgcatccgagttagttcagaggtgcgaagcttgccagtacttgtcaaagcaacaacatctaccagcacagcaactgcagaccataccagtaacttggccattcgcatgttggggactggatatgattggaccctccaagaaagcttaaggaggatacactcatgtactggtagtaatcgacaaattcactaaatggatagagtttaaacccattgcttctttaacctcagctaaggccgtggaattcatacaagacataatattcaggttcggattaccgaacagtatcataaccgacctgggatccaacttcacaagttcagagttcttcgatttctgcgagcaaaaaagcattcagatcaagtatgcttcg

SEQ ID NO: 132188 - DNA, 786 bp, Zea Mays
ttacggagattgtcaatattccaggaatgctctaagtcttcgccggatggcgttgttagcctgtacgcgctgggggacgactttgtcttgacgatgaagggaccctcccactttggctctagcttgccccatgattctgtccgagctgtccggacaagtacgaggtccccttcattgaattctctcgggacgactgtgtggtcgcgccatgcttttgtttgagcttggtatttgttgagggcctgcagggcgaagacacggtctctgtcgatgagatccttggaagttggttcgtctacgtcggggacggctgaagtgcttgtccgtggtgacccatgtttgatttcctgcggggtcatggcctccgatccatatagcaggcggaaaggagtgaacccagtcgcccggcactcggtcgtgttcagcgcccagactgctttaggtagcaggtcggcccatttacccttcttgtcgtcgagaagcattttcttgatggccgtgaaaattttgccgttggcgcgctccacgatgccgttggattgtgggtgatatactgaggcgaaggcaagcttggtgccgattgagaagcagaagtctttgaagtcctggctgtcaaattgtatgtcgttgtcaactgtgagctcggacgggactccgaatcggcaaacaatgttttgccagaagaatttctgggcagtcttcgatgttatcgtggatactgccctttcctcgatccacttggtaaaatactcgccggcgacgaatgtgaacttgaggttcccttgg

SEQ ID NO: 132189 - DNA, 378 bp, Zea Mays
aaaacttcctgagatgttctatgttccatgagttcccgatttccgtgccgtccatttgagtgagacgataagatccaggccgagtgacttctgctactatgaacgacccttcccatagtggcgacaatttgtgccgtccctcccccgttagaattcggtggaggacgaggtctcccactgcaaaggatcgatgccgtatggccttgtcatgatagtgcctcagagtttgctgatatcgggctgactgaatcaccgtattcaatcgttctttttctagtatattgacatcctccagtctagtagcttcagcttcagctatgttttcaaagattaaccttggtgccccaaacttgagatcagcaggtagcactgcttccg

SEQ ID NO: 132190 - DNA, 457 bp, Zea Mays
tcagaatattaaatgatgataatgaaatcatcctttcctcaactcaattcaaagtgcatcatctgtacattagcgcaaactcgatggcagacaatggattctatagtgcgattgacacacgaaataggctattggaagtgtcaagcaacactataattctggggctaagggcccctttagcatgactctttggacggctccagttcaggctcatcgtaaagccctaccaatcggtaaaaaacggcttctcgtcgagatccctccaaaagctagagttgttttcttcttgagagctatagcacaaaaatgttgttcctatcgtctcctatattttttctcatacataattcgaaagaaacatgggtgttgaacaccatatttggcacctgggcacggtcagactgtccagctctatagcccgaacggtccgcatccttgcaactagataagcataggc

SEQ ID NO: 132191 - DNA, 302 bp, Zea Mays
ctatcaccgaattgctcaaaaaccatgtcaaatttgtttggtcacctgagtgtgacaaagcttttgagaagctgaaggagctattgattacatcaccagtgcttgctcaaccagatattgcaaagccatttcatgtgtattgtgatgcttctggcattggcattggatgtgtagtgatgcaagaaggccgcgtgattgcctatgcttctcgacaactcaagcgtcatgaagcgaattatccaacccatgatattgaggtggctgctgttgttcatgcgctcaagatttggcgacattatttg

SEQ ID NO: 132192 - DNA, 721 bp, Zea Mays
tagctgagttgtatatggcccggatagtttgtctacacagagtgcctaagaagatcgtgttagaccggggatcccagttcattttctcggttttggcagaagttgcacgagtgcttggacacaaagttgaatttcagctcggcctaccatcctcaaactgatgggcagaccgaaagaaccaaccaagtactagaagatatgttaagagcttgtgctcttaaacatggtggcagttaggataagagtttaccctatgcggagttctcttacaataacagttaccaggctattttgaaaatgtccctgtttgaagctttatatggcagaaagtgtagaactcctctatattgggatcaaactagtgaaaggcagttcattgggccagatattgtacaagaggcagaagaacaagtccggttgataaaggagaatttgaaaactgcgcagtctaggcagaaaaggtatgtagttagagttcaagaggcagaagaacaagtccggtttaggcagaaggcagttagagtttaaggacggtggtcacgtgtatctgaaggtgtcactgattcggggtatgaggaggtttaaagtaaaagggaagttgtcccctcactttattggacccttcaagatcctaaagcgcgtgggggaagtcgcctaccaactggaactacccaaccatcttacggatgtacatgatgtcttccatgtatcccaattgaag

SEQ ID NO: 132193 - DNA, 577 bp, Zea Mays
ccggcgacctcttttccgcccgctattgcagctagagcttcggccaccgtggctagcccactgcagtcaccccaagtcgcgccagcgcttcggttagctccgctagtggcccgtgaagctttccaagccccggacctagcagaacttcaccggaaggcgaagatcaccctcgccggacttcagtcgcccgccagcacgcgtggactggacacttcggtgaaccattcttcaattcctcgcgcacacaccttccttgatccctggtgaagctctcttacccatttgattggtcaatttcgccctggataggccggactcctcgccgccgacgagctcccccgcctgcgcacgcggaccagccaactccgaccatccccgacggcgacccgcacatcgtcgtgaccgtcaggacctcccctacaccctcggccacctcaccggagcaatctcgtcgccggtaagccccttcgccctttcttccgccgcgggtactgtttaaattggggaaaggacctcgggttaggattagaagaacccagggggttttatgcaatgtcagtgactcatttaaatagta

SEQ ID NO: 132194 - DNA, 306 bp, Zea Mays
tgaatcatcatcctgatctcctcgtccgcttcagctccaacctgtacagcactagtctatcatctcggcttctgctcaaccaccggtcccggcataccataccacctggggctctcagctcagatcatcagcagctggtaacgaacgaacacccaacagtgatgcttagctgcagctgatcggagtcggagcaggagtaggagcagacgatgccgaccgatggccatgcaaggcagtaccagtaccacacggtggtgtactagccgggcatgtggcccggggagaatattttagcgcaccaactcg

SEQ ID NO: 132195 - DNA, 484 bp, Zea Mays
tcatcatttttctcactcaagagtttgttagattctccaccaatcctcctccctcatccctcaagctaataattagttagtacaagcatgagaatggggtgattcattggattcgtgaaatgaactcatgatgcaccgcctcatctaggatgagttgatcctcaaaccaaacaccccctaatagtgactaagcctagatctgctataatttttcatttcaagctagcgaaacaattacagatcagaatgaatgatgacttgtgcgatggttggtatatgtatttctgcacatattgctgaaataaccttagatggactaatcaactgttggttggaggaaaaaaaaaccccggagaatctttcctaatcattggtaccaaggcattgttatttgtttttatccaatgtaaagacaatgtgtgtttacgtgtttattctttttgggttcatttgtttattacttatacaaatgatgaacaaactg

SEQ ID NO: 132196 - DNA, 333 bp, Zea Mays
cttcttgagatgctctatattccatgagttccctatttctgtgccatccatttgagtaagacgatatgatccaggccgggtgacttctgctactatgaatggtccttcccatagtggtgacaatttgtgtcgtccctcccccgttagaattcggcggaggacaagatctcccactgcgaaggatcgatgtcgtatggccttatcatgatagcgccttagagtctgttggtacctggctgactgaattactgtattcaatcgttcttcttctagtatatcaacatcctccagtctggtagcttcagcttcagttatgttttcgaaaatcaatct

SEQ ID NO: 132197 - DNA, 334 bp, Zea Mays
tgttttcagctatgagaaccaaagatactagagaatgttacaattgtggtgatgttggacatattgcacgtaattgttctaagccttccaaagttaatcatgggagaggaagaggggcttctagaggcgacagaggtcgtggaggcaggagttgggcaagggcgaatgcaacaactacccaagaacttgaaacatttatggaacacgaagatgaaacaaagttgaggaagaaaaaccaaatctctggagataaagatcaggagtctcacaccggggattttgtccacttcgcctacactaatgaaggtaattatgctcatgcttttgtacccac

SEQ ID NO: 132198 - DNA, 756 bp, Zea Mays
ccaccattcaactgaggacgaaggtcatgttgttgaagtagggatagtacttggatagtcctaactaactggcttataccctttggtttggtcgtagggtgctcgacattattgataccctaagcactcaccgatcaggggagtccgaagcaccgtaaagacctatgtctatcgtcggtcttgtgtgctgtgcctcttttgattttccaagcagaggcatgggtcattgctctactgtcaaaggtaaattgttagtaggtctatatgttctagtggttagagattaagagcaagattccaaaaagatatagcacaactacagaagcgagcaaagaacaccttgctttcacagactgaggcaagcaagcagctagtaagagatccaaatacaacaataaaccattgtttttttagtttctggcccgacaaggtgaggcaagagcaatcgagacctccaaacattgaaacacgcccggagggagaggaaatggacacgagctgactgtgttcatcattgacctcggaatcagtgtgatatagcgtgggattaagagttcagcatagtcaagcctgtataattacgggtgcaactaggcaagcagctgagctgagcaagggccggggtgatacagagccggagccgtggtgccggtcactccggccgccgcacagcaggtggcgccgcgacaaaaccctcagtttgttggtcacaaacaacccctcgccacgccacgtcatcgcccatcaggagccgac

SEQ ID NO: 132199 - DNA, 896 bp, Zea Mays
tgtgttttgggtactcgactaaacttttgtttcactattctatcaaacctatgtatatcatgttcaagtatttgtatatttcgattctggtaatgtgaatctatcaaacaatcctatatagtactctagatctttgcttgtcttatcctcaatcgcaacatcagattttatagcagtgggtgttaccttatgccacaactcaacaacactctcgtcctcaatctcagcattagaatctacaaatgcttgcaagagcacaaataactatgcttagaatcatatattatatccgcacaacacaaaaccaacatgggagggacacttagatacctgcacattgatgtcatgaggggtgattcctctcaaaatcgtgcagatggacctaggggctacgtcatgcgctcccacctcccacattgatagtctggcgggcgattccaagctccaaatcacttagatggaggcgtgggttgtgccaaccgctccctactcctatatcgccgatctttggtctgattgtgagtgtggacacttcctggcttcccaccatttgtttgggtgctacaccagcagctctctgctccgatcttgtcatccgtagcggcgtgatatggaagacccagacacatgtcggttccaaatatgttgtcaataagagttggaggaggggatgctgctagatctaggcatggtgggagatgatcgatgaggggagttggaatctgggcatgggtggagaggataaatgaggggagctagatttgtggttgagaaggaacctgtagtttctttccccttctcacggccatggtggaaggaaggaggttgagaagatatttttggggccaacacaccagaacaacgatcttcatgggacaaaatccaaggcccaggac

SEQ ID NO: 132200 - DNA, 513 bp, Zea Mays
ttttgagatgctggctagcactgatgacgcggagatagatgctgtgcttagcttgctggctggggaatcatccgactcaacccacaccgagccaatggctatcatagctgggcaagaacttggtgaagaagtggagactcggaaacccgaaggtgcccgcccaaagcatccacgccgagtgagtcgtccgactgcacctgttgaggaaaacaggaagaagaggcgacttcggtgactgtcatgcttggtccaggttgcaggcccttatgctccggttcctgatgatgtactggcagaagcccttcctgaggttgatgccaagggttgtgatcatgcacaggctgctgtttgcctatttgacgaggacgaagaggaagaagaagaagtcccgctgatccacaagaacagccggcactatagaggtagcgaggggggtagtgatattccctctccagctctgtcggctcttgttagttttcaggggctttcaatatcagactttgatcaagtact

SEQ ID NO: 132201 - DNA, 467 bp, Zea Mays
acggttagccgcgacgtggtaaagcatttggacacgcggcggacggcagggatgactcaacggcagtgagatcttatctgatcgacgatgagcaaaggggaaaagtgcggcggctagccggattggtgtccagctcaacggcggcgatgatttttctaccccgcgacgttatccatttaccctaggcacgaatcgagacgccagcggcacgaatcgcggcggagagatcatcggcggcgaggttctgaaccttatcctccaggggcactgtaccatggcgaggatcattcagtgcacctgacagccaaagtttagggcgaattttctctcaattttatgtagtaacatgatcatcaccctttagcaaagttatagctctatgatccagctaaaatattgttatagcaatcctaatcaaattctttctcgatcatatttgaattcatgcccaaagtcactgcaattgc

SEQ ID NO: 132202 - DNA, 619 bp, Zea Mays
gcccgagtgggcagcctggcttatcgcttgctactgctggattccatggcaggggtacacccagtttttcatgtctctatgttgaggaagttcttgcggtatttggaccatcagattgagatggaaccaattactgtgcagcaggatctgactttggagtgttgtccggtgcgtatattggaattctcggagcgtgtattgaggaagagatcaattaagtatgtcaaggtcttatggactaatcagtctgagcgcgaggctacgtgggaacttgaggagctgatgcggcagaagtatccggaactttttgttgtgggtaagtgttgttgattcattaatctttccttttgtcgttctgatagaagcgtcagaattcgaggtcgaattctttttaaggggggtagagtgtgatacccggtttgcaaagaagagaagttggaggttattcttttgtttttttcgcattcggttgttgcgttttggggatttggaatttgtggaaaaatcattcaccagtagggcagtagaatttgtttggttaggcgcttgcgacggggtcgagagctatcgcgtgggcaagttgggccgcgattcgtgattcggcccactaaccatccct

SEQ ID NO: 132203 - DNA, 422 bp, Zea Mays
acacgcgacaagggaatcccagggccaactactgcgcgcggattccgcggatcttgttgccagcagtgagtccgatttgaggaagaagacgactgacgaggtggacccaccggtcagtggcgcagtgtcatggcgtgggctgagtgggggggagtgaggatgggccacgaagtgaaataagggaaatgggctgcccaggcgggggagtagaagggaaggagggggttggcaggatgggccggtgcgcggatttggcccaaaccgcagacaggtaagtcttttatccttttctaatttctgattcaaattaagattaaattccaaattcaaaacaaagtgctcacttcaaaattccagcatgaagtgcaagtatattttttttgaatgtgtagtaaaaaaactatctataatttcaatacttt

SEQ ID NO: 132204 - DNA, 338 bp, Zea Mays
gtggatgtttggctgttgcgggtgtggaggtgggagtgggggaggtacgatttgtacctcctagtggtgttggtacgcgtggttaggtggatgctgagcggggtcgtggttgtatggctgtgggagttgttgatatgtgtgcgcgacaactcttgggttgttggctggttgcgcccgagacatcctgtctctggtggccttcgtttctgggcagtcccttgttgggtgcacgcagtcttcgccgtggaacaagcagtaaaatctgcgcggctgctgcgcccgtcctcggccccgaccacgagttgcatttccgcgaccctggggagataatcttggcg

SEQ ID NO: 132205 - DNA, 495 bp, Zea Mays
aagtgatcccaccgaaggggtataagtgcgcctaatcgcaaccgcccgatagggatcggacggccaggagtcgttctccttccccgagatccccgatcggacggcgcggtgacccgccgtagcggcgccatgggcaaccatcgtgcggaggtcgctcccgagtagggaccccaaatactattgtgtaaaaacaaatttcgggtcacaaaggaacagacaggaggaatctcaccgttgattgccgcacgaacagccccggccacgacaaagtgtggttccgcggcggtgctagatctccggcgaggaattaaagacgtcccgagggacaccccattatggcgcggccatagaaacgttcctcgcgccatggcgaatctccccgactggtccccgatgattcgacgtacgcttgaccgcgaatcagccatggcggccgcagttctctcctctctctcgcgttctttctaccggtgttaacgatgacctggggttttg

SEQ ID NO: 132206 - DNA, 816 bp, Zea Mays
agaaacccttgtctgattcttcgtctatcagaaggtactaatgagaagcattgcaagatgatcaagctaggattgcagaacttgaagtgaagtttgccagaagaaaccctttcaaagctattgacgatgccctattttctgtcttatccccactccgcaagaagttttgttatggatcccgtagatctattaattgacttcttggttaggttgataggattgttctttagtattaagattttcgactagatcggtaatggcgatattatattatagtggttttctaatccctaatattgctatataacccttgacttcttatatttttgttttcttaccattgtattgccacccttgcgcaatatctactttgatatattaaacctttgcctctctacttttctccttgataacactttctccctaacttcatatccttggttgtatcatttatcctcactttaatagttcatggttatcttatttcactcttggccaccaacaaatatgtcttgtctaactccttgatgattcttacccaactccttgatgttataatatctttcttaatcttgtgtcaccttttgttttggttgaacgagtagaattggattgtgttgtgctggtatgtttgaattcattgtcccttgtgttcatgattgatttgcttctttgaaatgattgttggtgtattgtgtgacttttgtccacaatggcattagttagctaggtaaaaccttagatagatgggttttctctactctctataattcgtctttgctcaaccctttcgtcccttccattcttccataccca

SEQ ID NO: 132207 - DNA, 533 bp, Zea Mays
cggcgcgcgcgtgctccgctagtagtactcctccacatctgaaagtgagcgaggtctccagagtccagagaaaccgtgcggcctgcgacggttcccgtttctcccggccgcagtcgcctcgccgtcctctcggcgtgcttgtgctagcttttggctcgccgttaattataaacgatggaccaaacatcgaaaatgtgaacccccccccgtgttcgatgtttacaaccacgggccacgaagaaaccgcgccacaccctcgcgcgtgccttctgctgccctggccgggcacccaccagtaccaccgaccaatattgccatgctccccaggtcgcatcgttctggaacccgggctccctcgacgtctcgtggttaaccgctcgtgtggtctattcactggccttgcaaggtagtaagaatacagggatggatgtggacgtgattttggtcggcacgcagagtaactgtcggcgtggctatagttagctcgcagcaatgtgagaccgcacgggagaaatgtagcgatgctcattggc

SEQ ID NO: 132208 - DNA, 683 bp, Zea Mays
ttgtagaaaagatgctcctctctgtgtcacaccggatcatccgttgcttggcaccggaccgtccggtgcaactagccattacgggtagccattggatctgactgttggcatgctacagctcccccaccagagtgtctggttctgacaccagactatttggtggctctcttccatagtgccaccagaaaactagtcgttggtgcaccggacagtccgcggtgtggcaccagagtgtctagtgaccatcgaactgtccgcccagtgaaggcaaactgtccgcgagtgactgcactttcttcatgtcttggactttgcttgatacttgtagatcttcaataattgtcttcataatgtcttcttttgaggtgttgcatactcagtgcctaagtccaaaacataaatgcatcatgtgaactacaaagcataaacacatggaaatcattagtccacaaggtaatgttgatcatcaaccaccaaaatctttaaacaaatgggacgtggtccattttccttacatgcaccaccagaccacctgacagctgttgtggcaagttaccgttttgacgaagaacaatcgtgtcaagggcaccggatcgggtcctcgtgcaccagaccaccgccacgtcagcaaaaccgttggaggcgaagtcgacctttcaacatgtcagtctggtgtgccaccg

SEQ ID NO: 132209 - DNA, 715 bp, Zea Mays
gccgagacttcgatggatttcgaggtggaggaggaagctgcttcttccacaccactggttcccaaccgccctgtgctgggcgctgctactgtgcatgccgcacggcagcatacggccgcacagacatcccggactccgtcgagggcgactccgggagcattgtcagcagtcagggagttgctgcgacaccctccaagctccacagcctcaccaggggccatgaagcaatggcgggacgacgtcgaccgactactcggcatggcacactctacctcgaccaggtcgaggccacggtcatcgcggcgccaacatgaggcgtcggcatctgtgcgctcaccctcagtgagaggcgcacagaccaacgaccttcgagcagaactcgaccacaggcgtgcgggagaggacgccagggtctctttggagagggcacgcgagcgtcgccaaaacatcgagggccgcaaccttgatcaagacttcgtcgcggcggcaccgcagacaccaatgggcactcggtccctaacgggtgtccccttggccggcgtgggctgtgccgctctcgtggatcatctccgcgcggcctcatggccacccaagttccggccacaccttacggaaaagtacgacagaacgtcaaatccgtcggaattcctacaggtgtatgtcaccgctatcacagcagccggtgggaacaccgctgtgatggcaacatattttc

SEQ ID NO: 132210 - DNA, 564 bp, Zea Mays
gaacgaattaatcgtatgaatatcccttacacattagtcatcttgtcaacactggattgcagtatttggttgacagtgtcgtagctgcctatttgctctcatctgaccttctgacatggaatatgagtaaaatccaagaattttgtattttatagactttaaccatgcgcatgcacatccatctattttgttgttgaatccagtgatttttttcaggcatcaacaatgcagcaatgcctcactggcatcatgattattgaacggcccaacactacagaaattcagccaaccattgacttcgctagacaacaacccacattcacggcttcagtgcgctgcttcagctttgtgaaacaaagggataattgcaacgaacggaaatgcaatcataatccattaagataattgaagagccagtgtccttctggatccaaggactggccaggaaacagagggattcacatggaagagttgacagttgacacactcgttgacgcctcttgtccaggcaggtaggcaactcaaccatggcaacaagaggccaagcttgtcttaccaaaattt

SEQ ID NO: 132211 - DNA, 479 bp, Zea Mays
cgacacgaacacgcgaaggaacgacgacgaagcacaaatgacacgcgaacgacgcgcaacgacttgcgggaacaacacgtgcgccacaagaacatcacgcgcgaacagcgcacagatagtgcgacgatgcgtgaaaatcgctaacaaataacgtgtttataataaaccaatattaaatgaaaagtgtttaagttgatattaatctagttaacatttatatttataaaagcgtgagttaaaaactataaactagttttaattagaatgtcgtttttaataactactatagattaccgaaaggataaataattaattaatcaattaaacttgtgacatgactagataacattagtaataaaaaatcgacgttatcacgaagttgacacgactaaaacgagacgtaaaggtttacgacgcataatataataaataacaattcacagattataaatgacgtgacatatgagaactaataaaca

SEQ ID NO: 132212 - DNA, 507 bp, Zea Mays
ttgtcatggacgaggacgagcaaccgctggagcagcccatcgtcgcatacgcgcttgcgttgttcgagaagatgcgaggctaagggataccatgctgacgtgatgaggtacgatgctgtcaagctattcgatgaaatggccagggccagggtcaagcccgacgagcgcgtgtattccctcacaatcagggccttgtgcaagctgcgcgatgcagacagggcggtccaggtgctcggggagatgatggaggtcggctttaggccatgggtcttgacattgacatacaactttgtggtggctgtgctcgtgaaggcaggaaggatggaggaggcactaaaggtgaaggatcagatgttgttggttgctggaaagaagatggatgtggttctcgcgacaacattgatgcatgggtattgcttgctcggtgaagttgggaaagcgctgaatttatttaacgaggctgtcagggatggtgtgacagcaaccaatgtgacatatgcggttcta

SEQ ID NO: 132213 - DNA, 320 bp, Zea Mays
cagggttgttggtccgaaatttgctctacttattgtgcttgtgtattcatagaatgtagtctgtaaaaaactcgaccaacggggtggggggtattgacagcccctgggtatattaagaagaggaccttctcacgtaggttgagaaaatatgatcttgggttgggagttgggacggatgtagtatttaacaaggaaaatttccagaaatgttggaactttcagaactaagtactgcaaagagatagtgaaataacacattaccatgcagaagcattatgacatgctgatatccataattccatataaattctggagcatcc

SEQ ID NO: 132214 - DNA, 419 bp, Zea Mays
gggaaagggagcccatctgaacaccctcgggggctaggtcgtagcttgcactacccaccagagctggatcactaccagcaacaccctcgggggctaggtaactgccgacaccaccctcgggggctgggtcttctgcagtagccacctctaaggttgaaggcccctcggtcgcctccatgggagtcgggtgactcagatcagcttcttggcattgaagactgccctccaaagtcgacgatgcgcgagacacagctagggttacttcttgcccagcggaatcaagcaaggaaagcccaccgtttgggacctctgaacagacggtcgggatatcatcggcagttggctctgacagcatatctttggggacgacttcctacaatgcttgatcaaagtctaatattgaaagaccctgaagattg

SEQ ID NO: 132215 - DNA, 741 bp, Zea Mays
gaagtcactcggcctggatcatatcgtctcactcaaatggatggcatggaaattgggaagtcatggaacatagaacatctcaggaaattttacccctagctatatctcaaaagctattgggacgacaatatattctgtaaactgggaaatatatcatcaataaaaagacttcaaaggcactcgaattgttcactgtcaacctacatgcttacttaactcggggtgaccactataccctactagcggagcaatcggcttaagtcggcaatgacttaaagcggtgcgacatactcacgctcacttaactcggggtgaccaccataccctactaacggagcaattggcttaagtcggcaatgacttaaggcggtgcgacatgctcacgctcacttaactcggggtgaccactataccctactaacagagcaatcaacttaagtcagcaatgacttaaggcggtgcgacatgctcacacttacttaactcggggtgaccactataccctactaacggaacaatcgacttaagtcggcaatgacttaaggcggtgcgacatgctcacgcttacttaactcggggtgaccactataccctactaacggagcaatcagcttaagtcggcaacggcttaaggtggagcgacatgctcatgctcacgtaacccagggtgatcactataccctactaacggagcggtcggtttaagttggtaatgacttaaatcagcacggcacactcgcg

SEQ ID NO: 132216 - DNA, 597 bp, Zea Mays
tttggtttggttctgctcaaggtttacgagggttgcctatctctttctctgtgctccgtgatgtctagaaggtcatgtctagtaggtccacgaacgatccaagcaaactggtcatggggtagctgaaagcactctgcgtggtttggatatagctaccatgggttcagtaggggtgggtttggatatggattgtattggcagtcaggcagaggcgactagctcatggatctgctcatcggctgatcagataggcagcgtgaaggtttgtcgcggctggtatggtagatagatagtgatgaccgggtaattgttttcaagactgcaagccattggcttgagcttgagggtgtccggttaaacaaatgagggtgttcgatagccccttgagatccgtgctttgcaagaatgtttagtttgatctatctagttcctctcagataaaccatacatgcgtatttgtagccatgagcatcaggcaccacttgtttatccgcgagagcatgagcatgtcatgtagtagtagtcgttgcagttttttcagtgcgttctattgtgtcgtgtgcctgtgtggagccatttcagaagaaagcaagggga

SEQ ID NO: 132217 - DNA, 292 bp, Zea Mays
agataatccaacaaactttgctggggggtcagcctcaagatgaggatccggtgccagtggtcccggaggatggtcagcagctccctcttgagttttttggtttgggtcaacctgtgccggctgtgggctgggatctcaatttcccgccagaagacaatgtccaagcctagctagcagacaacattcaaggagattgggaccattggattgttaatgatccacctgtacagtagcctcatctggacctgccacttgacgagcaacagatcagcaatccgcattcggacctgtc

SEQ ID NO: 132218 - DNA, 277 bp, Zea Mays
gctggatcgcggtcacattggccatgcaccgtcgatttataatcggagggaccgcaggtagtaccgatgcattgagatgattgatctaatactggccatgcgatgtggatcctacggtacacatcctatatcggttcggatcataggcgatttaatgtgggccgctatactctaatcggacgatcgtggtgcgaccataccccttcgcggtgtgcatttttcatatgaaaccctatagtgtttggtaatgaacccgtaggccgcagtccgcgttggc

SEQ ID NO: 132219 - DNA, 306 bp, Zea Mays
aaaacgtagtatcattgtttctttgggtcagggaggagacattggtgcatctcatgacactccaacttacacgggccccctttttgatcagacacctagtggtcatgtaagtaatccagttatacatttattgcatgcttgcttctcataactcattcataatttactatactctctacctgcattgtgtttcaggttgcagatggtgaggaaacacatagcttgcacactacacatgaccactctctgccacgtttaacagaattggactgtgctcggtcgcttcgtgattttttgtgctcctca

SEQ ID NO: 132220 - DNA, 738 bp, Zea Mays
ataggaggaaacctcaatgggcatgtaggtacaacaaatacaggtttcgaggtcgttaatggaggttttgggagtggtggtagcaatcaggagggagagaaagtgctgtattttacaatagcttttgacctgttgatagccaacacttttttaggaagagaaaatcccatttagtgatctatagtagtggccaacactctagtcagattgactttgtcctcagaagaagagaggataaacgagcatgcttggattgtaaggtaaaggtaatatcttaggagtgtgttgtctctcaacataagcttgtggttgcggtctttcgtttttaggtgaatgcgtgcaagaataaagtggtggaaactgaaagggggatgacaaaagtcttgaaggaacaagccattaaagagggtagttggaagaagacgcaaacaatatgtgggagaagatggtaacctgtatttggaaggtagccttaaatgtgtgtggagcaacgaaagggagtgaaggcgaagctaaaggtacttggtggtggaatgatgaagtccaaaagggagaagaaagagtgctacagacatttataccatgacaagagtggataacatagataagtataatgtagcaaagaagatatccaaatgagttataagtgtggcaaagggtagggcatatgcggatctttaccaacatttgagtatgaaggacttcaactaagttaagtgtgttaaggatgaaacatgg

SEQ ID NO: 132221 - DNA, 438 bp, Zea Mays
gaaggtttcatagtgtacgattataagaagtagaaattcaacctgagagttgtgtatttatggtcgattcatgatttcatggcttatggtgtctttgctagctggatttggcatggaattctgactttgtctggtctgtgctaaagctattgattattttcggcttaagtttggtggaaagatttttttacttcgattgtcatagatgctttttgcctgagggtcaccagttcaggtttcagagaaacactttcagaaaggacatgattgtgtaggagatcaccaaagcgtctgcgtggtttagagattctcgctaggcttaatggtttgaaactaaccttctgattggttacccgcatggtctcgttctggaccaccgcttgcattgactttgcctaagtgtttgtttggttgcttgcaagtgggggcatggactgc

SEQ ID NO: 132222 - DNA, 790 bp, Zea Mays
ggcgtcagaggtggtcggagctgccctggccacgagcgcaggcggcggaggtcgtcggcagctcctgctctggccaaaccacgacggtagggttcaattaaagtgcacgaggagctccacggggtgatgtagaggccatgcgcgcaacgaattgagaaatggtgcagagggttacccggtccacgtgctccggcgggttcacgaactccggcgagcgcgattgcactattccggtggggctggtcctcggctcaagctcgggcaagcttcacggcctcctggggaagctatccgaaggctcggatcaagcggaggtgggcgggaaagggtttggccacggtggtcgccctcgggcggctctggcgggttgcggggagatcaccgaagctgcgggcaagcttgggagggttaggcgcgatgcgggagaggcaacggggaagatggtcgtgcactagggtgggctttatagccgtagcgcgggtgtgggcacggggcagccgagggcacgtgggggttcgcgtgcgggcgtgctctagacgcgcccccgagtgtcagcccacgtcgaacacgtgggggtttacttctgccaggattcaacggccgatttggttgacttagcgtgcaaatcttggcaaaaccctcgtgtacggtctcttctctgcaccaaatcctaccatttcgatgtgagttccaagcaaagatatggtcggtgtagagagatatgggggtgagaagttggctctgtccgagctgtccacaccgagacaaaagccatgccaagtcatgtcaa

SEQ ID NO: 132223 - DNA, 1169 bp, Zea Mays
catttctgacatgtccggtgggaccaaggaagtcgacttccacatcagtcgatgcgcatcggctcatcaacatcgactctaccccaacctcgcatcaaccatgtcatccaggaaactacgcaatgctttcacacagtctggggggaggccagttcttgatcactgttactttcgcagggtcagtggaaatacccccagcactaataacatgtcccagaaattccaacgtatcttgaccaaaacgacacttggactgcttaagctttaactgattttggtctaggatttgaaaaacctgttccaaatgttggacatgatgttccaaagtatcactgtaaacaagtatatcatccaggaaaaccactacacacttgcgtaataatggagacaatatgtggttcatgaagtcctggaatgtggctggggctcctgtaagtccaaagggcatgaccttgtactcataatgaccattatgtgtttgaaaggcagttttatattcttccccttcttgtatctgaatctgatgataaccagccatgtggtccaacttagtaaatattgtagctccacctagctcatctgtgatctcatcaaaaacaggcataggaaacctgttttttacagtgtaggcattgagcctcctgtaatcaacacataacctccactctccatctttcttcttgaccaagagtactggtgaagcaaagggacttgaactctgttgtatgatgccagactccaacatttcctgaatttgtctttctatctcattcttctggtgtggagtatacctgtagggtcgtaaccagaaagttgttgctccaggtaataggggaatagagtgatcaaatggcctctttggtggcagtccctgaggtgtagaaaacaattcctgatacttctctataactgctgcaatttccggaggtatttgcaccggaacaacttccttgttggattctgtgacagttctgagctccaacacatgctccacggcttcttgtctgattagtccagttagttggatactagacagaagagtacatgactgtaatttgggtctcaccccttgcagctgaactatcttaccttgatattcaaactccatccacttctccatccagtgtatggacatggggttaaatttttccagccagtccattcctaac
